United States Patent Application Publication US 2005/0153317 A1 - sequence listing, part 11

SEQ ID NO: 46467 - DNA, 600 bp, Chicken  19866894287481_1
atccgggctgtccgagtgcgcgtcatccatgccgaagtcgctccagtgagggagggtctccaggcagctcagcccctgtgtggcccccaggctggcacagctgaaaagagagagcagtcagagcaccggcaccgctgcagcggctgctcgtggttgcacacaagggcagcagcaccagcaagaggcagatggtgctggcagcagcgaggaaaacgcagccacaacacctgcatacctaccctgtcagcccgggctgctgtgctcccccaaaccctctccttcaagcaaaaagagctctgytttatgcattgytgcagtccagatacctctttctttccgttcattgaaaaycaagctgaaaaggcacttgcaatgggtggtgcagaaggccaggcacggccttctggggagatgcctgcctaattcccacacacacagcaagtgctctgcagctgtggtgggcgtgagacatgccttgcacactgcaagggctgagagaagatgcacagaaagtcttatgttctgaaaggctcaaaggttcctcgccacacagagattaagaaaagaatgcatccaaagatctctgtaaatctcagctta

SEQ ID NO: 46468 - DNA, 600 bp, Chicken  19866894287481_2
cgagtgcgcgtcatccatgccgaagtcgctccagtgagggagggtctccaggcagctcagcccctgtgtggcccccaggctggcacagctgaaaagagagagcagtcagagcaccggcaccgctgcagcggctgctcgtggttgcacacaagggcagcagcaccagcaagaggcagatggtgctggcagcagcgaggaaaacgcagccacaacacctgcatacctaccctgtcagcccgggctgctgtgctcccccaaaccctctccttcaagcaaaaagagctctgytttatgcattgytgcagtccagatacctctttctttccgttcattgaaaaycaagctgaaaaggcacttgcaatgggtggtgcagaaggccaggcacggccttctggggagatgcctgcctaattcccacacacacagcaagtgctctgcagctgtggtgggcgtgagacatgccttgcacactgcaagggctgagagaagatgcacagaaagtcttatgttctgaaaggctcaaaggttcctcgccacacagagattaagaaaagaatgcatccaaagatctctgtaaatctcagcttaagttttttctgg

SEQ ID NO: 46469 - DNA, 600 bp, Chicken  19866894287481_3
gagggtctccaggcagctcagcccctgtgtggcccccaggctggcacagctgaaaagagagagcagtcagagcaccggcaccgctgcagcggctgctcgtggttgcacacaagggcagcagcaccagcaagaggcagatggtgctggcagcagcgaggaaaacgcagccacaacacctgcatacctaccctgtcagcccgggctgctgtgctcccccaaaccctctccttcaagcaaaaagagctctgytttatgcattgytgcagtccagatacctctttctttccgttcattgaaaaycaagctgaaaaggcacttgcaatgggtggtgcagaaggccaggcacggccttctggggagatgcctgcctaattcccacacacacagcaagtgctctgcagctgtggtgggcgtgagacatgccttgcacactgcaagggctgagagaagatgcacagaaagtcttatgttctgaaaggctcaaaggttcctcgccacacagagattaagaaaagaatgcatccaaagatctctgtaaatctcagcttaagttttttctgggagactcaagctctccctctgctaagccttggctatggc

SEQ ID NO: 46470 - DNA, 600 bp, Chicken  19866894287487_1
agaatttctgacctctgttagtagtgacaatctggcttacctttgaataatgaaacacctattatgcaagtatgacaagcccagtgaccaaaacatttatgacacaagtcccagttaacaatactttttattgcattagcaaaatactagcgtataaagtcacttatctttttaagaatgtgtaagtacaaaataaattattcatgtaggacttagctgaattgcttctgattcagttttttaaagtctgaaaaacatgtttggacatgcatgagaaaataaatccttgaaacagcattkactttggaaataaccacataaattgagatcagaatgactctgggattcagctgagtaacattaaagcatcccatcaacaggaattaaaaaatccaagctgagatcaacttgctgacctgatgaaaactgaaatgtgcaatgttgatttggtataatggcagcagccttatgcagttaattgcaaaactaaatatatttattacacccatgagtatttctgctgtccttaaaaattctcaaaattttggtatgtgaaagccaacctggaaaaaaagataacttaaaaaacgtcacgcattc

SEQ ID NO: 46471 - DNA, 599 bp, Chicken  19866894287491_1
  misc_feature (1)..(185): n is any nucleotide
nnnnnnnnnnnnnnnnnnnnnnnnnnnnnnnnnnnnnnnnnnnnnnnnnnnnnnnnnnnnnnnnnnnnnnnnnnnnnnnnnnnnnnnnnnnnnnnnnnnnnnnnnnnnnnnnnnnnnnnnnnnnnnnnnnnnnnnnnnnnnnnnnnnnnnnnnnnnnnnnnnnnnnnnnnnnnnnnnnnnnnnnntgttaacaaacaaagtgaaatgctgttttttctcttcccagctatagcaactcaagctagtgtggagtttcgccggaagggatcccaaatgtccacagatacaatggcttccaaycctttgtttgatgccagtgaattcccagacaactatgaagcaggaagggcagaggcatgcgggacactgtgtaggatattttgtagcaagaagactggggaggaaatattaccagcttacttatcccggtactaacctatcttccagktactttattggtgtaattttatggtgcgaaggattttgcagcrcataacattcagttactgtctgaatcctgtgctgccagctctaagagcctggttggcctgcgcatggcacagacagagctycctctgtaaaccaagtgttggctttgt

SEQ ID NO: 46472 - DNA, 599 bp, Chicken  19866894287491_2
  misc_feature (1)..(37): n is any nucleotide
nnnnnnnnnnnnnnnnnnnnnnnnnnnnnnnnnnnnntgttaacaaacaaagtgaaatgctgttttttctcttcccagctatagcaactcaagctagtgtggagtttcgccggaagggatcccaaatgtccacagatacaatggcttccaaycctttgtttgatgccagtgaattcccagacaactatgaagcaggaagggcagaggcatgcgggacactgtgtaggatattttgtagcaagaagactggggaggaaatattaccagcttacttatcccggtactaacctatcttccagktactttattggtgtaattttatggtgcgaaggattttgcagcrcataacattcagttactgtctgaatcctgtgctgccagctctaagagcctggttggcctgcgcatggcacagacagagctycctctgtaaaccaagtgttggctttgtcttctcatggtgctggtttccattgggcttccttcaagctctagttgaggggaagcccctccagcagctgcagggaacgttttttggtcattttgacacttgaaggtttttaaacttgccaytgaactctggtaagatggacaaaagc

SEQ ID NO: 46473 - DNA, 600 bp, Chicken  19866894287491_3
caaacaaagtgaaatgctgttttttctcttcccagctatagcaactcaagctagtgtggagtttcgccggaagggatcccaaatgtccacagatacaatggcttccaaycctttgtttgatgccagtgaattcccagacaactatgaagcaggaagggcagaggcatgcgggacactgtgtaggatattttgtagcaagaagactggggaggaaatattaccagcttacttatcccggtactaacctatcttccagktactttattggtgtaattttatggtgcgaaggattttgcagcrcataacattcagttactgtctgaatcctgtgctgccagctctaagagcctggttggcctgcgcatggcacagacagagctycctctgtaaaccaagtgttggctttgtcttctcatggtgctggtttccattgggcttccttcaagctctagttgaggggaagcccctccagcagctgcagggaacgttttttggtcattttgacacttgaaggtttttaaacttgccaytgaactctggtaagatggacaaaagcgtgcagatgtgagactgtgttttgttagactgcaaggggtgtta

SEQ ID NO: 46474 - DNA, 600 bp, Chicken  19866894287491_4
aatgtccacagatacaatggcttccaaycctttgtttgatgccagtgaattcccagacaactatgaagcaggaagggcagaggcatgcgggacactgtgtaggatattttgtagcaagaagactggggaggaaatattaccagcttacttatcccggtactaacctatcttccagktactttattggtgtaattttatggtgcgaaggattttgcagcrcataacattcagttactgtctgaatcctgtgctgccagctctaagagcctggttggcctgcgcatggcacagacagagctycctctgtaaaccaagtgttggctttgtcttctcatggtgctggtttccattgggcttccttcaagctctagttgaggggaagcccctccagcagctgcagggaacgttttttggtcattttgacacttgaaggtttttaaacttgccaytgaactctggtaagatggacaaaagcgtgcagatgtgagactgtgttttgttagactgcaaggggtgttatgttgtcaagaaacactggaatggagaatgtatatattttaaatgatttttacatacaaaaatgcacaaatattctattgt

SEQ ID NO: 46475 - DNA, 600 bp, Chicken  19866894287491_5
tatcccggtactaacctatcttccagktactttattggtgtaattttatggtgcgaaggattttgcagcrcataacattcagttactgtctgaatcctgtgctgccagctctaagagcctggttggcctgcgcatggcacagacagagctycctctgtaaaccaagtgttggctttgtcttctcatggtgctggtttccattgggcttccttcaagctctagttgaggggaagcccctccagcagctgcagggaacgttttttggtcattttgacacttgaaggtttttaaacttgccaytgaactctggtaagatggacaaaagcgtgcagatgtgagactgtgttttgttagactgcaaggggtgttatgttgtcaagaaacactggaatggagaatgtatatattttaaatgatttttacatacaaaaatgcacaaatattctattgtttatttatttacaattttttttttattttcatcctgaactactttgattttcagtttaatttctattaaaagaaggccatcctgcctatcagtcttggtttttccaacctttttggttaaaaaatagcaaaatccagagtcagagaatc

SEQ ID NO: 46476 - DNA, 600 bp, Chicken  19866894287491_6
ttttgttagactgcaaggggtgttatgttgtcaagaaacactggaatggagaatgtatatattttaaatgatttttacatacaaaaatgcacaaatattctattgtttatttatttacaattttttttttattttcatcctgaactactttgattttcagtttaatttctattaaaagaaggccatcctgcctatcagtcttggtttttccaacctttttggttaaaaaatagcaaaatccagagtcagagaatcaattttataaacaataactctctcaactgttcaattacctttgcmccgtaggtggcatcaaaacttatggaagactgaaccattttagttcatgtatgtggtagtgctatatgcattagaaggtctgtttttcttacacagtcagattcctctattttgttaagttgtggagggtttttttktgtgtgtgtgtgtgtgtgtgtgtgtgtgttttagtataaatacactttaacataaaacctgtagaggaatctaactgcttcaagagacaaggtactctgcgatgatggccagctagataaggtgtttcatacccctctgttttttcatttggaatggatgatt

SEQ ID NO: 46477 - DNA, 600 bp, Chicken  19866894287491_7
tcctgaactactttgattttcagtttaatttctattaaaagaaggccatcctgcctatcagtcttggtttttccaacctttttggttaaaaaatagcaaaatccagagtcagagaatcaattttataaacaataactctctcaactgttcaattacctttgcmccgtaggtggcatcaaaacttatggaagactgaaccattttagttcatgtatgtggtagtgctatatgcattagaaggtctgtttttcttacacagtcagattcctctattttgttaagttgtggagggtttttttktgtgtgtgtgtgtgtgtgtgtgtgtgtgttttagtataaatacactttaacataaaacctgtagaggaatctaactgcttcaagagacaaggtactctgcgatgatggccagctagataaggtgtttcatacccctctgttttttcatttggaatggatgatttatattttccttctcgttttccagatgttagaattgctgtcacagtgttgttccccccccccagggattttgcagtatttttcttctgtgctagggaattagaaccaaggtctcatttacacccttacatgggaagg

SEQ ID NO: 46478 - DNA, 599 bp, Chicken  19866894287493_1
  misc_feature (1)..(121): n is any nucleotide
nnnnnnnnnnnnnnnnnnnnnnnnnnnnnnnnnnnnnnnnnnnnnnnnnnnnnnnnnnnnnnnnnnnnnnnnnnnnnnnnnnnnnnnnnnnnnnnnnnnnnnnnnnnnnnnnnnnnnnnnnagaagttgttcatgggagaaaatgaagcgttaacccagctgttattgtgatttaacatttattttccaatacagcagcatgcaaagctgatgagatccccatatccatgctgtagacacgagactctacccaatctgatgtagctctgagctttgatgaattgcatccttctcctgcartgcaaattgcctacatatgaaagtgcaacatcaacatccatgtaccacataaaagaggcaatgtctggattggaagaaacctgattcttttctaacaatactgtgattccttcactcagaagcacgaaaggttgccttacacctctcaaaatacactcaactttcagggcacttgaagcaatttctaaaagaatgtgaccaaacaggagaaaaaaaaaaatgacagcaattacaaaagcccagattattaaatggcactttaaatgaatcaaagcttctgtgagcatygctcttgactt

SEQ ID NO: 46479 - DNA, 600 bp, Chicken  19866894287493_2
cttctcctgcartgcaaattgcctacatatgaaagtgcaacatcaacatccatgtaccacataaaagaggcaatgtctggattggaagaaacctgattcttttctaacaatactgtgattccttcactcagaagcacgaaaggttgccttacacctctcaaaatacactcaactttcagggcacttgaagcaatttctaaaagaatgtgaccaaacaggagaaaaaaaaaaatgacagcaattacaaaagcccagattattaaatggcactttaaatgaatcaaagcttctgtgagcatygctcttgacttcagagcttttaattaggtcttgtttaaagtatatcaaagaacagatgattgtcaacattaatagacagcatggaaccgttaaatattagtcatctatttctgatctggtctccttaggaactccaggaggaggcagagttaggttagcccaatattcccaaatgggcatgtctctggatggtttgttttcagtctgcacaaatggcatctaggaatgcctatagaagaactgttcgtatgtagtttagatctttgactttctccattctgtgggcatgcataccctccc

SEQ ID NO: 46480 - DNA, 600 bp, Chicken  19866894287494_1
attcgtctactgaatctggaaatctcaacttgcaaaagttttctcaatttaaatattaatctcaaagcatctcagtatgactacggcacatgagtatgttaaatcagatggtactaagtatggggtacagtcatgctgtagtgtctgtgcaaattcctcccattcagggctttctaaacaaagattataaaaactgcagggaaagaaacacagtgatgatttactgatacctgatttgtctgctcctagtcattttcctcagccattgctccttctgttgatctcatccatagattacawatagacagaataacagagaaagggtccagcaacttccagatgataaagaaaagcgtacaggatcttaacaaacaggtggacaaggaatgtcaggaaaataactccagaaatattctcccacctcaggctgaaatggctcaatggactaaatggaaaatgagctaagccagaaagtaaggaaaaacaaataaataaaaaaaattaatctttccctcagatacagggaaactgtgcaggcaaattcagtgcttttaaaaagctattagactagttggaccagcctcacttcttagaactgca

SEQ ID NO: 46481 - DNA, 599 bp, Chicken  19866894287507_1
  misc_feature (1)..(173): n is any nucleotide
nnnnnnnnnnnnnnnnnnnnnnnnnnnnnnnnnnnnnnnnnnnnnnnnnnnnnnnnnnnnnnnnnnnnnnnnnnnnnnnnnnnnnnnnnnnnnnnnnnnnnnnnnnnnnnnnnnnnnnnnnnnnnnnnnnnnnnnnnnnnnnnnnnnnnnnnnnnnnnnnnnnnnnnnnnnnntggttggaagatttttgctcttattttgcctcagatgttgaactttaattacagtcaatgcggtgaaatacctggaataggaataaatcatgcaaaagattttctcaaggattcatgccttcccccrgctctccctgcttggcagccccggcatggaccccctcaaccccccacatttcctatgggcaaacaaaggtagtggctgtacctccaggaaggacaccccragctgctgcyccccccatatgggtcacaaacyrggcacagagagaccccagcagtgagtggaccacaactctgagctgctcattcagcgccagagagatgctgcaggaggctgggtaggcaagagcccaattaagataaaatcacagggaattgattaataattagcaagtaattagttatctctctaccatctggagg

SEQ ID NO: 46482 - DNA, 599 bp, Chicken  19866894287507_2
  misc_feature (1)..(73): n is any nucleotide
nnnnnnnnnnnnnnnnnnnnnnnnnnnnnnnnnnnnnnnnnnnnnnnnnnnnnnnnnnnnnnnnnnnnnnnnntggttggaagatttttgctcttattttgcctcagatgttgaactttaattacagtcaatgcggtgaaatacctggaataggaataaatcatgcaaaagattttctcaaggattcatgccttcccccrgctctccctgcttggcagccccggcatggaccccctcaaccccccacatttcctatgggcaaacaaaggtagtggctgtacctccaggaaggacaccccragctgctgcyccccccatatgggtcacaaacyrggcacagagagaccccagcagtgagtggaccacaactctgagctgctcattcagcgccagagagatgctgcaggaggctgggtaggcaagagcccaattaagataaaatcacagggaattgattaataattagcaagtaattagttatctctctaccatctggagggctgaatctgcttgtgaggcattggctgtctgtggggtgtccccaccacccgcgctgcccacgctgtcccygtggttcccctgccctgtgcccacactgc

SEQ ID NO: 46483 - DNA, 599 bp, Chicken  19866894287507_3
  misc_feature (1)..(63): n is any nucleotide
nnnnnnnnnnnnnnnnnnnnnnnnnnnnnnnnnnnnnnnnnnnnnnnnnnnnnnnnnnnnnnntggttggaagatttttgctcttattttgcctcagatgttgaactttaattacagtcaatgcggtgaaatacctggaataggaataaatcatgcaaaagattttctcaaggattcatgccttcccccrgctctccctgcttggcagccccggcatggaccccctcaaccccccacatttcctatgggcaaacaaaggtagtggctgtacctccaggaaggacaccccragctgctgcyccccccatatgggtcacaaacyrggcacagagagaccccagcagtgagtggaccacaactctgagctgctcattcagcgccagagagatgctgcaggaggctgggtaggcaagagcccaattaagataaaatcacagggaattgattaataattagcaagtaattagttatctctctaccatctggagggctgaatctgcttgtgaggcattggctgtctgtggggtgtccccaccacccgcgctgcccacgctgtcccygtggttcccctgccctgtgcccacactgcagccctgagt

SEQ ID NO: 46484 - DNA, 599 bp, Chicken  19866894287507_4
  misc_feature (1)..(41): n is any nucleotide
nnnnnnnnnnnnnnnnnnnnnnnnnnnnnnnnnnnnnnnnntggttggaagatttttgctcttattttgcctcagatgttgaactttaattacagtcaatgcggtgaaatacctggaataggaataaatcatgcaaaagattttctcaaggattcatgccttcccccrgctctccctgcttggcagccccggcatggaccccctcaaccccccacatttcctatgggcaaacaaaggtagtggctgtacctccaggaaggacaccccragctgctgcyccccccatatgggtcacaaacyrggcacagagagaccccagcagtgagtggaccacaactctgagctgctcattcagcgccagagagatgctgcaggaggctgggtaggcaagagcccaattaagataaaatcacagggaattgattaataattagcaagtaattagttatctctctaccatctggagggctgaatctgcttgtgaggcattggctgtctgtggggtgtccccaccacccgcgctgcccacgctgtcccygtggttcccctgccctgtgcccacactgcagccctgagttctgcacagctcagtgcccggg

SEQ ID NO: 46485 - DNA, 599 bp, Chicken  19866894287507_5
  misc_feature (1)..(40): n is any nucleotide
nnnnnnnnnnnnnnnnnnnnnnnnnnnnnnnnnnnnnnnntggttggaagatttttgctcttattttgcctcagatgttgaactttaattacagtcaatgcggtgaaatacctggaataggaataaatcatgcaaaagattttctcaaggattcatgccttcccccrgctctccctgcttggcagccccggcatggaccccctcaaccccccacatttcctatgggcaaacaaaggtagtggctgtacctccaggaaggacaccccragctgctgcyccccccatatgggtcacaaacyrggcacagagagaccccagcagtgagtggaccacaactctgagctgctcattcagcgccagagagatgctgcaggaggctgggtaggcaagagcccaattaagataaaatcacagggaattgattaataattagcaagtaattagttatctctctaccatctggagggctgaatctgcttgtgaggcattggctgtctgtggggtgtccccaccacccgcgctgcccacgctgtcccygtggttcccctgccctgtgcccacactgcagccctgagttctgcacagctcagtgcccgggt

SEQ ID NO: 46486 - DNA, 501 bp, Chicken  19866894287507_6
agtggctgtacctccaggaaggacaccccragctgctgcyccccccatatgggtcacaaacyrggcacagagagaccccagcagtgagtggaccacaactctgagctgctcattcagcgccagagagatgctgcaggaggctgggtaggcaagagcccaattaagataaaatcacagggaattgattaataattagcaagtaattagttatctctctaccatctggagggctgaatctgcttgtgaggcattggctgtctgtggggtgtccccaccacccgcgctgcccacgctgtcccygtggttcccctgccctgtgcccacactgcagccctgagttctgcacagctcagtgcccgggtgcccagccctgcctctgccccacgtggctgccagggagagctctgccataggtccagccttgcttcaaagtgatcagttatcaaagagcacacgtgtatcctctgctgtagcaccaacagagtggtggtgaggtgagga

SEQ ID NO: 46487 - DNA, 600 bp, Chicken  19866894287510_1
gatcaaagtatactttattcattattacctgtgcctttgctactcacttgtgtaatttgacataacactgtccagactgacttcacttccagactcaccatggaagacccagctgatgcaatgcagtgcagcagtggaactatccaacagcagcatgaaatatgaaagctcatttgcctctttattactgtgctgtaggcaaacagaaaaacactgatggcattaatcagtagcaaagagaggttgtgggatgggaaattagactctacacaaggatgagtccttctctactggttatgkaaggtgcctaagaggagctcattctcactaaggtgctttgtagtttcacagagtttaggccattgttgcagtaggcgtttgatggggatacgtgctgtacgggataggcctctccctaagcacagtgaaagggtgctgttgtgctcagacagactgtccttgctaacgaagtaaacaagataagaaggcgaaggaatgaggagacaataggagccaaataaggaattgtagtaaggggctaagatacagtacggacgaatcgggacagggcacrttagctcaagtaaaggtatataagct

SEQ ID NO: 46488 - DNA, 600 bp, Chicken  19866894287510_2
gatgagtccttctctactggttatgkaaggtgcctaagaggagctcattctcactaaggtgctttgtagtttcacagagtttaggccattgttgcagtaggcgtttgatggggatacgtgctgtacgggataggcctctccctaagcacagtgaaagggtgctgttgtgctcagacagactgtccttgctaacgaagtaaacaagataagaaggcgaaggaatgaggagacaataggagccaaataaggaattgtagtaaggggctaagatacagtacggacgaatcgggacagggcacrttagctcaagtaaaggtatataagctgtgcttagtagtgaatagatgccatgttgctgctcttcatattggtgtgcgtttgcagtcatttggtcctgatcaggtaattggtcagtgtgcgcaagagggctaacacaggtggctaacatcatagttgcagaaggcaacaggccatattatcttcactgcttcacatttctatttctattcaaccacattcttcctcaactgtcttgtattcttgtggaaaaatgttaataggatgaggcaagttaaaattaacttatttttttttatttaa

SEQ ID NO: 46489 - DNA, 600 bp, Chicken  19866894287513_1
gggttcttattccaccagctgatgtgtgaacttctttatagcatttcctgtgtatctgtttctgccagacatgctgaagatatgcggtccattacaaaatattgctttgagcatcctcagactgttctgaaattcagaagtattctgaccccattatattagcattacatcaagatacctttttttcttctcatctgaattgtatgttgtttattattatctgatatttggaagtgtcatatcccaaaaaagggttattacctggccacttaaacattttaaaaatggtcaccctacacrcatagtttacactattttttctccctcacttcctggatattcaacctacaaatgaaatcaggccttcaattatattctaccttaccccagagtactcaaccttatcatatctattcttcacaaaacaagagacaaatacctgggaattggcctgcaaggcagctggtttggaacacttaagattaagatggaaatttctgccctacagacaggttttcttagactacatcatctaagagcttttatgggtcaccactgtcaaaggcacccagcacagtcaattccacctgaaaatcattg

SEQ ID NO: 46490 - DNA, 599 bp, Chicken  19866894287523_1
  misc_feature (1)..(81): n is any nucleotide
nnnnnnnnnnnnnnnnnnnnnnnnnnnnnnnnnnnnnnnnnnnnnnnnnnnnnnnnnnnnnnnnnnnnnnnnnnnnnnnnntttgtaacttaacatgcatgtgttttgcctgaaggttgcaagggaaggaagtgaaacaattaataatgcatttaatgtcttttggctgcaaaatggagtgattccaaataagagatcagcaagcagcatgctagagatttgcagcttatgggcaatttcccacttaaaaaaaaaaaaaaaagaccctttttgtaggtcagctttgggaaggatgttctrtctaaaagtgctctgcakgtrgaatatggatgtgtgacaaaattacttagaaggatatcatcactacagtgatgtgggaaaatagttgccataaaaatttacagcagctaagatctaaccttgtaaaatactcaaaaatgagtgtgagggttgcacaatgggctcagtcacatctgtaattcacatctgtaattcccatcttaattaaccctagcttttatctactttgggcccttcctggaaaggcacattagagaaatctgtagttcgtggattaataactgtttttgttctatttt

SEQ ID NO: 46491 - DNA, 599 bp, Chicken  19866894287523_2
  misc_feature (1)..(63): n is any nucleotide
nnnnnnnnnnnnnnnnnnnnnnnnnnnnnnnnnnnnnnnnnnnnnnnnnnnnnnnnnnnnnnntttgtaacttaacatgcatgtgttttgcctgaaggttgcaagggaaggaagtgaaacaattaataatgcatttaatgtcttttggctgcaaaatggagtgattccaaataagagatcagcaagcagcatgctagagatttgcagcttatgggcaatttcccacttaaaaaaaaaaaaaaaagaccctttttgtaggtcagctttgggaaggatgttctrtctaaaagtgctctgcakgtrgaatatggatgtgtgacaaaattacttagaaggatatcatcactacagtgatgtgggaaaatagttgccataaaaatttacagcagctaagatctaaccttgtaaaatactcaaaaatgagtgtgagggttgcacaatgggctcagtcacatctgtaattcacatctgtaattcccatcttaattaaccctagcttttatctactttgggcccttcctggaaaggcacattagagaaatctgtagttcgtggattaataactgtttttgttctattttttacattcagattatgct

SEQ ID NO: 46492 - DNA, 599 bp, Chicken  19866894287523_3
  misc_feature (1)..(60): n is any nucleotide
nnnnnnnnnnnnnnnnnnnnnnnnnnnnnnnnnnnnnnnnnnnnnnnnnnnnnnnnnnnntttgtaacttaacatgcatgtgttttgcctgaaggttgcaagggaaggaagtgaaacaattaataatgcatttaatgtcttttggctgcaaaatggagtgattccaaataagagatcagcaagcagcatgctagagatttgcagcttatgggcaatttcccacttaaaaaaaaaaaaaaaagaccctttttgtaggtcagctttgggaaggatgttctrtctaaaagtgctctgcakgtrgaatatggatgtgtgacaaaattacttagaaggatatcatcactacagtgatgtgggaaaatagttgccataaaaatttacagcagctaagatctaaccttgtaaaatactcaaaaatgagtgtgagggttgcacaatgggctcagtcacatctgtaattcacatctgtaattcccatcttaattaaccctagcttttatctactttgggcccttcctggaaaggcacattagagaaatctgtagttcgtggattaataactgtttttgttctattttttacattcagattatgctaac

SEQ ID NO: 46493 - DNA, 600 bp, Chicken  19866894287526_1
gtttaatacttggagaacagccaccgtaaaaaataacagaacaaaagtcacaaaaacagcctctagatcagcctccttcctgcccgtgttttgacactggaggcgatttccaggattgcccaaactggaagcaaacctgctgcctgcagggatggggatgtgatgaggtgagccagtgacagctgggtgccacccctgcgcagtgccacgtccccctgtcacaccgtgctgctgtcatctcccccatgtgtgaggttcttgggatcccctgtcttgttggcttctaggattataagatcrtaaaatcacagaattattaaggttggaaaagatctctaaggtcatygagctcaaccccaacccatccccaccatgcccacggagccagcagggcagagagagcagagccacgtgcaaaactccagaagagaagcacaaaacccagtggccaaactcttgagctggcccatttctcccatgcccagagcccccgaagcaaacccttaatcaccccaaaagagaagtgcactgattgtatcacagggctgtgcctttcctgcctgcagccagggtttgcacaggggttaaggtctcaactga

SEQ ID NO: 46494 - DNA, 600 bp, Chicken  19866894287526_2
gtcacaaaaacagcctctagatcagcctccttcctgcccgtgttttgacactggaggcgatttccaggattgcccaaactggaagcaaacctgctgcctgcagggatggggatgtgatgaggtgagccagtgacagctgggtgccacccctgcgcagtgccacgtccccctgtcacaccgtgctgctgtcatctcccccatgtgtgaggttcttgggatcccctgtcttgttggcttctaggattataagatcrtaaaatcacagaattattaaggttggaaaagatctctaaggtcatygagctcaaccccaacccatccccaccatgcccacggagccagcagggcagagagagcagagccacgtgcaaaactccagaagagaagcacaaaacccagtggccaaactcttgagctggcccatttctcccatgcccagagcccccgaagcaaacccttaatcaccccaaaagagaagtgcactgattgtatcacagggctgtgcctttcctgcctgcagccagggtttgcacaggggttaaggtctcaactgatgaggagatcagctcagcagagtgccggggtgggagtggggataca

SEQ ID NO: 46495 - DNA, 600 bp, Chicken  19866894287533_1
ggacaccactctctcgaagaacagaattttctcttcctggcatatccatcctctgccgatctgagaaacagctgtgtgctgagaccagcctagcagagagtgattatctgcagagaggagatggttgcagcactgcagcctatagctaggccaggggttatttagtgatgggaaggctgtgtccaggtcagccctttttccttactgggagagcgaggtaggatatgtgacttatataactacttgttctaacaggatcctaatactgagagtactttgagggggaggcacaaccctttrtgtgaagcaaatctagggtaaactatccctatggaaacatattaaagacacattaaatatgtacatgaatgcccctgagatgggtccttgcattgcttttatctttggtattcttcttcctggtatccacatgaaccctgatctccttctttggttttcttaggaaacagagtttctgaacttagaaccattgtttttagctggagagctggtggaggaggcaaggaccagtgagagccagtacctctctgtgcctcttgccagcagctcaaccagcatatgtgctcaatgtttaaaagc

SEQ ID NO: 46496 - DNA, 599 bp, Chicken  19866894287534_1
  misc_feature (1)..(75): n is any nucleotide
nnnnnnnnnnnnnnnnnnnnnnnnnnnnnnnnnnnnnnnnnnnnnnnnnnnnnnnnnnnnnnnnnnnnnnnnnnnacaaaaacaaatctactacaggaattaattcaagtcatgactagatattcaactgatggatatcagtacagatctgtagatttcagtggaactctcccagtgcaggttagatgaaaatctaactctcgattgctttgtaattttttccactaatcaacaatgaaatactagttttaagctaatatctgtctgaagccctcatcactcctgagacacggccttctsttgcttttgcaacagatctgttttaacaacttataggtaacacaaatctttaaaaatcacttatttatttattaatttatttcttttaatcaagttgtacagccttgataaagtagatgtagtttactacacatgacatcacctcctcctggctttgaagaaaaaactggacaatgctaaaggattaatcttgttctraaacaatttctgtactgcatggccacattaccagcaagctaagcaaagtatcatggtgatgtggagctagaaatgaatggctgagtggctggagggtcaag

SEQ ID NO: 46497 - DNA, 600 bp, Chicken  19866894287534_2
tctcgattgctttgtaattttttccactaatcaacaatgaaatactagttttaagctaatatctgtctgaagccctcatcactcctgagacacggccttctsttgcttttgcaacagatctgttttaacaacttataggtaacacaaatctttaaaaatcacttatttatttattaatttatttcttttaatcaagttgtacagccttgataaagtagatgtagtttactacacatgacatcacctcctcctggctttgaagaaaaaactggacaatgctaaaggattaatcttgttctraaacaatttctgtactgcatggccacattaccagcaagctaagcaaagtatcatggtgatgtggagctagaaatgaatggctgagtggctggagggtcaagagctacctaaggccatccaaataaccccaaatttgtcaccaaatatgaacacatgcaatctgctacacaatctgccacactgtactagaccaaactttcaagagcaattccccaacctggattacagaccagaagcaagcgagagcagacaaatggtggagctctggtacactatgccaaaccaattaagcagtcaggc

SEQ ID NO: 46498 - DNA, 600 bp, Chicken  19866894287535_1
agtttttaaaattattgttaaaataattatacttcaagcattacattgcaggaataacgtttctgggtaagtagttgcattcatactatattctgtccttggttgtttattggcagtagtatagtgtgtgatacatgcatacctgctaatgtgaaattgaaaccgttgctgtattttgtcttattgtgaaagcagttttcagctttgcatttatacattccaaagtcattggaggatttgataagtacagaaatcactgctgcttccctgttctgcatcttcaccgggggttggatgctytgtctgtctttgaagaatgtgtatgtgatagggagagagccattctccgagagacaagacaaggtcacgttttggcctttctttgcttgagaattgggtgagctcagcactggtttggaaactggctctgtaaaatacaaaccacagcaacaaaaagaacctgaaaagacttcagcgctgattacaggacaaactccaaagcaagactctgaattaagcagcaatattagagaaagagatgcctataaaggatgaatcattcagtgggacctaccagaacagcactgctggctcctgagg

SEQ ID NO: 46499 - DNA, 599 bp, Chicken  19866894287540_1
  misc_feature (1)..(184): n is any nucleotide
nnnnnnnnnnnnnnnnnnnnnnnnnnnnnnnnnnnnnnnnnnnnnnnnnnnnnnnnnnnnnnnnnnnnnnnnnnnnnnnnnnnnnnnnnnnnnnnnnnnnnnnnnnnnnnnnnnnnnnnnnnnnnnnnnnnnnnnnnnnnnnnnnnnnnnnnnnnnnnnnnnnnnnnnnnnnnnnnnnnnnnnncaccgtacattgtgcagtcccaggagcctggccaccagatcctctgccttctgtgcagaagtcgtgtgctgagcactcacacggctgctccgtgtcccactgcctcacaggcagcrtttctccccaygtcagttgcctccaccagtcctttttctttgtctttcaggctggaatttctttgggggcaggcacctaccaaggttgggaccccttaggtatagccatatgcaaacaacacaagataaatgcctctcttgccaagtacattaagtgcggtgaatttacttttccccagcggctgcccactgatacaggaaatctaatcctaaatctcattaggttctacaaacaattccgcctctttmcccaacaaagtcaccatcctggactgccgaatgtttatgctttatttctc

SEQ ID NO: 46500 - DNA, 599 bp, Chicken  19866894287540_2
  misc_feature (1)..(173): n is any nucleotide
nnnnnnnnnnnnnnnnnnnnnnnnnnnnnnnnnnnnnnnnnnnnnnnnnnnnnnnnnnnnnnnnnnnnnnnnnnnnnnnnnnnnnnnnnnnnnnnnnnnnnnnnnnnnnnnnnnnnnnnnnnnnnnnnnnnnnnnnnnnnnnnnnnnnnnnnnnnnnnnnnnnnnnnnnnnnncaccgtacattgtgcagtcccaggagcctggccaccagatcctctgccttctgtgcagaagtcgtgtgctgagcactcacacggctgctccgtgtcccactgcctcacaggcagcrtttctccccaygtcagttgcctccaccagtcctttttctttgtctttcaggctggaatttctttgggggcaggcacctaccaaggttgggaccccttaggtatagccatatgcaaacaacacaagataaatgcctctcttgccaagtacattaagtgcggtgaatttacttttccccagcggctgcccactgatacaggaaatctaatcctaaatctcattaggttctacaaacaattccgcctctttmcccaacaaagtcaccatcctggactgccgaatgtttatgctttatttctcaattccctttt

SEQ ID NO: 46501 - DNA, 600 bp, Chicken  19866894287540_3
gtgctgagcactcacacggctgctccgtgtcccactgcctcacaggcagcrtttctccccaygtcagttgcctccaccagtcctttttctttgtctttcaggctggaatttctttgggggcaggcacctaccaaggttgggaccccttaggtatagccatatgcaaacaacacaagataaatgcctctcttgccaagtacattaagtgcggtgaatttacttttccccagcggctgcccactgatacaggaaatctaatcctaaatctcattaggttctacaaacaattccgcctctttmcccaacaaagtcaccatcctggactgccgaatgtttatgctttatttctcaattccctttttctccccaatcccccacccttgcgattttccttttggtaaatatttctacattggagaagtctagccaaaaaagatttaaaaaaagaaagtgagcaggagagacagagtatcaatcatttaccttcagttccccagggaagaggtggggagaaagaacagcaaggtaaaaagttaaaaacggcagaaccacagcagcgttctttgaagagcatccaaatctatttcttccagcattgag

SEQ ID NO: 46502 - DNA, 600 bp, Chicken  19866894287545_1
gggtgatttctgaggatggagagctttgtgcaaagctttgctgccgagcctgcatttcaggctcacatccctggccacgccaagagagccgtgccgtggttgggtgagccgggacggatgctgcaggggtgagaggttaaacaacttgcaagctacactccagctgagaatacacaataagaactgttgccaggttaactcctagaaaaatcagcctcagcccaaagggcagataatgaatccgtgtatcagttaaaccaagtgctgacgcagccttcgctgcaaagcactcccggtgcygctgtaatgcagggccaggatggaattccactgtgattgacactctgccatcacatcrtttgttaccgatcccatttttcctcccttcctctgcttttcacttcaagggacaggacctgcagcagcacagccttcagagccctccttcgatctgttttccatttgagtgccctcctctgaggattgactcatgcttcttgacataaagcaccgcctctttgggctcttagaaggaaatagcatgagagaatcgtctaattcagactttctggcagacttcagacactatgcgttacagtg

SEQ ID NO: 46503 - DNA, 600 bp, Chicken  19866894287545_2
aggctcacatccctggccacgccaagagagccgtgccgtggttgggtgagccgggacggatgctgcaggggtgagaggttaaacaacttgcaagctacactccagctgagaatacacaataagaactgttgccaggttaactcctagaaaaatcagcctcagcccaaagggcagataatgaatccgtgtatcagttaaaccaagtgctgacgcagccttcgctgcaaagcactcccggtgcygctgtaatgcagggccaggatggaattccactgtgattgacactctgccatcacatcrtttgttaccgatcccatttttcctcccttcctctgcttttcacttcaagggacaggacctgcagcagcacagccttcagagccctccttcgatctgttttccatttgagtgccctcctctgaggattgactcatgcttcttgacataaagcaccgcctctttgggctcttagaaggaaatagcatgagagaatcgtctaattcagactttctggcagacttcagacactatgcgttacagtgtacgtttctagccaaagtctttgcccttttgtggtcattgcagaacaaactgagcttc

SEQ ID NO: 46504 - DNA, 600 bp, Chicken  19866894287545_3
ttcttgacataaagcaccgcctctttgggctcttagaaggaaatagcatgagagaatcgtctaattcagactttctggcagacttcagacactatgcgttacagtgtacgtttctagccaaagtctttgcccttttgtggtcattgcagaacaaactgagcttcctccatcatcatttttgggtacttctgctaacgtgcagtgcctcagaccaagcagaaagagtgtgaggttcggagtaaatcaaatcttggaggaattattttaacatatgaaccataaacactcctgccgtgctaytaactcacatcccggggactccgagattttgctacagggaaagacgtctcagatacaacacatgagatgcacaacgatcatcacgggccgttgctatgtttatgggtgccctgtatctgtcccgtgctcaggtctttaaaaccagagctgtgaaagaatgcttggagtgaaacatgatgccgaatgagacggacctgggctgggatttggttatatatgggaaagtcaggctgagttcacctagagagttgtgaaggttcatgaaccttgcgagggagcaaaggtccagctcggagcaag

SEQ ID NO: 46505 - DNA, 600 bp, Chicken  19866894287550_1
ggatatgtcaggcattttaagagcactgccttggacttgtatacagtactatttcacatatagtgtggttcactgcttgcttatgatgtgcagaaatgcagagggaagctaaaaatataggttaaagaaatggtcctcaaggatcctctccttttcttgactcatatcttttgctgtctgccatgggttaaaactgccattcagtaatggaatagtactcagaccattcatttttccactttcaacctgggctctgtatccagtctatttgtagactttgtggtttctgaaatcaaagtygcaaatgcagtcacataactaaactctgcatgaattactacactgtgtgcggtagttcagtgggaatgtgtcatatcaattttggctcttgtataaacaattaggttttggcagtgtgtgttgcagcttgattgaaaaaagctcctgataaatgaaattgctatgtttcaatccgtaattgtgccaggctttttaaatggctataacatgctttgaaaaaaaaaaaagtaaaaagaaagaaacctgatatgcaaacatactgtgtcacactgtaatgccaatggggatccctgcctgact

SEQ ID NO: 46506 - DNA, 600 bp, Chicken  19866894287554_1
tgagagaagaatgcttcctgtgtaattttcataaatataattcacagagagtaatatctggaggacaagaggaaaatatttctcaaaggaaaattgcttattttagtaaaatcaagcccaattatcaactaaaatctaggtactgtggataggtccaagatacttaaccaaaacagtgacatccaattgtctgtaccaaatagtatattcactcccttattcacttgccactttttctttgctaatttgcaaaccaagagatacacctatccagaatgtgaaatggaaaaaagtaaatcwtatctctcttttccttttatattattgatccaggtgtaaaatcctcaacccacttatgggatccacctaccataacagggaagcaagaatttctactcatgggtgttatgctgaattaatattggcaattatggataagtagcttagttctgggggtcactgcaaaacctagattcaacagtatgatatgtcacaggtaacttggctgtctggcactgtgattacttctctccttcaactgtataaaacactatagtcctaaatagcgactagcacaaaagtactgttgttgaatgtgta

SEQ ID NO: 46507 - DNA, 600 bp, Chicken  19866894287558_1
ttaaagcatctgtcaaccttgattgatttacaagggacaaagaactgaaaaggtttgaagtgcgggtacaatttttgccaccgtttagcatacataatggttctcctttgatgtcaaaagctcatcttctattaataatgcagagggcttttgaatgcaggctacttgtatggagttccacactaataacctacttgctgtgaaatgggattcactttggagaagcagtcatttgtctgggttttacatgttcagaatgaatcccaactcaaagggatttctttcagtgctctgcatgaytgcagctgagcccggcacgggttaggggaagcaggcaaatcctagcctgctcctccagctgagaatctggcagaaatcacgcagccagatgcaaaggagcatgaacaacaagcctagatgatgcgatcaaatgccttgtgccgttttgtctggcaaccttctattaatatactttagggtgcatttcatgcctggactgctttcttcacctgtcatttccaataggcctttttatttaaatgacagcatgcaagggagattggtgattagaataggggacggataggggatatgtgctta

SEQ ID NO: 46508 - DNA, 600 bp, Chicken  19866894287558_2
tgctcctccagctgagaatctggcagaaatcacgcagccagatgcaaaggagcatgaacaacaagcctagatgatgcgatcaaatgccttgtgccgttttgtctggcaaccttctattaatatactttagggtgcatttcatgcctggactgctttcttcacctgtcatttccaataggcctttttatttaaatgacagcatgcaagggagattggtgattagaataggggacggataggggatatgtgcttacgtgttgttgtaggaccaaaggcaagtcacccagcatctctgtactstatctgctgagcaggacacttaacctcrcagtacgctggagggctgactgtggtttgaaggtaaaagttgcgaaaggagacagaaattctttatttgtatgtggctgcaggtactggggcctgcctttggtttggctgtcagcatgtgaaaggaaaagtgaatgaaagaagagctaggaaggtttgctctcaaatacgtgagagagatgcttgggcagctgtctcaggggaagaggacaattctggaagtaaaacattttatgatttcaaggtttaggaaggctatttttaaacactggg

SEQ ID NO: 46509 - DNA, 600 bp, Chicken  19866894287558_3
atcacgcagccagatgcaaaggagcatgaacaacaagcctagatgatgcgatcaaatgccttgtgccgttttgtctggcaaccttctattaatatactttagggtgcatttcatgcctggactgctttcttcacctgtcatttccaataggcctttttatttaaatgacagcatgcaagggagattggtgattagaataggggacggataggggatatgtgcttacgtgttgttgtaggaccaaaggcaagtcacccagcatctctgtactstatctgctgagcaggacacttaacctcrcagtacgctggagggctgactgtggtttgaaggtaaaagttgcgaaaggagacagaaattctttatttgtatgtggctgcaggtactggggcctgcctttggtttggctgtcagcatgtgaaaggaaaagtgaatgaaagaagagctaggaaggtttgctctcaaatacgtgagagagatgcttgggcagctgtctcaggggaagaggacaattctggaagtaaaacattttatgatttcaaggtttaggaaggctatttttaaacactggggagtaaatataatctgtatgaaaactca

SEQ ID NO: 46510 - DNA, 600 bp, Chicken  19866894287562_1
tcttcttcaaagagattactggataataggaaataagaggagaaaagtctaagtaaccgcagctgactccttttccccacaaggttactgcaagtctgctctttccataagccccagtcaatattaaattgttcagatgaatgatgatatgcctttatttctagttgcaaataatatcacctttgaaaatgtgcaatgcagattaggaattcagcgcttcagcaaacagcactgaaaacataaggagtgctagagtttgggtttcactgcttaatcgcacacaaaaacactccaaataayttttcgtattggagagcatccagctacataggtggtgtcctatgttctgcccctggtaagcaaggtcaaagcagaagctttccttaatttcaataatgtgggttctaatcccacatgtaacactaggcaggggactcacattttcaggcagttcttcagcccagaggtcattttcctaaggacgatacttctgcaaaaatcctatggtgaatgtaataaaggggtaagtagaaagactgaaaattaaagcactttaccagttcttcccgcttttatccctattcacatctcctcaaaaaa

SEQ ID NO: 46511 - DNA, 600 bp, Chicken  19866894287564_1
agcccttccccctgcagaactccccctctccaccatcctgcaatgcagcagctcgctgccccacttggggctggttgctctgttctaaagccccagtccagcctgctccctgctgccctcggtcccgtctgtcccaggcaccatactggagccaaggactgcagtctcatctcaccacaaagcgtgcttcaggtgggggaaagctgaagctgatgtgcacagctgtcggggaggtgctgcgccggtcagagctgctcagaagcctcctgctcctcaaagacgatgctgctcctcgtctcrtgggcttggttattggattcccaygtgaagatggatcccagggtctctttggacctttggtagatattcctcatgcgtgacatgcagtctttgctggtcatgacgtagagcagagggttgagcgcgctgttgaagctggccaggcccctggtcacctggtaggagacgtagatgtccttcatggcctgtgtgcaggacccctgscgctgccasgctcgggayagcaggttgaggttcctgaagatgtggtagggcaggaagcagacggagaagaggaccgtgacgagcaccaccagcctg

SEQ ID NO: 46512 - DNA, 600 bp, Chicken  19866894287564_2
cctctccaccatcctgcaatgcagcagctcgctgccccacttggggctggttgctctgttctaaagccccagtccagcctgctccctgctgccctcggtcccgtctgtcccaggcaccatactggagccaaggactgcagtctcatctcaccacaaagcgtgcttcaggtgggggaaagctgaagctgatgtgcacagctgtcggggaggtgctgcgccggtcagagctgctcagaagcctcctgctcctcaaagacgatgctgctcctcgtctcrtgggcttggttattggattcccaygtgaagatggatcccagggtctctttggacctttggtagatattcctcatgcgtgacatgcagtctttgctggtcatgacgtagagcagagggttgagcgcgctgttgaagctggccaggcccctggtcacctggtaggagacgtagatgtccttcatggcctgtgtgcaggacccctgscgctgccasgctcgggayagcaggttgaggttcctgaagatgtggtagggcaggaagcagacggagaagaggaccgtgacgagcaccaccagcctgatgctgctcctcctgaggccgggc

SEQ ID NO: 46513 - DNA, 600 bp, Chicken  19866894287564_3
tgaagctgatgtgcacagctgtcggggaggtgctgcgccggtcagagctgctcagaagcctcctgctcctcaaagacgatgctgctcctcgtctcrtgggcttggttattggattcccaygtgaagatggatcccagggtctctttggacctttggtagatattcctcatgcgtgacatgcagtctttgctggtcatgacgtagagcagagggttgagcgcgctgttgaagctggccaggcccctggtcacctggtaggagacgtagatgtccttcatggcctgtgtgcaggacccctgscgctgccasgctcgggayagcaggttgaggttcctgaagatgtggtagggcaggaagcagacggagaagaggaccgtgacgagcaccaccagcctgatgctgctcctcctgaggccgggctccaccgtrtcrctcctgcagagcaccagcaccacgtggcagtagcacccgacgatgatgaggaaggggatgacgaaccccgtcacggtgacggcggcggtgtagggcacgtaggcacccaggctttcggcccccgtcgtgtcgtggcactgcgtccccttggggtccatcttgctgaag

SEQ ID NO: 46514 - DNA, 600 bp, Chicken  19866894287564_4
tgtgcacagctgtcggggaggtgctgcgccggtcagagctgctcagaagcctcctgctcctcaaagacgatgctgctcctcgtctcrtgggcttggttattggattcccaygtgaagatggatcccagggtctctttggacctttggtagatattcctcatgcgtgacatgcagtctttgctggtcatgacgtagagcagagggttgagcgcgctgttgaagctggccaggcccctggtcacctggtaggagacgtagatgtccttcatggcctgtgtgcaggacccctgscgctgccasgctcgggayagcaggttgaggttcctgaagatgtggtagggcaggaagcagacggagaagaggaccgtgacgagcaccaccagcctgatgctgctcctcctgaggccgggctccaccgtrtcrctcctgcagagcaccagcaccacgtggcagtagcacccgacgatgatgaggaaggggatgacgaaccccgtcacggtgacggcggcggtgtagggcacgtaggcacccaggctttcggcccccgtcgtgtcgtggcactgcgtccccttggggtccatcttgctgaaggcgaagtcg

SEQ ID NO: 46515 - DNA, 600 bp, Chicken  19866894287564_5
ctgtcggggaggtgctgcgccggtcagagctgctcagaagcctcctgctcctcaaagacgatgctgctcctcgtctcrtgggcttggttattggattcccaygtgaagatggatcccagggtctctttggacctttggtagatattcctcatgcgtgacatgcagtctttgctggtcatgacgtagagcagagggttgagcgcgctgttgaagctggccaggcccctggtcacctggtaggagacgtagatgtccttcatggcctgtgtgcaggacccctgscgctgccasgctcgggayagcaggttgaggttcctgaagatgtggtagggcaggaagcagacggagaagaggaccgtgacgagcaccaccagcctgatgctgctcctcctgaggccgggctccaccgtrtcrctcctgcagagcaccagcaccacgtggcagtagcacccgacgatgatgaggaaggggatgacgaaccccgtcacggtgacggcggcggtgtagggcacgtaggcacccaggctttcggcccccgtcgtgtcgtggcactgcgtccccttggggtccatcttgctgaaggcgaagtcggggcccacc

SEQ ID NO: 46516 - DNA, 600 bp, Chicken  19866894287564_6
gatcccagggtctctttggacctttggtagatattcctcatgcgtgacatgcagtctttgctggtcatgacgtagagcagagggttgagcgcgctgttgaagctggccaggcccctggtcacctggtaggagacgtagatgtccttcatggcctgtgtgcaggacccctgscgctgccasgctcgggayagcaggttgaggttcctgaagatgtggtagggcaggaagcagacggagaagaggaccgtgacgagcaccaccagcctgatgctgctcctcctgaggccgggctccaccgtrtcrctcctgcagagcaccagcaccacgtggcagtagcacccgacgatgatgaggaaggggatgacgaaccccgtcacggtgacggcggcggtgtagggcacgtaggcacccaggctttcggcccccgtcgtgtcgtggcactgcgtccccttggggtccatcttgctgaaggcgaagtcggggcccacctgcgccatgacccacagccacacggcygcgctgagccggcccggcgccatggcggcccggcagcggccccgcgcccgcagcggatgcacgatgcccaggtagcggtgcacg

SEQ ID NO: 46517 - DNA, 600 bp, Chicken  19866894287564_7
cccagggtctctttggacctttggtagatattcctcatgcgtgacatgcagtctttgctggtcatgacgtagagcagagggttgagcgcgctgttgaagctggccaggcccctggtcacctggtaggagacgtagatgtccttcatggcctgtgtgcaggacccctgscgctgccasgctcgggayagcaggttgaggttcctgaagatgtggtagggcaggaagcagacggagaagaggaccgtgacgagcaccaccagcctgatgctgctcctcctgaggccgggctccaccgtrtcrctcctgcagagcaccagcaccacgtggcagtagcacccgacgatgatgaggaaggggatgacgaaccccgtcacggtgacggcggcggtgtagggcacgtaggcacccaggctttcggcccccgtcgtgtcgtggcactgcgtccccttggggtccatcttgctgaaggcgaagtcggggcccacctgcgccatgacccacagccacacggcygcgctgagccggcccggcgccatggcggcccggcagcggccccgcgcccgcagcggatgcacgatgcccaggtagcggtgcacgctg

SEQ ID NO: 46518 - DNA, 560 bp, Chicken  19866894287564_8
tagggcaggaagcagacggagaagaggaccgtgacgagcaccaccagcctgatgctgctcctcctgaggccgggctccaccgtrtcrctcctgcagagcaccagcaccacgtggcagtagcacccgacgatgatgaggaaggggatgacgaaccccgtcacggtgacggcggcggtgtagggcacgtaggcacccaggctttcggcccccgtcgtgtcgtggcactgcgtccccttggggtccatcttgctgaaggcgaagtcggggcccacctgcgccatgacccacagccacacggcygcgctgagccggcccggcgccatggcggcccggcagcggccccgcgcccgcagcggatgcacgatgcccaggtagcggtgcacgctgatgcaggtgaggaaaccgatgctggcgtagaggttgaggtggaagagcccgcgggtgaggcggcaccagccctgcccgaaggcccaggtgcggccgcgcaggtagtagctgatgaggaagggcagcgtgcagacgtacagcaggtcggccaggcccaggtggcccaccagcgg

SEQ ID NO: 46519 - DNA, 600 bp, Chicken  19866894287566_1
actgccataccaaggagggaggacaaggaggagggagggaacagaattaggacaactgactcaatctggccaaagggatactccattccacacatcatgcagaaggagttttcagagaggtgggagttcatctctctcttccactgctcaggggttagctgggcattggtcagcaggtggtgagcaattgcttgtgcaccacttgttgtatacatttacatatatagatagataggtttggatttgcgcccacttttgtacacagatctgtgcctcatgttcgatgtctttcacagagayggtggtgaggtgcttcccggagtggttgccctgtccctggagatgttcaaggccaggctggatggggccctgggcaacctggtcaagcgtataatctmgtatttggtaaccttgcctgcagcaagggttgttgccaacatgaycrttgaggtcccttccaacccaagccatactatgwttctatagatatggctctatggtgccatactatgattcacagatcattataatatccttttctttatgttagtcaatagtttatctcaacccatgcattatactttcatattttttctccaa

SEQ ID NO: 46520 - DNA, 600 bp, Chicken  19866894287566_10
tgttagtcaatagtttatctcaacccatgcattatactttcatattttttctccaattcactccccyatcccacttggaaggagtggagtgarcaaagagctgtgtggtgctgagctgctgccgggttaaacctgttgtttagccacaaatgctaggttatattttgagctctgccttctctgtttgctcacccagggcatgccacggtgcragggaaggggtaagtgccctgcccttctcagccttgcctgctctgctgggaacagtcagctgctctcctctgtcccatttagtaattyggaaaaggaagagaaaagaaatattaatgataattgtatgcctmtgtatttctactcaaaacaagtgttgcacagtgcagtgtctcaccacccactgcccaatgcccatctggtccctgagcagctgtctctccttcagcaaactccccacagctttgtggygttctgcatggcatcatgtggtatggaataagcccttttccaatccaggccagctatcttggctgacycccagctgcctttggtgcaacatcactcagaaacaactcagaactgatgtgctattaacactgttttcct

SEQ ID NO: 46521 - DNA, 600 bp, Chicken  19866894287566_11
ttttttctccaattcactccccyatcccacttggaaggagtggagtgarcaaagagctgtgtggtgctgagctgctgccgggttaaacctgttgtttagccacaaatgctaggttatattttgagctctgccttctctgtttgctcacccagggcatgccacggtgcragggaaggggtaagtgccctgcccttctcagccttgcctgctctgctgggaacagtcagctgctctcctctgtcccatttagtaattyggaaaaggaagagaaaagaaatattaatgataattgtatgcctmtgtatttctactcaaaacaagtgttgcacagtgcagtgtctcaccacccactgcccaatgcccatctggtccctgagcagctgtctctccttcagcaaactccccacagctttgtggygttctgcatggcatcatgtggtatggaataagcccttttccaatccaggccagctatcttggctgacycccagctgcctttggtgcaacatcactcagaaacaactcagaactgatgtgctattaacactgttttcctcccagtgccagaagatagcatcatatcaggcaccacgaagaaag

SEQ ID NO: 46522 - DNA, 600 bp, Chicken  19866894287566_12
ttttgagctctgccttctctgtttgctcacccagggcatgccacggtgcragggaaggggtaagtgccctgcccttctcagccttgcctgctctgctgggaacagtcagctgctctcctctgtcccatttagtaattyggaaaaggaagagaaaagaaatattaatgataattgtatgcctmtgtatttctactcaaaacaagtgttgcacagtgcagtgtctcaccacccactgcccaatgcccatctggtccctgagcagctgtctctccttcagcaaactccccacagctttgtggygttctgcatggcatcatgtggtatggaataagcccttttccaatccaggccagctatcttggctgacycccagctgcctttggtgcaacatcactcagaaacaactcagaactgatgtgctattaacactgttttcctcccagtgccagaagatagcatcatatcaggcaccacgaagaaagttcagctatgtctctgctgcagttaccttttaccataaccacacaaaggataacaatagcaaatgctggattctgctgttgggaacagacaaccctggctgtaaatacagatttgtct

SEQ ID NO: 46523 - DNA, 600 bp, Chicken  19866894287566_13
ctgcccttctcagccttgcctgctctgctgggaacagtcagctgctctcctctgtcccatttagtaattyggaaaaggaagagaaaagaaatattaatgataattgtatgcctmtgtatttctactcaaaacaagtgttgcacagtgcagtgtctcaccacccactgcccaatgcccatctggtccctgagcagctgtctctccttcagcaaactccccacagctttgtggygttctgcatggcatcatgtggtatggaataagcccttttccaatccaggccagctatcttggctgacycccagctgcctttggtgcaacatcactcagaaacaactcagaactgatgtgctattaacactgttttcctcccagtgccagaagatagcatcatatcaggcaccacgaagaaagttcagctatgtctctgctgcagttaccttttaccataaccacacaaaggataacaatagcaaatgctggattctgctgttgggaacagacaaccctggctgtaaatacagatttgtctgtatgtagttccaccagggactgagttgtttttttttttctttgtggcatctggaatgatgctgtttt

SEQ ID NO: 46524 - DNA, 600 bp, Chicken  19866894287566_2
gcagaaggagttttcagagaggtgggagttcatctctctcttccactgctcaggggttagctgggcattggtcagcaggtggtgagcaattgcttgtgcaccacttgttgtatacatttacatatatagatagataggtttggatttgcgcccacttttgtacacagatctgtgcctcatgttcgatgtctttcacagagayggtggtgaggtgcttcccggagtggttgccctgtccctggagatgttcaaggccaggctggatggggccctgggcaacctggtcaagcgtataatctmgtatttggtaaccttgcctgcagcaagggttgttgccaacatgaycrttgaggtcccttccaacccaagccatactatgwttctatagatatggctctatggtgccatactatgattcacagatcattataatatccttttctttatgttagtcaatagtttatctcaacccatgcattatactttcatattttttctccaattcactccccyatcccacttggaaggagtggagtgarcaaagagctgtgtggtgctgagctgctgccgggttaaacctgttgtttagccacaaatgct

SEQ ID NO: 46525 - DNA, 600 bp, Chicken  19866894287566_3
ctgctcaggggttagctgggcattggtcagcaggtggtgagcaattgcttgtgcaccacttgttgtatacatttacatatatagatagataggtttggatttgcgcccacttttgtacacagatctgtgcctcatgttcgatgtctttcacagagayggtggtgaggtgcttcccggagtggttgccctgtccctggagatgttcaaggccaggctggatggggccctgggcaacctggtcaagcgtataatctmgtatttggtaaccttgcctgcagcaagggttgttgccaacatgaycrttgaggtcccttccaacccaagccatactatgwttctatagatatggctctatggtgccatactatgattcacagatcattataatatccttttctttatgttagtcaatagtttatctcaacccatgcattatactttcatattttttctccaattcactccccyatcccacttggaaggagtggagtgarcaaagagctgtgtggtgctgagctgctgccgggttaaacctgttgtttagccacaaatgctaggttatattttgagctctgccttctctgtttgctcacccagggc

SEQ ID NO: 46526 - DNA, 600 bp, Chicken  19866894287566_4
gctcaggggttagctgggcattggtcagcaggtggtgagcaattgcttgtgcaccacttgttgtatacatttacatatatagatagataggtttggatttgcgcccacttttgtacacagatctgtgcctcatgttcgatgtctttcacagagayggtggtgaggtgcttcccggagtggttgccctgtccctggagatgttcaaggccaggctggatggggccctgggcaacctggtcaagcgtataatctmgtatttggtaaccttgcctgcagcaagggttgttgccaacatgaycrttgaggtcccttccaacccaagccatactatgwttctatagatatggctctatggtgccatactatgattcacagatcattataatatccttttctttatgttagtcaatagtttatctcaacccatgcattatactttcatattttttctccaattcactccccyatcccacttggaaggagtggagtgarcaaagagctgtgtggtgctgagctgctgccgggttaaacctgttgtttagccacaaatgctaggttatattttgagctctgccttctctgtttgctcacccagggcat

SEQ ID NO: 46527 - DNA, 600 bp, Chicken  19866894287566_5
ggtgagcaattgcttgtgcaccacttgttgtatacatttacatatatagatagataggtttggatttgcgcccacttttgtacacagatctgtgcctcatgttcgatgtctttcacagagayggtggtgaggtgcttcccggagtggttgccctgtccctggagatgttcaaggccaggctggatggggccctgggcaacctggtcaagcgtataatctmgtatttggtaaccttgcctgcagcaagggttgttgccaacatgaycrttgaggtcccttccaacccaagccatactatgwttctatagatatggctctatggtgccatactatgattcacagatcattataatatccttttctttatgttagtcaatagtttatctcaacccatgcattatactttcatattttttctccaattcactccccyatcccacttggaaggagtggagtgarcaaagagctgtgtggtgctgagctgctgccgggttaaacctgttgtttagccacaaatgctaggttatattttgagctctgccttctctgtttgctcacccagggcatgccacggtgcragggaaggggtaagtgccctgc

SEQ ID NO: 46528 - DNA, 600 bp, Chicken  19866894287566_6
ttcacagagayggtggtgaggtgcttcccggagtggttgccctgtccctggagatgttcaaggccaggctggatggggccctgggcaacctggtcaagcgtataatctmgtatttggtaaccttgcctgcagcaagggttgttgccaacatgaycrttgaggtcccttccaacccaagccatactatgwttctatagatatggctctatggtgccatactatgattcacagatcattataatatccttttctttatgttagtcaatagtttatctcaacccatgcattatactttcatawtttttctccaattcactccccyatcccacttggaaggagtggagtgarcaaagagctgtgtggtgctgagctgctgccgggttaaacctgttgtttagccacaaatgctaggttatattttgagctctgccttctctgtttgctcacccagggcatgccacggtgcragggaaggggtaagtgccctgcccttctcagccttgcctgctctgctgggaacagtcagctgctctcctctgtcccatttagtaattyggaaaaggaagagaaaagaaatattaatgataattgtatgcctmt

SEQ ID NO: 46529 - DNA, 600 bp, Chicken  19866894287566_7
gcttcccggagtggttgccctgtccctggagatgttcaaggccaggctggatggggccctgggcaacctggtcaagcgtataatctmgtatttggtaaccttgcctgcagcaagggttgttgccaacatgaycrttgaggtcccttccaacccaagccatactatgwttctatagatatggctctatggtgccatactatgattcacagatcattataatatccttttctttatgttagtcaatagtttatctcaacccatgcattatactttcatattttttctccaattcactccccyatcccacttggaaggagtggagtgarcaaagagctgtgtggtgctgagctgctgccgggttaaacctgttgtttagccacaaatgctaggttatattttgagctctgccttctctgtttgctcacccagggcatgccacggtgcragggaaggggtaagtgccctgcccttctcagccttgcctgctctgctgggaacagtcagctgctctcctctgtcccatttagtaattyggaaaaggaagagaaaagaaatattaatgataattgtatgcctmtgtatttctactcaaaacaagtg

SEQ ID NO: 46530 - DNA, 600 bp, Chicken  19866894287566_8
tggagatgttcaaggccaggctggatggggccctgggcaacctggtcaagcgtataatctmgtatttggtaaccttgcctgcagcaagggttgttgccaacatgaycrttgaggtcccttccaacccaagccatactatgwttctatagatatggctctatggtgccatactatgattcacagatcattataatatccttttctttatgttagtcaatagtttatctcaacccatgcattatactttcatattttttctccaattcactccccyatcccacttggaaggagtggagtgarcaaagagctgtgtggtgctgagctgctgccgggttaaacctgttgtttagccacaaatgctaggttatattttgagctctgccttctctgtttgctcacccagggcatgccacggtgcragggaaggggtaagtgccctgcccttctcagccttgcctgctctgctgggaacagtcagctgctctcctctgtcccatttagtaattyggaaaaggaagagaaaagaaatattaatgataattgtatgcctmtgtatttctactcaaaacaagtgttgcacagtgcagtgtctcaccaccc

SEQ ID NO: 46531 - DNA, 600 bp, Chicken  19866894287566_9
tccaacccaagccatactatgwttctatagatatggctctatggtgccatactatgattcacagatcattataatatccttttctttatgttagtcaatagtttatctcaacccatgcattatactttcatattttttctccaattcactccccyatcccacttggaaggagtggagtgarcaaagagctgtgtggtgctgagctgctgccgggttaaacctgttgtttagccacaaatgctaggttatattttgagctctgccttctctgtttgctcacccagggcatgccacggtgcragggaaggggtaagtgccctgcccttctcagccttgcctgctctgctgggaacagtcagctgctctcctctgtcccatttagtaattyggaaaaggaagagaaaagaaatattaatgataattgtatgcctmtgtatttctactcaaaacaagtgttgcacagtgcagtgtctcaccacccactgcccaatgcccatctggtccctgagcagctgtctctccttcagcaaactccccacagctttgtggygttctgcatggcatcatgtggtatggaataagcccttttccaatccaggc

SEQ ID NO: 46532 - DNA, 600 bp, Chicken  19866894287576_1
taccctaccttgcacagcattagtccattcagattagggttcagatgtacccttcagcactttttgtgtgaggctcacatattctgtgtttcacatccagctgagattttgacctaaaatgattacctccatcaggatacatttcatcttcaccgcattatattgttcttgtttttaagtgcttcagcaaatgttacttaatcagatagcccccaatatcaggatagctacatgttcttcgtatacaaacaagctgaaccacatacccagcaaaaggtagatagggaaaaagaaaatcaraagcaagctgaagatgtgaaaaactaaaaggcagctgatgatggtgatgtcctgtctgtgctcctgaccaaggaaatgtaaccctggacagttctagayatcctgtttctgccacctcctgttcagccaggtcctcccattccctacccactctcagcccaagagaattacaaattcaggtagcacttgaatcattgagataagaagcatcttaacaggactgtgaaaccaactaattcaggatctctttagaaacattctaactttctcatttagaaaccaacaatcagaattatgtga

SEQ ID NO: 46533 - DNA, 600 bp, Chicken  19866894287576_2
gctgagattttgacctaaaatgattacctccatcaggatacatttcatcttcaccgcattatattgttcttgtttttaagtgcttcagcaaatgttacttaatcagatagcccccaatatcaggatagctacatgttcttcgtatacaaacaagctgaaccacatacccagcaaaaggtagatagggaaaaagaaaatcaraagcaagctgaagatgtgaaaaactaaaaggcagctgatgatggtgatgtcctgtctgtgctcctgaccaaggaaatgtaaccctggacagttctagayatcctgtttctgccacctcctgttcagccaggtcctcccattccctacccactctcagcccaagagaattacaaattcaggtagcacttgaatcattgagataagaagcatcttaacaggactgtgaaaccaactaattcaggatctctttagaaacattctaactttctcatttagaaaccaacaatcagaattatgtgaggcaactttgattaaaagtatcaaccatcccgtcattaagagaccctccataaaaatgccattaagtgaagttacataagtaccagctagtaaagccaa

SEQ ID NO: 46534 - DNA, 600 bp, Chicken  19866894287578_1
aacaggttggaagagatgagtaaaattcctagccttgggttgagctggagttttcactgaaaaacagtccatggtctaaaagataaacatgtccaaaggctgttgagcagtcttactttgaaagtttggtgcaattttacccttaaagcatacataaaaagtatgttacgacaacacaggaaatcttctgtagatcatcataacagcaaggtttggattttaagtgttacttacttatatatatatatatatatatgtttttaaatgcagtctcattatccatcaagcaaggacctaccygtttattttatttaagctaagatctatggagtccagcttcattaaaactagacttagatcacacaaaatgtcaagacaagcaataaaagaccaaactctgtatcactttcatatataccttgagggctataaaccctctatgcaatcttactaaaaccagatcagttctagactaggctcactaaagttgccagacatacagcagtaattttgcacatatggtcctcaagaagtggataattctaaaaagagcttaaattagctttgaaagacaaatttaatatcccataaccaaagagt

SEQ ID NO: 46535 - DNA, 600 bp, Chicken  19866894287579_1
acagtccagacagaataattaatttcagtcaatcgatcatttaacaaaaaactcacaggtgacctcaaaaataacagataatccaccgagagccagtcataacaatctttaaattctcttggaaaggaaaattaagtcagctatgtgtggctcagggcaacctaagctgtaaatctctcttttctgatctcttcatacagatgaaagagtaatgccgctctggattacatagaacaattatgtgttctgaaaactcagggaatcaggtttcagacagcgttaatcattaccaattaaccrcaacttttgccatctcttaaaagtcccagcaatgcttatgaacactcaagaatcacttcagtcagccagttcctcacatttaggtttctggatactaaaagtcctgctaatatttgttaagaaaaaggtcacttgccaaagcaaaaaaatacctaccttgtccttctactgcacacctcaaggaaggtggagttgactttaactgctcaagtaggatgctactagcgtgaacacatggcaggaacggttgatctggagtccatgctttgctctggcaaccactcagagaatacaggcatt

SEQ ID NO: 46536 - DNA, 599 bp, Chicken  19866894287581_1
  misc_feature (1)..(80): n is any nucleotide
nnnnnnnnnnnnnnnnnnnnnnnnnnnnnnnnnnnnnnnnnnnnnnnnnnnnnnnnnnnnnnnnnnnnnnnnnnnnnnnntctctgcttaacaaaaggccaacgtttatttcgaagtcaggagatctcctaacaacactatttgcaactcttcacattgtccatccaattttaacaaatattggtagctttcctattatacttcacatatctccccccattgatacacagagaagtcacagaagaaaaactggcaacatttgaggcattaagattccctttcagaaaacatctgtacccygaagagctatatcccacaacaaagctgcttcactttgagtttctctttgatgtatactattgtaaaggaggtacagaggtagtcttatctttgaggtttgggacaactgctttctttcttttatactaaatctactgtacctgttttgacacttccatacctgtttatcttacaggaaaaastaagtggtacaagatttgcaaaaattccagaagtcattttaaagaaagacatgcagcaaaactaaatgttagaaggttttgtasaaagctttaaccaacatcaccagaagtattaga

SEQ ID NO: 46537 - DNA, 600 bp, Chicken  19866894287581_2
ggtagctttcctattatacttcacatatctccccccattgatacacagagaagtcacagaagaaaaactggcaacatttgaggcattaagattccctttcagaaaacatctgtacccygaagagctatatcccacaacaaagctgcttcactttgagtttctctttgatgtatactattgtaaaggaggtacagaggtagtcttatctttgaggtttgggacaactgctttctttcttttatactaaatctactgtacctgttttgacacttccatacctgtttatcttacaggaaaaastaagtggtacaagatttgcaaaaattccagaagtcattttaaagaaagacatgcagcaaaactaaatgttagaaggttttgtasaaagctttaaccaacatcaccagaagtattagattgccatatgataagaagatattgttttcagactccttaagaattaacctgccaaatatgaactttatattataataaataattggacagtttatcatgtaaatttgtaagtgaaggtgtggtgactagaatctattggtttatttaaatagtgagtcgctttaatatcatacttcaatagta

SEQ ID NO: 46538 - DNA, 600 bp, Chicken  19866894287581_3
attaagattccctttcagaaaacatctgtacccygaagagctatatcccacaacaaagctgcttcactttgagtttctctttgatgtatactattgtaaaggaggtacagaggtagtcttatctttgaggtttgggacaactgctttctttcttttatactaaatctactgtacctgttttgacacttccatacctgtttatcttacaggaaaaastaagtggtacaagatttgcaaaaattccagaagtcattttaaagaaagacatgcagcaaaactaaatgttagaaggttttgtasaaagctttaaccaacatcaccagaagtattagattgccatatgataagaagatattgttttcagactccttaagaattaacctgccaaatatgaactttatattataataaataattggacagtttatcatgtaaatttgtaagtgaaggtgtggtgactagaatctattggtttatttaaatagtgagtcgctttaatatcatacttcaatagtaaactaatttagcctactaatcctgtttatttcctaaatattgttagtttctattcgtcaaatgatttttttcccagacacttac

SEQ ID NO: 46539 - DNA, 600 bp, Chicken  19866894287589_1
gtaatataaatatccataggctaaaataatagactaaacttatctattcttatagcagctccaactcatactatgtcattgtactgtggtttggaaagctaagattcaatttcattgatttccctggaaaaaaaataaataaataagaggaaatatattttctcagtcttagttaccataaggttacagtacagagctagagcatacactaaatgcctttcttcctattccattacctggttccctaagaagagaagaaacaggattttgaatacaaagaagaaacaaaacaaaaacacrtatccaatgcacagagacatatgtaaaaacattcatgtgcatgtatacttgtagtcaatataaatgactgtatttgcatgatcataaatactcttatgatgcaaagaaatatcagatacagattcagatagttaaacacagcattcattataaaatactcaaaatatatatttcatcaatttacctcactgatattaaaatgctttattttccatacaatcatccataaactccctcaaaagatatgctgttgatgtaacatctttccttcccatctactgctttccttaccatttacag

SEQ ID NO: 46540 - DNA, 600 bp, Chicken  19866894287590_1
gggaggcagttcagtgggaactggaatttggatggatccgaggtgggaatcattgctggaagtgctgctggtaatgaaattgcttgtgattgctcagagagccactagcctccagcacaccaactgtatctgctgggggtgctcagggcgctgttggtgaagatggggaattcagaaggcttcatcctaacaggtctggttaggctgtaggttggttgcgctcaagcagcaatatctagaaagcaaagtaagctcctggcagcaatgttcagtgcactgaacactccaggtgacagcatktgccaggaaacagagattaaattgattgaaaacactgaagagagtgagccctggtgagctccatgcccgtccctygcctttccatgctgggggtgttgttctggctgtgatcctctgtgcctgcctggcccaagtggggcatttccctgcccggccgctggcacctcacgctctggctttgcagcacctggggcacagtgctgggcckgcagtccccgggtggatggagctgagtgctcacctccttgcagattctgaaggggtacatggcckcttctgggcaamtttcagagctctgga

SEQ ID NO: 46541 - DNA, 600 bp, Chicken  19866894287590_2
gaaattgcttgtgattgctcagagagccactagcctccagcacaccaactgtatctgctgggggtgctcagggcgctgttggtgaagatggggaattcagaaggcttcatcctaacaggtctggttaggctgtaggttggttgcgctcaagcagcaatatctagaaagcaaagtaagctcctggcagcaatgttcagtgcactgaacactccaggtgacagcatktgccaggaaacagagattaaattgattgaaaacactgaagagagtgagccctggtgagctccatgcccgtccctygcctttccatgctgggggtgttgttctggctgtgatcctctgtgcctgcctggcccaagtggggcatttccctgcccggccgctggcacctcacgctctggctttgcagcacctggggcacagtgctgggcckgcagtccccgggtggatggagctgagtgctcacctccttgcagattctgaaggggtacatggcckcttctgggcaamtttcagagctctggaggctgaaagcataaattcagtgaaggttttcytccatccccagagctgcccttcacgatcccatttctggggaca

SEQ ID NO: 46542 - DNA, 600 bp, Chicken  19866894287590_3
aggttggttgcgctcaagcagcaatatctagaaagcaaagtaagctcctggcagcaatgttcagtgcactgaacactccaggtgacagcatktgccaggaaacagagattaaattgattgaaaacactgaagagagtgagccctggtgagctccatgcccgtccctygcctttccatgctgggggtgttgttctggctgtgatcctctgtgcctgcctggcccaagtggggcatttccctgcccggccgctggcacctcacgctctggctttgcagcacctggggcacagtgctgggcckgcagtccccgggtggatggagctgagtgctcacctccttgcagattctgaaggggtacatggcckcttctgggcaamtttcagagctctggaggctgaaagcataaattcagtgaaggttttcytccatccccagagctgcccttcacgatcccatttctggggacagcttgtgtggtcagcaggggtggtgaatggaggaaaaawggctgctttcctctgccatggagctgggcgctctgtaggtccaagggatcctgtgagaggctgatagctctcatcagctgctcttatcgttcct

SEQ ID NO: 46543 - DNA, 600 bp, Chicken  19866894287590_4
gcactgaacactccaggtgacagcatktgccaggaaacagagattaaattgattgaaaacactgaagagagtgagccctggtgagctccatgcccgtccctygcctttccatgctgggggtgttgttctggctgtgatcctctgtgcctgcctggcccaagtggggcatttccctgcccggccgctggcacctcacgctctggctttgcagcacctggggcacagtgctgggcckgcagtccccgggtggatggagctgagtgctcacctccttgcagattctgaaggggtacatggcckcttctgggcaamtttcagagctctggaggctgaaagcataaattcagtgaaggttttcytccatccccagagctgcccttcacgatcccatttctggggacagcttgtgtggtcagcaggggtggtgaatggaggaaaaawggctgctttcctctgccatggagctgggcgctctgtaggtccaagggatcctgtgagaggctgatagctctcatcagctgctcttatcgttcctctagctgtgatctcccatgtactctctgatgctgtgctccatacgtaggccagaacaaacctttg

SEQ ID NO: 46544 - DNA, 600 bp, Chicken  19866894287590_5
ccaggtgacagcatktgccaggaaacagagattaaattgattgaaaacactgaagagagtgagccctggtgagctccatgcccgtccctygcctttccatgctgggggtgttgttctggctgtgatcctctgtgcctgcctggcccaagtggggcatttccctgcccggccgctggcacctcacgctctggctttgcagcacctggggcacagtgctgggcckgcagtccccgggtggatggagctgagtgctcacctccttgcagattctgaaggggtacatggcckcttctgggcaamtttcagagctctggaggctgaaagcataaattcagtgaaggttttcytccatccccagagctgcccttcacgatcccatttctggggacagcttgtgtggtcagcaggggtggtgaatggaggaaaaawggctgctttcctctgccatggagctgggcgctctgtaggtccaagggatcctgtgagaggctgatagctctcatcagctgctcttatcgttcctctagctgtgatctcccatgtactctctgatgctgtgctccatacgtaggccagaacaaacctttgtgcagcatcttt

SEQ ID NO: 46545 - DNA, 600 bp, Chicken  19866894287590_6
cactgaagagagtgagccctggtgagctccatgcccgtccctygcctttccatgctgggggtgttgttctggctgtgatcctctgtgcctgcctggcccaagtggggcatttccctgcccggccgctggcacctcacgctctggctttgcagcacctggggcacagtgctgggcckgcagtccccgggtggatggagctgagtgctcacctccttgcagattctgaaggggtacatggcckcttctgggcaamtttcagagctctggaggctgaaagcataaattcagtgaaggttttcytccatccccagagctgcccttcacgatcccatttctggggacagcttgtgtggtcagcaggggtggtgaatggaggaaaaawggctgctttcctctgccatggagctgggcgctctgtaggtccaagggatcctgtgagaggctgatagctctcatcagctgctcttatcgttcctctagctgtgatctcccatgtactctctgatgctgtgctccatacgtaggccagaacaaacctttgtgcagcatctttgtctccaggatgtaagtaatgggtagaccttttgctggcactgctca

SEQ ID NO: 46546 - DNA, 600 bp, Chicken  19866894287590_7
ctgtgcctgcctggcccaagtggggcatttccctgcccggccgctggcacctcacgctctggctttgcagcacctggggcacagtgctgggcckgcagtccccgggtggatggagctgagtgctcacctccttgcagattctgaaggggtacatggcckcttctgggcaamtttcagagctctggaggctgaaagcataaattcagtgaaggttttcytccatccccagagctgcccttcacgatcccatttctggggacagcttgtgtggtcagcaggggtggtgaatggaggaaaaawggctgctttcctctgccatggagctgggcgctctgtaggtccaagggatcctgtgagaggctgatagctctcatcagctgctcttatcgttcctctagctgtgatctcccatgtactctctgatgctgtgctccatacgtaggccagaacaaacctttgtgcagcatctttgtctccaggatgtaagtaatgggtagaccttttgctggcactgctcagagccgcctgtcacccctgcaccagtggctggaggaagggaagttgttcttggagaggaaggggatgggatgaggcctctgc

SEQ ID NO: 46547 - DNA, 600 bp, Chicken  19866894287593_1
aaggacagaagcaaaatacagatatatatgtcactgttgaatcatgttactcttgacaatagattctcttaacattacacctcagctttgatttttttatgtggcgtgttatcataatgaactgcacggtttacaacagcgaggttaaatgattgccattactacaatttaagaagcaaaataactgtgcttcctagaacttcacacttatcttgcaagtgttgtactgtgctgtccctccaagaggacgttacatagttctgtttgtgttggtatcagaaagaaccaaaactacaacarcaaaaaaagacaaacacaaaccatcagactggttgcacctttaccttgttcctcagatgcatggtgttggcaattcaacacgttatggaacacaatataaattgtcccaacattcagtatttaaatattgacacatattaaaactgtctttattctgattattggactttttaatagttgctggattaaaaaatacctcactattgaaactattatttttccatgaaactgtacttaacttcttaacacaaatgctaccacaagtaagaaagtcattatacagaaataagacttcctttc

SEQ ID NO: 46548 - DNA, 599 bp, Chicken  19866894287596_1
  misc_feature (1)..(94): n is any nucleotide
nnnnnnnnnnnnnnnnnnnnnnnnnnnnnnnnnnnnnnnnnnnnnnnnnnnnnnnnnnnnnnnnnnnnnnnnnnnnnnnnnnnnnnnnnnnnnnctgaacgcacagtgcagcttcagttcatgcccgttttgattttagcatcattagacttactgtatgacatctccctacttggctgccagagatctgaaaatcttggatgatataataaattactcttttcctgtttagataatatttttcagcatctgcaaagaaacagtggtataggagttctaaaatccccaggtggataatawgcagataatatgcacaacatataatgcagtggaactgtccagcaccgagcacttgaagaatgacaattcagatgtgctcagtggtacaagtgaattcttcatacttaaaaaaaattcaagtggtcttcataggaagacctttctagaattatgctgtccattccactagaaaactytgcagaactgcatattattgactcttctaaacaaattcaaaaccgcataaacaaaactaatactgtagctggataggttatttcaatttttttttacgtgcaacatctgttctgaattggtgt

SEQ ID NO: 46549 - DNA, 600 bp, Chicken  19866894287596_2
ctgccagagatctgaaaatcttggatgatataataaattactcttttcctgtttagataatatttttcagcatctgcaaagaaacagtggtataggagttctaaaatccccaggtggataatawgcagataatatgcacaacatataatgcagtggaactgtccagcaccgagcacttgaagaatgacaattcagatgtgctcagtggtacaagtgaattcttcatacttaaaaaaaattcaagtggtcttcataggaagacctttctagaattatgctgtccattccactagaaaactytgcagaactgcatattattgactcttctaaacaaattcaaaaccgcataaacaaaactaatactgtagctggataggttatttcaatttttttttacgtgcaacatctgttctgaattggtgtctgtctacctcaatgcccagaagttcattttcgaatgagtatctgcatctgcaagtcagaaaccaagtgtggctttacttagtttgctgaagcgctgtaaggatgtttccataagtgatccgtcatgcgttcttcaggtctgcaaacagcataatctttgtcttaaaaaaaaataag

SEQ ID NO: 46550 - DNA, 600 bp, Chicken  19866894287600_1
gattcaccaggaatccctataaattgaaataaccaagccatgtacagttcaagcagaggtcttaaacctggtctcaggaagaaaaaaaggaataaatttgatagtttttattctatttatctaaaaataaaacaaaaataaaaaatccagtgcaatacgtatccacatcaaatgctcacaaagaagtgacccaaacatcccttgaaattaaaacaaaaaaccacaaaccaagagcaaataaacaaacgggaagaagggtcatgagaaaagaaggtaggttagggttgtatgccatacttyagattggttttattataacaccaaattaaaaaccaaaataaaaggtctcagaaaacaaacagaaattcaggtaatagatgtgttatatgcrttatagtcatgaaatagaatataggtactaaaactacgacaagaatgtgcttagttatgatattcttttgagatgggtctgccagcgttctttcctttttcctacattgaggccattcgtatcagccaggagacaagaatgcacccgatcccatccctcaatgggatgcttctacactacagggctcagctgtaggctttctattgtga

SEQ ID NO: 46551 - DNA, 600 bp, Chicken  19866894287600_2
ataaatttgatagtttttattctatttatctaaaaataaaacaaaaataaaaaatccagtgcaatacgtatccacatcaaatgctcacaaagaagtgacccaaacatcccttgaaattaaaacaaaaaaccacaaaccaagagcaaataaacaaacgggaagaagggtcatgagaaaagaaggtaggttagggttgtatgccatacttyagattggttttattataacaccaaattaaaaaccaaaataaaaggtctcagaaaacaaacagaaattcaggtaatagatgtgttatatgcrttatagtcatgaaatagaatataggtactaaaactacgacaagaatgtgcttagttatgatattcttttgagatgggtctgccagcgttctttcctttttcctacattgaggccattcgtatcagccaggagacaagaatgcacccgatcccatccctcaatgggatgcttctacactacagggctcagctgtaggctttctattgtgagccaacaggagggcaggacatccccctgctccaacagcagggactgagagagcagtgaaatttcagtgtgggttatgcgaaatgaaaggat

SEQ ID NO: 46552 - DNA, 599 bp, Chicken  19866894287603_1
  misc_feature (1)..(5): n is any nucleotide
nnnnnccatgcacatgagcatccttgaaccctgtggtctttgagctggaggcattttacactgatgttcagtggatttacatccttatagctctgcaggctcggcgttagctctgcagattagcagtggctgaggatgcagcccaaacttttgcatgagtttttgtttgcttcccgtgttgcttccagctgattaacagtgcagggtagctccgcactttctttctatgagagcagaacagggacagttacttctttactcctagtgtctctccaaaatgaacaaatgattcctattcgracataagtgagcatcaagaactacctcaaaaatgtcaccttaaaatacttcgcgttttgagattcagtcacagaactcaaaaaagaaattttccactgggggaggaaacaatgaaatgggtatgagwacattctttaattcattaagccaaagaatgtacatttcaccagacgtgatgaactcttcccatcctgcaaactctccttattagttaggtcaaagaccaagcgtctgtctgagcaatcctctcctgtagacgtgtatctcccaagcaagacagaaaacccattgacaggaaa

SEQ ID NO: 46553 - DNA, 600 bp, Chicken  19866894287603_2
ggctgaggatgcagcccaaacttttgcatgagtttttgtttgcttcccgtgttgcttccagctgattaacagtgcagggtagctccgcactttctttctatgagagcagaacagggacagttacttctttactcctagtgtctctccaaaatgaacaaatgattcctattcgracataagtgagcatcaagaactacctcaaaaatgtcaccttaaaatacttcgcgttttgagattcagtcacagaactcaaaaaagaaattttccactgggggaggaaacaatgaaatgggtatgagwacattctttaattcattaagccaaagaatgtacatttcaccagacgtgatgaactcttcccatcctgcaaactctccttattagttaggtcaaagaccaagcgtctgtctgagcaatcctctcctgtagacgtgtatctcccaagcaagacagaaaacccattgacaggaaacagtgggtaatttatgctgcttgtgccaaagctgcacatgttctgtcgataaatggaagacttaattcttcaggatagcaattcaggcactttaaagggtttcctaatgaggtaaaattcagtaatga

SEQ ID NO: 46554 - DNA, 600 bp, Chicken  19866894287609_1
agctttaaaaaaggaattttccttttatgacatctgcatttgattttaatatttgcatttgaatacaccagtatactgttccaatgaagagctgttttctggtttagttggtcattcgtcaagcaaattaatgtccctaaaagcacgtttgtaactggctcgatagggagagttatagaacaagacaattgtatttcactattatggtagaaaattttgccacatatacatgatctaatgcgtgtttttaacctgatgggagaaaaaggaaataggagaagttactgctaggatctctgygttactcagtttacagaatcatacaattgtttgagttggaagggacccttaaggccatctsgtccarcccccctacaataagcagggacacctacagctccatcaggtgctctgagccccgtccagcctgaccttgagtgtctccaaggatggggcatccacygccwctctgggcaaagtgtttcagtgttttatctacacatacaattaagaactacacagtttccatctttgcctgaaattccttcatataacttcattcttctgcaacatatacactgatgattaatttggcaacct

SEQ ID NO: 46555 - DNA, 600 bp, Chicken  19866894287609_2
aatacaccagtatactgttccaatgaagagctgttttctggtttagttggtcattcgtcaagcaaattaatgtccctaaaagcacgtttgtaactggctcgatagggagagttatagaacaagacaattgtatttcactattatggtagaaaattttgccacatatacatgatctaatgcgtgtttttaacctgatgggagaaaaaggaaataggagaagttactgctaggatctctgygttactcagtttacagaatcatacaattgtttgagttggaagggacccttaaggccatctsgtccarcccccctacaataagcagggacacctacagctccatcaggtgctctgagccccgtccagcctgaccttgagtgtctccaaggatggggcatccacygccwctctgggcaaagtgtttcagtgttttatctacacatacaattaagaactacacagtttccatctttgcctgaaattccttcatataacttcattcttctgcaacatatacactgatgattaatttggcaacctctgacagcagcacgtatgatactactgaagtttctcagcagaccaactaaacacaggcatg

SEQ ID NO: 46556 - DNA, 600 bp, Chicken  19866894287609_3
ccagtatactgttccaatgaagagctgttttctggtttagttggtcattcgtcaagcaaattaatgtccctaaaagcacgtttgtaactggctcgatagggagagttatagaacaagacaattgtatttcactattatggtagaaaattttgccacatatacatgatctaatgcgtgtttttaacctgatgggagaaaaaggaaataggagaagttactgctaggatctctgygttactcagtttacagaatcatacaattgtttgagttggaagggacccttaaggccatctsgtccarcccccctacaataagcagggacacctacagctccatcaggtgctctgagccccgtccagcctgaccttgagtgtctccaaggatggggcatccacygccwctctgggcaaagtgtttcagtgttttatctacacatacaattaagaactacacagtttccatctttgcctgaaattccttcatataacttcattcttctgcaacatatacactgatgattaatttggcaacctctgacagcagcacgtatgatactactgaagtttctcagcagaccaactaaacacaggcatgtgcttt

SEQ ID NO: 46557 - DNA, 600 bp, Chicken  19866894287609_4
tagggagagttatagaacaagacaattgtatttcactattatggtagaaaattttgccacatatacatgatctaatgcgtgtttttaacctgatgggagaaaaaggaaataggagaagttactgctaggatctctgygttactcagtttacagaatcatacaattgtttgagttggaagggacccttaaggccatctsgtccarcccccctacaataagcagggacacctacagctccatcaggtgctctgagccccgtccagcctgaccttgagtgtctccaaggatggggcatccacygccwctctgggcaaagtgtttcagtgttttatctacacatacaattaagaactacacagtttccatctttgcctgaaattccttcatataacttcattcttctgcaacatatacactgatgattaatttggcaacctctgacagcagcacgtatgatactactgaagtttctcagcagaccaactaaacacaggcatgtgctttatctcagctccttctccttcccccttcttagtgggcatgtgatagatggcatcagctgagcaatgcagtgtttgctacaagaagccagtgacagca

SEQ ID NO: 46558 - DNA, 600 bp, Chicken  19866894287609_5
gagagttatagaacaagacaattgtatttcactattatggtagaaaattttgccacatatacatgatctaatgcgtgtttttaacctgatgggagaaaaaggaaataggagaagttactgctaggatctctgygttactcagtttacagaatcatacaattgtttgagttggaagggacccttaaggccatctsgtccarcccccctacaataagcagggacacctacagctccatcaggtgctctgagccccgtccagcctgaccttgagtgtctccaaggatggggcatccacygccwctctgggcaaagtgtttcagtgttttatctacacatacaattaagaactacacagtttccatctttgcctgaaattccttcatataacttcattcttctgcaacatatacactgatgattaatttggcaacctctgacagcagcacgtatgatactactgaagtttctcagcagaccaactaaacacaggcatgtgctttatctcagctccttctccttcccccttcttagtgggcatgtgatagatggcatcagctgagcaatgcagtgtttgctacaagaagccagtgacagcaaatc

SEQ ID NO: 46559 - DNA, 600 bp, Chicken  19866894287612_1
taatactgagagatccggcagcactccaagtatcgtgtgggcaaaacacctaacttccaataagcatatattctgaaatctcccttgcagccgcagtctctttacccttcatcctttaaagcgtcttcttgatttattagcagtcattaccattctggtacattcccaaaatagatgaactaaccctgtagctgcagagaacagcaggtagcgaatggtttagaggtctctctctgtgtttctcggtactagaagttttgagaaggtttcgaggcagctgagagaaacttcttgaaaagygcccttctctttctacttgaaatacatttccttgttgcagtttgatattgggaagcagcagcagccagcagcttccaaagggacagggagtcagcttgtgaaagtgagcatggcaccggcagtgccctcacaaatgggaacccatcccacaggctttctgtaggccttctgtgcaaaactgatagaaaatattttgttctgcaatatggtgttttggcctttcttctggaggtttcttatgggatctattggctgtcttaggatggtgaaagtgctatgtcagttcataatctcagtatt

SEQ ID NO: 46560 - DNA, 599 bp, Chicken  19866894287620_1
  misc_feature (1)..(101): n is any nucleotide
nnnnnnnnnnnnnnnnnnnnnnnnnnnnnnnnnnnnnnnnnnnnnnnnnnnnnnnnnnnnnnnnnnnnnnnnnnnnnnnnnnnnnnnnnnnnnnnnnnnnnacctgggttccccataatggcaaaatgtacaggactgtcctaggactgcaattaactgagctccactctcagctctccctgggtttaagtactgtaaaatgaatgcaaagtcgacaagcaatttcatgaggatatgggtcagatattctgtgactttttggcagatcccttagtctataaataactgcttctcccatcwataaaactaatgttataattagcagttcacaggcttgctgtaaaactaactagttgaaggtctgtgaagccttcatagaagaaaaatactaagtagaaatatcatattttaagaaaaacatctgtgcatttctaactctgtatcrtaggatgaagaacctgcccaaaattctctcttaaacagtttaattggtctcatgattatctgtcagataaaaaggagtggtctttgttaaattttttgtgctctactttcctgtcaaagattttttggttaacartagttccctgtctgaagta

SEQ ID NO: 46561 - DNA, 600 bp, Chicken  19866894287620_2
actgcaattaactgagctccactctcagctctccctgggtttaagtactgtaaaatgaatgcaaagtcgacaagcaatttcatgaggatatgggtcagatattctgtgactttttggcagatcccttagtctataaataactgcttctcccatcwataaaactaatgttataattagcagttcacaggcttgctgtaaaactaactagttgaaggtctgtgaagccttcatagaagaaaaatactaagtagaaatatcatattttaagaaaaacatctgtgcatttctaactctgtatcrtaggatgaagaacctgcccaaaattctctcttaaacagtttaattggtctcatgattatctgtcagataaaaaggagtggtctttgttaaattttttgtgctctactttcctgtcaaagattttttggttaacartagttccctgtctgaagtaagtctgggagcagataaagtattcccactgcactgaagcaaagtaatacagtcaaggaatgatgcacttttcacaatactacactccacgtttattgatagtgatgattcattctagttcttattttaggtgatgggtgaagacat

SEQ ID NO: 46562 - DNA, 600 bp, Chicken  19866894287620_3
aataactgcttctcccatcwataaaactaatgttataattagcagttcacaggcttgctgtaaaactaactagttgaaggtctgtgaagccttcatagaagaaaaatactaagtagaaatatcatattttaagaaaaacatctgtgcatttctaactctgtatcrtaggatgaagaacctgcccaaaattctctcttaaacagtttaattggtctcatgattatctgtcagataaaaaggagtggtctttgttaaattttttgtgctctactttcctgtcaaagattttttggttaacartagttccctgtctgaagtaagtctgggagcagataaagtattcccactgcactgaagcaaagtaatacagtcaaggaatgatgcacttttcacaatactacactccacgtttattgatagtgatgattcattctagttcttattttaggtgatgggtgaagacatatatgatttgtaattagctgttttttttttttttatcaagaaatctgaaaaactcttttccttctcatgatccaatctttatctctgatattcagtttttttcctgatcttttggtcaaaactgccatctttgac

SEQ ID NO: 46563 - DNA, 583 bp, Chicken  19866894287620_4
atgggtgaagacatatatgatttgtaattagctgttttttttttttttatcaagaaatctgaaaaactcttttccttctcatgatccaatctttatctctgatattcagtttttttcctgatcttttggtcaaaactgccatctttgacatatgctgtatttgggatcaagttctgcttgtatcaagcttctgagactctttatactcaggatctacaggtgacacatctttttggtttctctttctttgtttctagtgacagcagtagaacatgtattggtcatttcatcatatttcartacctcctttccacttcagattactggatggttcagtcaacaaatgtaagtaaaaagaccctgttgctactggttttacaaaaaatgtgataacctcattttggtttggctttgattgtttgtttagcaaagatgaagatactgaagttatgaataaaatgtttaaaggctgacatgtttgtattctcagtataacattttgtgattttcttgaattaatcacacctctaacttgattatgaatcttgctgggtatgagtgtctaattactccagcagtgaaa

SEQ ID NO: 46564 - DNA, 599 bp, Chicken  19866894287622_1
  misc_feature (1)..(113): n is any nucleotide
nnnnnnnnnnnnnnnnnnnnnnnnnnnnnnnnnnnnnnnnnnnnnnnnnnnnnnnnnnnnnnnnnnnnnnnnnnnnnnnnnnnnnnnnnnnnnnnnnnnnnnnnnnnnnnnnnaaaaagcactcaccctctccaaattaatagaaccaacaccctccccattcccaaattaactgaaaggaataactttcatgcaatctgtactgaagcaattctgttttagctccactgttatggacctcttcactggttacagagattagcttgtgcaggaaaactatactatgccacttagcaaaaraacacagaatgagcagccattatgtaaatagcaaaattattttgtctgaagagcctgcaatgcaatctagacagtcagctgttgcaaaaggtctcactgtttttcacaggaatggtgaaccctccatttaaaagtcttttaaacctgctttctcaatatcaccctctcttatttagtcccattacatatgatgaagcacatcacaacatctgggggaaaaagaagctatcttctacaaaacaacacactcctccactcataaaacataataattaatatcttgaaataaacctgagagg

SEQ ID NO: 46565 - DNA, 600 bp, Chicken  19866894287622_2
tattttgtctgaagagcctgcaatgcaatctagacagtcagctgttgcaaaaggtctcactgtttttcacaggaatggtgaaccctccatttaaaagtcttttaaacctgctttctcaatatcaccctctcttatttagtcccattacatatgatgaagcacatcacaacatctgggggaaaaagaagctatcttctacaaaacaacacactcctccactcataaaacataataattaatatcttgaaataaacctgagaggtttcctagagaaaggagctgtcttaacttgaccaataygagatgaaatacttacagatgcaaatccaggcacgttctctttgctgctgtattctctgcagttatacctcagcattaaatcatttatgcccatttggatcagagtgttagtgactaacttgtatacccagttcactgccttagatatagcactgagtgactgatcttgttcctttgagaaggtgctggaggattttacctttaagattgtctttcaaggttcccatcacagagcacttttttctggtcttcrtaagaaaaagagggagaatcacttaaacactgctggctgtgctgcta

SEQ ID NO: 46566 - DNA, 456 bp, Chicken  19866894287622_3
cctgagaggtttcctagagaaaggagctgtcttaacttgaccaataygagatgaaatacttacagatgcaaatccaggcacgttctctttgctgctgtattctctgcagttatacctcagcattaaatcatttatgcccatttggatcagagtgttagtgactaacttgtatacccagttcactgccttagatatagcactgagtgactgatcttgttcctttgagaaggtgctggaggattttacctttaagattgtctttcaaggttcccatcacagagcacttttttctggtcttcrtaagaaaaagagggagaatcacttaaacactgctggctgtgctgctagcaacttggacacaacttagaagaggctgtagtaccttcaggacatcatgctttgactgaagaatggctgacttaattgctagctgcatgaacatgtcctggaaagcaa

SEQ ID NO: 46567 - DNA, 600 bp, Chicken  19866894287628_1
gctacctctttcttctaacacggtgctgctgtgctcagttgatggagaaagaaagatgagaaacagatcccagagtgatcaagtgttgtaactcccatgggcatagctatggctcatttatacggaaggagatggtgaatcatggaagagtaaaatctcagaaataagcagagatggtgaagaagggaaagtgagctctgggagacagaggggaagatgaaggctgtctgtgagtgtgggtggagaggaaaacaaggatggtccttcgtggtcagcagtcagatcagaaactgtccatayggtgtccagactgcagtcctcacacatcagatgtctggatgctcctccattatccacgtacagctctggctcagcctcacaaggtaaaatgtggcacaggtagggcagagctgaagtccagagtgatgccagaggtgttccagctgtggggaatttgttaggtcaaaaagccaggggaaaaattgcataaaataataaagaactggtttctcctatggggagatattttgttcgaagctgtgcaaccagcactggcagtgaacttggctggagaatgacattctctttcaatggatgcat

SEQ ID NO: 46568 - DNA, 600 bp, Chicken  19866894287630_1
taaggaccagactaagtgcacaaatatttcttttttattttcaaagtaaaactagaaagtctgtttcatcatggcaagtccttctagatccaagtgcttttctgaaactttgctgttgaacatggtatttattagagttgtgcacaaatacctaatgttgtaaacataccacatacatacattaatgtcacattcaggttgcaaaacatttataactgtcacgtctttcctctcttttctctctttttgcacatatccgaacatataagcagccttgctcctggctgatgaatgaggcasttagtgtaaagttgtaaaattgcaccttttgtcccaatatcactgtgtgctctgcagactttggatattctgtgcacagggatcacagtttctttgttggtgggtatatggcagagacaataatccacagtttgggatgctggttgaaaaaaataagatacaaaaaaatgcaaacagggcttgttgctgttgcagaatagaataatccaagttggaaagggaaacaaagctgtgaagggtcgggagcacaagtcttatgaggaccagcttagggaactgggactgttcaatcagaagagt

SEQ ID NO: 46569 - DNA, 599 bp, Chicken  19866894287634_1
  misc_feature (1)..(37): n is any nucleotide
nnnnnnnnnnnnnnnnnnnnnnnnnnnnnnnnnnnnntgggtcctcctgcttggccttgctgctcccctgtaacccctctcccccggacagagggtggcagttgagatgaagatggtggcacagaggtgccagcagccacccacgcacctggagcttggggttgtgttgggggccccatgcccctgttgacacccacctcgcccaggtggtgcgcatgacccagcagcaggagaaccccaaattcctgtcacacttcaagaggaggttcgtcatccaccggggcaagcggaaggagaagrccatcccaccccagcccagcctgtaccacatccgcaccaatggtggagccctctgcaccaggtcagctccccccaacctgttggtgctgcccaggaatgctgggggaccacagctcccgctgactgtgcctcacgggcttctcttctaggtgcatccagatcaacacagactctgggctgctcaactctgagttctgcttcatcctcaaggtactgcctgaggctgagcatgttcccccagcagcaaggggggggctcagccacacatccccagccccgatgttctgctcttcccaggt

SEQ ID NO: 46570 - DNA, 390 bp, Chicken  19866894287649_1
  misc_feature (1)..(217): n is any nucleotide
nnnnnnnnnnnnnnnnnnnnnnnnnnnnnnnnnnnnnnnnnnnnnnnnnnnnnnnnnnnnnnnnnnnnnnnnnnnnnnnnnnnnnnnnnnnnnnnnnnnnnnnnnnnnnnnnnnnnnnnnnnnnnnnnnnnnnnnnnnnnnnnnnnnnnnnnnnnnnnnnnnnnnnnnnnnnnnnnnnnnnnnnnnnnnnnnnnnnnnnnnnnnnnnnnnnnnnnnnttccggagataactttagtccggagcagcagctggaagagacagacggtccacgggcagagcaaaacccttccccggctcccycaggtgagcagcggccgaggggaggctgcccccgccccgccggtgagtgctggggaggggagggcacggggctgggcttcgcattgccgg

SEQ ID NO: 46571 - DNA, 600 bp, Chicken  19866894287654_1
gatccctgcttacctgaggactttccaggccttttgaaggtaagctggttttctttgtcttattttttgcagctagtgctgtcctgtctaaggagattctttcaatctgtagcctgaggtgctgctgttctgctgccttgttatgttttctattgctttactggctgttacatattaaaacaatgggataatgatagaggtagaacctgaaagatgtgaaatatgtttgggtaaagttactacacgtactgctggacaaaaacttgtcacccatgaggtatggggttttggggcatgcayaagttgatagtatgagctctgtaattattagtaaaaataaaagggctctatcagcagatctcaataactgtgccacaaagaattagaatcctttgtaarataggaaactgagacatatagagctgtggagtgactgacagtcatccgcaaggctaatgtcagctctgggaacagaaccaaggacattgtaatccctggacagaaatactcaagttatcattcctttcttccccaaataccattctgtcagtgaatcattatcttgatctgggaacgttgtttttcaggcctttgtgtcca

SEQ ID NO: 46572 - DNA, 593 bp, Chicken  19866894287654_2
tttcaatctgtagcctgaggtgctgctgttctgctgccttgttatgttttctattgctttactggctgttacatattaaaacaatgggataatgatagaggtagaacctgaaagatgtgaaatatgtttgggtaaagttactacacgtactgctggacaaaaacttgtcacccatgaggtatggggttttggggcatgcayaagttgatagtatgagctctgtaattattagtaaaaataaaagggctctatcagcagatctcaataactgtgccacaaagaattagaatcctttgtaarataggaaactgagacatatagagctgtggagtgactgacagtcatccgcaaggctaatgtcagctctgggaacagaaccaaggacattgtaatccctggacagaaatactcaagttatcattcctttcttccccaaataccattctgtcagtgaatcattatcttgatctgggaacgttgtttttcaggcctttgtgtccattcgttttctggtgtccctattaaatagatgatttttatcccctggtgattcctgtcatgagaacatctgtgcatggggatggacaaaaagt

SEQ ID NO: 46573 - DNA, 600 bp, Chicken  19866894287656_1
ttagaggtcttttcccaacttcaaatgattctatgattcgaaacgaactgctgcaatagtgatcatacatggtgctggtgtcctatgcatcccaaagcccctctacactaacagaccccaatgtggcacctccccccctggctgtaagcaggaggagcatatccctttttctccatatccctttttctgcagtcatgttactctcagcaagttctactgcacctctccctggttaaaaacccaatgaatggatcatcttccttgatgatcacctgtcatcttccacatgcccacccatcytcctgatagagggctccttcagaagggaaaaggaaggggattcttttgcagaagcctgttacaagttgtattctatgatccatgatctcactcaagttgctcacagcagagagtgayctgcaagagcacacagacctgccacaggatctgcagtcatttcccgaggtctctgaagcacagggttttgccagtccttaggagaagcaggccttgaaatcaatgcattgaagcacatccctctcaatgcctcattcaaggactacccaactgacactgatggctttcaaggtaatttttttt

SEQ ID NO: 46574 - DNA, 600 bp, Chicken  19866894287656_2
ccaatgtggcacctccccccctggctgtaagcaggaggagcatatccctttttctccatatccctttttctgcagtcatgttactctcagcaagttctactgcacctctccctggttaaaaacccaatgaatggatcatcttccttgatgatcacctgtcatcttccacatgcccacccatcytcctgatagagggctccttcagaagggaaaaggaaggggattcttttgcagaagcctgttacaagttgtattctatgatccatgatctcactcaagttgctcacagcagagagtgayctgcaagagcacacagacctgccacaggatctgcagtcatttcccgaggtctctgaagcacagggttttgccagtccttaggagaagcaggccttgaaatcaatgcattgaagcacatccctctcaatgcctcattcaaggactacccaactgacactgatggctttcaaggtaatttttttttttttggcattwcttgtaatgccagggtcacgattcttgaaggactcctctctaagctccattaagtgagcacaatggaccttctgcacccaaggcagtcatgcttctgtgctctgc

SEQ ID NO: 46575 - DNA, 600 bp, Chicken  19866894287656_3
cccatcytcctgatagagggctccttcagaagggaaaaggaaggggattcttttgcagaagcctgttacaagttgtattctatgatccatgatctcactcaagttgctcacagcagagagtgayctgcaagagcacacagacctgccacaggatctgcagtcatttcccgaggtctctgaagcacagggttttgccagtccttaggagaagcaggccttgaaatcaatgcattgaagcacatccctctcaatgcctcattcaaggactacccaactgacactgatggctttcaaggtaayttttttttttttggcattwcttgtaatgccagggtcacgattcttgaaggactcctctctaagctccattaagtgagcacaatggaccttctgcacccaaggcagtcatgcttctgtgctctgcagcacacacaggtgcaaaggtcagcagcacatctcaccctcctctgcctccttactgctggaaggagccggtggggatgcgtgcaacctgtgctgggtgcagagcacgcagcaggactcctccctgccatgcacttacacacaagtacccagccagctccagaccactctgctgtt

SEQ ID NO: 46576 - DNA, 600 bp, Chicken  19866894287656_4
gctccttcagaagggaaaaggaaggggattcttttgcagaagcctgttacaagttgtattctatgatccatgatctcactcaagttgctcacagcagagagtgayctgcaagagcacacagacctgccacaggatctgcagtcatttcccgaggtctctgaagcacagggttttgccagtccttaggagaagcaggccttgaaatcaatgcattgaagcacatccctctcaatgcctcattcaaggactacccaactgacactgatggctttcaaggtaatttttttttttttggcattwcttgtaatgccagggtcacgattcttgaaggactcctctctaagctccattaagtgagcacaatggaccttctgcacccaaggcagtcatgcttctgtgctctgcagcacacacaggtgcaaaggtcagcagcacatctcaccctcctctgcctccttactgctggaaggagccggtggggatgcgtgcaacctgtgctgggtgcagagcacgcagcaggactcctccctgccatgcacttacacacaagtacccagccagctccagaccactctgctgttcgtgcccttatcaggcaca

SEQ ID NO: 46577 - DNA, 600 bp, Chicken  19866894287661_1
tcctgcaaaaatcccctacaactgtcagctgaagtgcaacaagagattcaaacgcaccgttcctgagtgctttaagctgcagtgtattatccctttctttattaagtatctaaaacacacctactgaaacatggaagatgcattctaatcgtgtctacactaacaagcccttgtgcacagaatcatagaatggcctgggttgaaaaggaccacaatgctcatccagttccaaccccctgctatgtgcaggatcgccaaccagcagaccaggctgcccagagccacatccagcctggcctygaatgcctgcarggatggggcatccacagcctccttgggcaacctgttcagtgcgtcaccaccctctgggcaaaaaacttccacctaatgcctccccgtctcagtttaaaaccattcccccttgtcttattactattagcccttgtaaacagatataccccctcctgtttatacacgcctttcaaatactggaaggccacaataaggtctccccaaagccctgtttcaccccagcctccaagaggaccaagagatgcccagcccaggactggtgctcagcactgcgcagcccccagcagc

SEQ ID NO: 46578 - DNA, 600 bp, Chicken  19866894287661_2
cccctacaactgtcagctgaagtgcaacaagagattcaaacgcaccgttcctgagtgctttaagctgcagtgtattatccctttctttattaagtatctaaaacacacctactgaaacatggaagatgcattctaatcgtgtctacactaacaagcccttgtgcacagaatcatagaatggcctgggttgaaaaggaccacaatgctcatccagttccaaccccctgctatgtgcaggatcgccaaccagcagaccaggctgcccagagccacatccagcctggcctygaatgcctgcarggatggggcatccacagcctccttgggcaacctgttcagtgcgtcaccaccctctgggcaaaaaacttccacctaatgcctccccgtctcagtttaaaaccattcccccttgtcttattactattagcccttgtaaacagatataccccctcctgtttatacacgcctttcaaatactggaaggccacaataaggtctccccaaagccctgtttcaccccagcctccaagaggaccaagagatgcccagcccaggactggtgctcagcactgcgcagcccccagcagccaaacccagcag

SEQ ID NO: 46579 - DNA, 423 bp, Chicken  19866894287661_3
gcatccacagcctccttgggcaacctgttcagtgcgtcaccaccctctgggcaaaaaacttccacctaatgcctccccgtctcagtttaaaaccattcccccttgtcttattactattagcccttgtaaacagatataccccctcctgtttatacacgcctttcaaatactggaaggccacaataaggtctccccaaagccctgtttcaccccagcctccaagaggaccaagagatgcccagcccaggactggtgctcagcactgcgcagcccccagcagccaaacccagcagtccccargctgccacattacaggtcagcaaagcagaatggcagctagaatgtggccatgctcctccatcttgatttaaaggaaaagtctagaagtagggtaaaaaaaccaacaacaaacaagcctgtcac

SEQ ID NO: 46580 - DNA, 599 bp, Chicken  19866894287667_1
  misc_feature (1)..(55): n is any nucleotide
nnnnnnnnnnnnnnnnnnnnnnnnnnnnnnnnnnnnnnnnnnnnnnnnnnnnnnnctccctacagatgatttccaatgaagatgaatttttatcctattgctctatggggaacagggccactgccatccaaatatataacaggaataaaaaacgtccaacctcagtttactcttaaggaagatagcaagctctgaatcaatccctaagcatttcctctcttaatgcattttgtctctacaagacagtgcatacatctcaagtatatactaaaagaatcttctgactccaattaccagcaktgtccagcatgagattgctcctgaggaagatgcaggaactgagtragaggatgtaggaaaatctcacagtagttagcataactcttyagcttcagataggcttctgctcggaaacatttggttctcatttttaaacattaaggcctgttagagtggatacttctgttatccatactaacatactcaattttgcagtcagygtaacttctcatagtaatgatttttccatactgtaactgttttatgcagaggttttatttttaattccggttttaaatttcattagtagtagttttcat

SEQ ID NO: 46581 - DNA, 599 bp, Chicken  19866894287667_2
  misc_feature (1)..(10): n is any nucleotide
nnnnnnnnnnctccctacagatgatttccaatgaagatgaatttttatcctattgctctatggggaacagggccactgccatccaaatatataacaggaataaaaaacgtccaacctcagtttactcttaaggaagatagcaagctctgaatcaatccctaagcatttcctctcttaatgcattttgtctctacaagacagtgcatacatctcaagtatatactaaaagaatcttctgactccaattaccagcaktgtccagcatgagattgctcctgaggaagatgcaggaactgagtragaggatgtaggaaaatctcacagtagttagcataactcttyagcttcagataggcttctgctcggaaacatttggttctcatttttaaacattaaggcctgttagagtggatacttctgttatccatactaacatactcaattttgcagtcagygtaacttctcatagtaatgatttttccatactgtaactgttttatgcagaggttttatttttaattccggttttaaatttcattagtagtagttttcatgaccatggaaagcagaagctcctaatctatcttttcttttccatt

SEQ ID NO: 46582 - DNA, 600 bp, Chicken  19866894287667_3
ttttatcctattgctctatggggaacagggccactgccatccaaatatataacaggaataaaaaacgtccaacctcagtttactcttaaggaagatagcaagctctgaatcaatccctaagcatttcctctcttaatgcattttgtctctacaagacagtgcatacatctcaagtatatactaaaagaatcttctgactccaattaccagcaktgtccagcatgagattgctcctgaggaagatgcaggaactgagtragaggatgtaggaaaatctcacagtagttagcataactcttyagcttcagataggcttctgctcggaaacatttggttctcatttttaaacattaaggcctgttagagtggatacttctgttatccatactaacatactcaattttgcagtcagygtaacttctcatagtaatgatttttccatactgtaactgttttatgcagaggttttatttttaattccggttttaaatttcattagtagtagttttcatgaccatggaaagcagaagctcctaatctatcttttcttttccatttctgactttgtgtaatgatttgtaattgttatcttattgaaac

SEQ ID NO: 46583 - DNA, 600 bp, Chicken  19866894287667_4
tccctaagcatttcctctcttaatgcattttgtctctacaagacagtgcatacatctcaagtatatactaaaagaatcttctgactccaattaccagcaktgtccagcatgagattgctcctgaggaagatgcaggaactgagtragaggatgtaggaaaatctcacagtagttagcataactcttyagcttcagataggcttctgctcggaaacatttggttctcatttttaaacattaaggcctgttagagtggatacttctgttatccatactaacatactcaattttgcagtcagygtaacttctcatagtaatgatttttccatactgtaactgttttatgcagaggttttatttttaattccggttttaaatttcattagtagtagttttcatgaccatggaaagcagaagctcctaatctatcttttcttttccatttctgactttgtgtaatgatttgtaattgttatcttattgaaacatctcaccataataaacattcagtatttttcagtattgctgtaatatttttctgtacttgcttttctacacagtgttgacgtattctctttatctttctgacctcttatttgt

SEQ ID NO: 46584 - DNA, 600 bp, Chicken  19866894287679_1
tttctcattaaaaaggactattcagacttcagaatgtaggtaagcaaattaaaaatttattagagagattttaaaagaaaatattaaatgagaatgatctttcaaaaaggaacatttctggtatagttttctatccaaatttagtttagtgaattgattggttgggagcaaaggcaagataaatttgtggtaaaggccacagttggtactaaatgaatgagaataaaggtagcttctatagagatgtccagactgcaggagaatctgggcttaccttcttttaattaaagagctaggtgyaatgatcaaacagctagaaatggggaatgtgggctgtaagtgaaataaaaaatgaattaatgttggcaactaaaaaaaaaaaacaccacctttttaaaatcagaacaggctggagagggttcagataagatccctagattgatgtgaaatttggaaagcttttaatgagagactgtataggctcaagagaatttactctcatctttatgcttgctttactatacagtcccagctacagtgaagttctcaccataccagcattgccagtacccactgagcctcctgccacctattactgag

SEQ ID NO: 46585 - DNA, 599 bp, Chicken  19866894287681_1
  misc_feature (1)..(72): n is any nucleotide
nnnnnnnnnnnnnnnnnnnnnnnnnnnnnnnnnnnnnnnnnnnnnnnnnnnnnnnnnnnnnnnnnnnnnnnnttatattatgtaaattatgtaatatgtatagttaaaatgatgaactttgaaacaacgaaatatcagtggaagtatagatattgctctaatctgaaccccaaaccgaagcttatggtcagtacttcttgtttgtttttgcttcacaatgagctggaagctatgttatgaaatatttacatttcacatagccatgaaattctgatccttaatcagctttcagctgagcayttgcaattccaaatgccttcagcatgaactgtaagcgccaacacatctgaaagtcattttaggagcataaaacaaaaagagaactgcagtttgatagtttatagagmtcattttgcagcctgcagaggagatagagttgattctaattcctcaggttatgactttccagtactcctgccctgctgcacgacatgcccagcttctagccagactgttgggcaaagctcttggctgccaccaggcacattctcgtgcttcagtatttaaagttaggttaaatcctttctgtgtgtgtggtg

SEQ ID NO: 46586 - DNA, 600 bp, Chicken  19866894287681_2
aatgatgaactttgaaacaacgaaatatcagtggaagtatagatattgctctaatctgaaccccaaaccgaagcttatggtcagtacttcttgtttgtttttgcttcacaatgagctggaagctatgttatgaaatatttacatttcacatagccatgaaattctgatccttaatcagctttcagctgagcayttgcaattccaaatgccttcagcatgaactgtaagcgccaacacatctgaaagtcattttaggagcataaaacaaaaagagaactgcagtttgatagtttatagagmtcattttgcagcctgcagaggagatagagttgattctaattcctcaggttatgactttccagtactcctgccctgctgcacgacatgcccagcttctagccagactgttgggcaaagctcttggctgccaccaggcacattctcgtgcttcagtatttaaagttaggttaaatcctttctgtgtgtgtggtggatgtggacacactagctctactgagaattctcccatcagtttatggatgttaactctacagaactgtaagtgtctgttttgacctggagatgttcaagaaccatgaa

SEQ ID NO: 46587 - DNA, 599 bp, Chicken  19866894287684_1
  misc_feature (1)..(65): n is any nucleotide
nnnnnnnnnnnnnnnnnnnnnnnnnnnnnnnnnnnnnnnnnnnnnnnnnnnnnnnnnnnnnnnnnaaagttccacaggcccataaagtcaccacagggaatggcagcttcccacatacagaggagaaacgcacctgtcttctgctcagcaaactgctaacgttcgagactaaccagttccaatgaaactggacttcaaaacatttttcatagtttggaatgtcagctgaaactgaacacaaaaataaaacctcaccaaaaagtaaattgggcattttgacgtgcagccgaggaacttggraaaatacagcagcagtacatgagtggagagactcaaggctgacattcaccaggtagggacatggcagccatgaaccatttgtctgcacaaagtccactctgcttttgcaatccctgccaaggggctgtaagacatgaaaggccgggctctttgctcttcgcctgcaactcgaagaygctgcaggaagtcaattttttactcagctggctgaaactcagtgtgaccgactgcctgggcgaagcccaaggcagctttaacatttggcacccatattgtgcacgtttccttttaagaacatg

SEQ ID NO: 46588 - DNA, 600 bp, Chicken  19866894287684_2
ttccaatgaaactggacttcaaaacatttttcatagtttggaatgtcagctgaaactgaacacaaaaataaaacctcaccaaaaagtaaattgggcattttgacgtgcagccgaggaacttggraaaatacagcagcagtacatgagtggagagactcaaggctgacattcaccaggtagggacatggcagccatgaaccatttgtctgcacaaagtccactctgcttttgcaatccctgccaaggggctgtaagacatgaaaggccgggctctttgctcttcgcctgcaactcgaagaygctgcaggaagtcaattttttactcagctggctgaaactcagtgtgaccgactgcctgggcgaagcccaaggcagctttaacatttggcacccatattgtgcacgtttccttttaagaacatggctctatggcaaaggtgtgcattctaagattctgatacaaacttgttgctgaagrgagcagcatccttgctgttgttttacactggagcttaatacccagctgaatgcttcagtttacctgcagaaatgaggaagtttgcactgtagctggccttgaacagagagactgcataagaa

SEQ ID NO: 46589 - DNA, 600 bp, Chicken  19866894287684_3
agggacatggcagccatgaaccatttgtctgcacaaagtccactctgcttttgcaatccctgccaaggggctgtaagacatgaaaggccgggctctttgctcttcgcctgcaactcgaagaygctgcaggaagtcaattttttactcagctggctgaaactcagtgtgaccgactgcctgggcgaagcccaaggcagctttaacatttggcacccatattgtgcacgtttccttttaagaacatggctctatggcaaaggtgtgcattctaagattctgatacaaacttgttgctgaagrgagcagcatccttgctgttgttttacactggagcttaatacccagctgaatgcttcagtttacctgcagaaatgaggaagtttgcactgtagctggccttgaacagagagactgcataagaaaatgcaccagaatttacagtaatcaagccactttcagaaacactgagcctttcccattcaagaattgaatttcctcatggactgccaaataaaaccagactgatacttgaatagactcaagcaagtgaggaatctggctctcaacatgagttaaaacagatgcacagccaactaccca

SEQ ID NO: 46590 - DNA, 599 bp, Chicken  19866894287691_1
  misc_feature (1)..(171): n is any nucleotide
nnnnnnnnnnnnnnnnnnnnnnnnnnnnnnnnnnnnnnnnnnnnnnnnnnnnnnnnnnnnnnnnnnnnnnnnnnnnnnnnnnnnnnnnnnnnnnnnnnnnnnnnnnnnnnnnnnnnnnnnnnnnnnnnnnnnnnnnnnnnnnnnnnnnnnnnnnnnnnnnnnnnnnnnnnntcgacgtggagttggactgcgggatgtgcatccgcaagaagggctctcggggggcgctgctgcccgagggcggcgcggaggagaagtgaggctgcactgggcagtggcagctccctcctgctgctctgrggctctggaaatgaacttctgagttgtgttttgttaagctgcaagcggcagaagcaggaggcagcaccccaaaagctgagctgctcccggccccctctgacagcgaggagtttgccacttcctcaggactggtttgcctgatgtggatggttgggctctctctgagcccagcaggaggggtgcaaactgaagcagctcctggtgcctgctgctcgctgtgccgtcagcggaggggttttgtacacagctttgcatgyacagagtgtacgggctccccaataaagtgctataatgaacct

SEQ ID NO: 46591 - DNA, 600 bp, Chicken  19866894287691_2
tgaggctgcactgggcagtggcagctccctcctgctgctctgrggctctggaaatgaacttctgagttgtgttttgttaagctgcaagcggcagaagcaggaggcagcaccccaaaagctgagctgctcccggccccctctgacagcgaggagtttgccacttcctcaggactggtttgcctgatgtggatggttgggctctctctgagcccagcaggaggggtgcaaactgaagcagctcctggtgcctgctgctcgctgtgccgtcagcggaggggttttgtacacagctttgcatgyacagagtgtacgggctccccaataaagtgctataatgaaccttcttatggatctcctcrctacgatgccttggggttggaagcactggaaggtgatgtctggctgctgggctgcctgggagtgaatggagtataggctggggctgctggagtgcaggggcacacggctgcagcgctgagggtttagatcagaagtgaagaggcagttttggggtgcacagccggagcacgaggatgtgggagatggggccttgcttttctcctaagtctctcacttggcttgcagctggacagcaaggaa

SEQ ID NO: 46592 - DNA, 565 bp, Chicken  19866894287691_3
ttctgagttgtgttttgttaagctgcaagcggcagaagcaggaggcagcaccccaaaagctgagctgctcccggccccctctgacagcgaggagtttgccacttcctcaggactggtttgcctgatgtggatggttgggctctctctgagcccagcaggaggggtgcaaactgaagcagctcctggtgcctgctgctcgctgtgccgtcagcggaggggttttgtacacagctttgcatgyacagagtgtacgggctccccaataaagtgctataatgaaccttcttatggatctcctcrctacgatgccttggggttggaagcactggaaggtgatgtctggctgctgggctgcctgggagtgaatggagtataggctggggctgctggagtgcaggggcacacggctgcagcgctgagggtttagatcagaagtgaagaggcagttttggggtgcacagccggagcacgaggatgtgggagatggggccttgcttttctcctaagtctctcacttggcttgcagctggacagcaaggaatcgtttcctgccattgagaccaaa

SEQ ID NO: 46593 - DNA, 600 bp, Chicken  19866894287698_1
caagacaaatactgaataaaaaaatggcctttggccaaatactttatgatctgaatatatattaaaaaaataagctattaagaacaaagaagatggaaaacacaatgaaacaatgggacaaatattagtcagcccagtagacaatgctgtaagtgcttgagctgccaagtttttgtagatactgggacaaaacaggaggtatttgaagtgataaaactatacttttgtgtcataaatctcttttaaagctggttttatcaggaaggaaaatatactttgggagccaacacaaaaaaaaamctgaaaacaatgagaacttcctgttaatgcttacatagacatcattgaaaatgtctgttgttttacttttctgactggaagaacttggtgctacatattatagattgaactgtcctatttgatgatacatgtgaagagataataagacacaaacagaattgtttctatataakgttttgtaaagttttccagtacatgtcagcagctctttaaagttaagtcacatagctcctttcagtgtccacaggaagaaacatcccagtgccagggcagaaattactcactcggatgtacatctga

SEQ ID NO: 46594 - DNA, 600 bp, Chicken  19866894287698_2
tgtagatactgggacaaaacaggaggtatttgaagtgataaaactatacttttgtgtcataaatctcttttaaagctggttttatcaggaaggaaaatatactttgggagccaacacaaaaaaaaamctgaaaacaatgagaacttcctgttaatgcttacatagacatcattgaaaatgtctgttgttttacttttctgactggaagaacttggtgctacatattatagattgaactgtcctatttgatgatacatgtgaagagataataagacacaaacagaattgtttctatataakgttttgtaaagttttccagtacatgtcagcagctctttaaagttaagtcacatagctcctttcagtgtccacaggaagaaacatcccagtgccagggcagaaattactcactcggatgtacatctgacttatctccacccaagtatttcagtgcctggaggcttactgcagatgtcctttttgtgtacacgtctgtggatatgttgaacattgtgcagccaacgctctcttttggataccggaagaaactatccaccagtaaggaggacacaaagaataatcaagctgtggtaaatggca

SEQ ID NO: 46595 - DNA, 600 bp, Chicken  19866894287698_3
ttaaagttaagtcacatagctcctttcagtgtccacaggaagaaacatcccagtgccagggcagaaattactcactcggatgtacatctgacttatctccacccaagtatttcagtgcctggaggcttactgcagatgtcctttttgtgtacacgtctgtggatatgttgaacattgtgcagccaacgctctcttttggataccggaagaaactatccaccagtaaggaggacacaaagaataatcaagctgtggtaaatggcaaatgcagaagtgacaatcaacctgcacaaagatgaytggagccaaagtaaatgttgttatgtatgttggattttcagtgaacactggaatctcatttaaaactattgatgcattaccatgtgattgaattctgttcttacacaacaagacgtatatagaaataaatgacaaaaaatgttcaggaatattttagttattatttttaattatttaacacagtcactccaggcatcactgaatctcagagatatgttaaatcacattatagctcatgattttcttttccacattcattagttttatttaaataatagattttctaaaaatgtactactt

SEQ ID NO: 46596 - DNA, 600 bp, Chicken  19866894287700_1
ctcccatttaacactgtcacattgggcactgtgtgttaactaattggtgttaaaatggggatgcagtcacgggtgatgtcttgtatgctccacaaggagaagccctgatgtcacacgaggtgctctggtggcttcttcttcccttgtaaccactgggataagtcacagttctggtgtgttatagcaggagatagaaaaataagaaattctggggaaaaaggaagcaaaccgagtgtggagtgaacagagaagcagtggcttccattggacagttctgtgccaaagtaaataatgcagatrtggggctctgcagggttgtggttgtggtcatttctaaaggcaactggaaactgatttgcttttttctctcttttccaggtgggagaattgtgtcctcaaaaccttttgcacctctgaatttcagaattaacagtcgaaacttgagtggtacgatggccctttttgttactgttgtcaacattaggctgcagtccttacacaagcacatcttttgctgctcttcagtaggagctgttaagtaggaaggttgtgttgtgttactgtagcacacacagcaaagggaaatgccttttaaatcac

SEQ ID NO: 46597 - DNA, 599 bp, Chicken  19866894287702_1
  misc_feature (1)..(207): n is any nucleotide
nnnnnnnnnnnnnnnnnnnnnnnnnnnnnnnnnnnnnnnnnnnnnnnnnnnnnnnnnnnnnnnnnnnnnnnnnnnnnnnnnnnnnnnnnnnnnnnnnnnnnnnnnnnnnnnnnnnnnnnnnnnnnnnnnnnnnnnnnnnnnnnnnnnnnnnnnnnnnnnnnnnnnnnnnnnnnnnnnnnnnnnnnnnnnnnnnnnnnnnnnnnnnnnagtaatctaaaagttacatctgtacatctgtaacattacttgcaaaaataaaactcagagaacatgtgagaaaggaaagaaaggaaaaataamcaaagagagaatgagaaaggaaggaaaacgggaaggaatgcagggtgaaaaagagagtacctgcagaatgggtaaagaaaatagatacaggcaggatggaagccattatctaggaattacatatgagatgttcaatataacattataagaagtgttaacattagcaagttttaatcctttttaatttgtgttcagctggttactttaacactttagctaaacagtttgccatgttcaattgcactgagctttacgtacactggatttacaacatgtggcaatttcaaacagattttata

SEQ ID NO: 46598 - DNA, 574 bp, Chicken  19866894287702_2
gttaacattagcaagttttaatcctttttaatttgtgttcagctggttactttaacactttagctaaacagtttgccatgttcaattgcactgagctttacgtacactggatttacaacatgtggcaatttcaaacagattttatactttccagaaagggaggaaaataagacagaaacagagtaagagttttgagatacagtctgggtgatcctaagcctgaatctcatagagcagatttaacacactggatataagagaatagataactagatgtttcagaagtacaatttacagggmaaaaaaaaatagagagagggagagagagaaatagaatgcctgtctgaccagcagactattttttttacttctttattttcaaagtaagaaaatatttagtcttcttcaagatgaaggaataaaatgatacaataggaaaatctaacagtacagaaaagtatttcttcatccacaggaagaatgaaaatatcagtagtaatatcagtagtaatgtgaactaaatttatcaaatatgttatatagtgatgcattcatgctctacgtgttttatttt

SEQ ID NO: 46599 - DNA, 600 bp, Chicken  19866894287708_1
gtcctgatgctttgggtggacttggattgttgaatatatgtcatttaactttcttgctctgtgggattgtaaggaaggagcctttatttcctttccacaatgaaatgcattttttctgaagatctagaattgaacagttatgtaaggaaatactgaaaaccagaaaaaaaacactacaaagtagtaatcaattgatgatgcctgtggccttggcttggtgctggagagagctggtggtactcaaggggctgagcagagtgtggggtgaagatcctttcttggaaacagggaaaggtgctyatggataatctgggggattgtggctggaactgggaggtctcagggacgttaaggaggtttaacrtgctgaacgtcagcagttccagggatcctggccccatgtgggaggcagtctgtcctcaggagtgctagcraagaggtagcagtgagagctagtgaatgttagagacttgccattgtgttttaaatgagttctttracctatagcttcatctgccatagcatgaatgaacgttgcaggctgagcgttagatatttatgttcatttaacaacctgtaataagctattgggactgattt

SEQ ID NO: 46600 - DNA, 587 bp, Chicken  19866894287708_2
gattgtaaggaaggagcctttatttcctttccacaatgaaatgcattttttctgaagatctagaattgaacagttatgtaaggaaatactgaaaaccagaaaaaaaacactacaaagtagtaatcaattgatgatgcctgtggccttggcttggtgctggagagagctggtggtactcaaggggctgagcagagtgtggggtgaagatcctttcttggaaacagggaaaggtgctyatggataatctgggggattgtggctggaactgggaggtctcagggacgttaaggaggtttaacrtgctgaacgtcagcagttccagggatcctggccccatgtgggaggcagtctgtcctcaggagtgctagcraagaggtagcagtgagagctagtgaatgttagagacttgccattgtgttttaaatgagttctttracctatagcttcatctgccatagcatgaatgaacgttgcaggctgagcgttagatatttatgttcatttaacaacctgtaataagctattgggactgattttgacgtgtcactgaagttattgctttcttatcaatatcatgggacatttat

SEQ ID NO: 46601 - DNA, 517 bp, Chicken  19866894287708_3
cagttatgtaaggaaatactgaaaaccagaaaaaaaacactacaaagtagtaatcaattgatgatgcctgtggccttggcttggtgctggagagagctggtggtactcaaggggctgagcagagtgtggggtgaagatcctttcttggaaacagggaaaggtgctyatggataatctgggggattgtggctggaactgggaggtctcagggacgttaaggaggtttaacrtgctgaacgtcagcagttccagggatcctggccccatgtgggaggcagtctgtcctcaggagtgctagcraagaggtagcagtgagagctagtgaatgttagagacttgccattgtgttttaaatgagttctttracctatagcttcatctgccatagcatgaatgaacgttgcaggctgagcgttagatatttatgttcatttaacaacctgtaataagctattgggactgattttgacgtgtcactgaagttattgctttcttatcaatatcatgggacatttat

SEQ ID NO: 46602 - DNA, 452 bp, Chicken  19866894287708_4
gcctgtggccttggcttggtgctggagagagctggtggtactcaaggggctgagcagagtgtggggtgaagatcctttcttggaaacagggaaaggtgctyatggataatctgggggattgtggctggaactgggaggtctcagggacgttaaggaggtttaacrtgctgaacgtcagcagttccagggatcctggccccatgtgggaggcagtctgtcctcaggagtgctagcraagaggtagcagtgagagctagtgaatgttagagacttgccattgtgttttaaatgagttctttracctatagcttcatctgccatagcatgaatgaacgttgcaggctgagcgttagatatttatgttcatttaacaacctgtaataagctattgggactgattttgacgtgtcactgaagttattgctttcttatcaatatcatgggacatttat

SEQ ID NO: 46603 - DNA, 600 bp, Chicken  19866894287712_1
tgtgacacctacccgtactcgctctcaaaagccctttggtggggtttctccagcatgtgaagtcacgcccattcctaattctttgcaggttgcaggcctttgctagggagttgctcagtgttgggaaaggcagcggaggcgagcctcaagctattgcacattaaatggggatatttccgatcataaagcagaggaatgcaagaagttctccataaagtccttgaagccaaagcaataatgtgctgcctattaaaaaaccaaaaagcgtccaaccaaaccataaagagggatctgtaagtrcgtaacagaacagatctcatccctgcccctcgctgctccggtcctgactgccttcccagctttgctttattctggctgctggggccccttttccaaaaggcagacagagcctgctccagggatttaagtgtatccccatgcttccccctcagccaaattttctcctgccaagcctcttgggataagtaatggaatgaacgcaaagagcctgtccccagccagtgacaccccaggctagttgcaggcgtcggccagagcygcggcagcacgtgcctgctacagacatcagagccatgagca

SEQ ID NO: 46604 - DNA, 551 bp, Chicken  19866894287712_2
aaaaagcgtccaaccaaaccataaagagggatctgtaagtrcgtaacagaacagatctcatccctgcccctcgctgctccggtcctgactgccttcccagctttgctttattctggctgctggggccccttttccaaaaggcagacagagcctgctccagggatttaagtgtatccccatgcttccccctcagccaaattttctcctgccaagcctcttgggataagtaatggaatgaacgcaaagagcctgtccccagccagtgacaccccaggctagttgcaggcgtcggccagagcygcggcagcacgtgcctgctacagacatcagagccatgagcagagctcccaaggcttcaattacagcatttatttgctctttgagctgccattctgggcaaaagcccctgttacctgagaaactgctgcacagggggcaggcaggctgagctgtggggagccttgctgcacgtgtgcacggccctgcttgcacgcacactgcagcccctgctcacacacatgcaacagccctgccactggaagtgcccgatg

SEQ ID NO: 46605 - DNA, 600 bp, Chicken  19866894287715_1
ttctgatttgaaagcatcattggagttagcctggctggatctattttatttgtgttcacaagctggcacacagggcattagacacactgtgaggctcagacttgtccaagcagcatggaaactcctaagggcatggctttcctgaaggccctgtgctgcatttgcagatgcacgtgagtgtgctgggcagccaacggatctggcatgacactaggctgcttctgatgtcattctgatgagagtccctagaatagtaagttcttgtctgttgaaaaataaagatgtgtgttagctttgcartgcctagagctccagcatatgcagcagatggagaacaaagaaatagcaggcacttcttttgtgatctcatccatttagtcaggttcataactctgcatactctatggagacaagtggaaaatgcacacttgagcaccccaaatgcaggggtctgttgttatttaggagggcaagaatacctctatcccctctctggctgtcagctgatgctcaggaaggagctgtctacctgagggaattcccacatactttacaagcaccaacacacatccaggagcaccccacgcaccttggtcatca

SEQ ID NO: 46606 - DNA, 560 bp, Chicken  19866894287715_2
agacaagtggaaaatgcacacttgagcaccccaaatgcaggggtctgttgttatttaggagggcaagaatacctctatcccctctctggctgtcagctgatgctcaggaaggagctgtctacctgagggaattcccacatactttacaagcaccaacacacatccaggagcaccccacgcaccttggtcatcatccactctgtgtgtgtgagcaactgtctccctgctgaaggaccaaggattcagagcaggagatcacgtgcaggcaacttcttgtgcactcctgatctgaaccagagraatcccagctcctgtgggtccgtggggagctgaatcccatttcagccgcagggtttccatcgaggaatgagatgcctgtactgcttcagatgaatcagtgccctgcacagggggaagtccacccctccctgtccttctctgcgtgccctttttgttacagcaaacactctccagtaggactaaccatatgtctggaattgtcttctggacatttggtggttaatgcagcagatttccaagtacagtcatgatgctgttgt

SEQ ID NO: 46607 - DNA, 600 bp, Chicken  19866894287720_1
taattacattcagtaatggtttgcctatacaattaataattgtcagtttatatcagatctaataggattaggtgtgcaagtactgcacatgaagtcttattatgatcttgtgactaaaagagcattctgtaaggataaagttccttcatttgcttacattagaatgcatatccatgagaaatgtatacaactaaggtttttccttttttcagttttgttaaaccatttattgatttgccattgctgtaggtttaattaagtttataagaagtgatgaagaaatagtatcatctaagttaytgtggcagcttatgtagcaatctcatagtaaatatttccccaaaatttagttactaaatcttaactgaatgtgacttacagacgtgccagtgtattcacctgttttttaaaaaatgacatttgaatgctgctaaattttattagatgctgtcctgtgtcttctcttcgtttttagcctacatgataaaagttgtatattataatacatattcccataatatcccacaaactgtcaaaaatgagtggagcacgctacttcctaattcttcttgttatatagacatagacaatatatagaca

SEQ ID NO: 46608 - DNA, 600 bp, Chicken  19866894287722_1
agttgtacatagaatggatagtggtgcatggaatacttgttatttattaacactagttatattttgtattttgtaagtgcagaaactttcatgcactgtaatatttaaaaggcaaagcaatgaacctgcttcaatcttcttgaaggaaaacaatatctggttattaggtaaagattttctgagatgattgttcaagttcttcaaattccctgaaaagtatccaattctttcttctttatttgagttcattaagttgcatttattcacaaattgtcacctgtgactaagatgtaaaatcayttattttggcaatgactgaattgctaagtgtttcagtgctagtatatagtaaatattttcctgcatggatattaaggttaatcacagtatattgcatgcttttcctccaacaatttgtgtgttgtttgggacagagttaaaaaatgacttttattgaagtttatgtaattaaaaataagtattaaagatagtgagaaatgacttctctgaatcctgtttttctgactccctctgaggggaggaaaaaaagtgattcctgtggtttagttatagttacctatagtttgtttgcttaacttg

SEQ ID NO: 46609 - DNA, 599 bp, Chicken  19866894287730_1
  misc_feature (1)..(235): n is any nucleotide
nnnnnnnnnnnnnnnnnnnnnnnnnnnnnnnnnnnnnnnnnnnnnnnnnnnnnnnnnnnnnnnnnnnnnnnnnnnnnnnnnnnnnnnnnnnnnnnnnnnnnnnnnnnnnnnnnnnnnnnnnnnnnnnnnnnnnnnnnnnnnnnnnnnnnnnnnnnnnnnnnnnnnnnnnnnnnnnnnnnnnnnnnnnnnnnnnnnnnnnnnnnnnnnnnnnnnnnnnnnnnnnnnnnnnnnnnnncattgtgaagaggcttactcacaaattcctgcttctccagaagattcacaacccgttggcaaagsagaagtgagattctcagctatgacctcagcacgaagtcagaacacaagctggttaaaagactgcgggggagacatgatgacatcctttggaagccagctgtggtctaaatcttctactgatgtttgcaattgtaaccaagaatgatgcagctttaaaaygtgctctattctagaaagtggagcgagtcagtkgagtatcatctcacaacccaaccattccctgtggcacgatgctgagcagcactgagcacacactcatctcctgacagcacccaatggtgcaacagctttgctcctct

SEQ ID NO: 46610 - DNA, 599 bp, Chicken  19866894287730_2
  misc_feature (1)..(76): n is any nucleotide
nnnnnnnnnnnnnnnnnnnnnnnnnnnnnnnnnnnnnnnnnnnnnnnnnnnnnnnnnnnnnnnnnnnnnnnnnnnncattgtgaagaggcttactcacaaattcctgcttctccagaagattcacaacccgttggcaaagsagaagtgagattctcagctatgacctcagcacgaagtcagaacacaagctggttaaaagactgcgggggagacatgatgacatcctttggaagccagctgtggtctaaatcttctactgatgtttgcaattgtaaccaagaatgatgcagctttaaaaygtgctctattctagaaagtggagcgagtcagtkgagtatcatctcacaacccaaccattccctgtggcacgatgctgagcagcactgagcacacactcatctcctgacagcacccaatggtgcaacagctttgctcctcttcaagtcaggtcaagacaaattttctgcaatttgattttcattatgaaaagcagaagtatctcccaaaccaccaatgccacctcctgttcacacagatgagggcaccaaaagatacaggacttgttggcaatgagacacaaggattacaaggacaagaa

SEQ ID NO: 46611 - DNA, 599 bp, Chicken  19866894287730_3
  misc_feature (1)..(43): n is any nucleotide
nnnnnnnnnnnnnnnnnnnnnnnnnnnnnnnnnnnnnnnnnnncattgtgaagaggcttactcacaaattcctgcttctccagaagattcacaacccgttggcaaagsagaagtgagattctcagctatgacctcagcacgaagtcagaacacaagctggttaaaagactgcgggggagacatgatgacatcctttggaagccagctgtggtctaaatcttctactgatgtttgcaattgtaaccaagaatgatgcagctttaaaaygtgctctattctagaaagtggagcgagtcagtkgagtatcatctcacaacccaaccattccctgtggcacgatgctgagcagcactgagcacacactcatctcctgacagcacccaatggtgcaacagctttgctcctcttcaagtcaggtcaagacaaattttctgcaatttgattttcattatgaaaagcagaagtatctcccaaaccaccaatgccacctcctgttcacacagatgagggcaccaaaagatacaggacttgttggcaatgagacacaaggattacaaggacaagaaaaccagaacaggtaagcaaagagaagcaagccc

SEQ ID NO: 46612 - DNA, 358 bp, Chicken  19866894287730_4
gattacaaggacaagaaaaccagaacaggtaagcaaagagaagcaagccctacaaaaccccattggtcagaatgggtcttactttgccagactgttgtgagcttcaacatatatctcctgtgccacctctgggaaagttttagtgctgaaatttggatcgtgatccttcaccttccgcaggctgaaaagacaagaaaaagctctgagcaaatgaaaaatgtctcctctgtgtttcggatgatgacaactgcattacccagttgtagtgcaagacaaaactgagcagaacttcagcactayggactaattgaaaaggaggtacatacgctaactgagaggcagcagtctgcttcagctt

SEQ ID NO: 46613 - DNA, 599 bp, Chicken  19866894287732_1
  misc_feature (1)..(62): n is any nucleotide
nnnnnnnnnnnnnnnnnnnnnnnnnnnnnnnnnnnnnnnnnnnnnnnnnnnnnnnnnnnnnntgattttcgcttgaatgggggatttgcgaagaggaaacgcatgatttttgggttaaatgggggatttgcaaagagaaaacgcgtgattttcggttaaatgggggatttgcgaagagaaaacgcgtgatttttggcttaaatgggggatttgcgaagagaaaacccgtgattttcggcttaaatgggggatttgcgaagagaaaacgcgtgatttttgcttaaatgggggatttccaawgagaaaatgcatgattttcgcttaaatgggggattgactaagagaaaacgcgtgattttcgcttaaatggaggattcttgaagaaaaaacgcgtgattttcgggttaaattggggatttgcgaagagaaaacacgtgatttttgggttaaatgcgggattggctaagagaaaacgcgtgattttcggttaaatgggggatttgcaaaaagaaaatgcgtgatttttgggttaaatgggggattcttcaagagaaaacgcgagattttcggttaaatgggggatttgcaaagagaaagca

SEQ ID NO: 46614 - DNA, 600 bp, Chicken  19866894287736_1
tttcatgacagaatttacaatttgaaccaagcagccagacacagttgggagtctgatggcagaaactgtctgcatccccatccaggctctcccaaacaagaaggcatagaggctaaggctgtcagcagcaaagagttttccattcctttcctcagatactaagactccccacgttagtgcctggaatcccttttcaggcagcagtttcagcttttaaaatggatttccttcagctgttgttgctacagctgttgtcactaaaagacatctgtgtctgcttgctcctatatctgtttgtaygttgagctttgggtttygatttgctttcgtgtatctgcttgtcttttccttgggtcagaactatcatcagttcttgtttccttttatatcaactcaagtgttgctggttggagctcatggtcactgmtgggagaagtgtgactgcagtctcagttgacaacttggcaagctcagtgctaaccagttttatactggcagtaataaccttgtgggatcttgcggggaccatgaatccctcctggtagagatctggtagatattcatacaattggccttgctgatattatctttcatctgcat

SEQ ID NO: 46615 - DNA, 600 bp, Chicken  19866894287736_2
caatttgaaccaagcagccagacacagttgggagtctgatggcagaaactgtctgcatccccatccaggctctcccaaacaagaaggcatagaggctaaggctgtcagcagcaaagagttttccattcctttcctcagatactaagactccccacgttagtgcctggaatcccttttcaggcagcagtttcagcttttaaaatggatttccttcagctgttgttgctacagctgttgtcactaaaagacatctgtgtctgcttgctcctatatctgtttgtaygttgagctttgggtttygatttgctttcgtgtatctgcttgtcttttccttgggtcagaactatcatcagttcttgtttccttttatatcaactcaagtgttgctggttggagctcatggtcactgmtgggagaagtgtgactgcagtctcagttgacaacttggcaagctcagtgctaaccagttttatactggcagtaataaccttgtgggatcttgcggggaccatgaatccctcctggtagagatctggtagatattcatacaattggccttgctgatattatctttcatctgcatttagtttaaagtttcct

SEQ ID NO: 46616 - DNA, 600 bp, Chicken  19866894287736_3
gcaaagagttttccattcctttcctcagatactaagactccccacgttagtgcctggaatcccttttcaggcagcagtttcagcttttaaaatggatttccttcagctgttgttgctacagctgttgtcactaaaagacatctgtgtctgcttgctcctatatctgtttgtaygttgagctttgggtttygatttgctttcgtgtatctgcttgtcttttccttgggtcagaactatcatcagttcttgtttccttttatatcaactcaagtgttgctggttggagctcatggtcactgmtgggagaagtgtgactgcagtctcagttgacaacttggcaagctcagtgctaaccagttttatactggcagtaataaccttgtgggatcttgcggggaccatgaatccctcctggtagagatctggtagatattcatacaattggccttgctgatattatctttcatctgcatttagtttaaagtttcctcaattctgtgagagtaaatgtatcctatttgggattcagattagactccagygcttcttcactcctgggaaaacctgtaccacttagttaatgttctcagaattgaaatc

SEQ ID NO: 46617 - DNA, 600 bp, Chicken  19866894287736_4
gttcttgtttccttttatatcaactcaagtgttgctggttggagctcatggtcactgmtgggagaagtgtgactgcagtctcagttgacaacttggcaagctcagtgctaaccagttttatactggcagtaataaccttgtgggatcttgcggggaccatgaatccctcctggtagagatctggtagatattcatacaattggccttgctgatattatctttcatctgcatttagtttaaagtttcctcaattctgtgagagtaaatgtatcctatttgggattcagattagactccagygcttcttcactcctgggaaaacctgtaccacttagttaatgttctcagaattgaaatccataatcagcagtgaatagtctttgtctagctctcaaatcctgttttgggaactaggatgccctcagtacatcactctgtccatggtcatgctttatgcccacagccagaaggactccaaaaggtgtctgcatgcagactgcttgctcatactagcaccaagcccaggtgggcaatgaactggtaaggagtttgctatatcatgtttataaagcctacagctgggagcagactgctatgctg

SEQ ID NO: 46618 - DNA, 556 bp, Chicken  19866894287742_1
agagagatttgataggtcagagatcgatttccagtttttatctttctctgaagggcaataaatactacagagcactgcatttatccctgtagttataatgtgtaggtcgtttgctcactgtatgtgtcagagtggattttgggcttgctgtcctgcccaagatgagataagaatggcatctgaggttaatctcctttctttgaatgcccattgtaggtatagatgtagcctcagaagatgtacaaaggataaattcagagcaggtttgttacaggagagtatcataaagtactggatttycagtagtgaagattttcaccttgatgtcatacagctagttgtaygtgcaagggaatagaagagctttctgtttggttctgctgatgtcctgctgtgagacgataggcacatcacttccattttctgtgtcttgtgactgctgaagtcagaaatctcttgggttcctccacctctgatgaaagtcctcctctgagttagtgccccaggtacagctgaagtgtaaagctaaactaatgaggctaaattgtaaacagaa

SEQ ID NO: 46619 - DNA, 512 bp, Chicken  19866894287742_2
tctctgaagggcaataaatactacagagcactgcatttatccctgtagttataatgtgtaggtcgtttgctcactgtatgtgtcagagtggattttgggcttgctgtcctgcccaagatgagataagaatggcatctgaggttaatctcctttctttgaatgcccattgtaggtatagatgtagcctcagaagatgtacaaaggataaattcagagcaggtttgttacaggagagtatcataaagtactggatttycagtagtgaagattttcaccttgatgtcatacagctagttgtaygtgcaagggaatagaagagctttctgtttggttctgctgatgtcctgctgtgagacgataggcacatcacttccattttctgtgtcttgtgactgctgaagtcagaaatctcttgggttcctccacctctgatgaaagtcctcctctgagttagtgccccaggtacagctgaagtgtaaagctaaactaatgaggctaaattgtaaacagaa

SEQ ID NO: 46620 - DNA, 600 bp, Chicken  19866894287744_1
tgacactggaacaaatggaggacataaaacactttgttcttgcctgggctggaggcaaaacaaacgaacaaacaaaaacaagcaaacaaaagcaagttgcattaaaccgatagaagttcttggactcgagtaaaagtcatgtatgactgcctcccatttcaggaaaagtgtgcatgtacagctgtgggcagatggttggcttctggggggaacggggtaattgagagcagcaagttgaagaacggagaagaggatatgggggatcccctctgactgtgagaaatcaaattgcgctctttraaagaaaactgattaccagaagtattaagctttaatcttattcgcagttagtagccccaaagagaatgctttgttggagaccttccaagaacagctattgcagacagcttgtaaaacaaagacaatctgatggaaataatgcaaatacagatcgacatttgctataataaaattattttatgacccccctttgtaacaacctcaacaataaacaccagtttcttcattggcaattagctctagtgggacaaacacttccccaaagttgacacgaagacagtacttacagatttcttactt

SEQ ID NO: 46621 - DNA, 600 bp, Chicken  19866894287744_2
ggcacagctcggccttaagctgacttgacaaatatctaaccaaagccagaaaaatctcatgttattcccccccgggcattgtgcagtatgtaatttgagtctcatgaaatcagaaggatagcattggctataattacaaagcatcacaaagattttagaaatctgtttatttgttctcgtgactcgaatatgtacatgttggaaaagatccctccaacagtaatttttacaaagttgatttactagggctccacaatccataaacttgactctcgatatacttctcttcatacagaagcyataaacccggtccttaaattatagactgcatttctgaatgtacacttattccaaaaattacatctttttatctgcatggtttagtgaatttatttcacttctcaacgtgtcttcgcctgtatctggaggtttcacattgacttttgcttttcatgaaattgatgacatttttgctaagtgaatttctgagactcggttgcagtgcaatagcagagataatcgaggtggcataaagacattccacagagggatttgggatacgtcctacggcatcagcagtcatcaaggaacaagtgttaa

SEQ ID NO: 46622 - DNA, 580 bp, Chicken  19866894287751_1
actgatgttgaaaattaactcaccaccttacagccatcttttcaaaaggaactggcatctaactgcatatgaaaaaatattctgccagaaaatatttgcacattggtttgtttgaagcttctttgtcatatcacttattgtaagcataaaaaataaaacctacaggagcaaactccttcttgctctgaatgtatttgcacaaggagataaaaccatagggaagaacttaagatgctagatccatacattaaaatatgcataactcaaggccccatcttgaaaaacgtgattcactctttyggatctttaaaaatcagacagataagaagcatggaaattgataaagactatactgactcaattacagaggaagctacttccttttcactcatctgtgtaattatcatactatggttattttgtcagaagtgaattacaatgtctcatgttaaattaaagaacttccagtacctagatatctgaattaaatcttatcaatacagaaagcattgttgctggtccaaggactaggatgcttttcctctgaaggaaacattcccccttgcagtccaatgctcta

SEQ ID NO: 46623 - DNA, 600 bp, Chicken  19866894287759_1
agcaagcaaaaactaacttaaaggtacagagttcagaagcaacgtattttactggaatgtttccctcccacaggatttaggactcccaaatgattactgaatgttagctgcagaaagctcatggaacttgatagtaccagtgatgagccagatgatgcagtcaacaacacatgcctcacaggtatttgtgatgttctgacaagtattgcatcaaatcagatcttggtaaggtaggagatttggaatggagagataactattttaagctagttccagtgttggtgggcttttgttgtacarttaagccaatctaacagacagctgctgtgaaaaggagagatcttgtcgctccttcccttcagctctacttgtctaaagctacagttaatttgtgcagagaggtaaatcagcagactggatttcacctacaaaaagatgttgccgttttcttctgccgttttatgttcctgtgaacgcacacagccaaagaggcggrtaggagggcagagaagaaagactatcacttgaagcagtaacacctactaggctaagttacaacacagaaatgctcctttcctcaagttcctcacaacagaattc

SEQ ID NO: 46624 - DNA, 600 bp, Chicken  19866894287759_2
tgacaagtattgcatcaaatcagatcttggtaaggtaggagatttggaatggagagataactattttaagctagttccagtgttggtgggcttttgttgtacarttaagccaatctaacagacagctgctgtgaaaaggagagatcttgtcgctccttcccttcagctctacttgtctaaagctacagttaatttgtgcagagaggtaaatcagcagactggatttcacctacaaaaagatgttgccgttttcttctgccgttttatgttcctgtgaacgcacacagccaaagaggcggrtaggagggcagagaagaaagactatcacttgaagcagtaacacctactaggctaagttacaacacagaaatgctcctttcctcaagttcctcacaacagaattctgtaatagactgatctgagaggagggcaatgtgaagctgaaaaacagtaaataacccatttacttgggattctctgggtttgcatgytgtaaatgatgatgcagagacatctttataatacaggtcacacatgggattttaaggcactccagtgatttacattaagcattcttactaaatctcatactcctaactc

SEQ ID NO: 46625 - DNA, 600 bp, Chicken  19866894287759_3
atttgtgcagagaggtaaatcagcagactggatttcacctacaaaaagatgttgccgttttcttctgccgttttatgttcctgtgaacgcacacagccaaagaggcggrtaggagggcagagaagaaagactatcacttgaagcagtaacacctactaggctaagttacaacacagaaatgctcctttcctcaagttcctcacaacagaattctgtaatagactgatctgagaggagggcaatgtgaagctgaaaaacagtaaataacccatttacttgggattctctgggtttgcatgytgtaaatgatgatgcagagacatctttataatacaggtcacacatgggattttaaggcactccagtgatttacattaagcattcttactaaatctcatactcctaactcaattacttctgaaaagcttgccctggaagatcacttgcagactggactcgaggttttaggaattcctccatggacatacacacacacacagaaaaaagattcagaaacattaacttctgttcatggccaataatgtaagttacaggcagaagccatttttgtcatggctcagaggaattcacctcaagtag

SEQ ID NO: 46626 - DNA, 600 bp, Chicken  19866894287761_1
gaagcacaccaagccaggtaagtcaactgaaaggctccttctgaattccagcagtgttgtgcattgggtgtgcatggttctgtgtgcatggtgccccctggggcaggatggaccatcaccatttggatgcatacctttgggccattgatggcaccagcccagcatgcgtggcattttgtttcagcgtgcggatccatttcagcttaatgacaggtgactgctgggagatgaatctgagccctccaggagaggggggaacatggatatctgcagggggacggggcaggatgagcatgtgcycgaggatgctgtgctttgaaatcccaccttggatttccccttggcgtcctgggtgagtgtcccaggtcccagygctgttctcagatggttacagcactcacgtatctatggggtgtgcaatgcagtctctctccacccctaactcccactggtgtccatgtggattttttgagttcttccaacgctgctttaggggaaaaagcagccctcatgggtggctctgggtgctcggtagctccagcctcagacatgaacatgactgctaatttctatcacttgcagagcaccgctcacaaggga

SEQ ID NO: 46627 - DNA, 600 bp, Chicken  19866894287761_2
atggttctgtgtgcatggtgccccctggggcaggatggaccatcaccatttggatgcatacctttgggccattgatggcaccagcccagcatgcgtggcattttgtttcagcgtgcggatccatttcagcttaatgacaggtgactgctgggagatgaatctgagccctccaggagaggggggaacatggatatctgcagggggacggggcaggatgagcatgtgcycgaggatgctgtgctttgaaatcccaccttggatttccccttggcgtcctgggtgagtgtcccaggtcccagygctgttctcagatggttacagcactcacgtatctatggggtgtgcaatgcagtctctctccacccctaactcccactggtgtccatgtggattttttgagttcttccaacgctgctttaggggaaaaagcagccctcatgggtggctctgggtgctcggtagctccagcctcagacatgaacatgactgctaatttctatcacttgcagagcaccgctcacaagggagacttctcacgtgttcttcttggcttcgctgtattcccactcacatcaattacgctcctgctttttggccttc

SEQ ID NO: 46628 - DNA, 600 bp, Chicken  19866894287771_1
attctactataacaaaatttaaccaagagctgctgagattctaaaattaagctgtgatgatctgttttatacctcccatataaatgaaaatcttctgttgttcatctgtagctttcaaatgtgtttaatccctatttatttttatgaagtacggagatatcttaaatggagaatggaaaaatagctaacttccttttagaatgggaaaccaagaggtttttggataagagcctcgctttaaatattctcttgtatattcaggttttcttgttgctatttctattacagcagccttttgtrtatgtgatgttcaagtaactgtggagtgtatgtgtgtgccaaatttcggcaagcatctgaaaatacagaatgtttttattgtcagaggaaatgagataattgcagagacagctaaggctgttgcctgtgttccatgttaaatgctgatctttctgcccaaactcattctgttgagtctggaagtatgagaactggcaggttttgggggctgctcactgtgaggcaggtgagagaagtcatccacgagtgtcctacaacyatgcattatggaaatatatctctttcagaagtgatatccat

SEQ ID NO: 46629 - DNA, 600 bp, Chicken  19866894287771_2
aggttttcttgttgctatttctattacagcagccttttgtrtatgtgatgttcaagtaactgtggagtgtatgtgtgtgccaaatttcggcaagcatctgaaaatacagaatgtttttattgtcagaggaaatgagataattgcagagacagctaaggctgttgcctgtgttccatgttaaatgctgatctttctgcccaaactcattctgttgagtctggaagtatgagaactggcaggttttgggggctgctcactgtgaggcaggtgagagaagtcatccacgagtgtcctacaacyatgcattatggaaatatatctctttcagaagtgatatccataatagcaagtctgcttggaggtgggccaaaggtaattttaacaacagtagagccatttgcccttggagtatcctggtaccgcttccttgcagagagtccagagcttagttctttgctcagaggttttgcatagagccacaaggagggggtggaggctcatagccatcgtgcttcctgtgttacctttgtgttttccaggagggtttccgtgcagaaaaatgtgygggattaacactaaagctcacccagagtgctccct

SEQ ID NO: 46630 - DNA, 600 bp, Chicken  19866894287771_3
aggtgagagaagtcatccacgagtgtcctacaacyatgcattatggaaatatatctctttcagaagtgatatccataatagcaagtctgcttggaggtgggccaaaggtaattttaacaacagtagagccatttgcccttggagtatcctggtaccgcttccttgcagagagtccagagcttagttctttgctcagaggttttgcatagagccacaaggagggggtggaggctcatagccatcgtgcttcctgtgttacctttgtgttttccaggagggtttccgtgcagaaaaatgtgygggattaacactaaagctcacccagagtgctcccttaattggaggacataggtattaacaasaagaagaatgggacaggctcgtactactcagaatgttttttctcaaagaatgtgcttgaagtgtacttcctcacggtctttatcttctgaggattttgtcatccttgttcattttatgtgtttccagagattttgccaggaactcttaatctgtacgtggaatagtaattctgcattctttccactcagctgcctgtattacattaaaaaggttcagaaatagtcctgactggtactg

SEQ ID NO: 46631 - DNA, 600 bp, Chicken  19866894287771_4
gaagtgatatccataatagcaagtctgcttggaggtgggccaaaggtaattttaacaacagtagagccatttgcccttggagtatcctggtaccgcttccttgcagagagtccagagcttagttctttgctcagaggttttgcatagagccacaaggagggggtggaggctcatagccatcgtgcttcctgtgttacctttgtgttttccaggagggtttccgtgcagaaaaatgtgygggattaacactaaagctcacccagagtgctcccttaattggaggacataggtattaacaasaagaagaatgggacaggctcgtactactcagaatgttttttctcaaagaatgtgcttgaagtgtacttcctcacggtctttatcttctgaggattttgtcatccttgttcattttatgtgtttccagagattttgccaggaactcttaatctgtacgtggaatagtaattctgcattctttccactcagctgcctgtattacattaaaaaggttcagaaatagtcctgactggtactgcagtgctaaacatcaatttatgtactttggagaacacatcatcgatagatgtgaggaacatt

SEQ ID NO: 46632 - DNA, 600 bp, Chicken  19866894287773_1
aaagctgtaggtttgtgctgttgtctgttgaattgcgtcatgtgaaaaacatccaccaatacccacagaaagatgcatagtcaaataaccccaggaaatagaaaaagagacagatggagaatttgtctggctaattttctcccctgtggctactgcgatgtttctgctagaaaggatgcagaaggaggcagagtgaataaacgcaaactgactttttgagacgcatagataactgtaatacttctttaagtccacacaaaaaacaccagtgaaaagaaataggattagaaaaagccataraaaaagattttataactgaaaccagcaaaaaagtggaatttcatttttatcatggtgaagttccttgttcaatactgcaaacaaggaatgctttctgtccttacgttaatacctttgaagagacctgtacactcaaggtgacataagaaagcattttaccaaaaggagaggacttgcttccctggtggccagtgagatgctttgtgtctgtagtcgctcagggcagatggcgtgtgccccactgcccagtgggtgcagcatgccctgctttcctctgcctgacattcaacgaggtgatgt

SEQ ID NO: 46633 - DNA, 600 bp, Chicken  19866894287779_1
gacttgcccaaggacagaggaagtatggctgcactagcttggttttcttagttcgtggtcacaaaaccatgtttcctctcctgcagtctgattcacagtccactgaagacaacagaagtctaagtcatgctgttcagcgggatttggattatccctcatatgattcctgcttgaatcctcttgttctggtccagcaacgatgccctgggaattggcaggaaagctagctgcagtagaggcagcaagaactggcttcaggaaagcatctcccttccccagctagtgctttccccacagtaytgtaaagcaagaagaggcaaatataccagctgcccaccaataaacttgtgcctcatttgcgctgtttgttttctttttaatgactggcacaggttctattattaatgccttcccctcaaagcaaaggtctcagcagaccagaatttcagtgtgcagtacataagggtgacacaatagccagctttcattttactttgctgagagcagcgggcaagtcacaagatcagagtttgccattgtgggcagcatttgaatgtgggcaggcacaaaggcaggcacacgagcagcaactctgggcag

SEQ ID NO: 46634 - DNA, 471 bp, Chicken  19866894287779_2
atagccagctttcattttactttgctgagagcagcgggcaagtcacaagatcagagtttgccattgtgggcagcatttgaatgtgggcaggcacaaaggcaggcacacgagcagcaactctgggcagcaggaaaagaaaggagcgttactgtcggagcgcaggaagcacagaagcacaacacccacctaagtgagctgcccaagtcagggagcatgccgcatgcttcacaaattgtttaccctctgaaccaaatagcaaaaggcttacgaacgaaagcaatctccacacacagagcagcwctctgcaaatcacttctgttcaggacagtaggaaagggaaacaatttttgctcaatcctagcggtgctattggggtcagcatttagttctgtaattaataaatcgcgctggctccccaaggaaggcagcctgagtgaggtgcttcaaggtctagaacagcaaaaagaggag

SEQ ID NO: 46635 - DNA, 599 bp, Chicken  19866894287783_1
  misc_feature (1)..(2): n is any nucleotide
nnactgtgaatctgcctctgctgtatccattacctccatcctgcaactggtagtaagcaaggagtaagctgaaagagcagaatactttttgcagattagtcacttgcaaatgtattctttgaggatctctctcagtgcacagttcagatctgaaaaagcaatgtgtattttacatattttatttattccgtcttttgcattgtggttagcttttgatttttcatgaaggctggtattcttgtttccaatatcaggaaggatgtagggcagcaggctcatttccatttacagattcaataytgacctccacatttgcctactccagttattttcattgmgtttttggagaraattgcaagttttgcatttaaggggattttataaagtctaacaatcaaagaatgcgggcaagatgggctgggtgcactcaccttcagggagacaggaagagaaaatctttgcatttccaaactcttgcctagttgactacagagggtggaagggtcctggtacagctcagcaccctgcagtgcccagacttggatttaccatgcatatttgagaagccttccaaatccttactctcatatcctagataa

SEQ ID NO: 46636 - DNA, 600 bp, Chicken  19866894287783_2
tcctgcaactggtagtaagcaaggagtaagctgaaagagcagaatactttttgcagattagtcacttgcaaatgtattctttgaggatctctctcagtgcacagttcagatctgaaaaagcaatgtgtattttacatattttatttattccgtcttttgcattgtggttagcttttgatttttcatgaaggctggtattcttgtttccaatatcaggaaggatgtagggcagcaggctcatttccatttacagattcaataytgacctccacatttgcctactccagttattttcattgmgtttttggagaraattgcaagttttgcatttaaggggattttataaagtctaacaatcaaagaatgcgggcaagatgggctgggtgcactcaccttcagggagacaggaagagaaaatctttgcatttccaaactcttgcctagttgactacagagggtggaagggtcctggtacagctcagcaccctgcagtgcccagacttggatttaccatgcatatttgagaagccttccaaatccttactctcatatcctagataaagttgctcttggcaagtttgtgcctattcatcacttatt

SEQ ID NO: 46637 - DNA, 600 bp, Chicken  19866894287783_3
tagtaagcaaggagtaagctgaaagagcagaatactttttgcagattagtcacttgcaaatgtattctttgaggatctctctcagtgcacagttcagatctgaaaaagcaatgtgtattttacatattttatttattccgtcttttgcattgtggttagcttttgatttttcatgaaggctggtattcttgtttccaatatcaggaaggatgtagggcagcaggctcatttccatttacagattcaataytgacctccacatttgcctactccagttattttcattgmgtttttggagaraattgcaagttttgcatttaaggggattttataaagtctaacaatcaaagaatgcgggcaagatgggctgggtgcactcaccttcagggagacaggaagagaaaatctttgcatttccaaactcttgcctagttgactacagagggtggaagggtcctggtacagctcagcaccctgcagtgcccagacttggatttaccatgcatatttgagaagccttccaaatccttactctcatatcctagataaagttgctcttggcaagtttgtgcctattcatcacttattctccagtatgtt

SEQ ID NO: 46638 - DNA, 600 bp, Chicken  19866894287784_1
ttgcatgcaacaaaatgcaaaaatagttttggagcacaagaatctacagttttaagttgtttggtaagagaaggagaaggaggagaaggagaaggagaaggagaaggagaaggagaaggagaaggagaaggagaaggagaaggagaaggagaaggagaaagaaaagaaaaagaaaacaagagaaataaagaagaaagaaatttttctttcactggcatcgattctagaaaaaaatttgtaggctgaacattcatttactaggagtggtgaccagtgccacatctgctttctatatgaatrggattttttgacagtgagtgaagagggcaaagagtaatcatatatatatatatatatattgttgttgttgttgtttttgttgttttttaaatctcactccaataaacaagggggttcttagaaataataggaagaagttaacagaaagaagttttctgagttgtcaattcagaaattctaagatgttctgaattatacccttgaagtagctcttctctttccattaactggaggaagactagcaacactgaactgcagcaagtttgaagctcacctctgtgtacaatccctcagcactgc

SEQ ID NO: 46639 - DNA, 600 bp, Chicken  19866894287792_1
atcattttagactcatgaacaaatggtagtcaagtggtggagctgacagtattccttcagtagtgatttcttcatgttacgtgagagctgattgagatttttggtttttcagcttgattaaaaaaggtgatcatgaagtgaatgtagcaacaatgccacccaggaaaatggcagttactcctgagccgaaaacaaaagcaacagatgagaacagtaagttaaaaacatgtcaagtaaatgtaggtttgcttttttaacataatgtgtgtggtaatattttaatctgtttcttgttaaatrtggttaatttgtgtccagtcattatttgcatactgatgttcagaaaagtgaagtcagtggcttctatggggagcctgcttaagaaatcattgcttatccttctactcatatccctctagaattgtgcagagacttccactgtatcggaattgcagtttatccatgctgctaatagcagcactattatagcaaccaaactttttttccatgaattatctattatatctatttaaagccagttaaatgtatgggaaagaaactgctttaaaacaggctaaccaaacagtaacttacagtgct

SEQ ID NO: 46640 - DNA, 599 bp, Chicken  19866894287797_1
  misc_feature (1)..(33): n is any nucleotide
nnnnnnnnnnnnnnnnnnnnnnnnnnnnnnnnntgtttaataataacatagttactagaaaataaatgggaatctagtttaggtcatgaggagaatagaagtgtgactcctcagggagtgactccatcataaaatctgacattgctttaaattggtgaaagagatcggattttaagatttatttaagaagagaaatctcctatggtctttgattattctttataaaacactaatcttagtggagtttctttagtatatttgagtcagaacaccaattttataccatgttcttaaacaatmaacctctcaagcatagacagtaacaacttcmggacactattaacttaacatttgcctgttaygaacctagctgaaatgcttactacatgttccaaaaatttagtgttcagaagtcatacaggatcctttcccattgtttcttaccacagaaacaagcaaacacaaattgtatactttttccatttcaagcgttgctgaatatgagtcattaaagcgtaaagacaagtctgagtcatagctaaatttgtaaaggacrtttgtcaattaaggaacttcaaagattgctgctgtcacctgta

SEQ ID NO: 46641 - DNA, 599 bp, Chicken  19866894287797_2
  misc_feature (1)..(2): n is any nucleotide
nntgtttaataataacatagttactagaaaataaatgggaatctagtttaggtcatgaggagaatagaagtgtgactcctcagggagtgactccatcataaaatctgacattgctttaaattggtgaaagagatcggattttaagatttatttaagaagagaaatctcctatggtctttgattattctttataaaacactaatcttagtggagtttctttagtatatttgagtcagaacaccaattttataccatgttcttaaacaatmaacctctcaagcatagacagtaacaacttcmggacactattaacttaacatttgcctgttaygaacctagctgaaatgcttactacatgttccaaaaatttagtgttcagaagtcatacaggatcctttcccattgtttcttaccacagaaacaagcaaacacaaattgtatactttttccatttcaagcgttgctgaatatgagtcattaaagcgtaaagacaagtctgagtcatagctaaatttgtaaaggacrtttgtcaattaaggaacttcaaagattgctgctgtcacctgtatgtatggaaacagacatttaggaatttccat

SEQ ID NO: 46642 - DNA, 600 bp, Chicken  19866894287797_3
taaatgggaatctagtttaggtcatgaggagaatagaagtgtgactcctcagggagtgactccatcataaaatctgacattgctttaaattggtgaaagagatcggattttaagatttatttaagaagagaaatctcctatggtctttgattattctttataaaacactaatcttagtggagtttctttagtatatttgagtcagaacaccaattttataccatgttcttaaacaatmaacctctcaagcatagacagtaacaacttcmggacactattaacttaacatttgcctgttaygaacctagctgaaatgcttactacatgttccaaaaatttagtgttcagaagtcatacaggatcctttcccattgtttcttaccacagaaacaagcaaacacaaattgtatactttttccatttcaagcgttgctgaatatgagtcattaaagcgtaaagacaagtctgagtcatagctaaatttgtaaaggacrtttgtcaattaaggaacttcaaagattgctgctgtcacctgtatgtatggaaacagacatttaggaatttccattgtccagaaattaaaaatgataactgaatatg

SEQ ID NO: 46643 - DNA, 600 bp, Chicken  19866894287797_4
atttgagtcagaacaccaattttataccatgttcttaaacaatmaacctctcaagcatagacagtaacaacttcmggacactattaacttaacatttgcctgttaygaacctagctgaaatgcttactacatgttccaaaaatttagtgttcagaagtcatacaggatcctttcccattgtttcttaccacagaaacaagcaaacacaaattgtatactttttccatttcaagcgttgctgaatatgagtcattaaagcgtaaagacaagtctgagtcatagctaaatttgtaaaggacrtttgtcaattaaggaacttcaaagattgctgctgtcacctgtatgtatggaaacagacatttaggaatttccattgtccagaaattaaaaatgataactgaatatgaaaataaaatttcatgcttaattttgaaagtaatccatataaaatccccccaaagcctctttctttgttttcttcagtctcgggtccgaatcctctggactgactctacattgaattatcctatttgtcctcctgtacaacttgtttttcaactttctatcgtaaaagtctgtggagacraaggaaaaacactt

SEQ ID NO: 46644 - DNA, 600 bp, Chicken  19866894287797_5
atttgtaaaggacrtttgtcaattaaggaacttcaaagattgctgctgtcacctgtatgtatggaaacagacatttaggaatttccattgtccagaaattaaaaatgataactgaatatgaaaataaaatttcatgcttaattttgaaagtaatccatataaaatccccccaaagcctctttctttgttttcttcagtctcgggtccgaatcctctggactgactctacattgaattatcctatttgtcctcctgtacaacttgtttttcaactttctatcgtaaaagtctgtggagacraaggaaaaacactttatgaatcgatcaataatggaaaacctttaaaaaaataaaataaaataagataaaataaaataaaataaaatacaaacatgaggtttttakttctagagttcaagaaataatttattttcttggaatcaatatattcacaaattatcaaataatggaatttgccatacgggtaatgacacagtaactgcataactgaaggtgaaagttcttccttgtttgagcattaggtttaaaagaacaaagagaagtcagagtggaagtatggctggtggttaagatagagaa

SEQ ID NO: 46645 - DNA, 600 bp, Chicken  19866894287797_6
tgataactgaatatgaaaataaaatttcatgcttaattttgaaagtaatccatataaaatccccccaaagcctctttctttgttttcttcagtctcgggtccgaatcctctggactgactctacattgaattatcctatttgtcctcctgtacaacttgtttttcaactttctatcgtaaaagtctgtggagacraaggaaaaacactttatgaatcgatcaataatggaaaacctttaaaaaaataaaataaaataagataaaataaaataaaataaaatacaaacatgaggtttttakttctagagttcaagaaataatttattttcttggaatcaatatattcacaaattatcaaataatggaatttgccatacgggtaatgacacagtaactgcataactgaaggtgaaagttcttccttgtttgagcattaggtttaaaagaacaaagagaagtcagagtggaagtatggctggtggttaagatagagaaatgtgacttaagactattagctttaccagtctcttgtttatgtgcaatttttactaaggcaggctgtagtgaagatgcttaccatctggtacaagaaagtggttc

SEQ ID NO: 46646 - DNA, 504 bp, Chicken  19866894287797_7
ggaatttgccatacgggtaatgacacagtaactgcataactgaaggtgaaagttcttccttgtttgagcattaggtttaaaagaacaaagagaagtcagagtggaagtatggctggtggttaagatagagaaatgtgacttaagactattagctttaccagtctcttgtttatgtgcaatttttactaaggcaggctgtagtgaagatgcttaccatctggtacaagaaagtggttcagagtcttattaaatgtaattatcacccctaggaaaacagatgactagcacaggtagaaagaratgtccttatacttcttggtttttcaacttttccagctaataatgagaggctgtgcccaaccttacgtgatgtctcagttatttggccagtgttctgctttctaaaggaaggctggagtaatcccaagagaagcgtgcatctgtgtctgataaggctttctgatgtcctacagcttctcaatcacaattcctctattactaaat

SEQ ID NO: 46647 - DNA, 600 bp, Chicken  19866894287798_1
atgggaaagcagagaggtgaagaaacttgtccagaaccacgcagtgaattgttaacagggaagataagaggacccaggagccctgactcacagtcattaacatatgttggagaattctcaaatcagtgcctccagaaatctttattcactccttcccgttctccccctgcaatagctaacagtgacagttctggaagaggtacagcactgtacagatggcacgaggagctctgtaacgtgccttcccgctagatggcaatacagccttgtctgcttcttcctgcaccctctggaatgcayggggtgccaagacaggcctgcaatggccagcctgcgtgttatgcaggcccttgcagataataggattgcctttgtttatttttacccaacagacaggggtactggcaagagaatctttgcagaagggatacagaacgcaacactcctgaatataggcttgaatactarggagtactgattcccttccctttcccattcctcaaaaaaacctatgttctcttacacctgccgtaacctaacrcatcccaaggcctttcctctctgctgatacctggctgttcatttccccttatggcactt

SEQ ID NO: 46648 - DNA, 600 bp, Chicken  19866894287798_2
gcaatagctaacagtgacagttctggaagaggtacagcactgtacagatggcacgaggagctctgtaacgtgccttcccgctagatggcaatacagccttgtctgcttcttcctgcaccctctggaatgcayggggtgccaagacaggcctgcaatggccagcctgcgtgttatgcaggcccttgcagataataggattgcctttgtttatttttacccaacagacaggggtactggcaagagaatctttgcagaagggatacagaacgcaacactcctgaatataggcttgaatactarggagtactgattcccttccctttcccattcctcaaaaaaacctatgttctcttacacctgccgtaacctaacrcatcccaaggcctttcctctctgctgatacctggctgttcatttccccttatggcacttaggcaagaaaattaagataaatagctcagaatagtaaagctctctctgcttcttacaagaatyctggcaggagaacacaggagcaagcattactttgttgaacacttgcataacacatatcttttatttttcattcctacccttgtgtcacctacagtagagacccct

SEQ ID NO: 46649 - DNA, 600 bp, Chicken  19866894287798_3
cttcccgctagatggcaatacagccttgtctgcttcttcctgcaccctctggaatgcayggggtgccaagacaggcctgcaatggccagcctgcgtgttatgcaggcccttgcagataataggattgcctttgtttatttttacccaacagacaggggtactggcaagagaatctttgcagaagggatacagaacgcaacactcctgaatataggcttgaatactarggagtactgattcccttccctttcccattcctcaaaaaaacctatgttctcttacacctgccgtaacctaacrcatcccaaggcctttcctctctgctgatacctggctgttcatttccccttatggcacttaggcaagaaaattaagataaatagctcagaatagtaaagctctctctgcttcttacaagaatyctggcaggagaacacaggagcaagcattactttgttgaacacttgcataacacatatcttttatttttcattcctacccttgtgtcacctacagtagagacccctacaaacaccctggatcatcaggccagtacactactgccctaattgcaggaaaacaaaattagacaatagtgct

SEQ ID NO: 46650 - DNA, 511 bp, Chicken  19866894287798_4
gattgcctttgtttatttttacccaacagacaggggtactggcaagagaatctttgcagaagggatacagaacgcaacactcctgaatataggcttgaatactarggagtactgattcccttccctttcccattcctcaaaaaaacctatgttctcttacacctgccgtaacctaacrcatcccaaggcctttcctctctgctgatacctggctgttcatttccccttatggcacttaggcaagaaaattaagataaatagctcagaatagtaaagctctctctgcttcttacaagaatyctggcaggagaacacaggagcaagcattactttgttgaacacttgcataacacatatcttttatttttcattcctacccttgtgtcacctacagtagagacccctacaaacaccctggatcatcaggccagtacactactgccctaattgcaggaaaacaaaattagacaatagtgctaaagagagtaactgtttcaatatcacattcagt

SEQ ID NO: 46651 - DNA, 600 bp, Chicken  19866894287801_1
acttctctaagtggttactgagatgttatgcgtagattgtagtgttctctgcttcatataaaactcattattccccctcacccgttgaaaatctttgctagcttctttcctcctcagctgctaatacctgatactccttcataccttcacactaacagtagaaggcaaatgttatgctcagtaaattgcttccttaatgaagaactacaacaaataaacccaagtctccaaatggcacctatcatcttagtcagcaattattggcataaaaataaacattattattcaaacatactgaartgtactgtaatccagcttactgttgtgttagcaataatctttgtcgcttctgagactaaatcagaagtcactgttttttaagaaagccctgtgcacaaaggttttagaaaacctatgcattttttttttcaaagactagtctttgctaaagttgctttagaactgcatcactaatgaattatttggattattatttttttaaagtaagccttctttcaaataagcaatatttagtcagattaccagtaatggagccgtggccggggagggtggggtggtgagaaatcaaatgaagtaagt

SEQ ID NO: 46652 - DNA, 600 bp, Chicken  19866894287802_1
taaccctagagaagactaggggtcagagggactttatcacagtattccagtacttaagatacaaagaattcaaagctccacatggagccttatggaaaagacaaagggcagtgggaacaagttgcaccaggaaaggttgcatacaggctatctatatgtagtcgggattagagttggctaatagcatagtttttacaactctttgtggtcttacacttcattgctaagtggcaggtctaatttgatttccaagaaacggtccatctgttaagaaagccgatggagtagtagtttcagggraattgtttactatggtgcatagttatggcatactattcaatgtgatgttttctaaaagaaaaagccaaagctggagattaggcagtaaggactatcctattttgaagcagtctctttatttgtgattgaagtccactaagtccatttctcacactaaagcaatttgtgggatcagcctctgtacctaacttgaacttcgggttgaaaagcattacactgtcccatcaaagggctggatacattgtctgtgacttggatcggctcagaaaacatagaatattatctcttcacactaaaggc

SEQ ID NO: 46653 - DNA, 599 bp, Chicken  19866894287803_1
  misc_feature (1)..(88): n is any nucleotide
nnnnnnnnnnnnnnnnnnnnnnnnnnnnnnnnnnnnnnnnnnnnnnnnnnnnnnnnnnnnnnnnnnnnnnnnnnnnnnnnnnnnnnnnttaaaaagggaagatttctaaaagcttaagaatattagtctgaacttgtggaagtatagttcatgttgcatcagtttttacaagtcctcaactacacttcccttaaatttcagaataataaatatataccaagttccagaaaaagataaggtcctccaagatgtaggacttacaacgttttcttatcctcccataaccatttccacaaatayaagagatttactgtacttgagaaccatctctttaatctaggaatgtataggctagttcttatctccttgacactggaaatatttcaagcaacttgttctgtaaggtacaaacattttgattcaagcaccacatcttaaaaaaaaaaaaaaaacagctggataaaacctgttttcacttttatcatgtttacagaactaatacctgcattcgaagagagctgagcctttgaagaagttcagacctccatctacttttagagaatggcgctgcaccttttagttttcgagaacaaccaaat

SEQ ID NO: 46654 - DNA, 600 bp, Chicken  19866894287808_1
aaaaaaaaaaaacaaaacttgtagactgtaggcaacttctaaactcaagtacaaaccctatttgcctgccaatccaggcaaatatatcccaacttaccttcgggcaggaacaaaggaaaaatgagcaggtgcatttggagagaagtttctagggctgtccaaagggctgccacctgttcgagagagcaaacaaattcagtcacatttgcaacagaggaacttctcactgtgcagaaacaccttcaatcccaagctgtagctgcaaatgattgacaatacactttgtgctcttcatcagtkgagcattagtttgccaaagaaatatgatttgaccagaatctttcctccttttcaagtaatttaagatgcacattttcatacttattcttaaataggtagtgcatcgtatatacccaatatrgtctctcagtattatgtaacaatccctgtacaatcctatagaaacctaayatttctcaatgaaaaacccgggttagaaatgatattgatgacagtttcaggaacagcaagtagaaaggaagtatcttcatacttactgtgttcatcactgctccatgtaaaattcactgagggaaaaaa

SEQ ID NO: 46655 - DNA, 600 bp, Chicken  19866894287808_2
tgagcaggtgcatttggagagaagtttctagggctgtccaaagggctgccacctgttcgagagagcaaacaaattcagtcacatttgcaacagaggaacttctcactgtgcagaaacaccttcaatcccaagctgtagctgcaaatgattgacaatacactttgtgctcttcatcagtkgagcattagtttgccaaagaaatatgatttgaccagaatctttcctccttttcaagtaatttaagatgcacattttcatacttattcttaaataggtagtgcatcgtatatacccaatatrgtctctcagtattatgtaacaatccctgtacaatcctatagaaacctaayatttctcaatgaaaaacccgggttagaaatgatattgatgacagtttcaggaacagcaagtagaaaggaagtatcttcatacttactgtgttcatcactgctccatgtaaaattcactgagggaaaaaatacatggcaaaggaactacatgtaataaaaggactgcagacacacaggaatgctcaagtgagaaaaatattaacattcaccctaaccaccaactcatccaaaaaatacaatgaaaatgaaa

SEQ ID NO: 46656 - DNA, 600 bp, Chicken  19866894287808_3
acctgttcgagagagcaaacaaattcagtcacatttgcaacagaggaacttctcactgtgcagaaacaccttcaatcccaagctgtagctgcaaatgattgacaatacactttgtgctcttcatcagtkgagcattagtttgccaaagaaatatgatttgaccagaatctttcctccttttcaagtaatttaagatgcacattttcatacttattcttaaataggtagtgcatcgtatatacccaatatrgtctctcagtattatgtaacaatccctgtacaatcctatagaaacctaayatttctcaatgaaaaacccgggttagaaatgatattgatgacagtttcaggaacagcaagtagaaaggaagtatcttcatacttactgtgttcatcactgctccatgtaaaattcactgagggaaaaaatacatggcaaaggaactacatgtaataaaaggactgcagacacacaggaatgctcaagtgagaaaaatattaacattcaccctaaccaccaactcatccaaaaaatacaatgaaaatgaaagaggcagcgacttcatggactgaagaaaaaataacatcaggtgttcaatt

SEQ ID NO: 46657 - DNA, 573 bp, Chicken  19866894287816_1
acaagcctgcgtgtcacaacttgaaactttttccattttatagatgacaatgactgtttgatgttacttacttcttttcaatcctgtaaacatgaaatattaaacctagaaaaggttcagtcccttgtcacagcaaacatattcttaaaattagatgtagtctggcagaggacatacagaggatcacctccaaaccctaaataaatcaatctcatctaaagcagagaaacaaactttgcaaagatcaatactggctttcacctttgcaaatgtaaaaaaagactaatggaacccttgtaytttaatttcagtaatgaagacaagatttaagtaccatcacccagttcagttccaaagtacaacacattatgtgtcagcctaatattacattctacaaatcacatatatcatcattcctttacataaaacttgaatactgaaaatcttacctgatttaaataggtcaggcacttttctagacaccaaaggcagcagatgcaggctttaagcatacaacgagcacaagcattttcctaggaaagcacaaaatttagggaagcaaagaaaaagaca

SEQ ID NO: 46658 - DNA, 600 bp, Chicken  19866894287820_1
gaggaaatcacaacatccgcttcggtttctgcgttccctgtcctgggggccggtcgagtgttgcaggaggccacaggaatcctgcttgtgaccacagccagattaatggctattttggcagcttttcaggagtgaggaatttggccactttcacaataatggctagaaattccacatgaattaattagttttattacaggacatgtccttcctgctcctccagggctgcctgaaacactgaactcattacatgaagaaatgaatatagtactaaaaataaaaactggtatcccaagcctktgtcaggaaacgcacagagtataccgacatcctcctccagatgtgcttctgaagctgtggcttttggccagatgagatctaaactcaactgttagatcaagcacagccactaaaatgtcccagcctgcttcatgagtgtgtcttctctcagcctcttagtctctgctcaacttgagccattcatataggcttgttaattgctcctccagtttgtttgacccctggatgttgttacacagaatcatggaatggcttgagtaggaggggaccttaaagattatctcttcagaaccccgtgcc

SEQ ID NO: 46659 - DNA, 600 bp, Chicken  19866894287820_2
tttggccagatgagatctaaactcaactgttagatcaagcacagccactaaaatgtcccagcctgcttcatgagtgtgtcttctctcagcctcttagtctctgctcaacttgagccattcatataggcttgttaattgctcctccagtttgtttgacccctggatgttgttacacagaatcatggaatggcttgagtaggaggggaccttaaagattatctcttcagaaccccgtgccatgggcagggttgtctcccaccagatcaggctgctcagggccccatccaacctggccttgawtgcctccagggatggggtatccaccatctgtgatgggtttccatagtgctgttcctaccttgcaaggascctgtttgtatctggggtaggaaagtgcttgggaacgtctgtggcaaagggtcctctgcgtttgagttttggtcaaagraatgccctaaaaaatgacagcatgtgactttcagagagctgccagagcaactgcaggttgggtaaatattttggaagcccagagctgataactttcccttgcttacgtttgtgcagattctgtctgtaaaatcgtatcatttatcacatagc

SEQ ID NO: 46660 - DNA, 600 bp, Chicken  19866894287820_3
atgagtgtgtcttctctcagcctcttagtctctgctcaacttgagccattcatataggcttgttaattgctcctccagtttgtttgacccctggatgttgttacacagaatcatggaatggcttgagtaggaggggaccttaaagattatctcttcagaaccccgtgccatgggcagggttgtctcccaccagatcaggctgctcagggccccatccaacctggccttgawtgcctccagggatggggtatccaccatctgtgatgggtttccatagtgctgttcctaccttgcaaggascctgtttgtatctggggtaggaaagtgcttgggaacgtctgtggcaaagggtcctctgcgtttgagttttggtcaaagraatgccctaaaaaatgacagcatgtgactttcagagagctgccagagcaactgcaggttgggtaaatattttggaagcccagagctgataactttcccttgcttacgtttgtgcagattctgtctgtaaaatcgtatcatttatcacatagctttttaaacaaaggtactgtgtggactctgtgagctcagtctgatttgaatccctttctagtagcacca

SEQ ID NO: 46661 - DNA, 600 bp, Chicken  19866894287820_4
ttgtttgacccctggatgttgttacacagaatcatggaatggcttgagtaggaggggaccttaaagattatctcttcagaaccccgtgccatgggcagggttgtctcccaccagatcaggctgctcagggccccatccaacctggccttgawtgcctccagggatggggtatccaccatctgtgatgggtttccatagtgctgttcctaccttgcaaggascctgtttgtatctggggtaggaaagtgcttgggaacgtctgtggcaaagggtcctctgcgtttgagttttggtcaaagraatgccctaaaaaatgacagcatgtgactttcagagagctgccagagcaactgcaggttgggtaaatattttggaagcccagagctgataactttcccttgcttacgtttgtgcagattctgtctgtaaaatcgtatcatttatcacatagctttttaaacaaaggtactgtgtggactctgtgagctcagtctgatttgaatccctttctagtagcaccagtgctgttctgagaagtttgtgctggtaaaggacaggtgtgcaaaatgggcactgcttgctggtcatagcagtgtttgc

SEQ ID NO: 46662 - DNA, 600 bp, Chicken  19866894287820_5
acgtttgtgcagattctgtctgtaaaatcgtatcatttatcacatagctttttaaacaaaggtactgtgtggactctgtgagctcagtctgatttgaatccctttctagtagcaccagtgctgttctgagaagtttgtgctggtaaaggacaggtgtgcaaaatgggcactgcttgctggtcatagcagtgtttgctttatgaatattgcttcagatacttctgtttgggcagaggttctccatttgagtcacagaatcatagagtcataaaggttagaaaggccactaagatcatctcrtccagccatcaccaccatgacacttagcccttcttcctgctcagccccacctctgtggaccaggacttgacttttttgctatttttcctcctgttctgaagttgaacgtaacagagtgaccagggaggtgatcaggtaggttattgcaggtctgactttacagaacatgacttgttttgtgctcagccctctggggaatgaaccatgaccctcatccagcaaggactaaggccagctgagttgacaggcaaattgcagatttttcagcattaacaaaatttgcctgctagaaaagagtga

SEQ ID NO: 46663 - DNA, 600 bp, Chicken  19866894287824_1
gctttcttctttccctcagcggtgtgtatccatgtccgtgttaagttcattgcttttttttacatctagtcttttcagctgtgaattgatcttatttctttgtttctcttaattctttctatatggaagtcctttgtatgttcattgcatctcataatcagcactttcaagaatgtctatcaaaatttgaaaggttttataccttacccttaaggaaaaaaacaagctcaaatgcttctgtggcatctgtgatgatctgtgtcatctgtacctcataaggcaaagcaatttaacatttgytgtttcctaaagttaatgaataaatattatgcaccaatagatgcaaattaaatcttcactttttctaagatctgtcttatatacctgtgtcgggtacctaaaggctccctgctgaagaatgatactgggatggaacaaagtattctgacagttttaagaaaactgatatctgtggctgtgggcacaaatttcttgttttgtagacagagctgtccttggtagtttctcttgtttttacaaagacttgttttgcaagcaggtgtcccacttgggcactgtatcacacactggccacacagg

SEQ ID NO: 46664 - DNA, 599 bp, Chicken  19866894287830_1
  misc_feature (1)..(139): n is any nucleotide
nnnnnnnnnnnnnnnnnnnnnnnnnnnnnnnnnnnnnnnnnnnnnnnnnnnnnnnnnnnnnnnnnnnnnnnnnnnnnnnnnnnnnnnnnnnnnnnnnnnnnnnnnnnnnnnnnnnnnnnnnnnnnnnnnnnnnnnnnnntcttgaataaacatctagagagccaatgcataggggaaatgtttgttccgaagcatggcaatcctatttttaagctatgaagctttcaagttttatgatttcaaacttttcttctttggtttaatgtgactctgaggtagagagcctacaattacaaaccraatttggcagaatatgataaatatatgtttcacttctgcttatgaaagctttctgcaaacactggtgaaacactgcagcagatacagctcagcagaatggaacagtgagctttggcctctgctgctcaattatggtggtggagcacagaggctgttcaaaactacagcaggactgtaaatgtatgctcatgccagttgtatttgcttgctagagggcagatatttattttcagtactgctgttaaaagggaggacataaccacttgtggttacagaacccctggaaattttatatagga

SEQ ID NO: 46665 - DNA, 600 bp, Chicken  19866894287835_1
gccatagaagccacagggctgtttgaattgcagcactagcagcttgctcactcttaccattttgctctacaaggtcttcatgtgtgctgaatagtacctccaaaccagtaggagagtattgcaaggctctcagaggaaaatggcaaccgctggtgccagagcaacgtcatcttcctgaggagtgtttgggaaagagggctgctgggaacagctatatgtgagataagccgttgtgtcctgcagcattaagcaccctaactcgacaggatcccacttgagaatgctgagaacccagattamttaattaataaacagacaaaaagcctaccattttgatatagctggtttgttgagttctccatctaccactgtatgcaatacgatgctgacaatgcttggaaaggggtaaaagtagaataaacctgctactgaattttagaacttgttctgtcagacgacgtatctacactacttatctgtagttttcagtgtgaatccggagttgtgccaatgattgctttttagctctgtagactaaaaacagatctgaaaaataaattgactgaatgcatcctaaatatggcattttgtatttcagga

SEQ ID NO: 46666 - DNA, 600 bp, Chicken  19866894287839_1
ttagactttttcaaattcacatttagactgcatgtgtgtgagaataagagagtgaattcagttgttaaccttgcctagtatttagtttattgatcagtactttctccctcgggtgactttatagaaaattagctggtcattttggtcacagagaaagaatgcaccatgcctatatgtctcaaaaataaaattcaaatgattatgttggttttaagtaatagggaagttatgaagttggtgagaaattcagcacccttatgagatattctattttctcctgttcagctaagattctaaagygaatgtgtttgacttcttttatttcagaaaatagttggttgtgagtatttaaatgtcttgtcataacttgtattttttgctttaagctatctttacaaatagtaaagtataaattattttttctgtttcttgtcttgtcttgtacttgattttgtcatgttgacagcatggcactcctgaagtaaacatgcaatgaattgtatcttgttacatgtatatatctgatgttaaaaagcagtcagtacctttgaaatgacatcaactactaatagctactaataagcaccaacaaatttgcct

SEQ ID NO: 46667 - DNA, 600 bp, Chicken  19866894287839_2
acagcatggcactcctgaagtaaacatgcaatgaattgtatcttgttacatgtatatatctgatgttaaaaagcagtcagtacctttgaaatgacatcaactactaatagctactaataagcaccaacaaatttgccttgcttaaagttttgcagaacagtgcataccagtgagggataaggtttcaaatatctgctactttgctacagggagagagtcacaagaggtgtaaatcaacataaatttactcagaaacccgtaactcccagttacatcgtgacactgaaaaccattaaaggsagtgcagccttttgaaatgtagatgcatctgcatttagtactgaagaggtgttcgaatagttcaaaagtaaaagcataccttttacatttctttaatcagagacatttttagagattttatatacatatatcacaagaaagggtaatctcatcttctgcttttgttctatagttttgaggaccttggaatatgataatcaagcagtctatatgaaatgtcattcatgtacaatggttcaattgttattgaaattatcttttgagagttactaccgtgcttctgcctatcaagagagctgt

SEQ ID NO: 46668 - DNA, 600 bp, Chicken  19866894287850_1
gcataaccattgctagcagtcagaaatttgtcatgaatggctcaaaattcagaaagaaagaaatgtcatggagaagataaggcatttaggagatgtgaaagagaaaaaaaaaagagcttatacacaattactgagaacttcaaactcataggaacaaaaggctgatctttggactgtcaggtcagtgtttctctagctgaatgactgtctttcaagtggtagatgttgggataatgtgtggctttctggttatcctggtgggtagctgtgtagctcctgctctcacagacactctcaagwagggcctccaaggtttgattgtttctactaggcctgggaatagcagatccagcatccaagaggtgcatcaggagataggggcaaagggtcaatgtctcctgctcaggcactggtgatgtgctggcatggctggagaagtaagaacagttcactagtgagaccagttcaataatctggatggagaaaggtcaagatgaaacatttaggccataacaaccatctagaatagtctctgacctacttaaccctggtacggatggatcctttagctttgtgtttactttctctgatcacattctt

SEQ ID NO: 46669 - DNA, 600 bp, Chicken  19866894287857_1
ctctgcacacaagtattgtgggtgttctaggctgaaaatgtcacagaactaaaatgttatagtgtacataaatgagagctgggcttatttgaagacaatagttgacgaagaaaaaaacaagaaacatccactgggaatatttgtacctgcaactgccccctcaaaactagtatttactgtgaacaggctttcagagactgcctaatgcaacagcttgttgggttaagtgccaattattcattgcttagtcactgaaatgtctgacagtacatcagcttcttagcaattgtacagctggtwaggaaaaaaaaatcaatagaacacctactcaacaaaatttattgacttttgtcaaaatgaaaacattagttggaattgctwctgattcagtgggagctccaaacatgtactctctcccrraccactgtgcttcatgaaaggggttgatgcagttcctctgccatgtgttgtctcctagcagagcttctggtcaagcactccctgataccctttctacagcatcacttttggcaaatcaaaggagtgggtggagataatgcttacgtttggtttaaatgaatgagggaacagttgagtagg

SEQ ID NO: 46670 - DNA, 600 bp, Chicken  19866894287857_10
tctgggaaatctttcaagggagaaataatttcagcagtcttttgaaaaacttaaaggcatgtagagtagcctccaccatcatccttcttcccttattatgtctccacagtagaaagagtaggaaagaagatccagaatgcagcagtcttcacaaaccctatgtgaaaaatatactttggactgaataattgggcagaagcaacatgaactaattttcactggartggctggaaatgtagttgtggcacttctcagaactgctctcttactgaaaaaaaactgtttggaatatgaagcctycctgtgctgtgacagtaaggtaatgactcttatactctagagctctttggggcagagaggtttattaggaagacagcacggcatcttgtctgtgaagtgtatggattctatatgaaaacagcaatttatctttaccttctatcagaaatgcaatgaggccaacaaaaacaattttatctgtaagtctactackggtgacactaattaagaatgttagatgtgtgaattttgtaattcaggttgaactgatgtgaaattctgagcatcagggtaaaattccttaartcctgtaaacaaaat

SEQ ID NO: 46671 - DNA, 600 bp, Chicken  19866894287857_11
cagaagcaacatgaactaattttcactggartggctggaaatgtagttgtggcacttctcagaactgctctcttactgaaaaaaaactgtttggaatatgaagcctycctgtgctgtgacagtaaggtaatgactcttatactctagagctctttggggcagagaggtttattaggaagacagcacggcatcttgtctgtgaagtgtatggattctatatgaaaacagcaatttatctttaccttctatcagaaatgcaatgaggccaacaaaaacaattttatctgtaagtctactackggtgacactaattaagaatgttagatgtgtgaattttgtaattcaggttgaactgatgtgaaattctgagcatcagggtaaaattccttaartcctgtaaacaaaatatggagaaagaactatgcaagtgagtgtttaagactgtacttgcaaaatgtgtttaaaaacattagatgttcttacctaagaaacatgttagcgtcataattgtgtattttgagtaaaatggtataattgtttcactatcattaattctctttccaattcttgattttatgtccttatttaatacatttttac

SEQ ID NO: 46672 - DNA, 600 bp, Chicken  19866894287857_12
ggaatatgaagcctycctgtgctgtgacagtaaggtaatgactcttatactctagagctctttggggcagagaggtttattaggaagacagcacggcatcttgtctgtgaagtgtatggattctatatgaaaacagcaatttatctttaccttctatcagaaatgcaatgaggccaacaaaaacaattttatctgtaagtctactackggtgacactaattaagaatgttagatgtgtgaattttgtaattcaggttgaactgatgtgaaattctgagcatcagggtaaaattccttaartcctgtaaacaaaatatggagaaagaactatgcaagtgagtgtttaagactgtacttgcaaaatgtgtttaaaaacattagatgttcttacctaagaaacatgttagcgtcataattgtgtattttgagtaaaatggtataattgtttcactatcattaattctctttccaattcttgattttatgtccttatttaatacatttttacagactttttatttgtttgttgtttttaaggtagttgaccagttgagagtaaggaatcacagtttttttggtggaattaaaatttgtttgctg

SEQ ID NO: 46673 - DNA, 600 bp, Chicken  19866894287857_2
ggcttatttgaagacaatagttgacgaagaaaaaaacaagaaacatccactgggaatatttgtacctgcaactgccccctcaaaactagtatttactgtgaacaggctttcagagactgcctaatgcaacagcttgttgggttaagtgccaattattcattgcttagtcactgaaatgtctgacagtacatcagcttcttagcaattgtacagctggtwaggaaaaaaaaatcaatagaacacctactcaacaaaatttattgacttttgtcaaaatgaaaacattagttggaattgctwctgattcagtgggagctccaaacatgtactctctcccrraccactgtgcttcatgaaaggggttgatgcagttcctctgccatgtgttgtctcctagcagagcttctggtcaagcactccctgataccctttctacagcatcacttttggcaaatcaaaggagtgggtggagataatgcttacgtttggtttaaatgaatgagggaacagttgagtagggtaatctagaggattttcctttgcagaggactcccagaggcatgaatgtgtttgagtctccaggttccctctcattcacct

SEQ ID NO: 46674 - DNA, 600 bp, Chicken  19866894287857_3
agaaacatccactgggaatatttgtacctgcaactgccccctcaaaactagtatttactgtgaacaggctttcagagactgcctaatgcaacagcttgttgggttaagtgccaattattcattgcttagtcactgaaatgtctgacagtacatcagcttcttagcaattgtacagctggtwaggaaaaaaaaatcaatagaacacctactcaacaaaatttattgacttttgtcaaaatgaaaacattagttggaattgctwctgattcagtgggagctccaaacatgtactctctcccrraccactgtgcttcatgaaaggggttgatgcagttcctctgccatgtgttgtctcctagcagagcttctggtcaagcactccctgataccctttctacagcatcacttttggcaaatcaaaggagtgggtggagataatgcttacgtttggtttaaatgaatgagggaacagttgagtagggtaatctagaggattttcctttgcagaggactcccagaggcatgaatgtgtttgagtctccaggttccctctcattcaccttctgtttctatgaagcctattttcctggctcctctggc

SEQ ID NO: 46675 - DNA, 600 bp, Chicken  19866894287857_4
gaaacatccactgggaatatttgtacctgcaactgccccctcaaaactagtatttactgtgaacaggctttcagagactgcctaatgcaacagcttgttgggttaagtgccaattattcattgcttagtcactgaaatgtctgacagtacatcagcttcttagcaattgtacagctggtwaggaaaaaaaaatcaatagaacacctactcaacaaaatttattgacttttgtcaaaatgaaaacattagttggaattgctwctgattcagtgggagctccaaacatgtactctctcccrraccactgtgcttcatgaaaggggttgatgcagttcctctgccatgtgttgtctcctagcagagcttctggtcaagcactccctgataccctttctacagcatcacttttggcaaatcaaaggagtgggtggagataatgcttacgtttggtttaaatgaatgagggaacagttgagtagggtaatctagaggattttcctttgcagaggactcccagaggcatgaatgtgtttgagtctccaggttccctctcattcaccttctgtttctatgaagcctattttcctggctcctctggca

SEQ ID NO: 46676 - DNA, 600 bp, Chicken  19866894287857_5
ttcctctgccatgtgttgtctcctagcagagcttctggtcaagcactccctgataccctttctacagcatcacttttggcaaatcaaaggagtgggtggagataatgcttacgtttggtttaaatgaatgagggaacagttgagtagggtaatctagaggattttcctttgcagaggactcccagaggcatgaatgtgtttgagtctccaggttccctctcattcaccttctgtttctatgaagcctattttcctggctcctctggcagctatgcagcacctgggggtttcctggaggcwgccagccaggtaaaggcagatgacaatattaagtatttggttactaacagaagtttgaattctgctaggggtaaaaccattttgaaaggctgaagttttctgcaygtaagagtttcatgtttcgtgatgtttctgtttcaaagatcaaatgattcttttggactagaagtataggagaaggcagacacaaaatgctgaagactatataaaggttgtccccatgcaaaatgrgcaattccatcagttgatgtgggactgcaggaaactgtaaggatgrataaatgagtctgggaaatcttt

SEQ ID NO: 46677 - DNA, 600 bp, Chicken  19866894287857_6
tgcttacgtttggtttaaatgaatgagggaacagttgagtagggtaatctagaggattttcctttgcagaggactcccagaggcatgaatgtgtttgagtctccaggttccctctcattcaccttctgtttctatgaagcctattttcctggctcctctggcagctatgcagcacctgggggtttcctggaggcwgccagccaggtaaaggcagatgacaatattaagtatttggttactaacagaagtttgaattctgctaggggtaaaaccattttgaaaggctgaagttttctgcaygtaagagtttcatgtttcgtgatgtttctgtttcaaagatcaaatgattcttttggactagaagtataggagaaggcagacacaaaatgctgaagactatataaaggttgtccccatgcaaaatgrgcaattccatcagttgatgtgggactgcaggaaactgtaaggatgrataaatgagtctgggaaatctttcaagggagaaataatttcagcagtcttttgaaaaacttaaaggcatgtagagtagcctccaccatcatccttcttcccttattatgtctccacagtagaaagagt

SEQ ID NO: 46678 - DNA, 600 bp, Chicken  19866894287857_7
tgtttctatgaagcctattttcctggctcctctggcagctatgcagcacctgggggtttcctggaggcwgccagccaggtaaaggcagatgacaatattaagtatttggttactaacagaagtttgaattctgctaggggtaaaaccattttgaaaggctgaagttttctgcaygtaagagtttcatgtttcgtgatgtttctgtttcaaagatcaaatgattcttttggactagaagtataggagaaggcagacacaaaatgctgaagactatataaaggttgtccccatgcaaaatgrgcaattccatcagttgatgtgggactgcaggaaactgtaaggatgrataaatgagtctgggaaatctttcaagggagaaataatttcagcagtcttttgaaaaacttaaaggcatgtagagtagcctccaccatcatccttcttcccttattatgtctccacagtagaaagagtaggaaagaagatccagaatgcagcagtcttcacaaaccctatgtgaaaaatatactttggactgaataattgggcagaagcaacatgaactaattttcactggartggctggaaatgtagttgtgg

SEQ ID NO: 46679 - DNA, 600 bp, Chicken  19866894287857_8
cacctgggggtttcctggaggcwgccagccaggtaaaggcagatgacaatattaagtatttggttactaacagaagtttgaattctgctaggggtaaaaccattttgaaaggctgaagttttctgcaygtaagagtttcatgtttcgtgatgtttctgtttcaaagatcaaatgattcttttggactagaagtataggagaaggcagacacaaaatgctgaagactatataaaggttgtccccatgcaaaatgrgcaattccatcagttgatgtgggactgcaggaaactgtaaggatgrataaatgagtctgggaaatctttcaagggagaaataatttcagcagtcttttgaaaaacttaaaggcatgtagagtagcctccaccatcatccttcttcccttattatgtctccacagtagaaagagtaggaaagaagatccagaatgcagcagtcttcacaaaccctatgtgaaaaatatactttggactgaataattgggcagaagcaacatgaactaattttcactggartggctggaaatgtagttgtggcacttctcagaactgctctcttactgaaaaaaaactgtttggaata

SEQ ID NO: 46680 - DNA, 600 bp, Chicken  19866894287857_9
ggttgtccccatgcaaaatgrgcaattccatcagttgatgtgggactgcaggaaactgtaaggatgrataaatgagtctgggaaatctttcaagggagaaataatttcagcagtcttttgaaaaacttaaaggcatgtagagtagcctccaccatcatccttcttcccttattatgtctccacagtagaaagagtaggaaagaagatccagaatgcagcagtcttcacaaaccctatgtgaaaaatatactttggactgaataattgggcagaagcaacatgaactaattttcactggartggctggaaatgtagttgtggcacttctcagaactgctctcttactgaaaaaaaactgtttggaatatgaagcctycctgtgctgtgacagtaaggtaatgactcttatactctagagctctttggggcagagaggtttattaggaagacagcacggcatcttgtctgtgaagtgtatggattctatatgaaaacagcaatttatctttaccttctatcagaaatgcaatgaggccaacaaaaacaattttatctgtaagtctactackggtgacactaattaagaatgttagatgtgtg

SEQ ID NO: 46681 - DNA, 600 bp, Chicken  19866894287866_1
cgggaatgaggtgttagtgcctccttcctcccagctcagccctggtgtgcgcttacacctgcaggctgtgcttgctgctcttgctcagcttcagctgagagatgcctttttgttttggtttgtttttaatatattttttgttcattcccctctttttctctgctgggggggtgagctctgtcctacccgggaagcactgcacgctctgcacagtgcagtgttgctctgcatgctgagacccatctttgtaggaacccaaagagtgagaggagcatctgagcacccaatgctttgtctcayagtgaatactgtgaatctgttcacacttcagtgagtgaaacaccctcaccacgcagcctaaatgcacacatggctctgagcacacgttctgagctggctgaattgagagctctccagcagacatccccaccaatgcagacattagcagcagggtttaccattgctcactcagcctaaaatctctgctttggcctttttatagaaggtctgtaggcttactttcccactgtgcctctcagtcagagaaacatgcttctttctcagtctggtcaagctccacatctctacacagcagtgctg

SEQ ID NO: 46682 - DNA, 600 bp, Chicken  19866894287866_2
ctctgcaggcttggagcagcacacgcagtgccaccaacagctggaagcatggggcgagctgttgggtgctcagggcacagcctgaagtgatcatagaatcgtagtctggcttgggttggaagggacctcaaggatcatcaagctccaacccccctgccgcgcgggctgtgcgacggcacggcgctgtgcgacgctccccttctttttctgcccttacaaatagcaatggcacagcgccatgcggacccaccgacccgcctgcgctcagacattattgcagcgtgccaaagcagcgcctcycgtgattgctttggggctgcggtgctcagctggcaccgtccctcctccgcggtgaccgcgttgcatgcagcggggctgcgtccgtgcgagggcagcgagcggcaagctgcttcccttggccaggcggccggaaaaggccggaacggcaccgtcagcacagagccggggctgcccccagcggtgtgtgcggggttgggctgcgaagcatcatccgaacgagcagcagccgaagcgctcagtaggggacggcatcgcaccgcgaacggagcgagcgcagagctccgcgctgcatcctgcccc

SEQ ID NO: 46683 - DNA, 600 bp, Chicken  19866894287881_1
tccctgtcaggggtgcgggggagcggtgctgcctgcctgggagctcctttccctgcccggattggggtcagcctggtacaggacctggttcaccctgaattcctcttcccacggagtggaaggtggtttcccacgggctgcgttgggccctctcctcttgacctacactgttcatagaattacagaatggcctgggttgaaaaggaccacaatgctcatccagttccaaccccctgctatgtgcagggtcgccaaccagcagcccaggctgcccagagccacatccagcctggccttgawtgcctgcagggatggggcatccacagcctccttgggcaacctgttcagtgcgtcaccaccctctgggtgaaaaacttcctcctcatatccaacctaaacctcccctgtctcagtttaaaaccattcctccttgtattttttgtgatattaagtacattaagtataattttgtttttacttttgtaaaacagctctgctgtggagagaaaccagtgacactttgtgttcagttgagagcatctactgtgttcgagcacatcaattaagtggaacttcattagcagaaatttccttttcagt

SEQ ID NO: 46684 - DNA, 600 bp, Chicken  19866894287881_2
ttgtgatattaagtacattaagtataattttgtttttacttttgtaaaacagctctgctgtggagagaaaccagtgacactttgtgttcagttgagagcatctactgtgttcgagcacatcaattaagtggaacttcattagcagaaatttccttttcagtttggttcatttctgtcttcgtatttctggatcatgattcgtgattttagatctgaaagatacccacagaatgaaaataggtggaagtcaggaggttatgacttgagagatgtccagcatgaagttgtcagcagactttytgaggtacactgcgtaaatcagtcagtccatcagtctcagtgcccacctgtattatggaggaaatatctgatttcatatctgccttttcttttgaaattcagattcctgaactgactctttccatgtgttgccctgtgaatgcagagagtctccagtcccacctgaggccccatgaagcgggaataccaaaaattcctactggaacacatggtggcaggaagaagcactccctatgaaaaattaataacaatcaagctctgatttgtcagaatggaactcaaatttatgaaaaatgctaa

SEQ ID NO: 46685 - DNA, 600 bp, Chicken  19866894287886_1
ttttttttttgggcaggtatgttgaaagtgaatttgcaacattagcctagtgatagaagaattcaatttccttcgggttttaattttttttcttacaaaacataatttttccaaaagcacatctgtattttggccatggaacacaattcagatcctcaaacaatttattttctgtttgtaaaagcacatccttaagccactattactatatgtgcaaatctaatactatgattctaatgctgggattctacactggaatttgcacagaggctttgaagtagcaatggacaatgattcccytttggaaaagaagcatcatcttgctttcttatttcaggacatgattcgtaggatttctagctactacgtgttccagttctccaatgggaatatgtcttttctggggctctttttagatcatgggacagaataattttcactrgagttggattttatctctctgcatgtgtgctagctttgtataacatgcacttcatttccactcatttttccaaaagaaaactcagagacataaaaatgagtaatgactttttcttgatgtggtagggcacttgagcactgttcagttgtgacaaacaa

SEQ ID NO: 46686 - DNA, 600 bp, Chicken  19866894287886_2
acaattcagatcctcaaacaatttattttctgtttgtaaaagcacatccttaagccactattactatatgtgcaaatctaatactatgattctaatgctgggattctacactggaatttgcacagaggctttgaagtagcaatggacaatgattcccytttggaaaagaagcatcatcttgctttcttatttcaggacatgattcgtaggatttctagctactacgtgttccagttctccaatgggaatatgtcttttctggggctctttttagatcatgggacagaataattttcactrgagttggattttatctctctgcatgtgtgctagctttgtataacatgcacttcatttccactcatttttccaaaagaaaactcagagacataaaaatgagtaatgactttttcttgatgtggtagggcacttgagcactgttcagttgtgacaaacaatgctaaaggagctggggagcataataatatgcaaaatgacaaaagaaaaaaaaaagacagatttcatcaattttggtcacaaaaaaaatatttcggtataaagtatcacacagctacttacagatcaaagcacaataaaggc

SEQ ID NO: 46687 - DNA, 600 bp, Chicken  19866894287888_1
caggctatttttgttgtgatcaaagactctatgtggtagaggtgtgcaatttgagtcctgtctaatgcttgaattttgatactgataaatgtatcagttaagctggtatatatttttctcctagaatagatatcagcagctcttcttacaggactcctcaggtcaacagatgtacctgtacttaaaagctgcatttagaacatctggaaaatatcctttcaccttgctataagactgccatgttataaacagcatccaaatagatcctgactggaaaggagggagggagcccttgctaartaagaagaaagtgctttccacatgtgaggaagtcatgtcttaacaaaagaagcaaccctatattccartaatcattcttaagtgatgccttgctccgagttacactttcattttgtgtttcttcaagctgttgatggaaaagctagtgaagtggggctcctgtacataaggtaactaagaagagagattttaatgaagcaacttggtattaacagccataagggtggcttacatctagcctatactcagtgctcagggaagtacgtgccaagtaagttaggattttccaggaactgaagt

SEQ ID NO: 46688 - DNA, 600 bp, Chicken  19866894287888_2
ttgaattttgatactgataaatgtatcagttaagctggtatatatttttctcctagaatagatatcagcagctcttcttacaggactcctcaggtcaacagatgtacctgtacttaaaagctgcatttagaacatctggaaaatatcctttcaccttgctataagactgccatgttataaacagcatccaaatagatcctgactggaaaggagggagggagcccttgctaartaagaagaaagtgctttccacatgtgaggaagtcatgtcttaacaaaagaagcaaccctatattccartaatcattcttaagtgatgccttgctccgagttacactttcattttgtgtttcttcaagctgttgatggaaaagctagtgaagtggggctcctgtacataaggtaactaagaagagagattttaatgaagcaacttggtattaacagccataagggtggcttacatctagcctatactcagtgctcagggaagtacgtgccaagtaagttaggattttccaggaactgaagtcagacgtgcaagttgaaatggaaggttttggtgatactgatatgcaagcatgacatgggaaacagtat

SEQ ID NO: 46689 - DNA, 600 bp, Chicken  19866894287892_1
tcatgcaagacatttcaccaagaactaggcaggcatttcttaaaacaccacatcactattctctctgtcatacatagaatggacaggtcatagtctcattaattttggaatagacttctaagatcatccagtccaaacatcaacccattcccaccatgcccactaaccacgtctgtcagtgccacatcctcacagtgtttttgaacacctccggggatggtgactccaccacctccctaggcaacctgttccaatgcatcaccactctttctgagaagaaagttttcctaacatccaacmtgaacctcccctagcacattagagtagttccctctgctgctycccataagacctgtgttctagacccttcacagctctattgctcttttctggacacactccagggtctcaatgtcattcttgtaggaggagcccagaactgaacccaatacttgaggtgaggcctcaccagagcagagtacagagggacgatcacctcactggtccttctgcctgcactctttctgctacaagccaggatgccattacttgttggactgcagcatgtagacatctaatctgaggagagattaatccctt

SEQ ID NO: 46690 - DNA, 600 bp, Chicken  19866894287892_2
aaacaccacatcactattctctctgtcatacatagaatggacaggtcatagtctcattaattttggaatagacttctaagatcatccagtccaaacatcaacccattcccaccatgcccactaaccacgtctgtcagtgccacatcctcacagtgtttttgaacacctccggggatggtgactccaccacctccctaggcaacctgttccaatgcatcaccactctttctgagaagaaagttttcctaacatccaacmtgaacctcccctagcacattagagtagttccctctgctgctycccataagacctgtgttctagacccttcacagctctattgctcttttctggacacactccagggtctcaatgtcattcttgtaggaggagcccagaactgaacccaatacttgaggtgaggcctcaccagagcagagtacagagggacgatcacctcactggtccttctgcctgcactctttctgctacaagccaggatgccattacttgttggactgcagcatgtagacatctaatctgaggagagattaatcccttcccaaggaaataggggcagtgacagaagcacatcctgatctg

SEQ ID NO: 46691 - DNA, 600 bp, Chicken  19866894287896_1
cagtcattgcaataaaatcctttagttggtaattgggggtagttaaaaactggagtgaaactgcatttcacttaaaaaaaagagtgagttttgtttcaatactgaaacaagtatttttgtttttcatttaaaagacgatacataggcctggttgtatgatttccagttatttttgaattctgcactaggggggaaaagatacctgcaatagcacattccttactcataactgaacgttaaacaaactgcctgttcaggttaattaggtacactgattcaggtatcgtatgacaaaaaggyaaaaaaaaagttgtagttacaggttggtaccatacacaacgtctaccacattcaytctaatttagcaagacttcagtttactctccatgccaattcagagcatgtagggaagtatttgaacaggtggttcactattaattcttggatctagagggacagcatcttatgctgacactagttctgtacttgattacagcactaaatggaacggctgagcagtatcagcttccagcagtgctgctactagtacctatgtactcgggggtgtttataggctcctttaaagttaagagtaacaat

SEQ ID NO: 46692 - DNA, 600 bp, Chicken  19866894287896_2
tgaaactgcatttcacttaaaaaaaagagtgagttttgtttcaatactgaaacaagtatttttgtttttcatttaaaagacgatacataggcctggttgtatgatttccagttatttttgaattctgcactaggggggaaaagatacctgcaatagcacattccttactcataactgaacgttaaacaaactgcctgttcaggttaattaggtacactgattcaggtatcgtatgacaaaaaggaaaaaaaaaagttgtagttacaggttggtaccatacacaacgtctaccacattcaytctaatttagcaagacttcagtttactctccatgccaattcagagcatgtagggaagtatttgaacaggtggttcactattaattcttggatctagagggacagcatcttatgctgacactagttctgtacttgattacagcactaaatggaacggctgagcagtatcagcttccagcagtgctgctactagtacctatgtactcgggggtgtttataggctcctttaaagttaagagtaacaataaagtgtttcattgggcccttaaatctaattaacgttaaatctaacatctcttgt

SEQ ID NO: 46693 - DNA, 600 bp, Chicken  19866894287897_1
cattccctcagtgtttatttgccccatgacaggtgatcagacatagggtagagaagctcacccccatgtttattttgcagaggctctgtccttgtcagaagccctgaaaatgctctgttgtttgttacttcacaagaaaggaaaaaaaaaaaaaaaaagaacctcaccaagaaaaaaaaacttaagtacgtcacagatactttagtggaagtcagctgcaggcgcgttctgctctatgcccagcactacagaagaataatcaccttctcattctttcgtgctgatgttgtgctgagaccrctgccctccagcctctctgtctccctaacagggatggaaacagtcccacasattgccctgttttacgtgtttaactgaagttttaaccttctgctgcgggctggggttaccagagctcacattcagcatcccccaccactgggtccttgagctgggcagcgtgagtgcatgccaagcaccatcagtgaaggatcacaaagcccttttccctctttgcctcccccccatccatccatccatctgtgccccccgtggggtcccaccactgggaaaggtccccaggaggaggctgggctcagc

SEQ ID NO: 46694 - DNA, 600 bp, Chicken  19866894287897_2
agaagctcacccccatgtttattttgcagaggctctgtccttgtcagaagccctgaaaatgctctgttgtttgttacttcacaagaaaggaaaaaaaaaaaaaaaaagaacctcaccaagaaaaaaaaacttaagtacgtcacagatactttagtggaagtcagctgcaggcgcgttctgctctatgcccagcactacagaagaataatcaccttctcattctttcgtgctgatgttgtgctgagaccrctgccctccagcctctctgtctccctaacagggatggaaacagtcccacasattgccctgttttacgtgtttaactgaagttttaaccttctgctgcgggctggggttaccagagctcacattcagcatcccccaccactgggtccttgagctgggcagcgtgagtgcatgccaagcaccatcagtgaaggatcacaaagcccttttccctctttgcctcccccccatccatccatccatctgtgccccccgtggggtcccaccactgggaaaggtccccaggaggaggctgggctcagccctcgctgcagtctcaatctcttccctgatctatactgcggtgagcagtga

SEQ ID NO: 46695 - DNA, 600 bp, Chicken  19866894287899_1
ttttttctcacacctacatataacatagactttggtgatttttatttacttttaaagtatagactaagagtgattagagtgtcctgtgaagagtggttcattttttggatcttagaaatgtcacgttgtcatgaaccaccaaagttctttgatgcttagtgctcctacagctaatcctcttcagtggcctctgcagttatgaataaatagacatttctagattgcagataatttcatcctaaagatgctgtctacaggagagtgtgattgtttaagaccactgggcgctaagctctaccrtgctgctctctcactctccttcctaaaaaggataagaaagagaatatragggaaattaatctgatttattgactactgataactgatcagagcaatgagaactaaaagcaaactataaacccctctgctactaaaaccttgtcacagaggcccagtgcacagactgacaaatcctaccctcaaaatacttacttaattctactgtctatttgaactacccctcagtgaaagagtctgctgcaaaggtggcagctcacaataaccataatcatggatattttcctgagccagcaggtcact

SEQ ID NO: 46696 - DNA, 600 bp, Chicken  19866894287899_2
cttttaaagtatagactaagagtgattagagtgtcctgtgaagagtggttcattttttggatcttagaaatgtcacgttgtcatgaaccaccaaagttctttgatgcttagtgctcctacagctaatcctcttcagtggcctctgcagttatgaataaatagacatttctagattgcagataatttcatcctaaagatgctgtctacaggagagtgtgattgtttaagaccactgggcgctaagctctaccrtgctgctctctcactctccttcctaaaaaggataagaaagagaatatragggaaattaatctgatttattgactactgataactgatcagagcaatgagaactaaaagcaaactataaacccctctgctactaaaaccttgtcacagaggcccagtgcacagactgacaaatcctaccctcaaaatacttacttaattctactgtctatttgaactacccctcagtgaaagagtctgctgcaaaggtggcagctcacaataaccataatcatggatattttcctgagccagcaggtcactgtgtcagtcttccttggcctggcttctgcctgcgagcctgagcatggg

SEQ ID NO: 46697 - DNA, 599 bp, Chicken  19866894287901_1
  misc_feature (1)..(142): n is any nucleotide
nnnnnnnnnnnnnnnnnnnnnnnnnnnnnnnnnnnnnnnnnnnnnnnnnnnnnnnnnnnnnnnnnnnnnnnnnnnnnnnnnnnnnnnnnnnnnnnnnnnnnnnnnnnnnnnnnnnnnnnnnnnnnnnnnnnnnnnnnnnnnncccgccgaatctcggaactttaccgtgcgtgcaggtgccttcccgcccatctttcctcacgccgcgctcctcctgaaggcgctttttctaccgcgaattcctccgtgcgccctgcgccgtgctcacgcggagctgttgtgccaagtgctcactgaaamatgcgttatcttactggtgtgaggcgatttacctctcgtcgcttcccctcagcgctttgctgtcttaattaaatcagacttcgagccctttgagcatacccttatktgaatgtttctttttggcttccgttgcaaaatgttgagtgtgtgaataggaagaagcacctcagagtggtctcaatgaaaggtttgtatcattaaatttatattttgtttaggaattaaataattgttgtagtaatagagagtagactaactccatgttaattttaacttgcgcattaaactggaagcacaag

SEQ ID NO: 46698 - DNA, 575 bp, Chicken  19866894287901_2
  misc_feature (1)..(36): n is any nucleotide
nnnnnnnnnnnnnnnnnnnnnnnnnnnnnnnnnnnncccgccgaatctcggaactttaccgtgcgtgcaggtgccttcccgcccatctttcctcacgccgcgctcctcctgaaggcgctttttctaccgcgaattcctccgtgcgccctgcgccgtgctcacgcggagctgttgtgccaagtgctcactgaaamatgcgttatcttactggtgtgaggcgatttacctctcgtcgcttcccctcagcgctttgctgtcttaattaaatcagacttcgagccctttgagcatacccttatktgaatgtttctttttggcttccgttgcaaaatgttgagtgtgtgaataggaagaagcacctcagagtggtctcaatgaaaggtttgtatcattaaatttatattttgtttaggaattaaataattgttgtagtaatagagagtagactaactccatgttaattttaacttgcgcattaaactggaagcacaaggccgcaatgctatgcagctgacataacagcccttttctcactgtattgatcctgatcttctactgcacttttattttccatt

SEQ ID NO: 46699 - DNA, 600 bp, Chicken  19866894287908_1
gaaaagaaatatgcttgaagctgaagaaaatgtgatagaaaaataaatggatataaattctccatagaaaaactctggttgaaagaaaaagaaaaaaaaaaaagaagaagaagaaaaaaaaaacttccaaaatctttggtggactttaatcccgaagtggggcagtgtttaaatgatggaataaaaataatttctagccacattctagagtttgtaattttatcaacacagctgataaaatgctgtcactttgacagcagtgggcttggcagtctcttctaggcttatctttttgctccygcacccagaccaagcactttggtgccaagtcaccctgctggcttcctcatgaagcctaaaaaggacaaagatgatggcatgaaacctgtcycactcttttactttttcatattcttttgctaccmrcctgtcacatgccattgctgagtacctcttctgttttgatattatttctggatataatattttgttttcatgctttacagtaaatgtgtcaatccctcttctatagagagagacaagattgtcactgctctgcaccacagaaatttactctccttctatttctatttccttcaa

SEQ ID NO: 46700 - DNA, 600 bp, Chicken  19866894287908_2
aaaaaaaaaaaagaagaagaagaaaaaaaaaacttccaaaatctttggtggactttaatcccgaagtggggcagtgtttaaatgatggaataaaaataatttctagccacattctagagtttgtaattttatcaacacagctgataaaatgctgtcactttgacagcagtgggcttggcagtctcttctaggcttatctttttgctccygcacccagaccaagcactttggtgccaagtcaccctgctggcttcctcatgaagcctaaaaaggacaaagatgatggcatgaaacctgtcycactcttttactttttcatattcttttgctaccmrcctgtcacatgccattgctgagtacctcttctgttttgatattatttctggatataatattttgttttcatgctttacagtaaatgtgtcaatccctcttctatagagagagacaagattgtcactgctctgcaccacagaaatttactctccttctatttctatttccttcaatttctatttccagaaaatagggaaacagtgatcactttcaaaaggacagcaaagaggacttgctacattttaattttctgttacttaagta

SEQ ID NO: 46701 - DNA, 600 bp, Chicken  19866894287908_3
tccaaaatctttggtggactttaatcccgaagtggggcagtgtttaaatgatggaataaaaataatttctagccacattctagagtttgtaattttatcaacacagctgataaaatgctgtcactttgacagcagtgggcttggcagtctcttctaggcttatctttttgctccygcacccagaccaagcactttggtgccaagtcaccctgctggcttcctcatgaagcctaaaaaggacaaagatgatggcatgaaacctgtcycactcttttactttttcatattcttttgctaccmrcctgtcacatgccattgctgagtacctcttctgttttgatattatttctggatataatattttgttttcatgctttacagtaaatgtgtcaatccctcttctatagagagagacaagattgtcactgctctgcaccacagaaatttactctccttctatttctatttccttcaatttctatttccagaaaatagggaaacagtgatcactttcaaaaggacagcaaagaggacttgctacattttaattttctgttacttaagtaataatatttctaaaatctttctgaaacccttcca

SEQ ID NO: 46702 - DNA, 600 bp, Chicken  19866894287908_4
ccaaaatctttggtggactttaatcccgaagtggggcagtgtttaaatgatggaataaaaataatttctagccacattctagagtttgtaattttatcaacacagctgataaaatgctgtcactttgacagcagtgggcttggcagtctcttctaggcttatctttttgctccygcacccagaccaagcactttggtgccaagtcaccctgctggcttcctcatgaagcctaaaaaggacaaagatgatggcatgaaacctgtcycactcttttactttttcatattcttttgctaccmrcctgtcacatgccattgctgagtacctcttctgttttgatattatttctggatataatattttgttttcatgctttacagtaaatgtgtcaatccctcttctatagagagagacaagattgtcactgctctgcaccacagaaatttactctccttctatttctatttccttcaatttctatttccagaaaatagggaaacagtgatcactttcaaaaggacagcaaagaggacttgctacattttaattttctgttacttaagtaataatatttctaaaatctttctgaaacccttccaa

SEQ ID NO: 46703 - DNA, 600 bp, Chicken  19866894287910_1
cttgcatagtcttgtattcagtagattaggaatacaagctctttcacataaactacatgagaattgaaataaaattacatcatacatgctcctgaagaatgagggggcatgagtatggatccaacaaaacccagaagtgacacatctgagaacttgattaccatcaggactactaagtccttaaccttactactgctggacattatcttactacttagagatgtgaagttaataacacactgacagaatccgattgcaagtgtgtcttacagtgtatcttcaagtcctgtgggtacatgygttcctcttcttaatttagttctttgtaaataagtctcatgacagacgtaaacagaaagtctaataattccacaaaaaaagccacagtgttagatttacccaaaacctatttatgaaaacctctccattagatacagtgactatcacaatcacaaagatctactgacacagatggaagtctgtttgaagatttaagtcattactcttgatacagaactgcaactattaacctagcaagacaaaaatgttttgatataatctcaccagtcatcctcagtaatatctaataggctaattctt

SEQ ID NO: 46704 - DNA, 599 bp, Chicken  19866894287920_1
  misc_feature (1)..(5): n is any nucleotide
nnnnntccttgatcctgcttttaacatagcatggtctgagatttaagagttctgttaacaaacaagatgtgagagacaaaattagatttatttttacaagatatttggaaggtagtttgaaatattgatgaacaaaatgaggagaatttatgaaaacatgaagtaaatccaccctgcctataaaacctgattagaaccattgattaagtaataaaagcctacagtttggctttaataagcaacagatgatgtggccaaagcgaggggcattctctctgaagttacaggagaagatgcaamatccctytcaggtctttgtaaccctgttcaaaccaatgagatcgatgagtaaagtcaacatcagcccttcaacgtacttggttttttcctgtgattaatggcattgggagaactcccaccagctgctgttggctttgggccatgagccaagcagagcacacagatagatccattcttgtgattaaagaaaaaaaggcagtagatggattccaaatacttgcaacaagtagtcagcgagaaacccacaggctaggaagtgtttgcggagcgtattaaaagctaacactgactttcaaatg

SEQ ID NO: 46705 - DNA, 600 bp, Chicken  19866894287920_2
cttgatcctgcttttaacatagcatggtctgagatttaagagttctgttaacaaacaagatgtgagagacaaaattagatttatttttacaagatatttggaaggtagtttgaaatattgatgaacaaaatgaggagaatttatgaaaacatgaagtaaatccaccctgcctataaaacctgattagaaccattgattaagtaataaaagcctacagtttggctttaataagcaacagatgatgtggccaaagcgaggggcattctctctgaagttacaggagaagatgcaamatccctytcaggtctttgtaaccctgttcaaaccaatgagatcgatgagtaaagtcaacatcagcccttcaacgtacttggttttttcctgtgattaatggcattgggagaactcccaccagctgctgttggctttgggccatgagccaagcagagcacacagatagatccattcttgtgattaaagaaaaaaaggcagtagatggattccaaatacttgcaacaagtagtcagcgagaaacccacaggctaggaagtgtttgcggagcgtattaaaagctaacactgactttcaaatgagctcaag

SEQ ID NO: 46706 - DNA, 600 bp, Chicken  19866894287930_1
tctgcagttctatggaagatttgatatatttgacacactagttttaccctgttttatcatcaaaataaatacattttaagtcattttgcacaagtttccactggaggaaaatacaacctagcatgaaaggcatccagccatttggacaaagcatttttatagtttggctttggattcatattctataaaagcagaggaagaaacttaatctcttggataacaataatggtagtagctaactgctgattgaagctcctgaggaacaacgtttatcatggtgcatttcaaccatggaaaaartgggcactgagtctaaatgtagcccttggtcctgtccctatagcataaggaaacagaaatctacttatttcaggaartttgatgtatgcttaagtgtttgggataagaggatgcattttcttccgcagttgttttgttgcggtgttcctttggctatgttagatcagatacagtgtttttagaaggctgcataagatggaaccagctccagctgagggaagggagaaacccacaattgtaaatgtgtacggcatttccatcctttctttctttgccaatagacttctcttcctacctaac

SEQ ID NO: 46707 - DNA, 600 bp, Chicken  19866894287930_2
aagtcattttgcacaagtttccactggaggaaaatacaacctagcatgaaaggcatccagccatttggacaaagcatttttatagtttggctttggattcatattctataaaagcagaggaagaaacttaatctcttggataacaataatggtagtagctaactgctgattgaagctcctgaggaacaacgtttatcatggtgcatttcaaccatggaaaaartgggcactgagtctaaatgtagcccttggtcctgtccctatagcataaggaaacagaaatctacttatttcaggaartttgatgtatgcttaagtgtttgggataagaggatgcattttcttccgcagttgttttgttgcggtgttcctttggctatgttagatcagatacagtgtttttagaaggctgcataagatggaaccagctccagctgagggaagggagaaacccacaattgtaaatgtgtacggcatttccatcctttctttctttgccaatagacttctcttcctacctaaccttgtttgcaaatagtgccagcaggggaaatttagctcaattgagggtagttctgtctggcagtggatacagacttg

SEQ ID NO: 46708 - DNA, 599 bp, Chicken  19866894287934_1
  misc_feature (1)..(59): n is any nucleotide
nnnnnnnnnnnnnnnnnnnnnnnnnnnnnnnnnnnnnnnnnnnnnnnnnnnnnnnnnnnttacagaggcctgcaccaaaccaagcacatgctttaaatatgaaattaacagcagtgataagttaagaccttgcttaagtgctctgctggatctaagccctaatttttaaccaacatccaactttgctttgccagcaaagctctgatgggaatgaattactcaattggggtgtgctacaaagaaagaatgtattatttatcactgaaagaaagttatccagtacagcctgggctgttgtgrccatctatggttgagttcatgcttctgaaggatacgagacaggcaaagcgtaaaattaggatgctaaattttatgaaaactaacttgtggttcttcggggagttagtcaaccaaacaccctaggaaactgtcctcatgggcaaaggtgagctgggagatcttaaggagactctcctcagggtgcaagagctccccaggtgtagcaagtcaggaaaggaaggcgagagactggtgtggctaaactgggacctgctggtcaaaatgaagagcaataaaaaaaatgccccccagtaccagta

SEQ ID NO: 46709 - DNA, 600 bp, Chicken  19866894287934_2
tcttcggggagttagtcaaccaaacaccctaggaaactgtcctcatgggcaaaggtgagctgggagatcttaaggagactctcctcagggtgcaagagctccccaggtgtagcaagtcaggaaaggaaggcgagagactggtgtggctaaactgggacctgctggtcaaaatgaagagcaataaaaaaaatgccccccagtaccagtacaggctgggggatgaaaggattgagcgcagctctgctgaaaaggacctgggtgtactggtagatggggagctagacatgagacagcaatgtrccctcacagcccagaaatccaaccgtgccctgggctgcatcaaaagaagtgtggccagcaggatgagggaggtgatcctrcccctctactctttacgaaaacaaagcatcattctttttattttgtatattttcttttgctcttcctaactcgcraaaactaaagcagtttcagtaggtaaatgtatgactctacttggcatgcagaatgccagagaaaagtgctaaattggcaatgaagggaaatatttgtacttgtcaactttactgactgagtattagaattttgagtagaaagaca

SEQ ID NO: 46710 - DNA, 600 bp, Chicken  19866894287934_3
ctcctcagggtgcaagagctccccaggtgtagcaagtcaggaaaggaaggcgagagactggtgtggctaaactgggacctgctggtcaaaatgaagagcaataaaaaaaatgccccccagtaccagtacaggctgggggatgaaaggattgagcgcagctctgctgaaaaggacctgggtgtactggtagatggggagctagacatgagacagcaatgtrccctcacagcccagaaatccaaccgtgccctgggctgcatcaaaagaagtgtggccagcaggatgagggaggtgatcctrcccctctactctttacgaaaacaaagcatcattctttttattttgtatattttcttttgctcttcctaactcgcraaaactaaagcagtttcagtaggtaaatgtatgactctacttggcatgcagaatgccagagaaaagtgctaaattggcaatgaagggaaatatttgtacttgtcaactttactgactgagtattagaattttgagtagaaagacataaaaattgttcagataaagaaattacctgccaaacagtttttgcctaagggaaaactaacttctgatggaccaaattca

SEQ ID NO: 46711 - DNA, 600 bp, Chicken  19866894287934_4
gacctgctggtcaaaatgaagagcaataaaaaaaatgccccccagtaccagtacaggctgggggatgaaaggattgagcgcagctctgctgaaaaggacctgggtgtactggtagatggggagctagacatgagacagcaatgtrccctcacagcccagaaatccaaccgtgccctgggctgcatcaaaagaagtgtggccagcaggatgagggaggtgatcctrcccctctactctttacgaaaacaaagcatcattctttttattttgtatattttcttttgctcttcctaactcgcraaaactaaagcagtttcagtaggtaaatgtatgactctacttggcatgcagaatgccagagaaaagtgctaaattggcaatgaagggaaatatttgtacttgtcaactttactgactgagtattagaattttgagtagaaagacataaaaattgttcagataaagaaattacctgccaaacagtttttgcctaagggaaaactaacttctgatggaccaaattcactcagaactttaattttttttttcttcctagatctttaataactgttctttctcgtcttctatttttagagttat

SEQ ID NO: 46712 - DNA, 600 bp, Chicken  19866894287935_1
tttaattcaggagctattttaaatgcagaattcaagcttaatatgagctaaaatttaaatatgttggtttatgagtgtttcagtcactgaagatttttttttcctgttttctaaattggccaaagtcattctgataggacagaaataagaaaaatgccatttccattcacacattttgcatatttctgtattgtctgtggtatttaagaaaaaaactgaagttgtgtaaatgataaaacattttaatgcctttactttgtatcttatgtctgaactcttgcaaagcagaaagagctacaratggaaaatacattcttaattttaaaatacagcgtgaaaagaacacgtgcaccaatgagccactgattaaaataaataaaaygaggagagcacaagttaattttatttatttatttattactgaaatggtatttggctcttctcaggagctggaatctgtcgtaaattatgttttccttcttgaaaaattagaagcctccaaaggcaatctgagatattttttcatcctttttattttaagcaacgcgtcattcataatttctttgagggaaaactgggtgccgagggtttggaatcagt

SEQ ID NO: 46713 - DNA, 600 bp, Chicken  19866894287935_2
gtcactgaagatttttttttcctgttttctaaattggccaaagtcattctgataggacagaaataagaaaaatgccatttccattcacacattttgcatatttctgtattgtctgtggtatttaagaaaaaaactgaagttgtgtaaatgataaaacattttaatgcctttactttgtatcttatgtctgaactcttgcaaagcagaaagagctacaratggaaaatacattcttaattttaaaatacagcgtgaaaagaacacgtgcaccaatgagccactgattaaaataaataaaaygaggagagcacaagttaattttatttatttatttattactgaaatggtatttggctcttctcaggagctggaatctgtcgtaaattatgttttccttcttgaaaaattagaagcctccaaaggcaatctgagatattttttcatcctttttattttaagcaacgcgtcattcataatttctttgagggaaaactgggtgccgagggtttggaatcagtcagaaccaatctgtgacattttgtcctatgaatctatgtcaccaacttttaagttttgtacatatctttaggcagaggtaaa

SEQ ID NO: 46714 - DNA, 600 bp, Chicken  19866894287935_3
ccttgctgtgttaacaatgtttgtatgcagacaaaaattatcatcaaaacctaacacttttccagtttctctgtcttcagggaatgaaacgcaggtgagaagctggcaaaactagtggtttactgacataattctatcacatggttattttagctaacttacaagcatagaggaaatacacaaataatgtattttcttacaaatttgcatgcagatggatgtaaaaacagttctgtgtttgttgaattgttgagagagacatcgattggaaaggtacacttttcataaaataaaatactwttctatctccatatttgacacagatatttcagatgctgaagacatctttattttgatcctgaatgtaagaaattataacgtgcatcagtttaaatatagaaacattttgacatcatgcaaagaaacaagcagctttgtggctaccgctttcaacttctcatcaataaatgtattttaatagagttttcagggacacatatgctttttctttaaaaatacaaacttcccatgttaatacttatgacagttactatatgttttgtcgggtaggtgtaaaggtaatgttaaagctttttgtgg

SEQ ID NO: 46715 - DNA, 600 bp, Chicken  19866894287941_1
tgcacttgcacactggtatcgatcaggggaggtgaggggctttcactgcagcaagaacagctcctttggtcaccactgctctgccttacttctacgaaggaggttgctaggagcgagcatgctccaggtgtgtcgcaatgtgggtcacctatggcacagcttaaacttccttcagcagcgggtggctgtgcactgactgcttgatccgctgcacagggggggtggtgtgtttctctaggcttccctgaagtacacggattcagtgtgtttagcattgtgtgttacaacgtcagttaaggraggtaaatcagaactgtgtggataaaaagacaaggagacatggctgagctaataggaatttaaaaaattgaaggtttgttttcagctgattttgtcattccttaatcttcttgtgtttgcttattgttttgtacttgagtttgtttttttgcttatgtgttgttcctctgttgaatgtttgaaaaggagggaagatgtgcttgctaatatgtaatattgttcgyaccattattatctggatatatcctgaagttttaatttgagttctttgcttcttgatgagctgagctgctgggggaa

SEQ ID NO: 46716 - DNA, 600 bp, Chicken  19866894287941_2
gtgtgtttctctaggcttccctgaagtacacggattcagtgtgtttagcattgtgtgttacaacgtcagttaaggraggtaaatcagaactgtgtggataaaaagacaaggagacatggctgagctaataggaatttaaaaaattgaaggtttgttttcagctgattttgtcattccttaatcttcttgtgtttgcttattgttttgtacttgagtttgtttttttgcttatgtgttgttcctctgttgaatgtttgaaaaggagggaagatgtgcttgctaatatgtaatattgttcgyaccattattatctggatatatcctgaagttttaatttgagttctttgcttcttgatgagctgagctgctgggggaaggaaaaaagtaaactaaaatatgtagtgaaactacagaacacctattaaaatcctatctgtatgattctgtcgttagagaactcttcaaagtgatgcaaaagaggacatccaggccttgctataggttctgaagtgaagaaggcactatgtagatatctcgtataatcttaattttgcttctgactaggaagttgagtgagctttattaaggtggttaaaatct

SEQ ID NO: 46717 - DNA, 600 bp, Chicken  19866894287941_3
tattatacatataacaaaaccagaatgcaagttactgttaattgtaatagaagcctgcagcttgcactccattgttggactcatctgagtccctcctagtgtcttacattgggcagttgaggcacgggtttactctacaggctgtacctggttcatagcttccctcccattctgcttgcccttccctagcttttcctgccaagtatgatgctatacagtatggaatatcctttggttggttgagatcagctgccatggtctccacctcttgagcaccctcagcctcagccaaaccatcaytgtgctgcctgtgcagagcgcagcgctatgtgggctgctgtggggaaagctcactccatcccagccagacccaagcgtcagtcttgtgtttacattcttaacagtgttttttccccttttttttttcagtcctgactgacttcatgtgtgcctggattaattctgttacttaatgattgtggatttttttggtaattgttcattaaaaatattttaaaaaatgaactgtacctcatatcagatattgctcttgggctgggagagtcatgggaatggctggaaagtattgggatggagggc

SEQ ID NO: 46718 - DNA, 600 bp, Chicken  19866894287944_1
tatgtaaataaaacaacagaaataaatactctcttgttccttatcgtattaaacctgcaaatagcttattaccctataaggcagcttaggctggcacatgagaacactggaaaacacagagcaggcgccagggtctgcccagccaagctgtgcaggagaggagggaaggcacagtccggcactgcaggaagaataggaggcccaggtaattactgtaaaaaccactctcaagtataaccaagctgaatgcttgttttgtttttggtccagtggaaatgttgcaatggaagagctggatarttttcttccttgacaacatcagagatcttgctgcttttcccagtcaactgtctcccattcattgggatctggactcccctctctgcagggcgctgctctggttaggtcagagacagaacattctgtaagtgtaagctgttcttattcagatgcttctcaggctcatcagtcacttccactaaagtaatagttgtttcagctagcaggagcagcaaactgttgccctggtgtggtaagttaaatacatgaatgtacaaagcagtgttagaggttgtgtatcctgtcctttctgttagtgtt

SEQ ID NO: 46719 - DNA, 600 bp, Chicken  19866894287966_1
gagctcccggagctgggtgccctgcagcccagggacagtggtgtggggctcccaggaggtgccaagtgctgctgactgctttgtgcctgtttgtcatcccgtgagcagagctgggcagagtaaaatacaccacttcaagagatgagaaagtgcattctcctccacagccgacacctgggttagtccagaggcaaacgtgtgatggacacaaaagtgcagttctgagcttcagtttagcttgagtatacatccgcggaggcgagcttctcccctccattttatttttcctaatctatgcawaatacacaaacatgtgcttctggcaatcacgctggaaatttctgtgaagcgattcttgtcaaagcatccagtgagaacagagagaagaactgcacatggaaaactgacagccaccatcttttacaacaaatgcaaagctgtgatcttatcatcrccctcacggaagttcttccccttaattcaagctctcctgctcagctattagtcctgggctactcagtaatcacccgtctgttctcacagcgcttcctctgcacacacgagcagcacaaagcagctgtgatgtatcaggcctacaga

SEQ ID NO: 46720 - DNA, 600 bp, Chicken  19866894287966_2
ttctcctccacagccgacacctgggttagtccagaggcaaacgtgtgatggacacaaaagtgcagttctgagcttcagtttagcttgagtatacatccgcggaggcgagcttctcccctccattttatttttcctaatctatgcawaatacacaaacatgtgcttctggcaatcacgctggaaatttctgtgaagcgattcttgtcaaagcatccagtgagaacagagagaagaactgcacatggaaaactgacagccaccatcttttacaacaaatgcaaagctgtgatcttatcatcrccctcacggaagttcttccccttaattcaagctctcctgctcagctattagtcctgggctactcagtaatcacccgtctgttctcacagcgcttcctctgcacacacgagcagcacaaagcagctgtgatgtatcaggcctacagatagggattttattcactaagcgagtaaaatcattaatagaaattaccttagtgtatgayttggctgcatctcatgatgcagctacatatgttgcagtgtgcaggagaaagaggcacagcagatgctactggaagcaaaatcctgaggaggaaag

SEQ ID NO: 46721 - DNA, 572 bp, Chicken  19866894287966_3
caaagcatccagtgagaacagagagaagaactgcacatggaaaactgacagccaccatcttttacaacaaatgcaaagctgtgatcttatcatcrccctcacggaagttcttccccttaattcaagctctcctgctcagctattagtcctgggctactcagtaatcacccgtctgttctcacagcgcttcctctgcacacacgagcagcacaaagcagctgtgatgtatcaggcctacagatagggattttattcactaagcgagtaaaatcattaatagaaattaccttagtgtatgayttggctgcatctcatgatgcagctacatatgttgcagtgtgcaggagaaagaggcacagcagatgctactggaagcaaaatcctgaggaggaaagatggcatgttgctagcagctctgcttagacggggatgaaagaaggagatgcagcacttactggacctgctgccgttgctattgaagcatctgctccattaccatgattgaagaatgtgtgtccatttgtactgctgctacattcctgtttttatttttgcattatgtttttcccctt

SEQ ID NO: 46722 - DNA, 599 bp, Chicken  19866894287974_1
  misc_feature (1)..(63): n is any nucleotide
nnnnnnnnnnnnnnnnnnnnnnnnnnnnnnnnnnnnnnnnnnnnnnnnnnnnnnnnnnnnnnncattcctggtccgtattcgtctggctggtaaactattatctactgttgacatgattaactctgttgggtaggctgttgaactctagttcctctagtattctctctaagtgttgtattaagacacgttttttaaacctaaagaagagaaagaaagtaatttaggttttttttctcccaaaaataacagtttgacaacttggtattatctagctatgacaaatactactcccagagccyctgttaccagcacagaagagcttcctgtaatgtaatttaatagaacctycattcccaactcagacaaatgttgsrtctttcttccttaaccaccgtctttctatcctacatttgaacttcaactaatggccatttactccagaaaacgtaagggcagtctgacagctaaaaaaactgtattgattgaaatatgtcaaaataagaaaacgaagttgtagtactggaaatttttgtattttattaatataatcaaaagtaacaatttatgaccgagtcacttttatctatacaaaccttgc

SEQ ID NO: 46723 - DNA, 599 bp, Chicken  19866894287974_2
  misc_feature (1)..(14): n is any nucleotide
nnnnnnnnnnnnnncattcctggtccgtattcgtctggctggtaaactattatctactgttgacatgattaactctgttgggtaggctgttgaactctagttcctctagtattctctctaagtgttgtattaagacacgttttttaaacctaaagaagagaaagaaagtaatttaggttttttttctcccaaaaataacagtttgacaacttggtattatctagctatgacaaatactactcccagagccyctgttaccagcacagaagagcttcctgtaatgtaatttaatagaacctycattcccaactcagacaaatgttgsrtctttcttccttaaccaccgtctttctatcctacatttgaacttcaactaatggccatttactccagaaaacgtaagggcagtctgacagctaaaaaaactgtattgattgaaatatgtcaaaataagaaaacgaagttgtagtactggaaatttttgtattttattaatataatcaaaagtaacaatttatgaccgagtcacttttatctatacaaaccttgctgcttccttgatagcaaattcaatgaaatacttctgcatttccataggt

SEQ ID NO: 46724 - DNA, 600 bp, Chicken  19866894287974_3
cgtattcgtctggctggtaaactattatctactgttgacatgattaactctgttgggtaggctgttgaactctagttcctctagtattctctctaagtgttgtattaagacacgttttttaaacctaaagaagagaaagaaagtaatttaggttttttttctcccaaaaataacagtttgacaacttggtattatctagctatgacaaatactactcccagagccyctgttaccagcacagaagagcttcctgtaatgtaatttaatagaacctycattcccaactcagacaaatgttgsrtctttcttccttaaccaccgtctttctatcctacatttgaacttcaactaatggccatttactccagaaaacgtaagggcagtctgacagctaaaaaaactgtattgattgaaatatgtcaaaataagaaaacgaagttgtagtactggaaatttttgtattttattaatataatcaaaagtaacaatttatgaccgagtcacttttatctatacaaaccttgctgcttccttgatagcaaattcaatgaaatacttctgcatttccataggtccttgtacctcctcaagaagagagaa

SEQ ID NO: 46725 - DNA, 600 bp, Chicken  19866894287974_4
gtattcgtctggctggtaaactattatctactgttgacatgattaactctgttgggtaggctgttgaactctagttcctctagtattctctctaagtgttgtattaagacacgttttttaaacctaaagaagagaaagaaagtaatttaggttttttttctcccaaaaataacagtttgacaacttggtattatctagctatgacaaatactactcccagagccyctgttaccagcacagaagagcttcctgtaatgtaatttaatagaacctycattcccaactcagacaaatgttgsrtctttcttccttaaccaccgtctttctatcctacatttgaacttcaactaatggccatttactccagaaaacgtaagggcagtctgacagctaaaaaaactgtattgattgaaatatgtcaaaataagaaaacgaagttgtagtactggaaatttttgtattttattaatataatcaaaagtaacaatttatgaccgagtcacttttatctatacaaaccttgctgcttccttgatagcaaattcaatgaaatacttctgcatttccataggtccttgtacctcctcaagaagagagaag

SEQ ID NO: 46726 - DNA, 599 bp, Chicken  19866894287980_1
  misc_feature (1)..(16): n is any nucleotide
nnnnnnnnnnnnnnnntgtggtacattgattttttttctgaagtcttttcagtggagtttgcatcttggagttgctaagtgaggaagcacgtgattaatatgtagagtttgagcacactagcttcaaagtcaattgtatgtatcagtcattttgatgtcctgtataacaactgttgaaatagattatggtccattagttacagacaaaagtaattaatgttacagtatgtacattgccttggatgcaatccactctctgctacaaatggctaattttttgctttattagcttcattggaytcaaattctccagacaaaggaatgaagatagattgtctgatgatttcaaaattatgtaaatgagttgaaggaaggaatacttcttaaaaatgtttaaataggaaaggaatttgagaaaacatggaataaatttttcaatcactgtggttacttgttggtatgctgttaggaattcccagtctgccccatctcctggatgagctctcgctcaggagatccattgcagtggcagctaggaacgtggagcagattggttgataatcacagagcgaagaaaatgggtgttgtgacagctaaac

SEQ ID NO: 46727 - DNA, 600 bp, Chicken  19866894287991_1
gcaaagggtatgtcctgagctgaagaccctctggcagctcttcgtatcagcatgtttggttcctaggacaaaagtgtaagtgtgtgaaggcaaactcatgcagtataaaattgttttgactaccagatataaaaaatcagttgatttcttagggaaattgcatggttgcatttagagttacctatgtgaaaccagttttgctgctgaatcagcacccaatgtcttgaccactgctttcactttgcctattgtcttcctcccgttgccatgcaggcagaagatcttgccctaaagtttacrtttgtggagtttggagttgaatcacagagctgcccccttcccccctgtttccgtatataggctgtggtgccaggagcaccgggacggccctccttgcaggrtcctgagccactctgtggcttattctstcagaacagcagaaattacgctggtttggtgaagttctcagtgagcagctctcgtgactactgttactgtgaacctggagccgtgcttgctgctacgttcgggctctgcattgacttcagcggccactcgcgattcggagcgcagtgcctcacgacgcgccccttctcccat

SEQ ID NO: 46728 - DNA, 600 bp, Chicken  19866894287991_2
agtataaaattgttttgactaccagatataaaaaatcagttgatttcttagggaaattgcatggttgcatttagagttacctatgtgaaaccagttttgctgctgaatcagcacccaatgtcttgaccactgctttcactttgcctattgtcttcctcccgttgccatgcaggcagaagatcttgccctaaagtttacrtttgtggagtttggagttgaatcacagagctgcccccttcccccctgtttccgtatataggctgtggtgccaggagcaccgggacggccctccttgcaggrtcctgagccactctgtggcttattctstcagaacagcagaaattacgctggtttggtgaagttctcagtgagcagctctcgtgactactgttactgtgaacctggagccgtgcttgctgctacgttcgggctctgcattgacttcagcggccactcgcgattcggagcgcagtgcctcacgacgcgccccttctcccatcctccccttcggggcggggccgtagcggccgtccccgtcgcttccccccgccccagactgggggcggccattgcccttagccccgccctcaagggggggag

SEQ ID NO: 46729 - DNA, 600 bp, Chicken  19866894287991_3
ataaaaaatcagttgatttcttagggaaattgcatggttgcatttagagttacctatgtgaaaccagttttgctgctgaatcagcacccaatgtcttgaccactgctttcactttgcctattgtcttcctcccgttgccatgcaggcagaagatcttgccctaaagtttacrtttgtggagtttggagttgaatcacagagctgcccccttcccccctgtttccgtatataggctgtggtgccaggagcaccgggacggccctccttgcaggrtcctgagccactctgtggcttattctstcagaacagcagaaattacgctggtttggtgaagttctcagtgagcagctctcgtgactactgttactgtgaacctggagccgtgcttgctgctacgttcgggctctgcattgacttcagcggccactcgcgattcggagcgcagtgcctcacgacgcgccccttctcccatcctccccttcggggcggggccgtagcggccgtccccgtcgcttccccccgccccagactgggggcggccattgcccttagccccgccctcaagggggggagccgcagcctcgctctgctcgccgggac

SEQ ID NO: 46730 - DNA, 600 bp, Chicken  19866894287992_1
ggcaggcttccaaaggagacgttttgtacttgtgcatgcctgaacactacttggagcctggtcattaaaaacattttgctaattggctggagttccttaatggtaaaatggttttgataattcaagtacaataaacttaaaaaaaaaaaaaaacaaacctaagttttgtaaattttcaatttggttccatttatatttgagcaaagccttatgaaattttaacaaataccaccaaatacgttgtgctaaaaggagactttgaatatatctggaattggtgatcggttgaacaaagttatrtattaatgctggctaatggaagtcacatttgggagaaaggctatattgtcggtcaagtcaaaatgctcagaaaacaatgtagaccaaaackatacttaacaagaaaaaaatagaaggcaagttaaagatctgatgctaaagcttcttgctgtgaagttcatgctaacaactgttcaaattcatgaaagtaagttttgttcttaaattataaatgaaaaaataaacaatactgtgaatgggtttcttgtttggtgacttgatttccatttgtaatttaaatttattttcagttttatattt

SEQ ID NO: 46731 - DNA, 600 bp, Chicken  19866894287992_2
gttccttaatggtaaaatggttttgataattcaagtacaataaacttaaaaaaaaaaaaaaacaaacctaagttttgtaaattttcaatttggttccatttatatttgagcaaagccttatgaaattttaacaaataccaccaaatacgttgtgctaaaaggagactttgaatatatctggaattggtgatcggttgaacaaagttatrtattaatgctggctaatggaagtcacatttgggagaaaggctatattgtcggtcaagtcaaaatgctcagaaaacaatgtagaccaaaackatacttaacaagaaaaaaatagaaggcaagttaaagatctgatgctaaagcttcttgctgtgaagttcatgctaacaactgttcaaattcatgaaagtaagttttgttcttaaattataaatgaaaaaataaacaatactgtgaatgggtttcttgtttggtgacttgatttccatttgtaatttaaatttattttcagttttatatttgtatmatttaggatgtaatcctgtatacttagctcttgcatggctggttctttttttatcagaatttaatttaaaaaagtttaaattccat

SEQ ID NO: 46732 - DNA, 600 bp, Chicken  19866894287992_3
atgctggctaatggaagtcacatttgggagaaaggctatattgtcggtcaagtcaaaatgctcagaaaacaatgtagaccaaaackatacttaacaagaaaaaaatagaaggcaagttaaagatctgatgctaaagcttcttgctgtgaagttcatgctaacaactgttcaaattcatgaaagtaagttttgttcttaaattataaatgaaaaaataaacaatactgtgaatgggtttcttgtttggtgacttgatttccatttgtaatttaaatttattttcagttttatatttgtatmatttaggatgtaatcctgtatacttagctcttgcatggctggttctttttttatcagaatttaatttaaaaaagtttaaattccatataacttcttaaagacctttgaatacctttcaagaaaaaagtaattcttgacaatagtagtgatttttaccagctttcttcttaatttattacaacagttttccacttatgatatctacttgtcaacagtattgctgctttttgatgtggaatttttgagttggtattcttcattactttcagagccttttaatagctaagtggttcaactaaa

SEQ ID NO: 46733 - DNA, 600 bp, Chicken  19866894287999_1
ctgcttctaaattaatgcaggaaaactctgcaaaaccttttaaaagaggctcatggcagcgagggtttgaaatgcagaggcaccccggcactgacagccttccccaggaatgtcacatccacatcctggaagcaatctcctgccacagaccccacgctgctcacagggcagcagtccttgtcattgcagccctaacatctgcatcagcatctgcttttttgggaggccccgtctctctgcgccttgctgctggcagaggtttgcctgccgtggctcagccagctgactgcgtccgcagcygccctgcagacactgcccccagcatcctgccagcaggtcggccacggacaggactttcacatcagcatattttgcaaaagaccgcagcaagagtgcttacaaagaaggggttgttcttgcagacaagcaatttcctaaagaatccacttcctcattaaaacaccagaaaggtggaaggtttccctaaagctggcactgagggcgtagctgtgacacgaagataattactggaagtaacgggcgaaactgccaaatctgactgctgcagaactgcctgaacattttcccttcttaattgca

SEQ ID NO: 46734 - DNA, 554 bp, Chicken  19866894287999_2
accccacatctcatttttcactgtctcctacaatgcaatgattctcacccccaagagcagagttgccgtgggagatccagtctgtgtcataggagatggacagaagagggaaaagcccaggctgcttttgtctgcatcccttttgtttttctgtttctctctttctccccaagcaaaggtctttctgctctcctgtcccagcacccagggcagctctttctgccagagttggagaaggctggagtgcaggggttggggcaggctgtgatgaagagcaggaggaagaggaggcccagcctktttcagaagggggaaagagaagtgcacacctactgccacaaagttaggatctccctaacaaataatgctagggacacttctcggatagacagtaaatacctggttacagctggaaataggggttctaggtatttcccaaacttacttctcatatttgttcagcccaagaaattgttccagtctctaggtttatctgctaactgggggagaaaatataaagaactcagtaaggtcataattcacaaatgcagctg

SEQ ID NO: 46735 - DNA, 600 bp, Chicken  19866894288008_1
gtatttctgggattttaaaatgtaattagcagtttgggttgagctgagtactgaaagtcatctttagagtcacatcgaatctttcctcttgctgataaaaccaagtaatctgttctttgtgtcacactgatggatataggccagaaaaatagaggaagtcaaaatacatccaaaaaaatgtggaaaaaatattcataagtgaagtcgcacaagctatgggatgtcagaaatattttccaggcatccacctgcatcttacttgcacatagccaacttaggaaaaagctcttttttctcttwaacaaagagcacaaaaagtatgcagtaggtttgaaagctgggaatagtaataccatgtcattattgttcctttgcagtaagactcgattccgctggatccaggagagcagctcccacaagagtgtgcctcctttyggtttagatggtgtttacatttctgagccttgccccarttactgcaatggtcatggggactgtgtctcgggggtctgtttttgtgacttgggctacacaggtaagatgttttttagataggacagtggtaaacactggctgtgttgctgctgtaaatctagcatc

SEQ ID NO: 46736 - DNA, 600 bp, Chicken  19866894288008_2
ataggccagaaaaatagaggaagtcaaaatacatccaaaaaaatgtggaaaaaatattcataagtgaagtcgcacaagctatgggatgtcagaaatattttccaggcatccacctgcatcttacttgcacatagccaacttaggaaaaagctcttttttctcttwaacaaagagcacaaaaagtatgcagtaggtttgaaagctgggaatagtaataccatgtcattattgttcctttgcagtaagactcgattccgctggatccaggagagcagctcccacaagagtgtgcctcctttyggtttagatggtgtttacatttctgagccttgccccarttactgcaatggtcatggggactgtgtctcgggggtctgtttttgtgacttgggctacacaggtaagatgttttttagataggacagtggtaaacactggctgtgttgctgctgtaaatctagcatcgtgtttttcctctkcagtatgctggaaaaatacatgttgacataaatttcatgggctgccagcaagagtattttctttctgttgaataaaatttagcacaggagtccagtacagataaaatagagcagctgagga

SEQ ID NO: 46737 - DNA, 600 bp, Chicken  19866894288008_3
aaaaatgtggaaaaaatattcataagtgaagtcgcacaagctatgggatgtcagaaatattttccaggcatccacctgcatcttacttgcacatagccaacttaggaaaaagctcttttttctcttwaacaaagagcacaaaaagtatgcagtaggtttgaaagctgggaatagtaataccatgtcattattgttcctttgcagtaagactcgattccgctggatccaggagagcagctcccacaagagtgtgcctcctttyggtttagatggtgtttacatttctgagccttgccccarttactgcaatggtcatggggactgtgtctcgggggtctgtttttgtgacttgggctacacaggtaagatgttttttagataggacagtggtaaacactggctgtgttgctgctgtaaatctagcatcgtgtttttcctctkcagtatgctggaaaaatacatgttgacataaatttcatgggctgccagcaagagtattttctttctgttgaataaaatttagcacaggagtccagtacagataaaatagagcagctgaggacaggagacgttggtgatgcttctggcaaccacaatcta

SEQ ID NO: 46738 - DNA, 600 bp, Chicken  19866894288008_4
aaagtatgcagtaggtttgaaagctgggaatagtaataccatgtcattattgttcctttgcagtaagactcgattccgctggatccaggagagcagctcccacaagagtgtgcctcctttyggtttagatggtgtttacatttctgagccttgccccarttactgcaatggtcatggggactgtgtctcgggggtctgtttttgtgacttgggctacacaggtaagatgttttttagataggacagtggtaaacactggctgtgttgctgctgtaaatctagcatcgtgtttttcctctkcagtatgctggaaaaatacatgttgacataaatttcatgggctgccagcaagagtattttctttctgttgaataaaatttagcacaggagtccagtacagataaaatagagcagctgaggacaggagacgttggtgatgcttctggcaaccacaatctacgaacagagccatctgtatgaatggaaagggactagcaatagaagagaaaacaaaataaaatattttaaactaaagagtctgtttaaaaacctttggaccatcttcaaatgaattgcttctgttactgagtcccctggcca

SEQ ID NO: 46739 - DNA, 599 bp, Chicken  19866894288011_1
  misc_feature (1)..(184): n is any nucleotide
nnnnnnnnnnnnnnnnnnnnnnnnnnnnnnnnnnnnnnnnnnnnnnnnnnnnnnnnnnnnnnnnnnnnnnnnnnnnnnnnnnnnnnnnnnnnnnnnnnnnnnnnnnnnnnnnnnnnnnnnnnnnnnnnnnnnnnnnnnnnnnnnnnnnnnnnnnnnnnnnnnnnnnnnnnnnnnnnnnnnnnnncctttctttgccggtgcatttcttatctgtaacgtcatttgacaggagaaatgccaagtgctctggtgagtttgtgagtggcaagtctagatgatgtagcagccaacacttgtatracgcctcattctaaattccctcttcaaatgtgccaagtttgaatgcacttcagttattctctggagtgcagtctctttagcgtgctgacgatggttctcaaagaggttattttcttcctacagtgaggatgggatcctcaaagcgtctgtgaggaaatgccatttcaccatcctcttccatcttgatctgttgtggtaaaagcttcccccattgggttgggaagccctatcacctgacctgaaggctcaagatctgttcattcatagagaggtcagtatatcaatgtaccggcattcca

SEQ ID NO: 46740 - DNA, 451 bp, Chicken  19866894288015_1
attgtttttgatattggaaacaatattaagtgaggaagggtgctacatgaagacagaagagttaaagaaattggctttttatatggaaaattcatttctattcatttatcttctccatcctactgtgagagtgttcttagagataagttgattgaatcaaactttgcaaagacagtcactaattgtgtgtttgggtattagctgtgtgaccaactttacattctctaccttgatttgcataattgctgagctttcacagtagcaacccaaatccctgagggttgagctttgtaaatgttmaggagctataagataaatttatattcatgaaacagaactacaacaatgaggactgctctaagaagccaggaaataattctctcttcagaactaagttcaagtaatatgtcataaaaatacatgggttatgaacagtaaaagtagataaaaa

SEQ ID NO: 46741 - DNA, 599 bp, Chicken  19866894288017_1
  misc_feature (1)..(28): n is any nucleotide
nnnnnnnnnnnnnnnnnnnnnnnnnnnncattcagctgaaagtttccacagtgaagtccaggagtctgaggtaaagggtttgcttaataggctcaaaccttatttgacccttccgttatgatctttaaatagtaacaataacaacagttactttgagaagtctgcatgttacaaggtctaacagtctgaacagaataaaatttaaattccccactggttcggtctcctccttgttgaaattaacattgacaccaacacatcaataaaactgagaggagggatgctgctgttgttttggtrgtactgttacaaaaggtaagggaagaaagaagtaattttcttaagtttcttatagmtcttaaagaaaaatatcttactaatggtggaaagggaaaagctgagtttacagaagtgttttayacatctytgctaaggtgtgaactgatgttctataagcacaattagtttaatatgcccccactttttaaccctacaaagctccaaagagctataagttgccaataaatgaattcagcttaactcaggttattccaagcatacacatttctcaagttttaatgatttttctcaacaaacac

SEQ ID NO: 46742 - DNA, 600 bp, Chicken  19866894288017_2
tccaggagtctgaggtaaagggtttgcttaataggctcaaaccttatttgacccttccgttatgatctttaaatagtaacaataacaacagttactttgagaagtctgcatgttacaaggtctaacagtctgaacagaataaaatttaaattccccactggttcggtctcctccttgttgaaattaacattgacaccaacacatcaataaaactgagaggagggatgctgctgttgttttggtrgtactgttacaaaaggtaagggaagaaagaagtaattttcttaagtttcttatagmtcttaaagaaaaatatcttactaatggtggaaagggaaaagctgagtttacagaagtgttttayacatctytgctaaggtgtgaactgatgttctataagcacaattagtttaatatgcccccactttttaaccctacaaagctccaaagagctataagttgccaataaatgaattcagcttaactcaggttattccaagcatacacatttctcaagttttaatgatttttctcaacaaacacccatgggagaagttattcctagaaacacattcccaacaatttcctgatgctgcacct

SEQ ID NO: 46743 - DNA, 600 bp, Chicken  19866894288017_3
atctttaaatagtaacaataacaacagttactttgagaagtctgcatgttacaaggtctaacagtctgaacagaataaaatttaaattccccactggttcggtctcctccttgttgaaattaacattgacaccaacacatcaataaaactgagaggagggatgctgctgttgttttggtrgtactgttacaaaaggtaagggaagaaagaagtaattttcttaagtttcttatagmtcttaaagaaaaatatcttactaatggtggaaagggaaaagctgagtttacagaagtgttttayacatctytgctaaggtgtgaactgatgttctataagcacaattagtttaatatgcccccactttttaaccctacaaagctccaaagagctataagttgccaataaatgaattcagcttaactcaggttattccaagcatacacatttctcaagttttaatgatttttctcaacaaacacccatgggagaagttattcctagaaacacattcccaacaatttcctgatgctgcacctgcttattctgcagcttttgctttcttactgaaaagagtgattttacaccacaaagaaacgtgtt

SEQ ID NO: 46744 - DNA, 600 bp, Chicken  19866894288017_4
aatagtaacaataacaacagttactttgagaagtctgcatgttacaaggtctaacagtctgaacagaataaaatttaaattccccactggttcggtctcctccttgttgaaattaacattgacaccaacacatcaataaaactgagaggagggatgctgctgttgttttggtrgtactgttacaaaaggtaagggaagaaagaagtaattttcttaagtttcttatagmtcttaaagaaaaatatcttactaatggtggaaagggaaaagctgagtttacagaagtgttttayacatctytgctaaggtgtgaactgatgttctataagcacaattagtttaatatgcccccactttttaaccctacaaagctccaaagagctataagttgccaataaatgaattcagcttaactcaggttattccaagcatacacatttctcaagttttaatgatttttctcaacaaacacccatgggagaagttattcctagaaacacattcccaacaatttcctgatgctgcacctgcttattctgcagcttttgctttcttactgaaaagagtgattttacaccacaaagaaacgtgttgttgaaa

SEQ ID NO: 46745 - DNA, 512 bp, Chicken  19866894288020_1
aaaacagaaacggagaattcttagttttagaatattccatttttgaatgtaattttttcttaatttaaaacaacaacaagaaaaaacccctaatgttttgttcttccagcatggtgaccgaacaccagctctaaaattgtttactgagttgtcaaatagcacacaccgaaaaggtcagcttgacttcacgtaacagaattatgggaaaactcatgcttgtaaatcacttctgataatcatccatctatcgtcatggtgattttgagagttaccttacagctgcctttatactttccccasttcaggaacacaaaattctcactgaaaactgaactacttttggccttgaagaaattaagattttttttttaagtacttttataaccggatgtgaagttgataataaaataaagatcaccaaatctgttttaacagacaatgtcaaaaggtatagggtcctcaagggctgcatcagaaataaacagaaactggtcactctaaatcagaagttt

SEQ ID NO: 46746 - DNA, 600 bp, Chicken  19866894288029_1
acttttctattttcctatccattttcatatttagcttaccgagtctgcaactgtacctctgcatgaagttgacagtcctaatcacaatcaggaaaaagtagataaaaatggatgtactgtctcagataaaagaatatcaggcaaatatcagggaaagtgcacaaaaaaagttgcaaaaatagttttacttccttctgtattgtccagcatcctcctgcataagctgcttggagacttagtgagccaagggtggtatctttgtgtttaaaaatctgtgctgcaccctagccattcaatgtracagaaagtttttaaagtttccatctggcacgtttgaaccaaagttactaatatttcagatcacattccattttgtcattctgccgttaacctcctaatggcacagataatgactttatgagcacagcatccacaggggctcagcaggagtgatattctaattttgatattctaatgtcccagtttcaatccagcatgctctggaggcagtggcatgtatttgtcagaacacaaactctaaaatgatgttaaaactgaggaaatctctcrattaaatgaggacagtggctcctttaaagg

SEQ ID NO: 46747 - DNA, 600 bp, Chicken  19866894288029_2
atctgtgctgcaccctagccattcaatgtracagaaagtttttaaagtttccatctggcacgtttgaaccaaagttactaatatttcagatcacattccattttgtcattctgccgttaacctcctaatggcacagataatgactttatgagcacagcatccacaggggctcagcaggagtgatattctaattttgatattctaatgtcccagtttcaatccagcatgctctggaggcagtggcatgtatttgtcagaacacaaactctaaaatgatgttaaaactgaggaaatctctcrattaaatgaggacagtggctcctttaaaggctacacaattgcctcaaataaagatattgcctaaactgaatagtctcagccaagaggttacttctgcacacttrggactttccattttccctccttctttgatgcacatcatctataacgtggtcaagcttttgakttctaaacataaagaagctgaggaaaagctaagagtggcacacagatatccacatgcttcttggtatccgccattatttcagttctgtatattgaaaaaagttagaatactattttagaactctctatacattt

SEQ ID NO: 46748 - DNA, 600 bp, Chicken  19866894288029_3
gtcattctgccgttaacctcctaatggcacagataatgactttatgagcacagcatccacaggggctcagcaggagtgatattctaattttgatattctaatgtcccagtttcaatccagcatgctctggaggcagtggcatgtatttgtcagaacacaaactctaaaatgatgttaaaactgaggaaatctctcrattaaatgaggacagtggctcctttaaaggctacacaattgcctcaaataaagatattgcctaaactgaatagtctcagccaagaggttacttctgcacacttrggactttccattttccctccttctttgatgcacatcatctataacgtggtcaagcttttgakttctaaacataaagaagctgaggaaaagctaagagtggcacacagatatccacatgcttcttggtatccgccattatttcagttctgtatattgaaaaaagttagaatactattttagaactctctatacatttatgttctaaaatattcccttctgatttagggcgaggaccagacagggacctaacaagctgccatgttcaggaagtcataaaattacttcttggtatggtggaat

SEQ ID NO: 46749 - DNA, 600 bp, Chicken  19866894288029_4
gggctcagcaggagtgatattctaattttgatattctaatgtcccagtttcaatccagcatgctctggaggcagtggcatgtatttgtcagaacacaaactctaaaatgatgttaaaactgaggaaatctctcrattaaatgaggacagtggctcctttaaaggctacacaattgcctcaaataaagatattgcctaaactgaatagtctcagccaagaggttacttctgcacacttrggactttccattttccctccttctttgatgcacatcatctataacgtggtcaagcttttgakttctaaacataaagaagctgaggaaaagctaagagtggcacacagatatccacatgcttcttggtatccgccattatttcagttctgtatattgaaaaaagttagaatactattttagaactctctatacatttatgttctaaaatattcccttctgatttagggcgaggaccagacagggacctaacaagctgccatgttcaggaagtcataaaattacttcttggtatggtggaatgctctcagccatgtagaatatttttacatagcttccatagggaaaaaaaaaaaaaaaaaaaa

SEQ ID NO: 46750 - DNA, 600 bp, Chicken  19866894288029_5
aatattcccttctgatttagggcgaggaccagacagggacctaacaagctgccatgttcaggaagtcataaaattacttcttggtatggtggaatgctctcagccatgtagaatatttttacatagcttccatagggaaaaaaaaaaaaaaaaaaaaaaagtctgaagtaatatagagaaattttatttgaacagctgagtttggaaccctgtttccgacagcacgcagaaatgtttctaagcaatttacaattccatctgagcacagggagtttgggagcacccatccttctgtggcaycctgcctcggaggcagcaaagacccagaaacacctggcccctcaataaccacacatttcttcactgtggacagtcattactgctctgcccagtgtagctttaaatgagccacctcaataaccaggttatttcactaagatatatcacttcttgatactcagccaagtttcgtacccatcatttcacagtcccattactcctacttatattcccatttattactgtaaataatatctctttcaattactgtaatgattatgttatcctattagatgtcagttaagcaacttctctgcgtgc

SEQ ID NO: 46751 - DNA, 600 bp, Chicken  19866894288029_6
tgtcagttaagcaacttctctgcgtgcctatccaaaaaaatgctaatttgttaggaatgattttaaaactctgtatatagggtgtggggaatgcaattcctgtatctttcagggtacaaacttacagtctatagacaaaggctgacacagagctacggaagtgaagcgttccccttcgtcatgagagagtatgtggggggaaactaccaaaactgcctctgagatcaacagcagggtatccagtaagcaatatcacccagggaaatcactccacctagcatcctgtaggtcagcttaccrgctctgctgctgtggcaggatggccgtcagttgcctctttggcgcctcttccatcctctctctgtggagtcctggggaaaacagcattaattatactagctaaaatccagagagagctcttccttttatagtaaagtaacttctaaattaaacaaatgtgaaagcctggtaaagcaaaagcatagccctcattattagttatggcacagcataaacataaaagcttttcctgacataaattgtgggttcttaaacatgaagtgaagtattagcttaaaactaaatatggagacaatcctt

SEQ ID NO: 46752 - DNA, 600 bp, Chicken  19866894288038_1
aacagatgacgccttaacaattacacctgtcaaaaactccagaaagcaatccatctctgaacagcccagttgaaaacaggctagttcataacaaaatgaatttttttaaaacaattgccagccataacagtttgatgcatgacaagcttaggaagtcgtgttgcatgtacaactgaaaccttaactaactggaccctgcttttctctgataaataagatattaaactataaaaagaaaaatcctaagtgaagcaatgcaaatagttaacagtccaggaaagcaaggacatctagctgacrtataggtagagacattccagtctggaataggactagacattccagttatgtcctatgtgaattgaaacaataaggctcttaattattttttagcgagagtcaaagtaccagatagtacttaggctggcacttattgcacagaactagaacaatttctagaattacagttctttctaaataagaagccctaatatcacttccttatagatatactgccaggaagtaggattctaaacaatcagttctctacagaaatcacagtttctttcttcagaaaatacataattttaaggtgaaaga

SEQ ID NO: 46753 - DNA, 600 bp, Chicken  19866894288039_1
atgctgttacccagtatgatgccaactccaaaggcagaacctgtgtcactaaagaaccttttctttgtggaaagagtgattagtggtggcaattatgagaaatttcagaaatagttcctttttttttgtatctgaaactcccatctttttttagaccaaaaaacaaagggaatgaaaaaaacttgaaaacaaaagctgagatggtttttcttctgcttagaatgaatttttagtttgatataactctttaataaagcttcgaccaaaaagtggaagaagaaacgtgtgagtaccattaarcatctcagctccccayccaccagcatcgatccacatcctgctctgacccatttgtgctgctcagctcccagagtgatgcttgctgcrtttttttccttatttccttttcctygcagacaagcaaaactgasactgcattttatctgattcagggatggaggatgtttgccccaaatgacccacgtgatgcttttcatcttccttctctycagatcattctgtatgtgaatttagcrgagcaaaacattgctgcattgtccctgggatgggggaacaggactcttaatacgttttttcatt

SEQ ID NO: 46754 - DNA, 600 bp, Chicken  19866894288039_2
tgatgccaactccaaaggcagaacctgtgtcactaaagaaccttttctttgtggaaagagtgattagtggtggcaattatgagaaatttcagaaatagttcctttttttttgtatctgaaactcccatctttttttagaccaaaaaacaaagggaatgaaaaaaacttgaaaacaaaagctgagatggtttttcttctgcttagaatgaatttttagtttgatataactctttaataaagcttcgaccaaaaagtggaagaagaaacgtgtgagtaccattaarcatctcagctccccayccaccagcatcgatccacatcctgctctgacccatttgtgctgctcagctcccagagtgatgcttgctgcrtttttttccttatttccttttcctygcagacaagcaaaactgasactgcattttatctgattcagggatggaggatgtttgccccaaatgacccacgtgatgcttttcatcttccttctctycagatcattctgtatgtgaatttagcrgagcaaaacattgctgcattgtccctgggatgggggaacaggactcttaatacgttttttcatttgggacccagaaagat

SEQ ID NO: 46755 - DNA, 600 bp, Chicken  19866894288039_3
ggcaattatgagaaatttcagaaatagttcctttttttttgtatctgaaactcccatctttttttagaccaaaaaacaaagggaatgaaaaaaacttgaaaacaaaagctgagatggtttttcttctgcttagaatgaatttttagtttgatataactctttaataaagcttcgaccaaaaagtggaagaagaaacgtgtgagtaccattaarcatctcagctccccayccaccagcatcgatccacatcctgctctgacccatttgtgctgctcagctcccagagtgatgcttgctgcrtttttttccttatttccttttcctygcagacaagcaaaactgasactgcattttatctgattcagggatggaggatgtttgccccaaatgacccacgtgatgcttttcatcttccttctctycagatcattctgtatgtgaatttagcrgagcaaaacattgctgcattgtccctgggatgggggaacaggactcttaatacgttttttcatttgggacccagaaagatgggagacctttatgaagaagcagaaatattctggagttggagctgcagaaactgattcagtgtgcaacttg

SEQ ID NO: 46756 - DNA, 600 bp, Chicken  19866894288039_4
agttcctttttttttgtatctgaaactcccatctttttttagaccaaaaaacaaagggaatgaaaaaaacttgaaaacaaaagctgagatggtttttcttctgcttagaatgaatttttagtttgatataactctttaataaagcttcgaccaaaaagtggaagaagaaacgtgtgagtaccattaarcatctcagctccccayccaccagcatcgatccacatcctgctctgacccatttgtgctgctcagctcccagagtgatgcttgctgcrtttttttccttatttccttttcctygcagacaagcaaaactgasactgcattttatctgattcagggatggaggatgtttgccccaaatgacccacgtgatgcttttcatcttccttctctycagatcattctgtatgtgaatttagcrgagcaaaacattgctgcattgtccctgggatgggggaacaggactcttaatacgttttttcatttgggacccagaaagatgggagacctttatgaagaagcagaaatattctggagttggagctgcagaaactgattcagtgtgcaacttgtcacgcgtggggtgatgcatgacat

SEQ ID NO: 46757 - DNA, 600 bp, Chicken  19866894288039_5
ctgaaactcccatctttttttagaccaaaaaacaaagggaatgaaaaaaacttgaaaacaaaagctgagatggtttttcttctgcttagaatgaatttttagtttgatataactctttaataaagcttcgaccaaaaagtggaagaagaaacgtgtgagtaccattaarcatctcagctccccayccaccagcatcgatccacatcctgctctgacccatttgtgctgctcagctcccagagtgatgcttgctgcrtttttttccttatttccttttcctygcagacaagcaaaactgasactgcattttatctgattcagggatggaggatgtttgccccaaatgacccacgtgatgcttttcatcttccttctctycagatcattctgtatgtgaatttagcrgagcaaaacattgctgcattgtccctgggatgggggaacaggactcttaatacgttttttcatttgggacccagaaagatgggagacctttatgaagaagcagaaatattctggagttggagctgcagaaactgattcagtgtgcaacttgtcacgcgtggggtgatgcatgacatgtctgtcatcaccgggctg

SEQ ID NO: 46758 - DNA, 595 bp, Chicken  19866894288039_6
cttctgcttagaatgaatttttagtttgatataactctttaataaagcttcgaccaaaaagtggaagaagaaacgtgtgagtaccattaarcatctcagctccccayccaccagcatcgatccacatcctgctctgacccatttgtgctgctcagctcccagagtgatgcttgctgcrtttttttccttatttccttttcctygcagacaagcaaaactgasactgcattttatctgattcagggatggaggatgtttgccccaaatgacccacgtgatgcttttcatcttccttctctycagatcattctgtatgtgaatttagcrgagcaaaacattgctgcattgtccctgggatgggggaacaggactcttaatacgttttttcatttgggacccagaaagatgggagacctttatgaagaagcagaaatattctggagttggagctgcagaaactgattcagtgtgcaacttgtcacgcgtggggtgatgcatgacatgtctgtcatcaccgggctggacttacagatatgttcaaggtggctgtttctattggtgacgcttctatagtcagatgtgccttgcccgtaca

SEQ ID NO: 46759 - DNA, 568 bp, Chicken  19866894288039_7
gatataactctttaataaagcttcgaccaaaaagtggaagaagaaacgtgtgagtaccattaarcatctcagctccccayccaccagcatcgatccacatcctgctctgacccatttgtgctgctcagctcccagagtgatgcttgctgcrtttttttccttatttccttttcctygcagacaagcaaaactgasactgcattttatctgattcagggatggaggatgtttgccccaaatgacccacgtgatgcttttcatcttccttctctycagatcattctgtatgtgaatttagcrgagcaaaacattgctgcattgtccctgggatgggggaacaggactcttaatacgttttttcatttgggacccagaaagatgggagacctttatgaagaagcagaaatattctggagttggagctgcagaaactgattcagtgtgcaacttgtcacgcgtggggtgatgcatgacatgtctgtcatcaccgggctggacttacagatatgttcaaggtggctgtttctattggtgacgcttctatagtcagatgtgccttgcccgtaca

SEQ ID NO: 46760 - DNA, 599 bp, Chicken  19866894288070_1
  misc_feature (1)..(33): n is any nucleotide
nnnnnnnnnnnnnnnnnnnnnnnnnnnnnnnnngataagctgtcggtgctgaaggattatgaaagagacagtgaaggcagtgctgaagatctgtctttcccgaattccccagaagctgtaaaagaaccttcacagaattacatcacctgtactaaatttgaatcctctgtaactcctgatggtagcaaagtcaaatctatttgcccaatagaggaagacacttcagaaaatagaactgatgatgagaaaaaaattgcagaaatgaaagctcagaacacagaacaaggtgattttagctckcaagcaattggcaagcaggaaggcctggaagctgatgatgctaaaacaggtagcatatcaacactgttatctgacactgcagcaagtatgcctgaaggtctcactcctgatctagtacaagaagcatatgaaagtgaaatgcacgatgcagcatgtacaaaacttgcttatgaaacaaagattgatttggttcaaacctccgagtcggtgcaagagactctgaaacctgtgacacagctctgcccctcatttgaagattcagaagctgctccatcaccagtgctgcctgatattgtcat

SEQ ID NO: 46761 - DNA, 600 bp, Chicken  19866894288070_2
ctgatgatgctaaaacaggtagcatatcaacactgttatctgacactgcagcaagtatgcctgaaggtctcactcctgatctagtacaagaagcatatgaaagtgaaatgcacgatgcagcatgtacaaaacttgcttatgaaacaaagattgatttggttcaaacctccgagtcggtgcaagagactctgaaacctgtgacacagctctgcccctcatttgaagattcagaagctgctccatcaccagtgctgcctgatattgtcatggaagccccactgagcagtgggactgctggtkcagaagcttctactgtgcagcttgaaacttctcaattaggaacatttgttactactgctagttatgagaatgtaaaaaaagaggctgagaaacctccattataccaagaggcagtgaatatgcctttgacacaggcccaagaagcaaaagaggaattgacacttaaaaaggctgatcgtgagagcagcaccagtcctgaagatctagagactccatatatatctattgcatgtgacctaattaaggaaacaaaggtctctggtgaatctgcttctccatccctaacagattattccacaa

SEQ ID NO: 46762 - DNA, 600 bp, Chicken  19866894288071_1
cttctcttatctgtgatcctatgttagatcatctttatggggaaggtttaacctctgggagcacctcaattccccccacatagagcagggagctgctgccttcttatcctgtcccctcacctttgctgtggaaggcagaagaatgcaatgggctttgtgaggatggctgctcgatttgggcacatctcttcatcctgatgtagttctgggagttgtgaattgctgagcatcctttagggtgcacaccccaaagagaatccagccagccctgtcccacttaatgtctcagtacctggcagygctcgtgttggcccaggacagctctaaccaaacaaaatgcattctgaaggtggaagaaaataaactatggatatcaactggaaattttgccatgtgcttccaaacaggcaccttctcagtaacttgtataagacaaacaccctggctgtatgaagatttaacttacccttgtttgttgtaactggaagggtagcattcaggatgttaggaccctaaacttgtaaatccaccaatgtgtgcttaacttctgagrcgtgggaaaggttctgttggatgtctcttgagtgcagtgagacactt

SEQ ID NO: 46763 - DNA, 464 bp, Chicken  19866894288071_2
agaatccagccagccctgtcccacttaatgtctcagtacctggcagygctcgtgttggcccaggacagctctaaccaaacaaaatgcattctgaaggtggaagaaaataaactatggatatcaactggaaattttgccatgtgcttccaaacaggcaccttctcagtaacttgtataagacaaacaccctggctgtatgaagatttaacttacccttgtttgttgtaactggaagggtagcattcaggatgttaggaccctaaacttgtaaatccaccaatgtgtgcttaacttctgagrcgtgggaaaggttctgttggatgtctcttgagtgcagtgagacacttgggtatttcacatcaaatacacagctaggccttcgtatggctgcactgtatttcagtttttacatatcaattacatgcagcaattattacaggcattaattattccttacagaaagg

SEQ ID NO: 46764 - DNA, 600 bp, Chicken  19866894288081_1
actgtttgaaattatacattcataactgaggaagggaaatagatgaaactatcatggtaaaatgagtaagaaaatcttactttagagagaagttatcagtaactcattccagaagaaagtactaagtaaaatttctcagaagcatatcctcaggctgattttgctcagtattttccgtagccacttaccagttctgtaaatgactcaaagtcaagaggaattgcaaatactctagaagacacaaagtttgaaataacaatgataaattacagacaggaaaaataaaataaataaataaawaaaccatgaaaaacatgaaaaaatgcaatgttgtagaagactgtcttctgagatacatgaaaaggagtgttgtctgtgtacatacaaagtaatctttccatccagaatactgattttgagttcctaacttaaagaaagatatatggacaaattgaagaacctatgtagaagaaaagcaagaataagcaaacttacaggaaatatgtccaatgaaagataggaagttgtgaagagaaaggagagagctgttctgtcacagccatcttcaaatacctaaaagattgctgtaaataaatgaga

SEQ ID NO: 46765 - DNA, 600 bp, Chicken  19866894288081_2
atatggacaaattgaagaacctatgtagaagaaaagcaagaataagcaaacttacaggaaatatgtccaatgaaagataggaagttgtgaagagaaaggagagagctgttctgtcacagccatcttcaaatacctaaaagattgctgtaaataaatgagaaaaaatggtatgctttctttgctaatggatgatggtaaaagaagtagttgctttgaaaagcagcaagaaaaacctaaagagggcttgaagaaaaactttctaatgaagcagataattaaatgctgaaacagaaagaagtygcaatatcaacctcactgtcatgttttaaagacatgccagataaactttcaggattaataaaaattgttatgacttctctttagcacaaggatggatgacacttataggttcattctaacctcatttttttgttactttccatatcctggagcgaggctcccctcactcaacagcttgtgtcaattgtgtatagtgagacagaagagcaaaggaacacttctcagatatcatccagactgtggctatatctcagtgccagatagtgttgaaatagatatttttccatggctggatttttg

SEQ ID NO: 46766 - DNA, 599 bp, Chicken  19866894288086_1
  misc_feature (1)..(126): n is any nucleotide
nnnnnnnnnnnnnnnnnnnnnnnnnnnnnnnnnnnnnnnnnnnnnnnnnnnnnnnnnnnnnnnnnnnnnnnnnnnnnnnnnnnnnnnnnnnnnnnnnnnnnnnnnnnnnnnnnnnnnnnnnnnnnnaggaaaaagatgagagattttgcttagaacaggttgaagacactgcacgaccatctcaggtgattacaaagcatttcccccatccctggggcagagattaaagcctcttctctatctcatgcctgtgtcttgggtggtatgtgcatggagaagtgcagtgctgtggtgttgggygctgaaagattcaagtcagcttatctgcttctgcctgtaaatgagacactttggttacagcttccctcctatcagcttctgataacaacttccttcctaccctctttcccaagctagcacgtgctaacatcttgtgcaacagagccagctgggcaagaaatgtgaacatatttaagaagcctgagatgtgtacattatgccactaagaagctgactcrgtggagcactgctaggaatggctccagattgttgggcatacakgcatcctccttaccttgcagtgacagagaggggggaga

SEQ ID NO: 46767 - DNA, 591 bp, Chicken  19866894288086_2
agagattaaagcctcttctctatctcatgcctgtgtcttgggtggtatgtgcatggagaagtgcagtgctgtggtgttgggygctgaaagattcaagtcagcttatctgcttctgcctgtaaatgagacactttggttacagcttccctcctatcagcttctgataacaacttccttcctaccctctttcccaagctagcacgtgctaacatcttgtgcaacagagccagctgggcaagaaatgtgaacatatttaagaagcctgagatgtgtacattatgccactaagaagctgactcrgtggagcactgctaggaatggctccagattgttgggcatacakgcatcctccttaccttgcagtgacagagaggggggagaataaaaagagcatctctgcctctttcatctctcctctttcttgtctttctgcctcaagctcctctggcaggagtgggtcttaagtcaccgtgcacttcacgaagcactgctctcactggatcatttctctttctccaaggatctaggtgtcagtcagcagaagagatcttgtcgcagcaactgaagagcatgttgtgatttgctggtgca

SEQ ID NO: 46768 - DNA, 548 bp, Chicken  19866894288086_3
ggtatgtgcatggagaagtgcagtgctgtggtgttgggygctgaaagattcaagtcagcttatctgcttctgcctgtaaatgagacactttggttacagcttccctcctatcagcttctgataacaacttccttcctaccctctttcccaagctagcacgtgctaacatcttgtgcaacagagccagctgggcaagaaatgtgaacatatttaagaagcctgagatgtgtacattatgccactaagaagctgactcrgtggagcactgctaggaatggctccagattgttgggcatacakgcatcctccttaccttgcagtgacagagaggggggagaataaaaagagcatctctgcctctttcatctctcctctttcttgtctttctgcctcaagctcctctggcaggagtgggtcttaagtcaccgtgcacttcacgaagcactgctctcactggatcatttctctttctccaaggatctaggtgtcagtcagcagaagagatcttgtcgcagcaactgaagagcatgttgtgatttgctggtgca

SEQ ID NO: 46769 - DNA, 600 bp, Chicken  19866894288088_1
ttttactgtgaaagaactagcatctaatggagaagcacaagataatcatgaaaacatttctttttctttctcttttttcttttcttttctttcttttttctttctttccttcttcctttctttctctttctttctttctttctttctttctttctttctttcgtccccctgggtcatcctgctttgcctgaggcttcattccaggaaaagttagggctgctgtaagatttattggctgggaccagagtttgaatgcaattttctctcgtcacattcgcacgaagaatattgcatcctccygcactaccgtagctgaggaaggcatatttaattgcttctgtgccagggctctggttgggggtttggggaactcgcttctatcactgtgtcaaatcataccatggcactacgtacagtttcactcccagtgtgcagactccaatgtggaaacttraaatttgtttactgggagcgctgatgtgtgcaagatttgattgcttcaatgctctcagaaagcaaaacacagaagctgggcagtgtctacagtaagtttgtttttaaaatcaagaaagcaatctaacaactaggaaaatgtctaac

SEQ ID NO: 46770 - DNA, 600 bp, Chicken  19866894288088_2
tttctttcgtccccctgggtcatcctgctttgcctgaggcttcattccaggaaaagttagggctgctgtaagatttattggctgggaccagagtttgaatgcaattttctctcgtcacattcgcacgaagaatattgcatcctccygcactaccgtagctgaggaaggcatatttaattgcttctgtgccagggctctggttgggggtttggggaactcgcttctatcactgtgtcaaatcataccatggcactacgtacagtttcactcccagtgtgcagactccaatgtggaaacttraaatttgtttactgggagcgctgatgtgtgcaagatttgattgcttcaatgctctcagaaagcaaaacacagaagctgggcagtgtctacagtaagtttgtttttaaaatcaagaaagcaatctaacaactaggaaaatgtctaacctaggtaaatcaaatccagtcccatatgataattcaactaaattcagtaaataagaccaattacgtcctagaatgcactgatgcctgacagtgcattaaactggaccaggataccataccaacttaatgtagttatatacatacatctatttat

SEQ ID NO: 46771 - DNA, 600 bp, Chicken  19866894288092_1
gttctccagagtaaatgttttgtgttgttgtgaaggtaatggatgttgtgacactattgtcctacccaaagattaatgtggatgcacgtgaatgcaactttaaagtaggacttttcatcgttgtggtaggcatgtcatttaatggctcgcatgccacagcaaagtgcaatctgaatgctgtgcaaatagcaagtgccactgtctctgctgggagctgccattgatggtgacacaggatcatgcgggtatcctcggtctgcacaacacgttctttgcatagggctttgtgtttgtttcatmaagtcaataatggaaatgcatagaaatcgaggtggggcctgatcttgactgcttgaggggcctgggagattgtctttcataaaagctaaggtctacttcctgtttttatttttttatataagagttttcaagagtatctttcacatgccaaaataaataaataaaaaataataaatcatttttagtttcatttcagtggcaaatgttgtggaaatgcatttaattagtagatgaaaggcttaattgtaactctggtcatattcccctgtagtggaggaaaataaggtgcgttcttcttcc

SEQ ID NO: 46772 - DNA, 600 bp, Chicken  19866894288092_2
tttgtctattcaggcacactttggatctcaagcccacactaaaaacccacaggtaaacaggtgcaaagttgtcttttacatttggtcggattggcttggaattctgctgctgcttgttcaaaatatactgttagccctgatcgaacgagtaagccaaggatcctagttcatctcatacagtagtgacaagacagcaaaggaagatgtgatagaataatcataaaaaattccagtatattattcttgttaaagactgccagggtcagagtggtggagaatgtaggttgcattggtgtagtrgatataatttaagttgtggaaacatcattaccactgatgaggaatgggactgagaaagcrtgtggggctttggaagtctctgtgtaaagactgagttcgtatggctggtgaacagcaaatacatcctttttatttatttttttggtaagctaagtgtaatttcttcagtattcacccagcagaaataagcatgggctgctgtctccttcccgtatgtccaattgtagaggcccttttgaagtgaaatcttgccagagcctgccacagcctgtgtgcgcaaaatagtcttgatggccaggc

SEQ ID NO: 46773 - DNA, 600 bp, Chicken  19866894288092_3
gtgcaaagttgtcttttacatttggtcggattggcttggaattctgctgctgcttgttcaaaatatactgttagccctgatcgaacgagtaagccaaggatcctagttcatctcatacagtagtgacaagacagcaaaggaagatgtgatagaataatcataaaaaattccagtatattattcttgttaaagactgccagggtcagagtggtggagaatgtaggttgcattggtgtagtrgatataatttaagttgtggaaacatcattaccactgatgaggaatgggactgagaaagcrtgtggggctttggaagtctctgtgtaaagactgagttcgtatggctggtgaacagcaaatacatcctttttatttatttttttggtaagctaagtgtaatttcttcagtattcacccagcagaaataagcatgggctgctgtctccttcccgtatgtccaattgtagaggcccttttgaagtgaaatcttgccagagcctgccacagcctgtgtgcgcaaaatagtcttgatggccaggctgcagaggacacagagcacattagatctggctcattcccagctccctgtacaaagcacag

SEQ ID NO: 46774 - DNA, 600 bp, Chicken  19866894288094_1
gcgagggggcctggagggactcttctttcctggtaacattcaagtgttgccataaataatgctaaatccaagaacctttcagtaaacccgaggaaggatggaaactaatatggtgctttttaagcggttgtaggtcttctgtcctccagaaaagcagtttgagacacgtggataaacgtggtgtctcacagcctgacaagtgaagctgtgttttgaaccagtgcttaagagaaggcttgtgttgaaaacttggcctctaatatctttatctcctttgttcctggatgccagcgaggatcrtgctgggaaattccaaatccccacgagagcttaaacttatgcagtgcttttaaagcaattaatttctgaaaactaacccaggttgtctgaaaaataacctgaattcaggtcagtgtttgaaatccaggtgcatcctctggcatcagctgcatcaaagctttctgaccccgcaagcagccgaggcctgcaccccgaggcctgcgccccgaggcctgctgctcaagcagacacaaccaaagcatcacatcaatgaggtacaaccccaacaccaccagttttccgcacgcagagcatttctct

SEQ ID NO: 46775 - DNA, 600 bp, Chicken  19866894288111_1
tagctgggagtataatagtatatagtgtccaaaattgtctaatattgttttttaccatatgaaggatctctttatatgtctaaaaagaaaatgtgtttcaatttccatggctgctacaacccaggtgttttgaatattcatcggctagtatttgtatgaagtagtaaggagaatagggagaacagtatggaaacactgctattaacacaaaagcatgacatcttgaagacaatgcatatcactactgttttagaacacccattctggaaaatgagaggctcagtagcacattgcatatcmcattgaaagccayccatttctctttatctgagcttktgctaaaaatttagttcatagtgttacagagatgaaagagcaatttttttttcckgtattagttttgcccagaggctaaacagatcctgtgtgaatttgaaaatacttctcaagtctgtgagttgacattatttttaaaatcttgtttttctttcttttccatgrtcttttatattagaggcagagttattaagttgctctattattaagattgaccgacattttctattataacaccttgttttcaatggcttgtaatttaaa

SEQ ID NO: 46776 - DNA, 600 bp, Chicken  19866894288111_2
aatagtatatagtgtccaaaattgtctaatattgttttttaccatatgaaggatctctttatatgtctaaaaagaaaatgtgtttcaatttccatggctgctacaacccaggtgttttgaatattcatcggctagtatttgtatgaagtagtaaggagaatagggagaacagtatggaaacactgctattaacacaaaagcatgacatcttgaagacaatgcatatcactactgttttagaacacccattctggaaaatgagaggctcagtagcacattgcatatcmcattgaaagccayccatttctctttatctgagcttktgctaaaaatttagttcatagtgttacagagatgaaagagcaatttttttttcckgtattagttttgcccagaggctaaacagatcctgtgtgaatttgaaaatacttctcaagtctgtgagttgacattatttttaaaatcttgtttttctttcttttccatgrtcttttatattagaggcagagttattaagttgctctattattaagattgaccgacattttctattataacaccttgttttcaatggcttgtaatttaaacaaactataatat

SEQ ID NO: 46777 - DNA, 600 bp, Chicken  19866894288111_3
gtctaatattgttttttaccatatgaaggatctctttatatgtctaaaaagaaaatgtgtttcaatttccatggctgctacaacccaggtgttttgaatattcatcggctagtatttgtatgaagtagtaaggagaatagggagaacagtatggaaacactgctattaacacaaaagcatgacatcttgaagacaatgcatatcactactgttttagaacacccattctggaaaatgagaggctcagtagcacattgcatatcmcattgaaagccayccatttctctttatctgagcttktgctaaaaatttagttcatagtgttacagagatgaaagagcaatttttttttcckgtattagttttgcccagaggctaaacagatcctgtgtgaatttgaaaatacttctcaagtctgtgagttgacattatttttaaaatcttgtttttctttcttttccatgrtcttttatattagaggcagagttattaagttgctctattattaagattgaccgacattttctattataacaccttgttttcaatggcttgtaatttaaacaaactataatattaggaactaaaaatttacttgcc

SEQ ID NO: 46778 - DNA, 600 bp, Chicken  19866894288111_4
taaaaagaaaatgtgtttcaatttccatggctgctacaacccaggtgttttgaatattcatcggctagtatttgtatgaagtagtaaggagaatagggagaacagtatggaaacactgctattaacacaaaagcatgacatcttgaagacaatgcatatcactactgttttagaacacccattctggaaaatgagaggctcagtagcacattgcatatcmcattgaaagccayccatttctctttatctgagcttktgctaaaaatttagttcatagtgttacagagatgaaagagcaakttttttttcckgtattagttttgcccagaggctaaacagatcctgtgtgaatttgaaaatacttctcaagtctgtgagttgacattatttttaaaatcttgtttttctttcttttccatgrtcttttatattagaggcagagttattaagttgctctattattaagattgaccgacattttctattataacaccttgttttcaatggcttgtaatttaaacaaactataatattaggaactaaaaatttacttgccaaatgaatacatcattttggtttcctgcttgtttgcttcaacca

SEQ ID NO: 46779 - DNA, 600 bp, Chicken  19866894288111_5
tgtgtttcaatttccatggctgctacaacccaggtgttttgaatattcatcggctagtatttgtatgaagtagtaaggagaatagggagaacagtatggaaacactgctattaacacaaaagcatgacatcttgaagacaatgcatatcactactgttttagaacacccattctggaaaatgagaggctcagtagcacattgcatatcmcattgaaagccayccatttctctttatctgagcttktgctaaaaatttagttcatagtgttacagagatgaaagagcaatttttttttcckgtattagttttgcccagaggctaaacagatcctgtgtgaatttgaaaatacttctcaagtctgtgagttgacattatttttaaaatcttgtttttctttcttttccatgrtcttttatattagaggcagagttattaagttgctctattattaagattgaccgacattttctattataacaccttgttttcaatggcttgtaatttaaacaaactataatattaggaactaaaaatttacttgccaaatgaatacatcattttggtttcctgcttgtttgcttcaaccaaatcaattcat

SEQ ID NO: 46780 - DNA, 600 bp, Chicken  19866894288111_6
ttaacacaaaagcatgacatcttgaagacaatgcatatcactactgttttagaacacccattctggaaaatgagaggctcagtagcacattgcatatcmcattgaaagccayccatttctctttatctgagcttktgctaaaaatttagttcatagtgttacagagatgaaagagcaatttttttttcckgtattagttttgcccagaggctaaacagatcctgtgtgaatttgaaaatacttctcaagtctgtgagttgacattatttttaaaatcttgtttttctttcttttccatgrtcttttatattagaggcagagttattaagttgctctattattaagattgaccgacattttctattataacaccttgttttcaatggcttgtaatttaaacaaactataatattaggaactaaaaatttacttgccaaatgaatacatcattttggtttcctgcttgtttgcttcaaccaaatcaattcatccatttcctatgaacaatacatagaaaaacatttttttcatatattaaataaaaatactgaaaacatttttctgaacagaacctaacaccttcattctcagaggtagaag

SEQ ID NO: 46781 - DNA, 600 bp, Chicken  19866894288112_1
ttagtgcccgcttttccaacaatgctaacctacgtggtagaaaaaccaagcaagtgctttatatttgaggcctaactcccccagagagaatgttttcctctgcccaggctgcagcaccgctctccacacaacaaaacaccatgaccagtgatctccctgaccccgtaaagggttggctgctccatctggagagtcatgtccacacatccccaaagccaaggtttgcccgggcagtgaggtacaaaactgccacagaatcacgcaagctcctagaaaagctgtcgagacaaaatgttgttkggaaggactaatgtggaatcaatattgctctggggatgatgcacacaccttctcaatgcaccttattgtgtattgtctttttctgcagctctcctagccctttctacacacaaaatcttagtaaaagtgcacaacttaaatctctcttcatcaaaaaatagcctgtatttaaattatttcattataacaattacacrgcaagtcagattttctcaacagaatttaagatttgtttaagattaaacttgcaaaattaactttggctaatttatgtacataaaaagaatacaagcaccagtg

SEQ ID NO: 46782 - DNA, 600 bp, Chicken  19866894288112_2
gtccacacatccccaaagccaaggtttgcccgggcagtgaggtacaaaactgccacagaatcacgcaagctcctagaaaagctgtcgagacaaaatgttgttkggaaggactaatgtggaatcaatattgctctggggatgatgcacacaccttctcaatgcaccttattgtgtattgtctttttctgcagctctcctagccctttctacacacaaaatcttagtaaaagtgcacaacttaaatctctcttcatcaaaaaatagcctgtatttaaattatttcattataacaattacacrgcaagtcagattttctcaacagaatttaagatttgtttaagattaaacttgcaaaattaactttggctaatttatgtacataaaaagaatacaagcaccagtgcaatcgtttcataccctctctctttcccatcaaaacygaagtacatttccctctgtttcctccacctgcaaaatatattcagtgctgaacaaatgatgatgattaagttcttcaaagttagggagggttaaaggtcacacctgctatcatactgttttgtttcgaaaagcatgcattaaagaaacctgtgtatacca

SEQ ID NO: 46783 - DNA, 600 bp, Chicken  19866894288112_3
gatgcacacaccttctcaatgcaccttattgtgtattgtctttttctgcagctctcctagccctttctacacacaaaatcttagtaaaagtgcacaacttaaatctctcttcatcaaaaaatagcctgtatttaaattatttcattataacaattacacrgcaagtcagattttctcaacagaatttaagatttgtttaagattaaacttgcaaaattaactttggctaatttatgtacataaaaagaatacaagcaccagtgcaatcgtttcataccctctctctttcccatcaaaacygaagtacatttccctctgtttcctccacctgcaaaatatattcagtgctgaacaaatgatgatgattaagttcttcaaagttagggagggttaaaggtcacacctgctatcatactgttttgtttcgaaaagcatgcattaaagaaacctgtgtataccagagtgaattccagcagtgtaaccaatcccttgcagctgttgtgatgactctattatatcaggcaataggaaaagttatccctgtaaactacacacaaaaattctttagttatgctctaaaatacagaaatgcatggtaaa

SEQ ID NO: 46784 - DNA, 600 bp, Chicken  19866894288112_4
aatggtgaattccataactgtgttgggacaaaagccaagctgatcgtgtattgaattacccttgtagttagttctcagagatttgatagcggaaagtgacaatcacttttgtttatgatagcaccagcaaaataagggtattacataaattacagtcacattaaaatccaatgcacactgtgttaagggggaagaaaagcacaggttatactctactaccatttactgcaagccttggctctattcagtggatgctttgcttcacgccgcccttctctaatggctagtttagaccgaacrtcacacaattaggaactacagaatgagaagataaatagattggttataaatgctgtacgtttctcaatctgaaatctgcctgattgcctagcatgcttctgtgcaaaatggtgaaaaagaggagtgctggttttgaaaagcattgtcataagatcagatagcttatggtaggtgatgacaagaaacaggagggaggactgggacaccagyttggactggatgactacaacactactattcacctattcatcctaagcaagcacttctcactcagcacttctatcaatattttgatcagta

SEQ ID NO: 46785 - DNA, 600 bp, Chicken  19866894288112_5
ctctactaccatttactgcaagccttggctctattcagtggatgctttgcttcacgccgcccttctctaatggctagtttagaccgaacrtcacacaattaggaactacagaatgagaagataaatagattggttataaatgctgtacgtttctcaatctgaaatctgcctgattgcctagcatgcttctgtgcaaaatggtgaaaaagaggagtgctggttttgaaaagcattgtcataagatcagatagcttatggtaggtgatgacaagaaacaggagggaggactgggacaccagyttggactggatgactacaacactactattcacctattcatcctaagcaagcacttctcactcagcacttctatcaatattttgatcagtacggaaatagaaaacattcacatccttgtgtatgcatcagcttgaagcgggcaaatgacaaacacaaaaaaattgactgttttacatcttttcaacctgagagagaacactagaagtactccacccttgcgaagcagaacacatagtgccacatcccaccttctggttctcagaatggccaaagttcctttcaactacagcactgaatcag

SEQ ID NO: 46786 - DNA, 600 bp, Chicken  19866894288113_1
gagaaacagaaccactctgattcttttaatgtggagttttaagtatggctcgagttgatggcacaaagatacttcatagcaattgacaaagaatttctctttagtagcgttctgcttacggagatatgtacagtaatgtatctgagatgttgcccactaagaaaaagaggagaaaaaaatatctgcaatactgtgatctcgatgcccattatctgtctcatattcaattggagagccacattgatcaattggacagtatatgttgcatttccacagctgaactcccagcagtgccttcartaagtaactcctgctttgaattctgcctttaaaggcctgaaaacatattctgccttaatgatacatcatttacagctgaaaaatgctagaactttttgtagtagtagcagtagtagaaatggatctaactgtgctgtgcttaatttgggactactccattattttttactccagggagctgaaaaccattgaaattctcagttttaagctatactacatcccatccatgacagaaaaaaacaccaaagccagacagggcaaataaartgttatgggggaaaaaaaaagtgtaagtgctga

SEQ ID NO: 46787 - DNA, 600 bp, Chicken  19866894288113_2
tttccacagctgaactcccagcagtgccttcartaagtaactcctgctttgaattctgcctttaaaggcctgaaaacatattctgccttaatgatacatcatttacagctgaaaaatgctagaactttttgtagtagtagcagtagtagaaatggatctaactgtgctgtgcttaatttgggactactccattattttttactccagggagctgaaaaccattgaaattctcagttttaagctatactacatcccatccatgacagaaaaaaacaccaaagccagacagggcaaataaartgttatgggggaaaaaaaaagtgtaagtgctgagataaacaagtagcagaaagccaggctgtagcaacacagacaaatggcggctttaatattgaaattaccccaatttttccaatgtcaggtgcagctgtgctactttaattcagttagattaaaataaaagaatttcctttaacacatagttcagcaaacatccaaatgctgtaataaataaataaataaacaagcccagccagggagcacagatgccttttaatgtgaaagcgtattaaagttttcagttacttcttttagactctt

SEQ ID NO: 46788 - DNA, 599 bp, Chicken  19866894288115_1
  misc_feature (1)..(183): n is any nucleotide
nnnnnnnnnnnnnnnnnnnnnnnnnnnnnnnnnnnnnnnnnnnnnnnnnnnnnnnnnnnnnnnnnnnnnnnnnnnnnnnnnnnnnnnnnnnnnnnnnnnnnnnnnnnnnnnnnnnnnnnnnnnnnnnnnnnnnnnnnnnnnnnnnnnnnnnnnnnnnnnnnnnnnnnnnnnnnnnnnnnnnnntacttactacaagtacaaaagtgcctttcctcaccccaaaaaatgcagatttgtcctgcaagtgatcacgcttctgggaagaacactcctctagtgttgccaggcctttctttgcawttctccccagagattaaataagagctactgctcctcattttcaagatcttttgtagttcaccycagctccacctgtctcatgtgtagcctctcacgagaacagtcagtcttgccgtcacccatctgcccacgatacaaccactttgggacactcccatatatcaccatacagactttgtgatgtggagaggagttgtttgcacacacctgcaaaaccaacacacctgcaaaattctcccttttctcactgcccacaraaacacttgacaagggtcaggcttttgtgctgggcaaacacc

SEQ ID NO: 46789 - DNA, 599 bp, Chicken  19866894288115_2
  misc_feature (1)..(120): n is any nucleotide
nnnnnnnnnnnnnnnnnnnnnnnnnnnnnnnnnnnnnnnnnnnnnnnnnnnnnnnnnnnnnnnnnnnnnnnnnnnnnnnnnnnnnnnnnnnnnnnnnnnnnnnnnnnnnnnnnnnnnnnntacttactacaagtacaaaagtgcctttcctcaccccaaaaaatgcagatttgtcctgcaagtgatcacgcttctgggaagaacactcctctagtgttgccaggcctttctttgcawttctccccagagattaaataagagctactgctcctcattttcaagatcttttgtagttcaccycagctccacctgtctcatgtgtagcctctcacgagaacagtcagtcttgccgtcacccatctgcccacgatacaaccactttgggacactcccatatatcaccatacagactttgtgatgtggagaggagttgtttgcacacacctgcaaaaccaacacacctgcaaaattctcccttttctcactgcccacaraaacacttgacaagggtcaggcttttgtgctgggcaaacaccgtcctgctggttcattgtgcttcccatctggccacacaccagctcacacactgtgtcaggagc

SEQ ID NO: 46790 - DNA, 600 bp, Chicken  19866894288115_3
tgggaagaacactcctctagtgttgccaggcctttctttgcawttctccccagagattaaataagagctactgctcctcattttcaagatcttttgtagttcaccycagctccacctgtctcatgtgtagcctctcacgagaacagtcagtcttgccgtcacccatctgcccacgatacaaccactttgggacactcccatatatcaccatacagactttgtgatgtggagaggagttgtttgcacacacctgcaaaaccaacacacctgcaaaattctcccttttctcactgcccacaraaacacttgacaagggtcaggcttttgtgctgggcaaacaccgtcctgctggttcattgtgcttcccatctggccacacaccagctcacacactgtgtcaggagccagactgtcctatgggtgatcctgtgtggagccaggatttgaacttcatgatccatgtgggtcccactcaattattcttcagattccatgctacttccacagtgaggtcctcatccacaacccatgctcttacatgttacagattaatatattaaaaatagcaagagcaaccactgaaacacgattggcatttgc

SEQ ID NO: 46791 - DNA, 600 bp, Chicken  19866894288118_1
tgcacaaattagaacttggtaaacatcaaaagctagagtgatcaattctgaggcaagttaataaaagtatttttatgctcacattatagtaaaaaggtaataatgtttaaaattacatcaaactgtagcacacatgtaaatgacttgatggaattgaagagccaaactaaaactaaaacatttttctttccttttttttttttttttttacttccaaagcattttgggatagaattccagcatggaaagtaaacatgattacttattagaggtctacaagtaatgtaaagtctatctatrttaacacaacatcaaagtatgtctgaaattaacatttctgtggaagcaattctagttaaaacttctctgtttcacagttcagtaatttaatttatactttaagcctaatgtaccaaaattactgttgaggaaactattgaatttccaggagaccgttataaggagaatattcacttgtcttgcaaaaagcatttacatgatcatattctaagactgcatctcaggtagctgagtgtcttcagactccaagcctaagtacttcaatgctagtctgaagtctggtgcccgctgcttctgagg

SEQ ID NO: 46792 - DNA, 564 bp, Chicken  19866894288121_1
gtatcaccctctcttcccttcctcgcctctcacttacttcttaaaacttcaagctgggagtaaagttcaggaaaacttgcctctttctacagtccttaactatgttacagcaatttgcagcccttgtaaaaaaagagctatcaagctcaaaaccaatatgctctatggtgcgtgcccaaggacctttagtactctgatcagctgagattcttagcccccttttttatatgatgtaaaaccagtttcagccaaactgttttggggcttattgtggcagcatcccgtagctggctttccccyccctgccagcccagctcatgctctcattggcccacaaggcaagccataaccttcccagccctattgctagaaaacacaggaatatttaacagaaagtttgtctcatctatacatgaagaatgtgactgaatgcatttagtcaggcaccaatgaactgaaaaaaaacaactgtaccactgggaacagagttgcccatttaggcaaaaggaactacagccaacacatgctcctctggtagtgcaagggaaattcacctgtgcttat

SEQ ID NO: 46793 - DNA, 599 bp, Chicken  19866894288123_1
  misc_feature (1)..(63): n is any nucleotide
nnnnnnnnnnnnnnnnnnnnnnnnnnnnnnnnnnnnnnnnnnnnnnnnnnnnnnnnnnnnnnntgaggacttgttccaaagtaacacacgtgggcagagaaataaaggaaaaaaatctacttaccttatgaaggcttcaggcatgcagacatctccagtgagatactctcacctccactgccaaccctcaaatgtggtctggaaaggggtagatcctggctccaccccttccagtcactcagctgcattgcacacacctgagctctcctgggttggccctgcctttccaccaggtgctcratcactggctcaagccacaacttagaatttctgatacagacactacttcttagtatacaatattcttaaattatttaaattttagactaagaaattaggaagttttcactataattttatcattatttacaatataattcttattttataaaataatcgtgtaaaagggattactatgtagtgaattaattcagttttttggaagggctgttccagttacaaaatcttggagtatgaatttttcagccttctaactaagtcagcaacttcagctcactggtttcaatcaaaacaagaag

SEQ ID NO: 46794 - DNA, 600 bp, Chicken  19866894288127_1
tcttcccctctgtctctttccagcaagcagaaaaacccgatggtttcttggtcagatatcgtttgcatttcaaccaggcttctgagctatcacatttttgccagtctgattaatttatcatctgacattttttctaatcagatttttctctctatttttaaacaggattcaggccatttcccctccctgagcccatgtttacttgaagctaatgacatgcctttcaggcttatcaggttaaagcaatgaacaaataagacttcttccttcagctgcagggccatagcaaaaaatgaatcygtaatttaatacaaaataataaagatcattattttaattacattttgagattttgctgatgtcccatttcccatcttacaatctgtgataggtatgcatctactttagcaaagacatgcatttctgctgagcataacttaacagtgcwggagtggatwtcgaggttgatggagttttccrcattgtttcawaccagttctaaaggactctcacacctgacagtcccttctatcccacaagcaaagtacacctctgcagtggcaagaatggcaagcagtactgcagaaaatattcattgaa

SEQ ID NO: 46795 - DNA, 600 bp, Chicken  19866894288127_2
tctctatttttaaacaggattcaggccatttcccctccctgagcccatgtttacttgaagctaatgacatgcctttcaggcttatcaggttaaagcaatgaacaaataagacttcttccttcagctgcagggccatagcaaaaaatgaatcygtaatttaatacaaaataataaagatcattattttaattacattttgagattttgctgatgtcccatttcccatcttacaatctgtgataggtatgcatctactttagcaaagacatgcatttctgctgagcataacttaacagtgcwggagtggatwtcgaggttgatggagttttccrcattgtttcawaccagttctaaaggactctcacacctgacagtcccttctatcccacaagcaaagtacacctctgcagtggcaagaatggcaagcagtactgcagaaaatattcattgaaatgcaggtatgctctccctgtggtgttccagcatctgctacctgcttgcaacrcaggtgcttgcagcacagcgcttcttattcattcacttatttacagcagcagatttgtgttccaataacgtgtgagggaaattctgcctgagact

SEQ ID NO: 46796 - DNA, 600 bp, Chicken  19866894288127_3
taaacaggattcaggccatttcccctccctgagcccatgtttacttgaagctaatgacatgcctttcaggcttatcaggttaaagcaatgaacaaataagacttcttccttcagctgcagggccatagcaaaaaatgaatcygtaatttaatacaaaataataaagatcattattttaattacattttgagattttgctgatgtcccatttcccatcttacaatctgtgataggtatgcatctactttagcaaagacatgcatttctgctgagcataacttaacagtgcwggagtggatwtcgaggttgatggagttttccrcattgtttcawaccagttctaaaggactctcacacctgacagtcccttctatcccacaagcaaagtacacctctgcagtggcaagaatggcaagcagtactgcagaaaatattcattgaaatgcaggtatgctctccctgtggtgttccagcatctgctacctgcttgcaacrcaggtgcttgcagcacagcgcttcttattcattcacttatttacagcagcagatttgtgttccaataacgtgtgagggaaattctgcctgagacttttgtggacg

SEQ ID NO: 46797 - DNA, 600 bp, Chicken  19866894288127_4
ccctccctgagcccatgtttacttgaagctaatgacatgcctttcaggcttatcaggttaaagcaatgaacaaataagacttcttccttcagctgcagggccatagcaaaaaatgaatcygtaatttaatacaaaataataaagatcattattttaattacattttgagattttgctgatgtcccatttcccatcttacaatctgtgataggtatgcatctactttagcaaagacatgcatttctgctgagcataacttaacagtgcwggagtggatwtcgaggttgatggagttttccrcattgtttcawaccagttctaaaggactctcacacctgacagtcccttctatcccacaagcaaagtacacctctgcagtggcaagaatggcaagcagtactgcagaaaatattcattgaaatgcaggtatgctctccctgtggtgttccagcatctgctacctgcttgcaacrcaggtgcttgcagcacagcgcttcttattcattcacttatttacagcagcagatttgtgttccaataacgtgtgagggaaattctgcctgagacttttgtggacgcccagtgatatgaggaagctgc

SEQ ID NO: 46798 - DNA, 600 bp, Chicken  19866894288127_5
cccatgtttacttgaagctaatgacatgcctttcaggcttatcaggttaaagcaatgaacaaataagacttcttccttcagctgcagggccatagcaaaaaatgaatcygtaatttaatacaaaataataaagatcattattttaattacattttgagattttgctgatgtcccatttcccatcttacaatctgtgataggtatgcatctactttagcaaagacatgcatttctgctgagcataacttaacagtgcwggagtggatwtcgaggttgatggagttttccrcattgtttcawaccagttctaaaggactctcacacctgacagtcccttctatcccacaagcaaagtacacctctgcagtggcaagaatggcaagcagtactgcagaaaatattcattgaaatgcaggtatgctctccctgtggtgttccagcatctgctacctgcttgcaacrcaggtgcttgcagcacagcgcttcttattcattcacttatttacagcagcagatttgtgttccaataacgtgtgagggaaattctgcctgagacttttgtggacgcccagtgatatgaggaagctgcagctacccact

SEQ ID NO: 46799 - DNA, 600 bp, Chicken  19866894288127_6
tgctgatgtcccatttcccatcttacaatctgtgataggtatgcatctactttagcaaagacatgcatttctgctgagcataacttaacagtgcwggagtggatwtcgaggttgatggagttttccrcattgtttcawaccagttctaaaggactctcacacctgacagtcccttctatcccacaagcaaagtacacctctgcagtggcaagaatggcaagcagtactgcagaaaatattcattgaaatgcaggtatgctctccctgtggtgttccagcatctgctacctgcttgcaacrcaggtgcttgcagcacagcgcttcttattcattcacttatttacagcagcagatttgtgttccaataacgtgtgagggaaattctgcctgagacttttgtggacgcccagtgatatgaggaagctgcagctacccactcacagggaagagtgggagcaagaataacattaaagagaaattgaaaagagaaatgagattgttcaatttttagaaaaaagtcatcttctgcaaaatatactcattacaggatttcaattatctcttatatttgataatagtagcagaacgatagctcacact

SEQ ID NO: 46800 - DNA, 597 bp, Chicken  19866894288128_1
atctaacaatgtacaagcaaaaacggaggaaccacccttaccttttccccaagtcagacatcggaaatgtcataatcatatcctactctgatcttgctaaattattgtaaaatactgaggatataagcatctctctgtaggcttcgttctgtaagtgcagttctctgcaagtccagtcattaatttaatacatatattacaaatgtaattcatctttgcctcctctcacttccataagttctcttgccatccagactgtaaattagatgtcatactcaaagagctgcacagttttcccaratctgtaaaattgctggattctttctgttctttctctgtgctatctccaaaaggcattccttctatagaaggtttactttgtggccttagatctcaaacgttggttgaaatgacctccacacctgtagctttcccaggaatcaccctatttcttgggatttgcagtgaaactcccccacctgcccaacgtgccgcccatgctgtgagcgtttgtccctccctgaagcagttctgagctccgctggctgcatctccccagccccaggaccacaggtcaggtgtcagagggagcagcat

SEQ ID NO: 46801 - DNA, 599 bp, Chicken  19866894288138_1
  misc_feature (1)..(92): n is any nucleotide
nnnnnnnnnnnnnnnnnnnnnnnnnnnnnnnnnnnnnnnnnnnnnnnnnnnnnnnnnnnnnnnnnnnnnnnnnnnnnnnnnnnnnnnnnnnntcggaattactgtagcatatactatcccaaacaaggtaatatggtcattatttacaatgacactggttttttaaataaatcttatagattatatgtgtaaggttagctactttgcttacccttaaaaccttaaaataaagtatcatcttaaacaagtccagtaaaactgaaggctcagtacattcagctggtgtcttctatggttccrtgtttccatgaaatatattccattaaatatggacgttaggtgtgaatgtagctttgaaatgataggagtaaatgtatttcttggggtgagaaggcaaagaaatgcaaatttctcaactgctctttttgtgagtgatatttttgccatctttgtagaagtcagcattgtcaaagtgcagttggtatacttggggaacacggaatgtgtatgttttgcaagcagaactttcaaacttcagtcagaacagagtttgcaatttctcaaccagtgtgctgagttgaccctcatcttgtaatgga

SEQ ID NO: 46802 - DNA, 600 bp, Chicken  19866894288138_2
ggaacacggaatgtgtatgttttgcaagcagaactttcaaacttcagtcagaacagagtttgcaatttctcaaccagtgtgctgagttgaccctcatcttgtaatggagtgcttggttctgggaaagcgtgacgtaactgcaatacagcttgtttgtggagatcttttagtgtgctgcttctgttgctgaccttttcttcctttgctactaggaagagaatctgacagctgaagaaacagtggctgagtctgaagaaagcctggaagatctcatggccaaaatgcgcaacttgtagcaaracaaatacyaaggacaagtacaggagtttggattgacatcacattttgagtagacttttcttccctccactgaagctcatctttacatayctaatgaaattgaactgttacataggtgggaagtagacagacttacccttgtttatattttgttgtcttttcatggttttaacatgcactactgtaagttttaatttttcagcattgctggggtccagataatcaatggaaaattaaaagagatggatgaactaaaaaaaaaaagtatgcatagcacgtgatatgcagtatcaggttatg

SEQ ID NO: 46803 - DNA, 600 bp, Chicken  19866894288138_3
aatgtgtatgttttgcaagcagaactttcaaacttcagtcagaacagagtttgcaatttctcaaccagtgtgctgagttgaccctcatcttgtaatggagtgcttggttctgggaaagcgtgacgtaactgcaatacagcttgtttgtggagatcttttagtgtgctgcttctgttgctgaccttttcttcctttgctactaggaagagaatctgacagctgaagaaacagtggctgagtctgaagaaagcctggaagatctcatggccaaaatgcgcaacttgtagcaaracaaatacyaaggacaagtacaggagtttggattgacatcacattttgagtagacttttcttccctccactgaagctcatctttacatayctaatgaaattgaactgttacataggtgggaagtagacagacttacccttgtttatattttgttgtcttttcatggttttaacatgcactactgtaagttttaatttttcagcattgctggggtccagataatcaatggaaaattaaaagagatggatgaactaaaaaaaaaaagtatgcatagcacgtgatatgcagtatcaggttatgaaaatatag

SEQ ID NO: 46804 - DNA, 600 bp, Chicken  19866894288138_4
ccctcatcttgtaatggagtgcttggttctgggaaagcgtgacgtaactgcaatacagcttgtttgtggagatcttttagtgtgctgcttctgttgctgaccttttcttcctttgctactaggaagagaatctgacagctgaagaaacagtggctgagtctgaagaaagcctggaagatctcatggccaaaatgcgcaacttgtagcaaracaaatacyaaggacaagtacaggagtttggattgacatcacattttgagtagacttttcttccctccactgaagctcatctttacatayctaatgaaattgaactgttacataggtgggaagtagacagacttacccttgtttatattttgttgtcttttcatggttttaacatgcactactgtaagttttaatttttcagcattgctggggtccagataatcaatggaaaattaaaagagatggatgaactaaaaaaaaaaagtatgcatagcacgtgatatgcagtatcaggttatgaaaatatagcatgggacaaatgaaagatgaaatctgctggctggagtgtacaggataggtcaagggcagctgacagtgcctcactcattg

SEQ ID NO: 46805 - DNA, 600 bp, Chicken  19866894288160_1
gaaagcaattctcaccttataccaatttgaagactcttaagcattttccaatagatctgacatggttcttatacagcaaattgaagtcgactgacaatagatttacttttcttaattaccttttgcagactcttcagaagtggcccctgagacccaaggagtccacagacccaatttgcaggaaaacagatatttattatcatacattttgttttgttatcagtttaacttgaaactactgttgaacataaaaactgctagagtcttgtttttacttgagttctattttgtccttataarcagtcaatcatctcttgaggtcccttgagcccctgcaattctgtgattctgtaataataagtaagcactgaagcaccaacgtgaaggcatgatcagtgaacatccattttcaggaagcttttctaaccagtgatgtttctacagcatcctattttttgatgtccaggctctgtgttgcacacacagtcattactttcagcaagtttgaaagcatttgtctaagtataactgactagcaaagtttaggtgctgatctgtctggtgttcatagttacccagttcttagtgttgcttttcaaa

SEQ ID NO: 46806 - DNA, 599 bp, Chicken  19866894288173_1
  misc_feature (1)..(153): n is any nucleotide
nnnnnnnnnnnnnnnnnnnnnnnnnnnnnnnnnnnnnnnnnnnnnnnnnnnnnnnnnnnnnnnnnnnnnnnnnnnnnnnnnnnnnnnnnnnnnnnnnnnnnnnnnnnnnnnnnnnnnnnnnnnnnnnnnnnnnnnnnnnnnnnnnnnnnnnnnatagtgtacgggattcattacatagattgtccttgaacaactcctcaacactttggcacaaaggtatgcagacagaccattgcaatgaaccatttttatccagcagcagaaagaaatatggacgaagctttatggcttttcttcagygcagtgggttaacctagccatgctattattgttgggccctgaaatagacctcattgatttcagatttgatgggattcaaggggagcaacagcaattactatgttcaaccatttaaaaacgtaaattagggatgaataaggcttttaaagctaggaattaaaagaagtgggtgcaaatcatttctgcctgctttgtattggatttacttcctggatacctgtttgcccagacacctttctgagactgtcacatattaccccaatgagatctgcaaaggacagaacctcatcagatgagta

SEQ ID NO: 46807 - DNA, 600 bp, Chicken  19866894288204_1
ataatgagttcccattgcgagttgcttgaaatctgcctggcccaattaaataagatcattctgaaagacatattctccccagagcattacagaaatttaaaatgagccagctgaattagcctcagtatgtaggtggcctgctccctgcctgtaagtataatctttaagaatttgtatgatctgctcagtcagctcaatcactttgggtccgatagctgtaacaaatgccatttaaattattatatgtggcaactgcaaaagaatcatgcttcttaattataaactagaatattagggtcyagcttcttgcatagacacaagtaccatacaaaacaaaacaacaacaacaacaacaaaaaytgagatcagtaataatcattacttaataatgacttaatgatgtggaaaaagaatatgctgttattwtttatttgcaatggtgaaaagtgagaattatttttgttctgatagagtaaaaatgcatttataaatagctgcagaaaaagggattaaatttgtgcttatgctaacattcatatcctattttctgataggtaatggaagcatggagttatcagaacaaaggtcttaactgtttcc

SEQ ID NO: 46808 - DNA, 600 bp, Chicken  19866894288204_2
ctgaaagacatattctccccagagcattacagaaatttaaaatgagccagctgaattagcctcagtatgtaggtggcctgctccctgcctgtaagtataatctttaagaatttgtatgatctgctcagtcagctcaatcactttgggtccgatagctgtaacaaatgccatttaaattattatatgtggcaactgcaaaagaatcatgcttcttaattataaactagaatattagggtcyagcttcttgcatagacacaagtaccatacaaaacaaaacaacaacaacaacaacaaaaaytgagatcagtaataatcattacttaataatgacttaatgatgtggaaaaagaatatgctgttattwtttatttgcaatggtgaaaagtgagaattatttttgttctgatagagtaaaaatgcatttataaatagctgcagaaaaagggattaaatttgtgcttatgctaacattcatatcctattttctgataggtaatggaagcatggagttatcagaacaaaggtcttaactgtttccattttaactccaaaaatttatctgaccagacaattcagtagcaattcattccttccctgc

SEQ ID NO: 46809 - DNA, 600 bp, Chicken  19866894288204_3
atgtaggtggcctgctccctgcctgtaagtataatctttaagaatttgtatgatctgctcagtcagctcaatcactttgggtccgatagctgtaacaaatgccatttaaattattatatgtggcaactgcaaaagaatcatgcttcttaattataaactagaatattagggtcyagcttcttgcatagacacaagtaccatacaaaacaaaacaacaacaacaacaacaaaaaytgagatcagtaataatcattacttaataatgacttaatgatgtggaaaaagaatatgctgttattwtttatttgcaatggtgaaaagtgagaattatttttgttctgatagagtaaaaatgcatttataaatagctgcagaaaaagggattaaatttgtgcttatgctaacattcatatcctattttctgataggtaatggaagcatggagttatcagaacaaaggtcttaactgtttccattttaactccaaaaatttatctgaccagacaattcagtagcaattcattccttccctgcttatgctatgactgcaaycacatctacaaaatgcctcatttttataattataagtyatttgaatat

SEQ ID NO: 46810 - DNA, 570 bp, Chicken  19866894288204_4
ttacttaataatgacttaatgatgtggaaaaagaatatgctgttattwtttatttgcaatggtgaaaagtgagaattatttttgttctgatagagtaaaaatgcatttataaatagctgcagaaaaagggattaaatttgtgcttatgctaacattcatatcctattttctgataggtaatggaagcatggagttatcagaacaaaggtcttaactgtttccattttaactccaaaaatttatctgaccagacaattcagtagcaattcattccttccctgcttatgctatgactgcaaycacatctacaaaatgcctcatttttataattataagtyatttgaatataccatgctcaagcattcagctatttctgctacagaaacattacactggagcattcctgggtctgtgataagagctgtaattccccaccccaccccaccattttattagcaaccattcaaatggacacaataggtttatattgcttctccagctcttgtgagcttgtttctattttgacataaaatttattctttagaatggaaagacacacaaaaagaagta

SEQ ID NO: 46811 - DNA, 532 bp, Chicken  19866894288204_5
gctgttattwtttatttgcaatggtgaaaagtgagaattatttttgttctgatagagtaaaaatgcatttataaatagctgcagaaaaagggattaaatttgtgcttatgctaacattcatatcctattttctgataggtaatggaagcatggagttatcagaacaaaggtcttaactgtttccattttaactccaaaaatttatctgaccagacaattcagtagcaattcattccttccctgcttatgctatgactgcaaycacatctacaaaatgcctcatttttataattataagtyatttgaatataccatgctcaagcattcagctatttctgctacagaaacattacactggagcattcctgggtctgtgataagagctgtaattccccaccccaccccaccattttattagcaaccattcaaatggacacaataggtttatattgcttctccagctcttgtgagcttgtttctattttgacataaaatttattctttagaatggaaagacacacaaaaagaagta

SEQ ID NO: 46812 - DNA, 599 bp, Chicken  19866894288213_1
  misc_feature (1)..(117): n is any nucleotide
nnnnnnnnnnnnnnnnnnnnnnnnnnnnnnnnnnnnnnnnnnnnnnnnnnnnnnnnnnnnnnnnnnnnnnnnnnnnnnnnnnnnnnnnnnnnnnnnnnnnnnnnnnnnnnnnnnnnntgaaaaaaatgaaagcaagggagttttcacaagaaatgtatttaatttcaatatatatatggatcataggcacgagttggaatgcagatgtgtccaagctgtggtctttgtggactaggtatgcaagcaacataaccatgttgtccaagagttaaaccaagggctagttggtcttgctgacayggcttttgtgctcttgcttaatatgtgcatggccgtagtttccacacctaatctatatttyggtcagttgactgcttgttagagcacataaattaaagtcttgtgtatgtgtacatagcartatgatatttcgttcaatacaaattggcaggatatttcagagatctttatgcccttgttagtgctgacacatgcatgcaatagaccctgaggagatgatgtgtgagaagagacygtgtgcgcagtcattggatactgagcttcacaccctgcaatgaagacaaggcctactggcagta

SEQ ID NO: 46813 - DNA, 599 bp, Chicken  19866894288213_2
  misc_feature (1)..(56): n is any nucleotide
nnnnnnnnnnnnnnnnnnnnnnnnnnnnnnnnnnnnnnnnnnnnnnnnnnnnnnnntgaaaaaaatgaaagcaagggagttttcacaagaaatgtatttaatttcaatatatatatggatcataggcacgagttggaatgcagatgtgtccaagctgtggtctttgtggactaggtatgcaagcaacataaccatgttgtccaagagttaaaccaagggctagttggtcttgctgacayggcttttgtgctcttgcttaatatgtgcatggccgtagtttccacacctaatctatatttyggtcagttgactgcttgttagagcacataaattaaagtcttgtgtatgtgtacatagcartatgatatttcgttcaatacaaattggcaggatatttcagagatctttatgcccttgttagtgctgacacatgcatgcaatagaccctgaggagatgatgtgtgagaagagacygtgtgcgcagtcattggatactgagcttcacaccctgcaatgaagacaaggcctactggcagtaatagaggtgtgagctgcaaagtgtgatacctggatagatgtattcttctgctaattctgga

SEQ ID NO: 46814 - DNA, 600 bp, Chicken  19866894288213_3
aaaaatgaaagcaagggagttttcacaagaaatgtatttaatttcaatatatatatggatcataggcacgagttggaatgcagatgtgtccaagctgtggtctttgtggactaggtatgcaagcaacataaccatgttgtccaagagttaaaccaagggctagttggtcttgctgacayggcttttgtgctcttgcttaatatgtgcatggccgtagtttccacacctaatctatatttyggtcagttgactgcttgttagagcacataaattaaagtcttgtgtatgtgtacatagcartatgatatttcgttcaatacaaattggcaggatatttcagagatctttatgcccttgttagtgctgacacatgcatgcaatagaccctgaggagatgatgtgtgagaagagacygtgtgcgcagtcattggatactgagcttcacaccctgcaatgaagacaaggcctactggcagtaatagaggtgtgagctgcaaagtgtgatacctggatagatgtattcttctgctaattctggatgatattagcacgtcaaaaagctgtgtttagcattaccttaaggtctgtcacagcctacct

SEQ ID NO: 46815 - DNA, 600 bp, Chicken  19866894288213_4
gtatgcaagcaacataaccatgttgtccaagagttaaaccaagggctagttggtcttgctgacayggcttttgtgctcttgcttaatatgtgcatggccgtagtttccacacctaatctatatttyggtcagttgactgcttgttagagcacataaattaaagtcttgtgtatgtgtacatagcartatgatatttcgttcaatacaaattggcaggatatttcagagatctttatgcccttgttagtgctgacacatgcatgcaatagaccctgaggagatgatgtgtgagaagagacygtgtgcgcagtcattggatactgagcttcacaccctgcaatgaagacaaggcctactggcagtaatagaggtgtgagctgcaaagtgtgatacctggatagatgtattcttctgctaattctggatgatattagcacgtcaaaaagctgtgtttagcattaccttaaggtctgtcacagcctacctgggtgatttgtttgttgatttcctaagtcattgctaaggagcccacaagaaaaaagcaataaaaatagtaggtgaaactcttgttaacagaacagataaaaagtaagaaaccat

SEQ ID NO: 46816 - DNA, 600 bp, Chicken  19866894288215_1
tatgtggaaaacataatagtcccattaggcatgtcttcactgcagaagcaggcagtatattggtcctcggctttgagtaccagctttacctcagatgaggtgtgagaagccagtctgcaaagctacactgggataatgaatcctcattacctttgtgttcccctagacatttctattggccatcacagggcatttcccctaatcctttcatgtaacagtaagtggagttgttccaaacacaaccatttgtggaaacagtgtctttaggacacacagtgagaaatgggtttgtgggtgacrggrtgaccctggaggccttagagagggagtctccagctgaagattgcttaccaatggccaaagaacaagtgaaatgccttcttgagctggatcttcaccagtaaactgggaaaatcacaagcctgaatgaaggtgaaaagctgccactaacctctcttttcagccttatcctgcagaaactcacagaatctggagacatacaattacaggaggctgttttataattacaggaggctgtgtttacaattacaggagcctaagtcactgtccccacatacccacaatttaacataaaataga

SEQ ID NO: 46817 - DNA, 600 bp, Chicken  19866894288215_2
gtggaaaacataatagtcccattaggcatgtcttcactgcagaagcaggcagtatattggtcctcggctttgagtaccagctttacctcagatgaggtgtgagaagccagtctgcaaagctacactgggataatgaatcctcattacctttgtgttcccctagacatttctattggccatcacagggcatttcccctaatcctttcatgtaacagtaagtggagttgttccaaacacaaccatttgtggaaacagtgtctttaggacacacagtgagaaatgggtttgtgggtgacrggrtgaccctggaggccttagagagggagtctccagctgaagattgcttaccaatggccaaagaacaagtgaaatgccttcttgagctggatcttcaccagtaaactgggaaaatcacaagcctgaatgaaggtgaaaagctgccactaacctctcttttcagccttatcctgcagaaactcacagaatctggagacatacaattacaggaggctgttttataattacaggaggctgtgtttacaattacaggagcctaagtcactgtccccacatacccacaatttaacataaaatagaatc

SEQ ID NO: 46818 - DNA, 600 bp, Chicken  19866894288215_3
attacaggaggctgtgtttacaattacaggagcctaagtcactgtccccacatacccacaatttaacataaaatagaatcatagaatcatagaatcacaaggttggaaaggacctacaagattatctagtccaaccatcctcccattaccattgctatcacaagctagaagaaatagaagagatatatctgtgtatgcaagtgccagcaaagtgctggcacacgtactgccttctttccagcccacccttcttagtgctttacacagaagaaatgctgtaactgctgccacttcatggtrtagactatgttcccagctccacattcaattatttttaaacagttccagttacatttcctataatggattccatttttccttttgtcctttatttttttacttttaccaacaaaataaaagacagatcagctaaggatctttgtttaaatattattggcatacagtaaacttagaaatactataggagttagtcctggacggatgttaataagattactcatattacctatgcactcaataaattttttctggctaccgctgggtgccctgtagctctagaaactttaagctagggaggtt

SEQ ID NO: 46819 - DNA, 600 bp, Chicken  19866894288234_1
tggtccaaattttagtgcccaacagtgccaagactcaggcagagaaagctttaaggcttcttgaaccactgccaagagtaaatattctatagtgctttgctagccaagaaattgcatgccttacatttaagctttaatttccattttttggtcatcaatcttagaatggcaccataaccaaacacatctgtcaaatagcttcaaaaccactaatcctgattcaagcaaacgacgactccagagttattttccagttttactcatacccaacttatggtctctgaagctgatttttaaagraaaagcacattaatctccttctatccctatgagctcaacaccyacctacacagagaaaacgtagctctggtattctcccataagcacctcagtcttaaaagatgtggcaagacaggccaccatatagctggtgaaaaactatttccaaattagggaacagagcaatttttgccttacattctgcaattttgtcttggcactctattcacactgtataatagctatgtacaaccatcagcgtttttaatacatttattttacttttcaaattaagaggggttacgtatatatgtagggcag

SEQ ID NO: 46820 - DNA, 600 bp, Chicken  19866894288234_2
gaaagctttaaggcttcttgaaccactgccaagagtaaatattctatagtgctttgctagccaagaaattgcatgccttacatttaagctttaatttccattttttggtcatcaatcttagaatggcaccataaccaaacacatctgtcaaatagcttcaaaaccactaatcctgattcaagcaaacgacgactccagagttattttccagttttactcatacccaacttatggtctctgaagctgatttttaaagraaaagcacattaatctccttctatccctatgagctcaacaccyacctacacagagaaaacgtagctctggtattctcccataagcacctcagtcttaaaagatgtggcaagacaggccaccatatagctggtgaaaaactatttccaaattagggaacagagcaatttttgccttacattctgcaattttgtcttggcactctattcacactgtataatagctatgtacaaccatcagcgtttttaatacatttattttacttttcaaattaagaggggttacgtatatatgtagggcagcttccatctgtgacaaaacagttaagcaaaccagaaaaaatgg

SEQ ID NO: 46821 - DNA, 600 bp, Chicken  19866894288242_1
aatttgcctaacgacttgttcctctggggggcagcttttgctgctgaatcacaaatctcacacaactcctgtgctgattgtgcagcctattggtactgggtaccagtacaaaccagtggtttcttttaggagatccatctactgtgactatggctagtagctgaatagctcctgaaactatcctttctttaggcacaagatgtttgcaaagccagcaggaatggaaattatttggactggtgagggtttagtggggcggactttgccttatatttcacacatgcacactgagttggaggrggaacacaargagatgttccattcataggcaracatgtgctttgacactagggaggtacatcatgttcttgcagagggtgggaagaactatggaggagaaaggcaatggctctgctccttttctccatgagygtaaagayagtccagagatggatgacctttcccaaccctgctccttttttctatgctgtagcctgggttattatgccctttgccttcaatataagttcgcactcaatttctgcagaaagataacgagcgttattgtgaacaagagcctgaggccagctgtgaattaaa

SEQ ID NO: 46822 - DNA, 600 bp, Chicken  19866894288242_2
acgacttgttcctctggggggcagcttttgctgctgaatcacaaatctcacacaactcctgtgctgattgtgcagcctattggtactgggtaccagtacaaaccagtggtttcttttaggagatccatctactgtgactatggctagtagctgaatagctcctgaaactatcctttctttaggcacaagatgtttgcaaagccagcaggaatggaaattatttggactggtgagggtttagtggggcggactttgccttatatttcacacatgcacactgagttggaggrggaacacaargagatgttccattcataggcaracatgtgctttgacactagggaggtacatcatgttcttgcagagggtgggaagaactatggaggagaaaggcaatggctctgctccttttctccatgagygtaaagayagtccagagatggatgacctttcccaaccctgctccttttttctatgctgtagcctgggttattatgccctttgccttcaatataagttcgcactcaatttctgcagaaagataacgagcgttattgtgaacaagagcctgaggccagctgtgaattaaatcaaatgatc

SEQ ID NO: 46823 - DNA, 600 bp, Chicken  19866894288242_3
agcttttgctgctgaatcacaaatctcacacaactcctgtgctgattgtgcagcctattggtactgggtaccagtacaaaccagtggtttcttttaggagatccatctactgtgactatggctagtagctgaatagctcctgaaactatcctttctttaggcacaagatgtttgcaaagccagcaggaatggaaattatttggactggtgagggtttagtggggcggactttgccttatatttcacacatgcacactgagttggaggrggaacacaargagatgttccattcataggcaracatgtgctttgacactagggaggtacatcatgttcttgcagagggtgggaagaactatggaggagaaaggcaatggctctgctccttttctccatgagygtaaagayagtccagagatggatgacctttcccaaccctgctccttttttctatgctgtagcctgggttattatgccctttgccttcaatataagttcgcactcaatttctgcagaaagataacgagcgttattgtgaacaagagcctgaggccagctgtgaattaaatcaaatgatcagaaaaatgactcaaaatgccc

SEQ ID NO: 46824 - DNA, 600 bp, Chicken  19866894288242_4
atccatctactgtgactatggctagtagctgaatagctcctgaaactatcctttctttaggcacaagatgtttgcaaagccagcaggaatggaaattatttggactggtgagggtttagtggggcggactttgccttatatttcacacatgcacactgagttggaggrggaacacaargagatgttccattcataggcaracatgtgctttgacactagggaggtacatcatgttcttgcagagggtgggaagaactatggaggagaaaggcaatggctctgctccttttctccatgagygtaaagayagtccagagatggatgacctttcccaaccctgctccttttttctatgctgtagcctgggttattatgccctttgccttcaatataagttcgcactcaatttctgcagaaagataacgagcgttattgtgaacaagagcctgaggccagctgtgaattaaatcaaatgatcagaaaaatgactcaaaatgcccagtgcgatctaccaggattgcaaccccatgctgtgctgtgctgctccttgctgtcctgattgctgtgtgtgaggatagcccagtcctgccactcagatcc

SEQ ID NO: 46825 - DNA, 600 bp, Chicken  19866894288242_5
actgtgactatggctagtagctgaatagctcctgaaactatcctttctttaggcacaagatgtttgcaaagccagcaggaatggaaattatttggactggtgagggtttagtggggcggactttgccttatatttcacacatgcacactgagttggaggrggaacacaargagatgttccattcataggcaracatgtgctttgacactagggaggtacatcatgttcttgcagagggtgggaagaactatggaggagaaaggcaatggctctgctccttttctccatgagygtaaagayagtccagagatggatgacctttcccaaccctgctccttttttctatgctgtagcctgggttattatgccctttgccttcaatataagttcgcactcaatttctgcagaaagataacgagcgttattgtgaacaagagcctgaggccagctgtgaattaaatcaaatgatcagaaaaatgactcaaaatgcccagtgcgatctaccaggattgcaaccccatgctgtgctgtgctgctccttgctgtcctgattgctgtgtgtgaggatagcccagtcctgccactcagatccatgcaaat

SEQ ID NO: 46826 - DNA, 442 bp, Chicken  19866894288242_6
ttctatgctgtagcctgggttattatgccctttgccttcaatataagttcgcactcaatttctgcagaaagataacgagcgttattgtgaacaagagcctgaggccagctgtgaattaaatcaaatgatcagaaaaatgactcaaaatgcccagtgcgatctaccaggattgcaaccccatgctgtgctgtgctgctccttgctgtcctgattgctgtgtgtgaggatagcccagtcctgccactcagatccatgcaaatgttcctctgatggcgccatgacagtcactggagagatcayaggaaggctatggaaatgccactgctgtatctgttactggggtgagagcgtgtatagctctgggtcatcaacaagacacactgtgccattagccacacagtctttaaagagaaatttggaagcttcagtgtaaatagagtca

SEQ ID NO: 46827 - DNA, 599 bp, Chicken  19866894288245_1
  misc_feature (1)..(117): n is any nucleotide
nnnnnnnnnnnnnnnnnnnnnnnnnnnnnnnnnnnnnnnnnnnnnnnnnnnnnnnnnnnnnnnnnnnnnnnnnnnnnnnnnnnnnnnnnnnnnnnnnnnnnnnnnnnnnnnnnnnnnataactgtgaaataaaaagcacaatattgtttcatgccatttccttaaaaaactcaactgttgtaatcatgttttctttgcaatatgaccttaacttcctttctcagtcactagattaggaaaataaattttagagctgtgtttgtgtgcgtattgcttttccttttcgtggtagtataacamccctagcaataatagagtttgtgattacattttgtgattctttcatccattatagtagtacctatttctattaataacatatatatttggggtggcttttatattttgattgtgaaatattcttataacagcttttttgttgtttttgtgagaattggactcatgttagccccatagccacatttttcaaaatcatataatcattctttatcatcttgcctattgagtaagttagcataactttaaaatgttgttttgtgttgtattgtttgcttttgttattttgaattaattaatta

SEQ ID NO: 46828 - DNA, 600 bp, Chicken  19866894288248_1
agtcgataaatgggaatgtaaaagtggcttagcacttgtatgcccaaagaaaaggactgtaaactgttattgtatagttaatctttaagagttagttagattgctgatatgcttatctcccttgttagattatattatttattctttctcttacaattactgtttagtcattcatatcatgtaagtaactacactgcctgactgagcatcaaaaagcttaccattactttcccaagcttttcattgtatgctagtcctattcctccacctccaaaagcagggtcagctagagcatgtcayctaggaccatgtcatccaggaccacgtccagttcagttctgagaatctgcaattttaatttatctggctacattattcttaagcttatgtgaattgctttaacaaggcagaattcccccagttaatgggttggtcaaagcactgactttcacttgcagtacagttttctctacaatagcttacaaactgcatgccgcaacttctcttcaggaaggctgaggatttcttatgatatgagttgtctgcttactgaaaagcactgttcttcaccagctacagttaatggttacttcacgctga

SEQ ID NO: 46829 - DNA, 600 bp, Chicken  19866894288251_1
tattctttatgagcagtgttcctctgcttccccttcaattaaaaagaatcactacaacagaagcaccactggttgtgcagagcagagcagagcagcagagaaagtaacgtatcatcacgaataccagccctgatcccacagacacttctgtcaattaaagtcaatgaaacattcaagtccataatgttaagtctatgtgacaaacaaaaaccttggagcctactcggacgtcatgactgggcacagacatgaatttcaccctgccaatattcacttagctctgacaacacactactcacrgagttgctttaaaaataattattcacaaaatctctaatagtctctttactctttcaataagcttggaatatagcttccctcttacacaactttcttgtttcctagcaaaaaaaagtctaaattaaaggagaaagttctaaagaaacatgggcagctgtttctgtcacattaatgcctttcagaccaacagacagaattagacagatagatatygaatgaaagaaagatctaaataaagatcaaacccaagaaagaaaacgttccaagagcagttcttgaaggttttcgagggcatttgag

SEQ ID NO: 46830 - DNA, 600 bp, Chicken  19866894288251_2
tggagcctactcggacgtcatgactgggcacagacatgaatttcaccctgccaatattcacttagctctgacaacacactactcacrgagttgctttaaaaataattattcacaaaatctctaatagtctctttactctttcaataagcttggaatatagcttccctcttacacaactttcttgtttcctagcaaaaaaaagtctaaattaaaggagaaagttctaaagaaacatgggcagctgtttctgtcacattaatgcctttcagaccaacagacagaattagacagatagatatygaatgaaagaaagatctaaataaagatcaaacccaagaaagaaaacgttccaagagcagttcttgaaggttttcgagggcatttgagtagcatttcccctactcaaaaatgcatcaaaaaggagaagtggatctttacaatagtagcatgtccttacattttataggccaaggttactgctggctggcttaggaagaaaatgcttcaccactgaatagtcttcagtttttttataggtcactattaacacggtttggaaacagagtatcagatcccattaggcactggctgtgctactgg

SEQ ID NO: 46831 - DNA, 600 bp, Chicken  19866894288252_1
cctattgtattaacaagacaagatttgttttaagttcaatggagaaaagatagctttgaatttgagaagttaaagggtgttgcattacctaggcacaatgggataggttaatgatgaagcttcagttttaacttggaaactgctgggttttgtaggcttcagcctgtcactaataggtatattttaacgagatacatggggatttaggggaacaattcccattaatgttaatgggattcacacagctaaatccctgtgctggaagtgtttcttttaatgtgtctttaatacagcttgtgygtgtatgtgcacgcacacgtacacgtgtgcacacgtgtctggttaatggttagatatataaagaggaacattacaattccaagtgtcactgcttcattctatgatttataactaaaacagaggtaaaatatgagtacctggaagaattctttatttatttaacccatcattgtaaaaaaaaaaatctgttccaaaggtttgatgggagtggggatgttacatcagttgcacatatgtgggctcacagaagtgtgatctgcacatattatatccttttttgcacattaattaagacaggat

SEQ ID NO: 46832 - DNA, 600 bp, Chicken  19866894288252_2
aggtatattttaacgagatacatggggatttaggggaacaattcccattaatgttaatgggattcacacagctaaatccctgtgctggaagtgtttcttttaatgtgtctttaatacagcttgtgygtgtatgtgcacgcacacgtacacgtgtgcacacgtgtctggttaatggttagatatataaagaggaacattacaattccaagtgtcactgcttcattctatgatttataactaaaacagaggtaaaatatgagtacctggaagaattctttatttatttaacccatcattgtyaaaaaaaaaatctgttccaaaggtttgatgggagtggggatgttacatcagttgcacatatgtgggctcacagaagtgtgatctgcacatattatatccttttttgcacattaattaagacaggatgacttttgtacagtcactgttctgcttccaatgggatccctagaaaaggagggttgttgaaaatctagtcagcaatatctgggagtagcgyacattggactggtgagaaaatctgctaaatgggtacatgccctgctgatctggccctgaacagctgtgggttcctttggcagc

SEQ ID NO: 46833 - DNA, 600 bp, Chicken  19866894288252_3
cttcattctatgatttataactaaaacagaggtaaaatatgagtacctggaagaattctttatttatttaacccatcattgtaaaaaaaaaaatctgttccaaaggtttgatgggagtggggatgttacatcagttgcacatatgtgggctcacagaagtgtgatctgcacatattatatccttttttgcacattaattaagacaggatgacttttgtacagtcactgttctgcttccaatgggatccctagaaaaggagggttgttgaaaatctagtcagcaatatctgggagtagcgyacattggactggtgagaaaatctgctaaatgggtacatgccctgctgatctggccctgaacagctgtgggttcctttggcagcaatcaatattgaatttgaattcctactgggaagaaagttgtctatttcactgacctggtctgcatacacatggccactgtagcagmagtaaataaattgcaatgctytgtaaagagttttctggggaaaaaaaagaaaaaaagaaagaaacacaaagagtttgattttagaaacattaactacttttgtattattacccaccaggtggtacgcaatg

SEQ ID NO: 46834 - DNA, 600 bp, Chicken  19866894288252_4
acatattatatccttttttgcacattaattaagacaggatgacttttgtacagtcactgttctgcttccaatgggatccctagaaaaggagggttgttgaaaatctagtcagcaatatctgggagtagcgyacattggactggtgagaaaatctgctaaatgggtacatgccctgctgatctggccctgaacagctgtgggttcctttggcagcaatcaatattgaatttgaattcctactgggaagaaagttgtctatttcactgacctggtctgcatacacatggccactgtagcagmagtaaataaattgcaatgctytgtaaagagttttctggggaaaaaaaagaaaaaaagaaagaaacacaaagagtttgattttagaaacattaactacttttgtattattacccaccaggtggtacgcaatgcatgcaggaagcagctaacctggagagagacactacaagaacagcacagttatctaaggggccaagcagcaccttgaaacagagtgaacagactgcatcaaaaggagtgaccaccaggatgctgggttttcagaagtaaacccaaggacacagcaaaatgaagacctga

SEQ ID NO: 46835 - DNA, 600 bp, Chicken  19866894288252_5
acattaattaagacaggatgacttttgtacagtcactgttctgcttccaatgggatccctagaaaaggagggttgttgaaaatctagtcagcaatatctgggagtagcgyacattggactggtgagaaaatctgctaaatgggtacatgccctgctgatctggccctgaacagctgtgggttcctttggcagcaatcaatattgaatttgaattcctactgggaagaaagttgtctatttcactgacctggtctgcatacacatggccactgtagcagmagtaaataaattgcaatgctytgtaaagagttttctggggaaaaaaaagaaaaaaagaaagaaacacaaagagtttgattttagaaacattaactacttttgtattattacccaccaggtggtacgcaatgcatgcaggaagcagctaacctggagagagacactacaagaacagcacagttatctaaggggccaagcagcaccttgaaacagagtgaacagactgcatcaaaaggagtgaccaccaggatgctgggttttcagaagtaaacccaaggacacagcaaaatgaagacctgaataagtacagagcactgacca

SEQ ID NO: 46836 - DNA, 600 bp, Chicken  19866894288254_1
attgaacatcccccatctttttgcatcacccaccaagtggacccaggtccctgggcaaaaacagttccgtgaagaggtttgcccttcccagaagctggaaagacccaaaccgcttttcccaccatgatctttacgtatactacagggaccgtatctcccttgacagtatgtagggagctggcaggaccattgcaactgatagatcctcgagtgttgaccaaccaagtggcttctgccaaatgcttctcccagtgcttaaatgttcctctacccattgcttagaaaaaaaaaaaaaaaaarcaatttttttaacaacccactgtattgattgattttaccagaagttggtgcatgatagggagtatgatagatccactcaatgccatgatctttgacccaagtatttacaagagaatttttgaaatgagtcccattatctgactcaattctttctggagtgtcatgttgccacaggacttgtttcttgagacttaatatggtgttttgggtagtagcatggggtactgcatatgtttcaaaccacccagtggttgcctccaccatggtaagcatgtaacacttcccattgagagactgtgg

SEQ ID NO: 46837 - DNA, 600 bp, Chicken  19866894288255_1
aaaccttcgtgtgtcggggtggtcagcagtcagcagcgctgcagtctgaccgtggggaggtgctggctgccccttccctgcctggcagggagcagacagggcagcgtgcttcagaagttaagctacagagtgcttgcaggccgtgcactcgtgtcagatgtcaccgtgctgaactgctgttgtattttgcaggatcaagtggagcttgaagtgatcccgttaaaagcagtaagaattcatgtaccctccacaaggctgatcacaggcactgaggtactgtagcccacactgaaaacttcygatggccaaaagttaaggaggattcttaccctaagaaactgattaacaaatgcctgcagttctaaaccctgagctcagtgctgactggagtagagcagtcagtagaaagaactccttcagtcttctagttcattcattctagtgtgcaacagaaagtaacaccattagataagagagaagcaacagccctctccagctgctcgcatggaattcaagtcttgcaggctacagctctgcccttcgctggatttatgggctgggaaacagctctgtgtgagtgtgagggcagcagagatggat

SEQ ID NO: 46838 - DNA, 546 bp, Chicken  19866894288261_1
agtaagcacttaacagacaatgtaaagccattggcattttcactacagtgaaaacacatattgcagtgtaatacatagttctataatcattaccactttctttctttactgtgtacttacaagatcagtgacttggtcctcgaaagcagaacagaaggcactgacagcttttctgcaagccttcgattctatgctttgcctggagaagtcagagggataaaacacaactcatttgttatagcgaaggagaaatctcatccaggaatattcttgtgaatacaagtacaacccaacgtcaamcagctagtagcacaagcagctgcagatcattgacatgctagcatttctacactagaaaacatcaactgatgttttgttcttatatttggaaaaattccaaattcctgaggatcgccgccttaagatcacgtgtaaaaaaacgtgtcagagaaacctaacagtcattaaaacaatatcagaatgtaactaggcagtgctgcattacttaaggggggagtccactggcaaaaaagcacattatttatt

SEQ ID NO: 46839 - DNA, 600 bp, Chicken  19866894288270_1
gctcctgcctgctgctggcagtgggagcagacccggtagtagagtgagcctgacctggggctgcattctgctctgcctcctgctcaggccgtgcccggcctccagcttcatccacagcagcaccatttgcagtgctcaggctgctaatggagcttgtctcgcagtccagaaggagcaataaaccagcaaactttatacagggtccccaagctggtgctgggatgcaaaggatgtcggtgcgggtgcccatagcagcaaacacggctctgtgtgccagcaccccacatccagcagcgtcgrcattgctgcagccccgtgtgctgtgggtgtgtggctgctgcyggagagccgggtagtgtagggggaattgggatggcaggatatcgtggaggaaaaaaaaatgggcttcaaagaaccattggataaattcccggagggtgcagggctggcactgtgctgcgctccaaaggtgcccagatgtgagttgctgggtgcccacagctcagagccagtggggtttgttccatccatgctcccatcgatgggctcaggtccttgcagggagctgccacctccacaccagcattcccttgtgctttc

SEQ ID NO: 46840 - DNA, 600 bp, Chicken  19866894288270_2
agtgagcctgacctggggctgcattctgctctgcctcctgctcaggccgtgcccggcctccagcttcatccacagcagcaccatttgcagtgctcaggctgctaatggagcttgtctcgcagtccagaaggagcaataaaccagcaaactttatacagggtccccaagctggtgctgggatgcaaaggatgtcggtgcgggtgcccatagcagcaaacacggctctgtgtgccagcaccccacatccagcagcgtcgrcattgctgcagccccgtgtgctgtgggtgtgtggctgctgcyggagagccgggtagtgtagggggaattgggatggcaggatatcgtggaggaaaaaaaaatgggcttcaaagaaccattggataaattcccggagggtgcagggctggcactgtgctgcgctccaaaggtgcccagatgtgagttgctgggtgcccacagctcagagccagtggggtttgttccatccatgctcccatcgatgggctcaggtccttgcagggagctgccacctccacaccagcattcccttgtgctttccccagtgcgaaatggggctgggggagctgggctggggggtgc

SEQ ID NO: 46841 - DNA, 600 bp, Chicken  19866894288272_1
acaatttgaatggttcccataatggtttcttacagctttctcataaaggcttgtgtaagctgacaagaaaaacgactgagcatgaaaaagtacagggacacagctccatagctcttccatgacttgaactatgatcttcacaaagaaatgctaattaccaagggataattagccgagtgattgttgagagatactggaaacaggagttagttctttctgatactcttattcctgttctcacgtatggctgccatttttgttttattttctgccatttatttccttacagtggggaaaagracctgcattggctcttaattcttaaatcccttgtaaaatatagctgttccatatctgacttctccccttttttgttgtttaatgcttcttacactttctaattgcaggccagagagcgggcaggaggtgtaggaaacttctgatggcagcagatgtctgtaaatagtaaaggctggaggttaaaaagtaataattgagacacaatgaaggaaacttgctgacatctggtaaacctcagcagaaggtatccctgtcctcaagataataaggcttgactaygggttcttttttctctgaaaa

SEQ ID NO: 46842 - DNA, 600 bp, Chicken  19866894288272_2
ttccttacagtggggaaaagracctgcattggctcttaattcttaaatcccttgtaaaatatagctgttccatatctgacttctccccttttttgttgtttaatgcttcttacactttctaattgcaggccagagagcgggcaggaggtgtaggaaacttctgatggcagcagatgtctgtaaatagtaaaggctggaggttaaaaagtaataattgagacacaatgaaggaaacttgctgacatctggtaaacctcagcagaaggtatccctgtcctcaagataataaggcttgactaygggttcttttttctctgaaaaattgaattaatttttgttcccagtatttgaataagctttgcaaatctgcatttgcagccatggctgtacttttttcaaaaaggctgagtagagttatagtccttgggattgccaagtatgctgtacttggtctcatctaccccatcagtttaaggttgctcaataaatgagtctttgaggcattcctaatggggattgtgtttatgactattaacaaagcttttagtaatgttttgcaccagtgttttctaatgtattgcatattttgaaccgaattaa

SEQ ID NO: 46843 - DNA, 600 bp, Chicken  19866894288273_1
gacttgcttttctgactcagctggttttgcaggtcagcgttgctttagcatagctcaggtatatccttgaaaaaagaagataaccattaaatctgacatgggcaatacatctagacttcactgcatttacctgaaatcaactcaaatgaaaaattcgtagggaactgatttgtccaattccatggctcagagaagcaataatagggtttcttttttgttttgttttgttttgtttttcaaatgcatggtatcagaattgctctcacttgccatattttgggaacttcctgaacgaggaargacaytgartatttgctgacagttttgaggaggtagaactccagaccattaccttcacagtttccatagaaataagtaagaggcattgcttttggagcaacgtacttatttttaattagcattaagttgtgtcctcagaattccttctttctttttaacatttctcttaaataagagattcttaggaaactgtattttttttgtgtatgtttttacagaacttcaagggaacatgtaaagtggctagcaaaggatggggatcaaagtaaagtaacagatacatgtcatgatgaagagctg

SEQ ID NO: 46844 - DNA, 600 bp, Chicken  19866894288273_2
gcttttctgactcagctggttttgcaggtcagcgttgctttagcatagctcaggtatatccttgaaaaaagaagataaccattaaatctgacatgggcaatacatctagacttcactgcatttacctgaaatcaactcaaatgaaaaattcgtagggaactgatttgtccaattccatggctcagagaagcaataatagggtttcttttttgttttgttttgttttgtttttcaaatgcatggtatcagaattgctctcacttgccatattttgggaacttcctgaacgaggaargacaytgartatttgctgacagttttgaggaggtagaactccagaccattaccttcacagtttccatagaaataagtaagaggcattgcttttggagcaacgtacttatttttaattagcattaagttgtgtcctcagaattccttctttctttttaacatttctcttaaataagagattcttaggaaactgtattttttttgtgtatgtttttacagaacttcaagggaacatgtaaagtggctagcaaaggatggggatcaaagtaaagtaacagatacatgtcatgatgaagagctgctgat

SEQ ID NO: 46845 - DNA, 600 bp, Chicken  19866894288273_3
ttctgactcagctggttttgcaggtcagcgttgctttagcatagctcaggtatatccttgaaaaaagaagataaccattaaatctgacatgggcaatacatctagacttcactgcatttacctgaaatcaactcaaatgaaaaattcgtagggaactgatttgtccaattccatggctcagagaagcaataatagggtttcttttttgttttgttttgttttgtttttcaaatgcatggtatcagaattgctctcacttgccatattttgggaacttcctgaacgaggaargacaytgartatttgctgacagttttgaggaggtagaactccagaccattaccttcacagtttccatagaaataagtaagaggcattgcttttggagcaacgtacttatttttaattagcattaagttgtgtcctcagaattccttctttctttttaacatttctcttaaataagagattcttaggaaactgtattttttttgtgtatgtttttacagaacttcaagggaacatgtaaagtggctagcaaaggatggggatcaaagtaaagtaacagatacatgtcatgatgaagagctgctgatgttt

SEQ ID NO: 46846 - DNA, 589 bp, Chicken  19866894288278_1
tagatgagattatacagaaaccagtgtttgaggtaaatagtacactccacatgcatgtgttgtcatgacgattgttggcttccacagcttagacaatgttcactcaagtgacgtgctccagaccaacctggagctcaggtgaacattaaggatggatacagtcttgggaaggagatgcctgaggcaactgctgtaccgccttctggtctcctgcaccttgcttgttgttgagtctgtgctgcaaaacttcagtaacaatgcagtgtaaatcccagctactaaagcaatatagtgtcctcyggtaaagctgcaatgaggctgcagcttcccgctgagagacaggagattaaagcaccaaaaattgaatctgttctatactgggctgctcctcaactgactgtggtcttggatcctttgtgatgcctgagaaccagtttttctggcatgtgagatcttgcaaatgccttgaatccaggcctgcttccactacttactttaccttgcaccattctgactgaggcataagaggcccaaaactgaaggaagatgacaactttatccccgcttcaatctgacaccagacacaaca

SEQ ID NO: 46847 - DNA, 600 bp, Chicken  19866894288280_1
tccactggcattactggtcaactagaagtcccagaggactggaggcttgccaatgtgactgccatctacaagaagggtcataaagaggatctagagaactatgggcctatcaatctgacctcagtgcaaggcaagtttgtggaagaaatccccttgagtgagatcccacagcatgtgcaggacaacccagggatcaggcccagtcagacaggtcctgcttgaccaacttcatctccttctgtgacaaggtaaccgacctggtggatgagggaaaggctgttgacataatctagctagacytcagcaaagccttcaacactgtctaccacagtattctcctggggaagctggcagaccatgtcttgaacaggtacactttttgtggggtaaaaaatggctggagggccaggcccagagagtggtcatgaatggagttaaatccrtctggcaatcagttacaagtggtggatgccaggggttggtattggggcacatcctgtttagtatccttattgacaatctgaaagaggggattgagtgcactctcagaaagtttacagatgacaccaagctgggagaaaatgttaatctgcctgaggg

SEQ ID NO: 46848 - DNA, 600 bp, Chicken  19866894288280_2
agaaatccccttgagtgagatcccacagcatgtgcaggacaacccagggatcaggcccagtcagacaggtcctgcttgaccaacttcatctccttctgtgacaaggtaaccgacctggtggatgagggaaaggctgttgacataatctagctagacytcagcaaagccttcaacactgtctaccacagtattctcctggggaagctggcagaccatgtcttgaacaggtacactttttgtggggtaaaaaatggctggagggccaggcccagagagtggtcatgaatggagttaaatccrtctggcaatcagttacaagtggtggatgccaggggttggtattggggcacatcctgtttagtatccttattgacaatctgaaagaggggattgagtgcactctcagaaagtttacagatgacaccaagctgggagaaaatgttaatctgcctgagggtaggaacgtctttcagatggatctggacagactggatctgtgggctgaggccaatgggatcaagttcaacaaccccaagtgccaggtcctgcactttggccacaacaaccccaagcaatgctacaggcttgcagcagagtggc

SEQ ID NO: 46849 - DNA, 600 bp, Chicken  19866894288287_1
tgggccaaggggtccctggtggggcgagagcacagctgggattaggatgagccccatgcagataggagaatggcacccatggagctgcacacccacctgcgtgcatgtgggcggacgtgggctgctccaggtccagggtcaggtgatggggagcaggcagtggggagctgcagggagtgctcagcagcagcatgcaggagccagcgcagtccttgcagtgtgctgcgggccgggcccacggctgcacatggctcctggaggtggcagggctcagtcagccccctcacaacccctggatgygcacacaggggaagtgggcttggggcagccctgcactcacaatgcggcagggcgagcggttctcattgaccagccgctgcagcgccaggcgctcgatcagttcacaaggcagcagggcagctgctacgtcctgcttgttggccaggctggagcacagggaaaggtggtcagtcctggagccatctcactacatgctccccatcgctgctggggttcccactcccccccacaaccccaaacactacagccttacagcaagaggggctttccagagacatcggggtgactcaggatgcgact

SEQ ID NO: 46850 - DNA, 599 bp, Chicken  19866894288308_1
  misc_feature (1)..(149): n is any nucleotide
nnnnnnnnnnnnnnnnnnnnnnnnnnnnnnnnnnnnnnnnnnnnnnnnnnnnnnnnnnnnnnnnnnnnnnnnnnnnnnnnnnnnnnnnnnnnnnnnnnnnnnnnnnnnnnnnnnnnnnnnnnnnnnnnnnnnnnnnnnnnnnnnnnnnntctctctaatgcttatgtagtttacgttttgcctttgaaataacaattgtcttcatctggcagcattatgactcccatcattttgatatttcctgtgcttttgtgcctctgaactgctcacacccttgaatttttcatgtgggtctgaggkcttttcgcgggatttcccacacctcaagtaaggaggctcatcatcagcgtataaacctagaatggcctgggttgaaaaggaccacartgatcatctgctttcaacccccctgctgtgtgcagggtcaccaaccascagaccaggctgcccagagccacatccagcctggccttgaatgcctccagggatggggcatccacaacctccttgggcaacctgttccagtgcatcaccaccctctgggtgaaaaaattcctcctaatatccaacctaaacctcccctgtctcagtttaaaacc

SEQ ID NO: 46851 - DNA, 599 bp, Chicken  19866894288308_2
  misc_feature (1)..(62): n is any nucleotide
nnnnnnnnnnnnnnnnnnnnnnnnnnnnnnnnnnnnnnnnnnnnnnnnnnnnnnnnnnnnnntctctctaatgcttatgtagtttacgttttgcctttgaaataacaattgtcttcatctggcagcattatgactcccatcattttgatatttcctgtgcttttgtgcctctgaactgctcacacccttgaatttttcatgtgggtctgaggkcttttcgcgggatttcccacacctcaagtaaggaggctcatcatcagcgtataaacctagaatggcctgggttgaaaaggaccacartgatcatctgctttcaacccccctgctgtgtgcagggtcaccaaccascagaccaggctgcccagagccacatccagcctggccttgaatgcctccagggatggggcatccacaacctccttgggcaacctgttccagtgcatcaccaccctctgggtgaaaaaattcctcctaatatccaacctaaacctcccctgtctcagtttaaaaccattcccccttgtcctattgatgcctaagagcagagggcatggttattcagtaaggctcaaagacatttgggtttgctgttaaagcct

SEQ ID NO: 46852 - DNA, 599 bp, Chicken  19866894288308_3
  misc_feature (1)..(14): n is any nucleotide
nnnnnnnnnnnnnntctctctaatgcttatgtagtttacgttttgcctttgaaataacaattgtcttcatctggcagcattatgactcccatcattttgatatttcctgtgcttttgtgcctctgaactgctcacacccttgaatttttcatgtgggtctgaggkcttttcgcgggatttcccacacctcaagtaaggaggctcatcatcagcgtataaacctagaatggcctgggttgaaaaggaccacartgatcatctgctttcaacccccctgctgtgtgcagggtcaccaaccascagaccaggctgcccagagccacatccagcctggccttgaatgcctccagggatggggcatccacaacctccttgggcaacctgttccagtgcatcaccaccctctgggtgaaaaaattcctcctaatatccaacctaaacctcccctgtctcagtttaaaaccattcccccttgtcctattgatgcctaagagcagagggcatggttattcagtaaggctcaaagacatttgggtttgctgttaaagccttccctagaaaaaagccagccctacagctagagggagcagctttaagga

SEQ ID NO: 46853 - DNA, 599 bp, Chicken  19866894288312_1
  misc_feature (1)..(207): n is any nucleotide
nnnnnnnnnnnnnnnnnnnnnnnnnnnnnnnnnnnnnnnnnnnnnnnnnnnnnnnnnnnnnnnnnnnnnnnnnnnnnnnnnnnnnnnnnnnnnnnnnnnnnnnnnnnnnnnnnnnnnnnnnnnnnnnnnnnnnnnnnnnnnnnnnnnnnnnnnnnnnnnnnnnnnnnnnnnnnnnnnnnnnnnnnnnnnnnnnnnnnnnnnnnnnnnggaaaaaaaaaaaaaaaatcacaaaagatatctgatgccaggtaaatgtagtcattgagacaataagggaataaaggaatactgccagttccrgtaagtatagagacagaagcttatcactcacaatgagcaaaatcatgataaaagtaataatcagcatgttagttttcaagggtacagctaaatctgcgctggtctaaaaatatactgacaacggagtaaaggtaagaataaaaatatacagtgtttctattgacattttgaagctggttgattcaggggatactatggaaaacagaaaagttataagtagttccagacaaatttattgaaaatataaaacagatgtacaaagtacctgggatacttcagtaattactgtaaaataagaa

SEQ ID NO: 46854 - DNA, 600 bp, Chicken  19866894288313_1
gtgagcagaagtgtggggctggagcagccggggctggaggcactgccatgtgctgaggtgggcagatattctccggggaaccggagatgcacttaggagctgcatctcctgaaaaggatgctcctgctgagcacctcttcaccgttctgggtaccacgggcagaatctgagccctgaatatgtcatcattcgcttgttgctgaggggagagttttaaatgtcagttgttattgctctttttttataagggtatagaatacccttctgccccgccctcctgctcttgtccatgggcattargagatgccaacatgggctcctgcccctgctcttgccagccatggtctcaggggtcatgaaaaggctttgctctctccaaccacctcctgttgtagctaagtgcagggaaatcagtctgactgcatgcatttataaaggcaggaggcagagcgttccactctcagcatctgttgttttcagtaaaggccactgcatctgatcctaagtgtcaagagcagaacctcaaatggtaacctcacgtaggtcactggaccagaactgcagctgtgtttgataggtgtccctgctgtcctttcccac

SEQ ID NO: 46855 - DNA, 600 bp, Chicken  19866894288313_2
agctaagtgcagggaaatcagtctgactgcatgcatttataaaggcaggaggcagagcgttccactctcagcatctgttgttttcagtaaaggccactgcatctgatcctaagtgtcaagagcagaacctcaaatggtaacctcacgtaggtcactggaccagaactgcagctgtgtttgataggtgtccctgctgtcctttcccacctcttggtgctgctgatgagattgcagccaaaggtgaaaattcagctgctttaagcaccttaagcacacacagccaggcaataaagcattcayagttttaacatactgataaagcactgtaatgttatagatgacataacaataaagtaaggtttggaagcagrttttcatctgtttaaagaagatgggtgatttggggagctctgggagctccttccttcctggacgcaaataagcacaagagagaatggctttaaattgaaagaggagagatgtatgttaggtgttaggaagcaatttttcactgaggatcatgagacacctggaagaggatgcccagaggggttgtggattccctatctatggatatgctcaaggccaggctggatggga

SEQ ID NO: 46856 - DNA, 600 bp, Chicken  19866894288313_3
catctgttgttttcagtaaaggccactgcatctgatcctaagtgtcaagagcagaacctcaaatggtaacctcacgtaggtcactggaccagaactgcagctgtgtttgataggtgtccctgctgtcctttcccacctcttggtgctgctgatgagattgcagccaaaggtgaaaattcagctgctttaagcaccttaagcacacacagccaggcaataaagcattcayagttttaacatactgataaagcactgtaatgttatagatgacataacaataaagtaaggtttggaagcagrttttcatctgtttaaagaagatgggtgatttggggagctctgggagctccttccttcctggacgcaaataagcacaagagagaatggctttaaattgaaagaggagagatgtatgttaggtgttaggaagcaatttttcactgaggatcatgagacacctggaagaggatgcccagaggggttgtggattccctatctatggatatgctcaaggccaggctggatgggatcctgagcagcctgattagtggttggcaaccctgcccacggccgggacactgggactaggtgatcttgaag

SEQ ID NO: 46857 - DNA, 555 bp, Chicken  19866894288315_1
gcaattatttctaattgtttctatttctgcctgcttagaaaaccaggaaacaggatttagttatgaacaattgctttaataaagtcaaatgaagtttcaccttgttggaagatgggaagagagaaggactgggaaatcagagaagtgctgttctgaaatacttgaccttgatgagtttctaaagctgtaagacatctcaatttcaaacaccactgattcttcatccattcatcctacttggaacttgtgcattcacaggcaaggccgtacatacattcagagaatcacaggatcatagamtggtttgagtcggaaggaacctttgaaggtcgtcaggtctcactccctgcaatgaatggagcagctcccagctccaccaggtgctcacagccctgttctctgactgggggggtgtctccagggatgggacatctaccacctctttaggcaacgtgtgccagtgcttcattgcccttattggaagctttttttccttatatctagcctcctggagttgcacactgagaattagcattcctttgggtacgtgctggg

SEQ ID NO: 46858 - DNA, 436 bp, Chicken  19866894288318_1
atgcaggtagttacacttcagttgcctaaagacaagacagattagtttgtgctaatttatagatgattttaatagtaactcaatttagaaaagaacaaagaattgaacaaacaaattaaaaagccttgaaaaactacctccaaagctgaaaattctgttaaaatacaaatattctcagaaaatatcctgacaacttagagtatttggtggagatgaacacctaactatttgaactatcacatctggggctggaagtgtaaaaattcttctggtcaatcagagagattacacttaacttgscgagatacaattcttttaaatttgatagagtgatagagctttgtcgtggggaatacaaaaggaaagcagttacatttttatgtttacagctaaataaaatataatgcagggtctgtattggataagtacttaatag

SEQ ID NO: 46859 - DNA, 600 bp, Chicken  19866894288320_1
aacacactggagctttcagagcgtgactggtccatgcaggggacggactgcttgtccaaatgggatgatgtatttgggggtcaaataggaaatcagcatgcaagtgctattccccagggaattaaacagaaagatgtcattacaaataatgcatggctctctagagaaaaaacagatggctcaacctcagctaccacagcaaaaagctctttgtcagacatgttgtcagcaagtaataaaggtcgaaatcctgtgggaagaaatcagctgcatgggaaagaataaaaacctcagaaataraacaaggtaaagcatattagcaatgtgatactcccattgtcatactactttgtatgtataaaaagtactgcttattttttaaaccaaaaatattttactagatgtttgaggtgtctggaaaatttacgtgagaaagagctttaataatttttacgatcaggatttcttagaacactttagacaactgaaaccagcagagttttcaaccgccaggctgcttctcaatttttgctttaccacttgtctatgatttgcttttcctttaactgtgaaacaatgtattaaatcacttttgctttt

SEQ ID NO: 46860 - DNA, 600 bp, Chicken  19866894288323_1
tgtcaaagtgtgtttcatttcatgtggaaaattttaaaacattaattactgaagagccctatggtttccttttgcttctatagtatgagtgtaaaccttcagaactttgtaacttacaacagatgttaaaaatagagtattcacaaaatcacagaatacctgagatgggaagggatctctggaacttatttactttgaccccactgctcaaagatgggtcagctggagattgtatccagatgattttgagtatacccaaggaaggaggctacacgaccacgaccttggcaaccctcaccrcaccagtttcttagtcttaagaaaaatacaggaaataacaacaatttcctatatttctatttgtgcctcttgtcctttcactagacacgactgaaagagtctggatccatcgtctttactgcctcccattgtgtacttatacacagataagatcaacctgaaccttctcctcttcaagctgaacagttgcaactctcttagtctttccttatatgttggatatgttgtatccttatatgttagctcttaatcatttcatggccctttggtggtcttgctccaggacatccaagtctcact

SEQ ID NO: 46861 - DNA, 600 bp, Chicken  19866894288324_1
gtgctgtggtcccctcaggtcccacgtgctcattgatgactttgatgggaaatccttggggaggtggctcaagtggtattccagttcccactgggctgattcgcagagaggtggtcccatgcatgaaagcgttttgcagctgtctaaattaataacagctttctcttttcttgacagcactggccactgttaactttcagaagttggaacctggtgtactgaaatacctggacacggtacaggtaaggtgcagagagactctgtttgtctaagtttcacaggacagcttcatctcaacawcaaattcatgctggaagacagtattctttgggaggacagttggagtttttgctactctttgggtgcaggcagcaagcctgttattacttgggctttaatgatgcttagatccacaaaagggtcctacgtaacaaattagaaggtattggagggctattagtccagctactagagtatggcacaattgcacccactgctgtaaaacaacagggcgctgacatctggtgatggatgtgctttgtcacaaagccacgagctgcaataaactgaattattcctctttccttggttgaatttgta

SEQ ID NO: 46862 - DNA, 600 bp, Chicken  19866894288328_1
accgttaaaacattcagtgtgatacgctaatacacagcctccaaatgcatgcatatatgcataacccactttgctagaaggatcaagcatcttctgacttatctgagtatcaacctgtttgatgaggggtaaataagcatcttttgaactatgttgtaacaaggtactaactcaagattcaaaattaagctttttccaactaaattatttatcctatgataaggctaaataaatccagaaaatggctataactatttctattactatggatttacaattcctttatttactgtgaccttycaattgaaaatatcccctaattagcacatgttcaagtggaaatttttaaagcactgaaaatgccttcgttcaagttaagaaaaatgttatgaaatgcttgcattcaaaagtgtaaggcttgcaaaatatttgaacatgttaaacayaagtatctatatgctaacaaaattcagaaaaaataatagaaagctttacattttttgaaaatattatttcagctccacgacatacaatccttatctggaattgtagatgtatgatcttcacctttcctattttttcttactttattttcaatct

SEQ ID NO: 46863 - DNA, 600 bp, Chicken  19866894288328_2
aactatgttgtaacaaggtactaactcaagattcaaaattaagctttttccaactaaattatttatcctatgataaggctaaataaatccagaaaatggctataactatttctattactatggatttacaattcctttatttactgtgaccttycaattgaaaatatcccctaattagcacatgttcaagtggaaatttttaaagcactgaaaatgccttcgttcaagttaagaaaaatgttatgaaatgcttgcattcaaaagtgtaaggcttgcaaaatatttgaacatgttaaacayaagtatctatatgctaacaaaattcagaaaaaataatagaaagctttacattttttgaaaatattatttcagctccacgacatacaatccttatctggaattgtagatgtatgatcttcacctttcctattttttcttactttattttcaatctccaaacatcatctaaacactaaattcatgctttgacatcagtaagtttaagagttaagttctttatatgcaattggtcagaattttatacttttgttatggtggaagaagtgaaatacagctgcaaagtctgagagacagacacta

SEQ ID NO: 46864 - DNA, 600 bp, Chicken  19866894288329_1
ggcaccaaatatagggggtgtttgatttgatatggggccactaagaaagcactggtgtcattgcattgtgtttggagtttgatttcagagtttccttctctacagacttagtaatgagatttttggggtgccatttgaaaatgggttggtaattaggtgcttgcaaagccagcagaagtgacaggaagctttgatctccaaaggtgtaatgtgctgttttttgcaatcacgccgcagtggcaaaattggacccagtctttaaactccctaccccttaatttaaacaaatacaataaaatkcagctgtctgtttgcctttagcatgctcgggttgctttgcagtcttggaaaatatacagatcgtttattagccccataaatcagactctatttggagtacaagaaccctccccatgtgaacttcttattgttacaacctgctgctgttggctcactctgctattgctaggaagcacggcagggccaggatgctcattttgtgacggagctgcctaagctgggaggattgcacaagataaggactgctgtccaccccaagccttggatggctccttgggaggctggctctgagctgggaag

SEQ ID NO: 46865 - DNA, 600 bp, Chicken  19866894288344_1
gatttgttgcatatctgttaattctctcgtagttataaatgcaacagattttctgcctaaattctaaaatgttctacagcttccaggagtcctagtaagcttaattgttgcactaagttcttactccaacctatattaaccctacagaactgtagtagcaatcgcttgcccagctattgatacaaggagtcttttaataagttcttaggctgagagatttgatttccagagtcttcaatattcatttcctacattcctggcagaaggtgagcagtgaacacagacacacatgttgggctwgaaaaatctggtggctttccactcggattcctcgcaagaaagagatcctggacatggtctgtccctcaaagggcagcaaaagccatctgtaggagactgctaatgggaaaaaaaaacctmrtggtgtcactgtcagagggagctcaaatcaaagacttattactggtaccactgggctattcattatgatgacattccttcaaacaaaacaaaaaagccatgctgatttcttggcagactactcataaaaattgcaagagagaaagaaactttttcctttttggccgtatcttcaattaa

SEQ ID NO: 46866 - DNA, 600 bp, Chicken  19866894288344_2
ttactccaacctatattaaccctacagaactgtagtagcaatcgcttgcccagctattgatacaaggagtcttttaataagttcttaggctgagagatttgatttccagagtcttcaatattcatttcctacattcctggcagaaggtgagcagtgaacacagacacacatgttgggctwgaaaaatctggtggctttccactcggattcctcgcaagaaagagatcctggacatggtctgtccctcaaagggcagcaaaagccatctgtaggagactgctaatgggaaaaaaaaacctmrtggtgtcactgtcagagggagctcaaatcaaagacttattactggtaccactgggctattcattatgatgacattccttcaaacaaaacaaaaaagccatgctgatttcttggcagactactcataaaaattgcaagagagaaagaaactttttcctttttggccgtatcttcaattaaatagcaaaatgatgtatatttatgacacacactggctatgatcatactgaagaacaataaaaaaaaaagatgtttatatggctgcacagtgcaaggtaacagattttaataaataattat

SEQ ID NO: 46867 - DNA, 600 bp, Chicken  19866894288344_3
tactccaacctatattaaccctacagaactgtagtagcaatcgcttgcccagctattgatacaaggagtcttttaataagttcttaggctgagagatttgatttccagagtcttcaatattcatttcctacattcctggcagaaggtgagcagtgaacacagacacacatgttgggctwgaaaaatctggtggctttccactcggattcctcgcaagaaagagatcctggacatggtctgtccctcaaagggcagcaaaagccatctgtaggagactgctaatgggaaaaaaaaacctmrtggtgtcactgtcagagggagctcaaatcaaagacttattactggtaccactgggctattcattatgatgacattccttcaaacaaaacaaaaaagccatgctgatttcttggcagactactcataaaaattgcaagagagaaagaaactttttcctttttggccgtatcttcaattaaatagcaaaatgatgtatatttatgacacacactggctatgatcatactgaagaacaataaaaaaaaaagatgtttatatggctgcacagtgcaaggtaacagattttaataaataattatt

SEQ ID NO: 46868 - DNA, 599 bp, Chicken  19866894288346_1
  misc_feature (1)..(230): n is any nucleotide
nnnnnnnnnnnnnnnnnnnnnnnnnnnnnnnnnnnnnnnnnnnnnnnnnnnnnnnnnnnnnnnnnnnnnnnnnnnnnnnnnnnnnnnnnnnnnnnnnnnnnnnnnnnnnnnnnnnnnnnnnnnnnnnnnnnnnnnnnnnnnnnnnnnnnnnnnnnnnnnnnnnnnnnnnnnnnnnnnnnnnnnnnnnnnnnnnnnnnnnnnnnnnnnnnnnnnnnnnnnnnnnnnnnnnntatgggctctcaaagcatcccaaagaagcccagctgcagactgcagccctggttcaatccagaagatgasaggtacttacagggacttcatatgctccagttgatttcctgccttggaagccagtgtcatctcaggtccgcttttctattaatggagagtaacaaatatttctagaagattctgtcaggcttgaccaatatataaaccctgggaagtatctcctgactggaagaaatgaaactcccaggtttctcacttaaagagaagcagaatgtattacatcttttgttctatctccattacacagtgaaccacctcttagggacacagttcagtttcagctgctacttttatgtcagtacaaattg

SEQ ID NO: 46869 - DNA, 600 bp, Chicken  19866894288346_2
aagagaagcagaatgtattacatcttttgttctatctccattacacagtgaaccacctcttagggacacagttcagtttcagctgctacttttatgtcagtacaaattgcttgtgagggcatggctcatggcacaactccaacgttaaggacgaaaaaataataggcacctaacattcattcatgctgaaaagttgaatgagaagtctcttgcacacagaatagttgaagacacgtaccatgtacttaaaactgtatctccttgagtaccaacaatctgattaaagtacaggaaagacakagtagggataaagaatagaaatggtatgcaagattttaaggatccacctwtgaaatcacagaaaatggaaagggaagaaatgttatttctgtttccttgtcttttccacacagagctgtcaaaacaagctactgatcccagtagtttcctctacatctccagcaactgcaggaaccaactttcttaagggtttttttattcacttttcaagccatatcactgggaactttcattctacagcaaatctccattttacagcaaaggttatatttctgccaggacagttcagttctggtacag

SEQ ID NO: 46870 - DNA, 600 bp, Chicken  19866894288346_3
aaccacctcttagggacacagttcagtttcagctgctacttttatgtcagtacaaattgcttgtgagggcatggctcatggcacaactccaacgttaaggacgaaaaaataataggcacctaacattcattcatgctgaaaagttgaatgagaagtctcttgcacacagaatagttgaagacacgtaccatgtacttaaaactgtatctccttgagtaccaacaatctgattaaagtacaggaaagacakagtagggataaagaatagaaatggtatgcaagattttaaggatccacctwtgaaatcacagaaaatggaaagggaagaaatgttatttctgtttccttgtcttttccacacagagctgtcaaaacaagctactgatcccagtagtttcctctacatctccagcaactgcaggaaccaactttcttaagggtttttttattcacttttcaagccatatcactgggaactttcattctacagcaaatctccattttacagcaaaggttatatttctgccaggacagttcagttctggtacagtctaagtttgacagtctcggacagttttcaaactacagtgcaagattagt

SEQ ID NO: 46871 - DNA, 600 bp, Chicken  19866894288350_1
tctgaggttactttccgtcttgctggagttcattctttttggtaacattaaatgtttcattgctatatgaaattctggcatttgcaaactctcctgtcattctgtcattgctgcctctgtgccttccctttaggtgatgggtagatctataatctatcacattttgcaaacacactgccagcttactgtcacttgctagtctacttttgaaacctctcatttgactctggctgacaaggattgggcaactagtcaaagtcactccactttggggtccaggagggctacatgtaggagatrtgaaaggaaaagccaaattgcattgtcttccttactccctctggcattaaccaagttaggaatgccaggaataaggaaaagctagagttaattgaaataaacaatttctgatattactattaatcaccgataattatcctcagaattataagtacaaagagtaaacatacagaggatttttgtgttttttttcccttaatcagttaagctgtacccattactgcaaagaaacaacaacaaaaatcaattaaaatgcattgagtcttctgaaaattctgaaacacagatagtgttatgaca

SEQ ID NO: 46872 - DNA, 479 bp, Chicken  19866894288353_1
gactgatgaaagtaagtctgaggatctggcacatcaagctatatatagcaggtgctacaaatattctgaatagcagtatatgtatatataaaaagatctgttttaactatctccctcaactcctccatctttacagaatctcctttttctgtctgatttgtcaacaaaaactaaacacacttgtctctcaagtctgatactgtcaagaatgtacagatggaaaggattacagacttcagcaaaccagaaactcaaaattcttactgtccctgggggtttccaatcagttcttcctagaaraactgaaagatgatttacacgcacccaacatttcataagggtatggtaacctaacactaacctaatttttattaaatatacaggttttgcttttgtggcatgactgatttctaagctatccacagtcctaaaatacgtaatggtgaactagaaacattttgtgtggtgtgacttctctt

SEQ ID NO: 46873 - DNA, 600 bp, Chicken  19866894288357_1
tgcatgctgaatatttgaagcatgaactacccttaaagcagtgggatttggctcattctttgtgagttcaagtgagaaatatttttttccttactctgaaggaagaaagaggtggtaaagtaggaaggttttccttttagtcgcctctgttgggctgtagctgtttttctgtggccgttctatcaggatgacttctgcaaataacttgtctgattttgtttttgttccacattcttgtgttacttcagcaatgatggattggaattgcagcaatacttagagacgagggttagctgcagygagacaagatgacttcgctgcttttaaaaaggggcacggattcttttggctgggaaaggaaaagcggagttctagtctgcaaccaagcaggaatttactcttgaaataagcaatgaagttccaagattagaatagattgctgcagttgatctcatcccttgcatgagtaattctgggtggttatttagtagactgcacagattataaactcagagctgagcttcgtttctcaaaaggctggagtgataaagaagctgcaatggctgctttactggattgtccccactctggggagatgga

SEQ ID NO: 46874 - DNA, 600 bp, Chicken  19866894288358_1
cagtaataggatgatggatgaacaaaatgcagactgttctacttacataggacccactttttgctctaacccaattggaagcatttgtttgcactcttggatacaggtgagcattccttctctgtttgttcctttgctatctcactacagtactctttccaaatgtactttgttgactgtacacagtggcagagtagctagccctaggaagcaatggtcactgcacctcattgctcccagagtaccaacctctgctgctggatggttgctgtttctagacaacaaggagtactcagaggrcactacagcacaggatgaggcaaatatacagaagaagggtatgtccactaaaaaaraatgtacaaaagaacttcacttgggtaggagtctaagagatctctgcactgtgtatttgtgatttgtgagtgttttaaggaactgtcccctgccttaccctaatctcctccccatgtaaaaacactgcaagaaaagttgcctgtgaatttctgtactacaaagcacactgtaaggcagcatttttctcctcacaacagtcccttgctgtttttcacttcccactctctcagtttccaccagaat

SEQ ID NO: 46875 - DNA, 600 bp, Chicken  19866894288358_2
ctttttgctctaacccaattggaagcatttgtttgcactcttggatacaggtgagcattccttctctgtttgttcctttgctatctcactacagtactctttccaaatgtactttgttgactgtacacagtggcagagtagctagccctaggaagcaatggtcactgcacctcattgctcccagagtaccaacctctgctgctggatggttgctgtttctagacaacaaggagtactcagaggrcactacagcacaggatgaggcaaatatacagaagaagggtatgtccactaaaaaaraatgtacaaaagaacttcacttgggtaggagtctaagagatctctgcactgtgtatttgtgatttgtgagtgttttaaggaactgtcccctgccttaccctaatctcctccccatgtaaaaacactgcaagaaaagttgcctgtgaatttctgtactacaaagcacactgtaaggcagcatttttctcctcacaacagtcccttgctgtttttcacttcccactctctcagtttccaccagaatcattccagcttcaatttctcccaaagatttcttaccctgccacatgaaagatcagc

SEQ ID NO: 46876 - DNA, 599 bp, Chicken  19866894288364_1
  misc_feature (1)..(24): n is any nucleotide
nnnnnnnnnnnnnnnnnnnnnnnntagtaattatgccagtgttaattagaagattgacttcagttttccacaaatttgcatttaagtgagtagttgtaaaggaaagcttaatgctggcacatgactcttctcactcagcacctcagaaatttagaacatatgttttctgaaagacaaaccaacagcttaaccaaggggaaagggagaattactctaatctaacatctcattaatgaagaggagatccaggcaattggcttcagcttacggtctcactcagttcattttttcagtctcaaytttcttttaaagtgccttttatggctataaaaaagcaaagtgcaccaagagttgagagaagatcagggatgtagccctttgcttggctcctsactccacatgcaggaatcacactgtgaattgattgagcagcrggggacaaactaagtatagctgagatcctgttgtgcttggcttttctcttcagggtgacttgtagtcagtgcagataacttttggctttagtctcggtgtttttatcctctgccctaaaagctttgggcctccaaactagaaatggtttctggagcaattccagt

SEQ ID NO: 46877 - DNA, 600 bp, Chicken  19866894288364_2
gttgtaaaggaaagcttaatgctggcacatgactcttctcactcagcacctcagaaatttagaacatatgttttctgaaagacaaaccaacagcttaaccaaggggaaagggagaattactctaatctaacatctcattaatgaagaggagatccaggcaattggcttcagcttacggtctcactcagttcattttttcagtctcaaytttcttttaaagtgccttttatggctataaaaaagcaaagtgcaccaagagttgagagaagatcagggatgtagccctttgcttggctcctsactccacatgcaggaatcacactgtgaattgattgagcagcrggggacaaactaagtatagctgagatcctgttgtgcttggcttttctcttcagggtgacttgtagtcagtgcagataacttttggctttagtctcggtgtttttatcctctgccctaaaagctttgggcctccaaactagaaatggtttctggagcaattccagtctcccagcagagatcacttttaatctgatttgaaggcagctaaggtgaakgtaatgacttttagactgagtaagcataagactgtccaaagaa

SEQ ID NO: 46878 - DNA, 600 bp, Chicken  19866894288364_3
tcagcacctcagaaatttagaacatatgttttctgaaagacaaaccaacagcttaaccaaggggaaagggagaattactctaatctaacatctcattaatgaagaggagatccaggcaattggcttcagcttacggtctcactcagttcattttttcagtctcaaytttcttttaaagtgccttttatggctataaaaaagcaaagtgcaccaagagttgagagaagatcagggatgtagccctttgcttggctcctsactccacatgcaggaatcacactgtgaattgattgagcagcrggggacaaactaagtatagctgagatcctgttgtgcttggcttttctcttcagggtgacttgtagtcagtgcagataacttttggctttagtctcggtgtttttatcctctgccctaaaagctttgggcctccaaactagaaatggtttctggagcaattccagtctcccagcagagatcacttttaatctgatttgaaggcagctaaggtgaakgtaatgacttttagactgagtaagcataagactgtccaaagaaatattgatgagcacaactagtgctacacttacagcatgaaag

SEQ ID NO: 46879 - DNA, 600 bp, Chicken  19866894288364_4
agttgagagaagatcagggatgtagccctttgcttggctcctsactccacatgcaggaatcacactgtgaattgattgagcagcrggggacaaactaagtatagctgagatcctgttgtgcttggcttttctcttcagggtgacttgtagtcagtgcagataacttttggctttagtctcggtgtttttatcctctgccctaaaagctttgggcctccaaactagaaatggtttctggagcaattccagtctcccagcagagatcacttttaatctgatttgaaggcagctaaggtgaakgtaatgacttttagactgagtaagcataagactgtccaaagaaatattgatgagcacaactagtgctacacttacagcatgaaagggttgatagaaatatattaaatccatctcaattctggttcttctgttgtttctgaatacagtacacagcactggctttagcctgcatagcttgtgccctgatatgccccagtaattcagggctctctctgggaagtcttctgtaaagtaggtagcatcagccatacatgcaaactagaggactctttttgagatgcagaggtgccaggtagccag

SEQ ID NO: 46880 - DNA, 599 bp, Chicken  19866894288367_1
  misc_feature (1)..(12): n is any nucleotide
nnnnnnnnnnnntccccatctccttaaatgactgggatttgtaataagctggttgggcccacatttgaaccattgtttcttaatctcacgtcagctatacatatatcaaagaatgtcctctccctcctataaattggagcaagacaactagtttccacaaacacaaatgcatgaaacaaaccattaccagcagtcacatccaaatatatcaacactaaaagacaagatttcaatcatataactgaaagattgatcttcacgaaggaataattaggctgttcagtcactgggaacaggtaytgcaggtgctcgcggagataccaatttctagtttgtttttcagatgaacayttgtctaaagaaaattaggcattgatcataaacctggttttacacaggctacaaagcagccacatgaaagaaacttgtaaacttccaatctgatccagacagaaactcggaatcaataatgaatggccctttggttgttgataataatactgtacataaacccggctgttaatgaagaaagaatgaatgctagaaaacaaaacagtagaaagtaactcactgcagctatctttctattttctgctcta

SEQ ID NO: 46881 - DNA, 600 bp, Chicken  19866894288367_2
gttgggcccacatttgaaccattgtttcttaatctcacgtcagctatacatatatcaaagaatgtcctctccctcctataaattggagcaagacaactagtttccacaaacacaaatgcatgaaacaaaccattaccagcagtcacatccaaatatatcaacactaaaagacaagatttcaatcatataactgaaagattgatcttcacgaaggaataattaggctgttcagtcactgggaacaggtaytgcaggtgctcgcggagataccaatttctagtttgtttttcagatgaacayttgtctaaagaaaattaggcattgatcataaacctggttttacacaggctacaaagcagccacatgaaagaaacttgtaaacttccaatctgatccagacagaaactcggaatcaataatgaatggccctttggttgttgataataatactgtacataaacccggctgttaatgaagaaagaatgaatgctagaaaacaaaacagtagaaagtaactcactgcagctatctttctattttctgctctatttatgtgataagtaattatttagttgtacttctcagacagctacagatgtg

SEQ ID NO: 46882 - DNA, 600 bp, Chicken  19866894288375_1
acttagaaactgatgagtgcaggtgaaaatagggatgatagggaagccccctctttccctcaggaacagagggaagtagcttacagacagtaaggagaactacttaaccctacacatggacataaaaccagtttacagacagtaaggagaactacttaaccctacacatggtcataaaaccagtaaccccattgtatccatcattctcagtaactagcaattaattcctagtgtaacaatcagaaagatcaacacagtggaatggtgatacaggaggcgtaatgacaaagggactaggaygatggaaaggtgctcacctgtctctgaagatctaagctcagaggggaaaaaaaaactccacaaggcaaggaactccaaacagcaaaacttccccagtggcagtcagcccttaaatgaggtctaagagaggtgcagccaggctcaatgccttccggtcactcaggtgaattrccttcacctgtgctcccagggctgaccgggtcttttccccagctgatcaatcagtggttcagacctcagcagttcccatacgcctaggttcatcttctggaagatgttctttagatccttgatgagaac

SEQ ID NO: 46883 - DNA, 600 bp, Chicken  19866894288375_2
cccctctttccctcaggaacagagggaagtagcttacagacagtaaggagaactacttaaccctacacatggacataaaaccagtttacagacagtaaggagaactacttaaccctacacatggtcataaaaccagtaaccccattgtatccatcattctcagtaactagcaattaattcctagtgtaacaatcagaaagatcaacacagtggaatggtgatacaggaggcgtaatgacaaagggactaggaygatggaaaggtgctcacctgtctctgaagatctaagctcagaggggyaaaaaaaactccacaaggcaaggaactccaaacagcaaaacttccccagtggcagtcagcccttaaatgaggtctaagagaggtgcagccaggctcaatgccttccggtcactcaggtgaattrccttcacctgtgctcccagggctgaccgggtcttttccccagctgatcaatcagtggttcagacctcagcagttcccatacgcctaggttcatcttctggaagatgttctttagatccttgatgagaactgattagctgacagcttagtagcagctttgtgagaaatcatcacctg

SEQ ID NO: 46884 - DNA, 568 bp, Chicken  19866894288375_3
tcataaaaccagtaaccccattgtatccatcattctcagtaactagcaattaattcctagtgtaacaatcagaaagatcaacacagtggaatggtgatacaggaggcgtaatgacaaagggactaggaygatggaaaggtgctcacctgtctctgaagatctaagctcagaggggaaaaaaaaactccacaaggcaaggaactccaaacagcaaaacttccccagtggcagtcagcccttaaatgaggtctaagagaggtgcagccaggctcaatgccttccggtcactcaggtgaattrccttcacctgtgctcccagggctgaccgggtcttttccccagctgatcaatcagtggttcagacctcagcagttcccatacgcctaggttcatcttctggaagatgttctttagatccttgatgagaactgattagctgacagcttagtagcagctttgtgagaaatcatcacctgctgggaactacgtattgcatgttccactttttgtctgtgtgaagtttttatgtgtaacaatttttatctgaaggcttcatgtgcacgttttg

SEQ ID NO: 46885 - DNA, 600 bp, Chicken  19866894288378_1
tgtcagcagtgaatgaacaatgttctccaatatgatgaaaagagagactatttattttttcacctgatgctgaaattgggtcattaatagaaaagttcataataatatgcactggaactaaaattatatctcttatatctctgcagcctctgtatcttcagcaaattccccaagtttcaagacaggcagaacctggcccaggtttttgcaatggtcacttttccgtggttgccttaccctcaatggaatgccaatgtcatcaacagaagtatcagccatgtgctgagggctcttgacaaytcttctcttctcctccaataccctcctctcactcagcaccggctcctggagtggcttgacttgtgtgagtgccaaatctactttatctgaaactagtctgtctggcactgaatctgcaaatgaaaacaaggcattcttatttcatcccagcattccatcacttcaccatatcccagtcttttaaggcaagaaccctggcaaatagttgatgagacagactgtgaccctgccagttggagccagcatctgggctgaaggaatctagcaagaatacatttgataccagcaaaagcaggctag

SEQ ID NO: 46886 - DNA, 600 bp, Chicken  19866894288379_1
tctgtgtaaggaatgatcagttcctccttgttcaagagctggaattggtgattgaagaagagacctcccccatcagctgacgggttatatctagccaggatgggattggagtacttagactctgtgaagctggaagtgtggtagtgctttacaggtcactaacaaaaagggctactatgtttcactgctgatagatccctaaaataagcattcttaccccaccctatcatggtaaaacctgtatttgagcgttttcaaacttaacctgattcgttgccctgaactatgctgcagagaackctcactgcttatttattgtgctttttttcttctgtgcaggaagcatagtggtacacttcatgctgccagagacacgagagacttatgaactggagaagctgtggactctaggttcctatgatgaccagctggcacagatgactccacagttactgccagaagactttatactgggactgacttccgaagagcagtgatcaacttgtgacaagaacttaatgtagctgctgaggtgcctgactagaaagagacacgagtgtgcctcagcagacacaggaggcacagcaacttagccatcac

SEQ ID NO: 46887 - DNA, 600 bp, Chicken  19866894288382_1
agactagctgggagcaacagtgaaggatcctcatcaaattctacatctcgagctgctccaaaaagccacaagcattcacactgtcatcaggaaacacggcacgcctccagcttccgaaatcacgccacactctttgtattgcatcccattagctccgagataataaataacgacactgcaaagcactgacataatagtctcattcttggagcacgaaacacttactaatgacatttggatgtgtttactacaattttacaagtggggaaagtgcacggagagcctcgggtacttcttccygaggtcctacagagtggagtggtgtgaagttggtcctaggacacattcctatggtgtwttcaggtacagaaaagccaccagaagagctagcagcaaagctgagcccagctggatagaaggtgtgaagtgtggaagagattcctataagtactgtgccactgattccaccagcaataatgaaaacctttgctttcaagygcaaagaggcatccccaggcaacaacatagggccaaacaaagtaatagtaaaaattaccattcatgacaggaaaaaacataataataattgatttttaaaat

SEQ ID NO: 46888 - DNA, 600 bp, Chicken  19866894288382_2
caaaaagccacaagcattcacactgtcatcaggaaacacggcacgcctccagcttccgaaatcacgccacactctttgtattgcatcccattagctccgagataataaataacgacactgcaaagcactgacataatagtctcattcttggagcacgaaacacttactaatgacatttggatgtgtttactacaattttacaagtggggaaagtgcacggagagcctcgggtacttcttccygaggtcctacagagtggagtggtgtgaagttggtcctaggacacattcctatggtgtwttcaggtacagaaaagccaccagaagagctagcagcaaagctgagcccagctggatagaaggtgtgaagtgtggaagagattcctataagtactgtgccactgattccaccagcaataatgaaaacctttgctttcaagygcaaagaggcatccccaggcaacaacatagggccaaacaaagtaatagtaaaaattaccattcatgacaggaaaaaacataataataattgatttttaaaatgtacagctaaaaaaatgtcatgcttgggaagtataatttttgccagaaatacgccctg

SEQ ID NO: 46889 - DNA, 600 bp, Chicken  19866894288382_3
ctcattcttggagcacgaaacacttactaatgacatttggatgtgtttactacaattttacaagtggggaaagtgcacggagagcctcgggtacttcttccygaggtcctacagagtggagtggtgtgaagttggtcctaggacacattcctatggtgtwttcaggtacagaaaagccaccagaagagctagcagcaaagctgagcccagctggatagaaggtgtgaagtgtggaagagattcctataagtactgtgccactgattccaccagcaataatgaaaacctttgctttcaagygcaaagaggcatccccaggcaacaacatagggccaaacaaagtaatagtaaaaattaccattcatgacaggaaaaaacataataataattgatttttaaaatgtacagctaaaaaaatgtcatgcttgggaagtataatttttgccagaaatacgccctggtgacacgtgatggagtgagcccagaaacgtcccccggggcgctctccatctccatggtggaacagagagttacaccaaggtaagcaaacacaaggataaatgtgattaaagaggaaacgccactcccagaacaaacagg

SEQ ID NO: 46890 - DNA, 600 bp, Chicken  19866894288388_1
ggaggcagaaactgagggccaagaactgcattttggcaaagctatctatgtgagctcttgggatcactgcagagagccaagcctcacaccaaaggtgcaaaatctgctcatggttctgagctgttcactgtggccacagagagcagagagtttgaaggatggtttcccagtgaaacactttgaagcaagaaaaatgctgttctcaatgacgggatcaggcacatccttaccaggcaattcaagacaagtttaagaacggctagaaaagcattttcataaagaagtgttgaagatgtcctrtatggcgatttccagctttcttgctagatgtactcttctccagcaatattctcttgaaggaagcagcaacaggttcagaataaccttctgatcagtttccaacattctttaatataatttttggacaggataggcaagtttatggcccaatataacccaacgtggctgcattgcccaagccagtctggtcctttcccatcacatactttattttgggatccaatatataactatgttctgttatagctgccagtgggagttgttattttatgattgctggttgtatttactttgaaaaaa

SEQ ID NO: 46891 - DNA, 600 bp, Chicken  19866894288400_1
tgaaaaacctcaggaaagatatttgcttaagggcttattattcattaccgctatattttacaaacgctatttatttttataaggtattcggattttatattttgagataatgggaacttccaccttattttcataatttgacggtgaagaaataagcaagacagacctaatggtagaatgtacctgtcatgcggaggatcatcgtctgtctgagctctttgctgtgaactgcgttttcgcacttttggaaaaacattctttcttacaaatcgccaatcacggggcttcaaatcttgtgcygacacaatatcttcaatatcttcaagcaccgaatcacaggcagcaggcatctctgagaaacattagattagactagaattagcgagtatttgaatgcaaagccatatacctgaaatacagcatatacgcaagggatattcagcacacaaagacaatcaattatcccaagttattttctgacgctgtcttctcccaagatccttcaggcagggagaaacctacaaaagccaagttcttgtttagttttggggggaaatttgcttgtttcttaaaatctgtatcttctaattcaaaaagcct

SEQ ID NO: 46892 - DNA, 599 bp, Chicken  19866894288401_1
  misc_feature (1)..(9): n is any nucleotide
nnnnnnnnnctgataaccaatgaagatacaattcagagtgtttatatagaaattatggggaaaagagcaaatagttttgttagtacctcaggccttggtttctaaattggtgtctatctaaattttcagcattttttttcttacaaggagctgtatcatttataatcttgagaccgtaacttcagtaatctttcagctgatacagtctccttgaacgaggtatgaacagggtttattaccttgtaatagtaccaagtctggaccttcaccagtgctagatctaaactgttaactgttgayttgcaggctgcatgcactaagtgtagccagcaggtggagggctggactatttgcttaaaactgaaattcagccatccattgcagacacaaactggctgaaagctttcatagctctggtgcttcctattgcttaccaagtaaaatactgcgttttaagatggctctcattaagattatttggactatattttcttcacaatgatgtgtagctccatttgtgactttgaaacttctgtgggtggcagtggcagtgctgaagagccaagtaatcactgcaaagttggagctggggagatgct

SEQ ID NO: 46893 - DNA, 600 bp, Chicken  19866894288404_1
aatattcttctaattttagacatttccttttaattctccacagttcacagacatttctggacaaattgaaaaccagtaaaaatgctaaaaataatcaaaagccaaaagtttacttcttgcactaaaataaacaagaggataattcaacaattatagtttataacgtagtaaaaaagtcagtgaacatactgacctcagaaatattctgcattcagataaaagttgatggcttgtgcattttcataaagtgtctgggcatcagggtttttagtgacactctcactgaaataaagagaaagwtcggcttgctatgcatgggaatgctgtaaagaattattgtaagctttacttcagcagagtaacaggatgstacagaatctgycagaagctcagatccayacgggaatgtctattcccttctttgaggatcacattcctaaaagggcacagttatgtaacatggaacaggaaaggatgataatgctacattcttagttcacatctcttagttcaatttccattttttttatatatggataatggaagaggtaagtgatatttgacgtrcagaaatcagaccctatagccggtaaggatata

SEQ ID NO: 46894 - DNA, 600 bp, Chicken  19866894288404_2
aaccagtaaaaatgctaaaaataatcaaaagccaaaagtttacttcttgcactaaaataaacaagaggataattcaacaattatagtttataacgtagtaaaaaagtcagtgaacatactgacctcagaaatattctgcattcagataaaagttgatggcttgtgcattttcataaagtgtctgggcatcagggtttttagtgacactctcactgaaataaagagaaagwtcggcttgctatgcatgggaatgctgtaaagaattattgtaagctttacttcagcagagtaacaggatgstacagaatctgycagaagctcagatccayacgggaatgtctattcccttctttgaggatcacattcctaaaagggcacagttatgtaacatggaacaggaaaggatgataatgctacattcttagttcacatctcttagttcaatttccattttttttatatatggataatggaagaggtaagtgatatttgacgtrcagaaatcagaccctatagccggtaaggatatagagcaggaatgtgtttattggtgatgcacgtacaccctggtgcaagggggatcgctccacctaacttgca

SEQ ID NO: 46895 - DNA, 600 bp, Chicken  19866894288404_3
tgctaaaaataatcaaaagccaaaagtttacttcttgcactaaaataaacaagaggataattcaacaattatagtttataacgtagtaaaaaagtcagtgaacatactgacctcagaaatattctgcattcagataaaagttgatggcttgtgcattttcataaagtgtctgggcatcagggtttttagtgacactctcactgaaataaagagaaagwtcggcttgctatgcatgggaatgctgtaaagaattattgtaagctttacttcagcagagtaacaggatgstacagaatctgycagaagctcagatccayacgggaatgtctattcccttctttgaggatcacattcctaaaagggcacagttatgtaacatggaacaggaaaggatgataatgctacattcttagttcacatctcttagttcaatttccattttttttatatatggataatggaagaggtaagtgatatttgacgtrcagaaatcagaccctatagccggtaaggatatagagcaggaatgtgtttattggtgatgcacgtacaccctggtgcaagggggatcgctccacctaacttgcacaccgtcaggag

SEQ ID NO: 46896 - DNA, 600 bp, Chicken  19866894288404_4
agccaaaagtttacttcttgcactaaaataaacaagaggataattcaacaattatagtttataacgtagtaaaaaagtcagtgaacatactgacctcagaaatattctgcattcagataaaagttgatggcttgtgcattttcataaagtgtctgggcatcagggtttttagtgacactctcactgaaataaagagaaagwtcggcttgctatgcatgggaatgctgtaaagaattattgtaagctttacttcagcagagtaacaggatgstacagaatctgycagaagctcagatccayacgggaatgtctattcccttctttgaggatcacattcctaaaagggcacagttatgtaacatggaacaggaaaggatgataatgctacattcttagttcacatctcttagttcaatttccattttttttatatatggataatggaagaggtaagtgatatttgacgtrcagaaatcagaccctatagccggtaaggatatagagcaggaatgtgtttattggtgatgcacgtacaccctggtgcaagggggatcgctccacctaacttgcacaccgtcaggagaaatcgtgctatagata

SEQ ID NO: 46897 - DNA, 600 bp, Chicken  19866894288404_5
ttagtgacactctcactgaaataaagagaaagwtcggcttgctatgcatgggaatgctgtaaagaattattgtaagctttacttcagcagagtaacaggatgstacagaatctgycagaagctcagatccayacgggaatgtctattcccttctttgaggatcacattcctaaaagggcacagttatgtaacatggaacaggaaaggatgataatgctacattcttagttcacatctcttagttcaatttccattttttttatatatggataatggaagaggtaagtgatatttgacgtrcagaaatcagaccctatagccggtaaggatatagagcaggaatgtgtttattggtgatgcacgtacaccctggtgcaagggggatcgctccacctaacttgcacaccgtcaggagaaatcgtgctatagatataagttgaactaatacataatcaatagttgacargaatttggatacatattcattacattcccgagagcccatttgcatacagtccctcccccccttgcgcttgcgtagtaggtcgtgatgctgaaggctcatagtcttcctcgcgaaggctcgtagtcttcctcgct

SEQ ID NO: 46898 - DNA, 439 bp, Chicken  19866894288404_6
ttcctaaaagggcacagttatgtaacatggaacaggaaaggatgataatgctacattcttagttcacatctcttagttcaatttccattttttttatatatggataatggaagaggtaagtgatatttgacgtrcagaaatcagaccctatagccggtaaggatatagagcaggaatgtgtttattggtgatgcacgtacaccctggtgcaagggggatcgctccacctaacttgcacaccgtcaggagaaatcgtgctatagatataagttgaactaatacataatcaatagttgacargaatttggatacatattcattacattcccgagagcccatttgcatacagtccctcccccccttgcgcttgcgtagtaggtcgtgatgctgaaggctcatagtcttcctcgcgaaggctcgtagtcttcctcgctgcaaa

SEQ ID NO: 46899 - DNA, 600 bp, Chicken  19866894288406_1
aaccaatgtattctgatatccatttttcttttctgagtctcagaaacaccgcgcctggcaaacagccatgccaaacagtgcaacaggcagataaagtatctcacctttgtaggctgctttcaccagtggaaggcaatgctttttaggcagaagtaaaaatgatcaccacactgattctaccactggaggaactaaggtagaaggaagcaagctctgcatgggcctcactaccactgcccggcaggccctgcaccagacccaggtggccaaggtcccagtgcggcctgcagcatggcaccrcctgccagggtaagctccctgcttcctcttcacgtggttcacaggtcttcytccagctgggcaaggtgagccttcatcagggagaactgcacttctcagcttttgcactcaaaggtaaaacgcaacctaatgtcacaaaacgtacatactcaaggtctcagctactgacctagccagaaaaagtgatgcctttgcatagtacatcatgtattatgggaacccaggatctccagtttcctatcagtccagccaatactggtcagaagaccaatgtaagtagccagaatgtctccatcagcc

SEQ ID NO: 46900 - DNA, 600 bp, Chicken  19866894288406_2
cgcctggcaaacagccatgccaaacagtgcaacaggcagataaagtatctcacctttgtaggctgctttcaccagtggaaggcaatgctttttaggcagaagtaaaaatgatcaccacactgattctaccactggaggaactaaggtagaaggaagcaagctctgcatgggcctcactaccactgcccggcaggccctgcaccagacccaggtggccaaggtcccagtgcggcctgcagcatggcaccrcctgccagggtaagctccctgcttcctcttcacgtggttcacaggtcttcytccagctgggcaaggtgagccttcatcagggagaactgcacttctcagcttttgcactcaaaggtaaaacgcaacctaatgtcacaaaacgtacatactcaaggtctcagctactgacctagccagaaaaagtgatgcctttgcatagtacatcatgtattatgggaacccaggatctccagtttcctatcagtccagccaatactggtcagaagaccaatgtaagtagccagaatgtctccatcagccttcttgtggagcccaccctacttgattctgctggtctcacagacctggtgt

SEQ ID NO: 46901 - DNA, 600 bp, Chicken  19866894288413_1
tcctccaaagagtcaaagtactcaacacactttaaaaataaagatcagacatctctaggagggaaagccctggccaagccactgcaaagaagttaaatggattcctcttgtaagtatttgctgtggaagaagctggggagatttctgtgctggaactcgttagtggagaataaggagcaggagatgtcttaaactttaagtgactgtagaagttactgaacaaactcttaacgcatccccataattccctgagaagttctaggagaaatcaaggatgatataggtgagctatcaaccccyataagtgggcaagtgcctgtttaaaactgctttcgtacctcaggtgtgaaaaccacacttctttttgagaaagaccttgggaactctagggtaaagtactggtacacctgcactaggcaaattagcagaaacccaaacaaatgaatgcaagaacagcattacctaattcctggacaaatgcaatctgatttgaaagagccagcatgacttgtacgaatggacgtattctcttctaaatctctgaagtggttaaacaaatagcatagggacagtttttgtggtttcctcttgacctgtaga

SEQ ID NO: 46902 - DNA, 599 bp, Chicken  19866894288415_1
  misc_feature (1)..(187): n is any nucleotide
nnnnnnnnnnnnnnnnnnnnnnnnnnnnnnnnnnnnnnnnnnnnnnnnnnnnnnnnnnnnnnnnnnnnnnnnnnnnnnnnnnnnnnnnnnnnnnnnnnnnnnnnnnnnnnnnnnnnnnnnnnnnnnnnnnnnnnnnnnnnnnnnnnnnnnnnnnnnnnnnnnnnnnnnnnnnnnnnnnnnnnnnnnnctttcatttcaatgcataagttttgtcctatcctttggcacacacagggcagcacagtttcctcaaactaccttttgcaaattgatgaatcatgagtgatttcaaaggaagaraactattttggaaagcatctgaagcctgtaaacttgagaagaaaacaaatttgatcaaatatatgaaaatattgacaccattattgttgctttgccatcagcatgaattcaggacacggttgttttttccccagaatatgagaagtctgaaaagacaaagctaatcttacctttacttcagtattttatttgaattatctttgtactaccatcaggctccagctttattcactacccactgaatcaattacctttcctgataaaacaattttccaatgtttcagactttaaaatatgtt

SEQ ID NO: 46903 - DNA, 600 bp, Chicken  19866894288415_2
tgaaaagacaaagctaatcttacctttacttcagtattttatttgaattatctttgtactaccatcaggctccagctttattcactacccactgaatcaattacctttcctgataaaacaattttccaatgtttcagactttaaaatatgttattttaccaaagcaacagtccctgacttcatactgagaaccttttttaaattactacacacctcattcgcctgctctattaagaaatgcaatttagtgagaataagtttgttaaattagagcagtaggtgcatcagacactggcagtmttctttaagtgctgtcttatgaatcagtgcatatgtatgcatactggagaattgtctttaaatcagagataatataaaaattcaacatagtgatgtttgctctgtgaggaaaatgaactttctccttaaaatgctcttcatccaatggaaaaaatgtctgtcctgcagtacaaaatcagactattcttttcacttcttcaaacattcccttcatactcttgtatatgtttaaaattgaaggtaattcttgcttttcattgtttgtgctatcatagcacacagaggacgaagttatgcaca

SEQ ID NO: 46904 - DNA, 600 bp, Chicken  19866894288423_1
agcccccccagcccagccaccaaaccccagccctacgcggctctggctggaggcacacatcgggggccccgtgcagagccccctcacacccacagcccacggccgcagcccggccccactgctctgcatcgctcctgggccaccatcccgctttgcctcctgcttcaggcacactcagggaattcaatccactctctgcccgactcagccttggctgctcctccgtgccaccgctggagcacagcgtaacgcccttggaacctctcggggctggaggatgctgggaggagggctggcgcygagcagagcagcacgcccgagtcaggaagcggggagtggtggggatctctggggtgagatttggggtctcaccgccaagcactgggcagcgtgagccccgcactgacaggatgcgcccacccagccccacacctgcccatgggcaccccacgctccagccttgcctccagcctggagctgctcctggagctgtccccgtgccagggccgccatcacctccccacaacatcggtgctgcagggatgcgggggtctccggtgcctcccagtgcccagccccgttcccaggcccccgcccgca

SEQ ID NO: 46905 - DNA, 600 bp, Chicken  19866894288423_2
cacgcccgagtcaggaagcggggagtggtggggatctctggggtgagatttggggtctcaccgccaagcactgggcagcgtgagccccgcactgacaggatgcgcccacccagccccacacctgcccatgggcaccccacgctccagccttgcctccagcctggagctgctcctggagctgtccccgtgccagggccgccatcacctccccacaacatcggtgctgcagggatgcgggggtctccggtgcctcccagtgcccagccccgttcccaggcccccgcccgcagcctccgcccyggcccctcctgcccagctcttcctggccccagcggcgttgggcagtggaaacatttcggaaacgctttttactgctctcagacggggctgcagttaacccctgcaggagccgctgcattgggaaaagcgatttcattacagccagaattcctcacgggaaaagccgggtttggggccactgctcacatagaaaccccgcgctgctccccgcactgccagctctgcacatacagatcatgcgccaccagccccaccggcacccccggggccatggggccgtgcgcagccagcactgctgtg

SEQ ID NO: 46906 - DNA, 600 bp, Chicken  19866894288424_1
taaaaaggatgacccagggaactaccaacctgttggtctcatctctgtgctgggaaaaatcatggagcagatcctcctagaagctctgctaaggagcatggaagacaagaaggtgatatgggagaaccagcatggcttcacaaagggcaagtcctgtttgcccaacctgtcatcaatgatggtgtcactgcatcagtggacaagagaagagccactgacaccatctatctggacttcagtaaggcctttgatatggtaccccacaacagccttctccccaaattggacagatatggattygatgagtggactgtttgatggacgaagaactggctgcaagactgaacccagagagtgattgtcaacggctcaatatctagatggagatcagtgatgagcaatgttccccaggagtcagtgctgggacagacactctccaacatcttcatcaatgacactgacagtgggggttgagcctcaccctcagtaagtttgcaggcaacagcaagctgtggggtgcagctgacatgtccagaggatgggatgccatccagagggacctagacaggcttgaccagtgggcccaggagaactagggtt

SEQ ID NO: 46907 - DNA, 600 bp, Chicken  19866894288439_1
caggatccattgcacaaacatttaaacaaatggaataatttcttttacaaatgtgtttctgttgtataagaataatcttgtacagaaaatagctctttatgcatcttacagaaacgctaacatttagattctctattcatggacagtgtttgaatgcaatttaagattccagctatgctttatagttaccaaatgtcaataaagcagcagtacatcattgtctaatatccttaagctgcttgacctagcaagtattgaggacagtgaaaacattcctagaaccatgtttgtttacaaacmttcaagtatcttgaaacagtgattaaatacctcctgaaagtaacactgtaacttatgtgtcaagaaatatgaaatgaaacctcaacaaggcagcattacttgctcacagattatcctgctggctaatactttgagaaccaaattgaaaaggaagttcaatattgaactggtttacagttaacgtgaccttagaaatgacatagcagaaggtattctagtaaatgttatgcagcattaatacaactttgtatatgaattaaaaatactttcattttcttaagaaaagaccatggaaggtag

SEQ ID NO: 46908 - DNA, 600 bp, Chicken  19866894288439_2
tcctgctggctaatactttgagaaccaaattgaaaaggaagttcaatattgaactggtttacagttaacgtgaccttagaaatgacatagcagaaggtattctagtaaatgttatgcagcattaatacaactttgtatatgaattaaaaatactttcattttcttaagaaaagaccatggaaggtaggcaaaaatttaaaaataaaaagtaaatttgtgaagaatgagaagcaattgaaaataaggtatatttatatataacgtgtaagggtatgctagcaagtacatatatttaaaaayactcaatttctttgaagataacgttaaagtccatatggtatcacagggacctcaaacacaaaccaccttcaaacacttttcttctgcaattgctgtttcaagcaccatacctgtatgaaaatttccttcaaaatcagtgagaagaaaatttcttcttgatatacaactttatgcagtcatcatcttttctttctttctaggtatgtcttaagttaaactagaagatgtaagcaaacaagttttatataactcaatgaaaaaaaaaaggaatttttagattgtatttgattgtattaagta

SEQ ID NO: 46909 - DNA, 600 bp, Chicken  19866894288439_3
catcattgttcttatcatcatctcttaagacgtcatctattagactaattagctcctcttctttcattgcctgggtattctcaccaccttcctacaacaacaacaacaaaaacaacacaacacaattaacagttcagcagttttgcacatagtggcacatttgacacagattactggcaactagtttttgcaaagcagctcgtgtttgatgttcaaagtggtgttaagttttatgtaattatttcaatataagcaaattttatcagatgcaagctactaagtctacattctgtctttcamaacaagccctctgtatctgctatatccagttcacattcttggccaagagacctaaaagctaaatagcaaaatgtacaatgatagttactaatctaacagatgtattcttaatttgaatcttgatgtagcacggacaagagtttctagatagtgtggaaacatcttgcttcacatcaagacttgcaacatgctgaacatgcagaacagcgagtaatgagaaaaccagcatgttaagtacactgtagcttaaagacagtaaaattctcagtatcagctcttgggaacagagaggaatacaaa

SEQ ID NO: 46910 - DNA, 600 bp, Chicken  19866894288442_1
aaagcttccagctttcaagttattactgctagtttttctcatgctttcagaagacaaaaaaggaggcagaaaagtccaattttctggtcacttaatatacacactactgccgtgcacagctccagatgttcatgtatttctgagtaggaaaaaatgtgagaactatgagcacacaaccagaaacttcaaacagaaatggaaggatctacaaggagtagacgtttattctctggtccttccctcaggtaaacattgttcaaagactttgaactgcaagcttaagttacagctagcagcaascgagacccagcaaagccttcaggactccgctgcatcacattccagtctcatctcattgctgaagcacttcagcttagctgctaaaatactgacaggctgatctcctgcaggctgagcactgccagcagcccaccagcttccagaagaaactgaaagactccacaaagtgaaacactgcgcagtcatttttaatcatttgctaagcactactaaaaataagctgacaagaaaggatcattgggcaagcaaagcaatggagtgctccagcaaacgtcgagtatgaggcaaacccaagcagaa

SEQ ID NO: 46911 - DNA, 599 bp, Chicken  19866894288448_1
  misc_feature (1)..(101): n is any nucleotide
nnnnnnnnnnnnnnnnnnnnnnnnnnnnnnnnnnnnnnnnnnnnnnnnnnnnnnnnnnnnnnnnnnnnnnnnnnnnnnnnnnnnnnnnnnnnnnnnnnnnnatttagtgacacatctgaagttactaattgtgcttgagacttcatgctaagaatagttttgcttcattatacgtttttatatgtgtttttttctgtccctctatattatcttgttaatttattgtctttattgtttttatttgacaccccaatcagcagagagaagctgtcgtaaggatgactaaaattttggtaggargaagggattgtctttatatacagtgttgtacggcactgaaatgaattggggtctgatacagaaaagaggctttcaggcatggctgccaaacaaataagagaaaggtcccatgagcagcacaactaatgaaacctctggcwccattagccaactttcttgtaggcttgtgtccttaagcccttctccttgtgataataacctctcctccctgcgcatgctactgtgtcaccacaaatggcaagtgacactggtggaggctaggcagggcccctgcttgctgatgagcaggcaaggacacg

SEQ ID NO: 46912 - DNA, 600 bp, Chicken  19866894288448_2
cttcatgctaagaatagttttgcttcattatacgtttttatatgtgtttttttctgtccctctatattatcttgttaatttattgtctttattgtttttatttgacaccccaatcagcagagagaagctgtcgtaaggatgactaaaattttggtaggargaagggattgtctttatatacagtgttgtacggcactgaaatgaattggggtctgatacagaaaagaggctttcaggcatggctgccaaacaaataagagaaaggtcccatgagcagcacaactaatgaaacctctggcwccattagccaactttcttgtaggcttgtgtccttaagcccttctccttgtgataataacctctcctccctgcgcatgctactgtgtcaccacaaatggcaagtgacactggtggaggctaggcagggcccctgcttgctgatgagcaggcaaggacacgctgcacccttggccaggtggctgctgccaagtgcaggatgaccgagctctgcctgcctttcccatgataatggcagaaatgtgggtccatctccctcacccaattttcattttcacaaagcttgttaatttttggttttca

SEQ ID NO: 46913 - DNA, 587 bp, Chicken  19866894288448_3
tcattttcacaaagcttgttaatttttggttttcagtgtttctgtcaaacatcactggaactggccaagtatttaggaggtactggggaaactgtcagacaagctaatggatggatagatcagcagtgcaactgcataaccacatttccttggggaacagagagcaatactgggcagatgttaatgtaaagtagttgctgataaaatatgggtagcatgcaagtgttcatattgtggatggaaaaaatgatgctataaaataataagtgctctcagataatatttttacattcatatggkggagtcctgctttttccatgcaaacaaaaaaaacgaaggacaaacgttcaagaagagaattaacacgaataaggttggtcaaagtaagttctatttttgtggatgtgtaaaagaaatctgtaacagtgactacatcagagactattgaattgtgcctgaagtaccctaaacttggttctcaattcttggagaaccgatcaaccttactgagatactgagtacaggaagactcctccagcctgggttatttggtccactacgctttcttcattccttagctatagata

SEQ ID NO: 46914 - DNA, 600 bp, Chicken  19866894288451_1
cttttggctacagctgaatcatgtgagatgttgaagatccagatgtcttctgtcaaagctccattacaaaccaagcaagacataattcttagttgctgctgccagtgctggagcctggctgaaccgagatcaggaattatcccaagactttgctttgtggtagaggctgtcacccagaggggtgctgaggtccttagtctacatctttttccttggagcaagatccttgacctcaccaagattccataggacatgagctcctatccatttagaggccctttctcccatagaaacctccaygtcccagaatgttttatttctcccttgagcctcaagccctcctgccctcctttctgtaacacctcatccctttgtcagggagaaagcggagtgtcaccaaccaaagggtagagatgtggaaaaagagcttgcttgctgcttgttcccttgctagagcagaatcttcctasaygccaccatccatyctttgtggaaaggagcaggagcaaaggactggggaggcagaaccatggctgcaggtctaagtggttcaaagcctggctggcccagacaccgtaggctgaaacagcagcaaaagag

SEQ ID NO: 46915 - DNA, 600 bp, Chicken  19866894288451_2
cacccagaggggtgctgaggtccttagtctacatctttttccttggagcaagatccttgacctcaccaagattccataggacatgagctcctatccatttagaggccctttctcccatagaaacctccaygtcccagaatgttttatttctcccttgagcctcaagccctcctgccctcctttctgtaacacctcatccctttgtcagggagaaagcggagtgtcaccaaccaaagggtagagatgtggaaaaagagcttgcttgctgcttgttcccttgctagagcagaatcttcctasaygccaccatccatyctttgtggaaaggagcaggagcaaaggactggggaggcagaaccatggctgcaggtctaagtggttcaaagcctggctggcccagacaccgtaggctgaaacagcagcaaaagagcagaggtcaagattagggtctcaaacatcccaatactacaatcctgttcatacatttagtactgtattttgtcctttgtgtatcacctgtagactaaatctccctaactgtgggcctggtgtggctcattgctaastgggagggtagattgttagagtttctgccccaca

SEQ ID NO: 46916 - DNA, 600 bp, Chicken  19866894288451_3
cccagaggggtgctgaggtccttagtctacatctttttccttggagcaagatccttgacctcaccaagattccataggacatgagctcctatccatttagaggccctttctcccatagaaacctccaygtcccagaatgttttatttctcccttgagcctcaagccctcctgccctcctttctgtaacacctcatccctttgtcagggagaaagcggagtgtcaccaaccaaagggtagagatgtggaaaaagagcttgcttgctgcttgttcccttgctagagcagaatcttcctasaygccaccatccatyctttgtggaaaggagcaggagcaaaggactggggaggcagaaccatggctgcaggtctaagtggttcaaagcctggctggcccagacaccgtaggctgaaacagcagcaaaagagcagaggtcaagattagggtctcaaacatcccaatactacaatcctgttcatacatttagtactgtattttgtcctttgtgtatcacctgtagactaaatctccctaactgtgggcctggtgtggctcattgctaastgggagggtagattgttagagtttctgccccacatc

SEQ ID NO: 46917 - DNA, 600 bp, Chicken  19866894288451_4
tgaggtccttagtctacatctttttccttggagcaagatccttgacctcaccaagattccataggacatgagctcctatccatttagaggccctttctcccatagaaacctccaygtcccagaatgttttatttctcccttgagcctcaagccctcctgccctcctttctgtaacacctcatccctttgtcagggagaaagcggagtgtcaccaaccaaagggtagagatgtggaaaaagagcttgcttgctgcttgttcccttgctagagcagaatcttcctasaygccaccatccatyctttgtggaaaggagcaggagcaaaggactggggaggcagaaccatggctgcaggtctaagtggttcaaagcctggctggcccagacaccgtaggctgaaacagcagcaaaagagcagaggtcaagattagggtctcaaacatcccaatactacaatcctgttcatacatttagtactgtattttgtcctttgtgtatcacctgtagactaaatctccctaactgtgggcctggtgtggctcattgctaastgggagggtagattgttagagtttctgccccacatcagaggcagactgc

SEQ ID NO: 46918 - DNA, 600 bp, Chicken  19866894288451_5
tgcttgttcccttgctagagcagaatcttcctasaygccaccatccatyctttgtggaaaggagcaggagcaaaggactggggaggcagaaccatggctgcaggtctaagtggttcaaagcctggctggcccagacaccgtaggctgaaacagcagcaaaagagcagaggtcaagattagggtctcaaacatcccaatactacaatcctgttcatacatttagtactgtattttgtcctttgtgtatcacctgtagactaaatctccctaactgtgggcctggtgtggctcattgctaastgggagggtagattgttagagtttctgccccacatcagaggcagactgcagaattcctgttgaatgcactgacgactctcagaaaagtgttgtttatcctcagaaacctctgcaggctctctcagctctatcctctggcaycatggaagaaattatttgtgggttagtccttaaatgatccagtatcgaccttctgattccagaccttcctacaccacaaataggcaatggttataaatttataaactatgaaaaattaaacatgcagtgaactttaacagcacttcaaaaacaccacac

SEQ ID NO: 46919 - DNA, 600 bp, Chicken  19866894288451_6
aggctgaaacagcagcaaaagagcagaggtcaagattagggtctcaaacatcccaatactacaatcctgttcatacatttagtactgtattttgtcctttgtgtatcacctgtagactaaatctccctaactgtgggcctggtgtggctcattgctaastgggagggtagattgttagagtttctgccccacatcagaggcagactgcagaattcctgttgaatgcactgacgactctcagaaaagtgttgtttatcctcagaaacctctgcaggctctctcagctctatcctctggcaycatggaagaaattatttgtgggttagtccttaaatgatccagtatcgaccttctgattccagaccttcctacaccacaaataggcaatggttataaatttataaactatgaaaaattaaacatgcagtgaactttaacagcacttcaaaaacaccacactcacagctggcacatattgctgatattactcagatactttcataactgtggagggctgcaatcctcttgcccagcattggtggaccattcatttattgttgatagtgtgagtagaaggccttgctagttactgaatgttca

SEQ ID NO: 46920 - DNA, 600 bp, Chicken  19866894288454_1
aaaaaaaagcatagaaaaatgttaaatttctacttcactctctacttccaattctcttttttgctacttaagcaaacagtggaaaaaccaatagtgaaaaatataaatttgatacaggaaatgttactgaaaaatggtttaatgtgagtgaaaaaaaaaaaatctgttaccaaagttagagaacaagtatgtaaatgttcccttataatgttcatttaagaagagaaaatggtttcaaaacagctcctagatggagcaaggccagtaagaaatcccaatgtattaaattactttgagaargaatacaaggaccacttyatgtcctatcaaacacaggatttaaatatatcagaaacccacacgattgcgttgcagtaagtagagagatggttggaactgcttatggacacaaatataggaaaagaaagaatctcccagttcctcagttctccataccttaatattgtccagtctaagaagaaaatgtgatatatgatggcccaaatgctcaccactgggaatcactagatactgaatgaattgtttctgactgagctgtctgagtgcttattagttaaatttgtcactctgaaagtaacg

SEQ ID NO: 46921 - DNA, 600 bp, Chicken  19866894288454_2
atgttaaatttctacttcactctctacttccaattctcttttttgctacttaagcaaacagtggaaaaaccaatagtgaaaaatataaatttgatacaggaaatgttactgaaaaatggtttaatgtgagtgaaaaaaaaaaaatctgttaccaaagttagagaacaagtatgtaaatgttcccttataatgttcatttaagaagagaaaatggtttcaaaacagctcctagatggagcaaggccagtaagaaatcccaatgtattaaattactttgagaargaatacaaggaccacttyatgtcctatcaaacacaggatttaaatatatcagaaacccacacgattgcgttgcagtaagtagagagatggttggaactgcttatggacacaaatataggaaaagaaagaatctcccagttcctcagttctccataccttaatattgtccagtctaagaagaaaatgtgatatatgatggcccaaatgctcaccactgggaatcactagatactgaatgaattgtttctgactgagctgtctgagtgcttattagttaaatttgtcactctgaaagtaacgccttttatttatttccat

SEQ ID NO: 46922 - DNA, 600 bp, Chicken  19866894288461_1
taggttggatggaaccataaagatcatctcgttccaactacgtgccatgatcaggattgccaaccaccaagatcaggctgccctgggccccatccaacctggccttgaacacctccagggatggacattcacggcttctctgggcaacctgttccagtgtctcaccacccactgagtaaaagatttccacctaacatccaacctaaatctctcatagtttaaagccatccccccttgtcctatcactagtagacataaaaagttggtccccttcctgcttataagctcccttcaagtacygaaaggctacattaaggtctccctggagtcttctttcctccaagctaaacaasctcaactccctcagccttctctcataggagaggtgctccagcccttcaatcatcttcatggccctcctctggacccaccccaactactccactgttctaatgcagcccaagatactgccggccttccaagctgtaagtgcacactacttgatcatgcccagttttttgtgtaccagaaactccaagtctttttcagcttcttctccaaagaagcaatagataccatactgtcatctgttagtaaagc

SEQ ID NO: 46923 - DNA, 600 bp, Chicken  19866894288461_2
ggattgccaaccaccaagatcaggctgccctgggccccatccaacctggccttgaacacctccagggatggacattcacggcttctctgggcaacctgttccagtgtctcaccacccactgagtaaaagatttccacctaacatccaacctaaatctctcatagtttaaagccatccccccttgtcctatcactagtagacataaaaagttggtccccttcctgcttataagctcccttcaagtacygaaaggctacattaaggtctccctggagtcttctttcctccaagctaaacaasctcaactccctcagccttctctcataggagaggtgctccagcccttcaatcatcttcatggccctcctctggacccaccccaactactccactgttctaatgcagcccaagatactgccggccttccaagctgtaagtgcacactacttgatcatgcccagttttttgtgtaccagaaactccaagtctttttcagcttcttctccaaagaagcaatagataccatactgtcatctgttagtaaagctttcaaactgctttgcatagtcccataaattagatggagaaaggaaacggtcc

SEQ ID NO: 46924 - DNA, 600 bp, Chicken  19866894288462_1
tgctatcttcttttctacatttattcttagtattttgttgtgagacgaacgttttaaagactgctgcaagaatacatgtgcagtgaacattgctcattaagtgaacaggtgttagttttctggctttttttcagacatcacctggctttcttaatgacagataaaagactcatcttttacagtgttctttgccaaaacagtcgttacttgatattccttttctgccttttgctgttgttcccctcccacacagacacatatttcctcttcttaatttctcacatctttaagatcttataktaaagaatgtctttttcaaatctttttttctgrcaaaaaaagaaaaattatttatgcaaaccaatacaaaataaaattcttaaaacaacagggaagatactacagtaattctcagtttacactgaaattttctgttattgctctggcatttgccagttgctgaagacttgccctggactcatgtgggaagtcctaatcctgcagttggcttcctgggcatagtgacagtgcttttgttgtactcctgggcactggatacaatctcctatctgcttagttgcaggggaggttagatagata

SEQ ID NO: 46925 - DNA, 600 bp, Chicken  19866894288462_2
tttgttgtgagacgaacgttttaaagactgctgcaagaatacatgtgcagtgaacattgctcattaagtgaacaggtgttagttttctggctttttttcagacatcacctggctttcttaatgacagataaaagactcatcttttacagtgttctttgccaaaacagtcgttacttgatattccttttctgccttttgctgttgttcccctcccacacagacacatatttcctcttcttaatttctcacatctttaagatcttataktaaagaatgtctttttcaaatctttttttctgrcaaaaaaagaaaaattatttatgcaaaccaatacaaaataaaattcttaaaacaacagggaagatactacagtaattctcagtttacactgaaattttctgttattgctctggcatttgccagttgctgaagacttgccctggactcatgtgggaagtcctaatcctgcagttggcttcctgggcatagtgacagtgcttttgttgtactcctgggcactggatacaatctcctatctgcttagttgcaggggaggttagatagatagccagttgtattcccaagaactctttccttagc

SEQ ID NO: 46926 - DNA, 600 bp, Chicken  19866894288472_1
caggagaagtggaaatacgtcatccactgttttgtttataaaagtgcttctgacaaaaaaatcacaggctgctttgctatgacttcatagaaagaaagatttatttaaaaatatgaagtaagaactgcaagagaatttggacaagataaacatgattttcaggctagtgaaaatcaggcacattaatagacagctcctggttactgcatgcagagctgatttgctctcctttgtctcacttgaggcaaattgagcaataaatgataggagccagtggggagcatccttcctccagggctkcagaacccaaactacattggctcagttgtgcacacagcctggattcacactgtggtgagtgcgcagttcaagtgcttgtccagctttatttcttggttgttaatgaagttttcagtttagttatttacttgcaattgcaaaaagtagagattggaagtttactgccaaaactgtttttgaccaaaaccactgatgtgctgagtcacaaatttggaaccactgaaactgtttggaactactgaactcttgccctgcctcatgcagggcagctctggggcctcacacagccagtgaggaatc

SEQ ID NO: 46927 - DNA, 600 bp, Chicken  19866894288472_2
cagtttgtggagttaaagttgttgacttgtgatttgtgctctgctgatggtggcatttttaaattttcacatcctttcaaactgtttattgtaaagatttctccccattgcagtgtttatggtgtcacattttcttactgtttcctcattacttaactttccctttgtatgtcctgtcattatatgtacccagaacaaacaaggtgtggcacagtgtctgtggctaagtatggctcctatgagtgctcaggtaagaagtgcagaaggcaagcagcaccctcacccagcatccccatgtcytactagtaagatgaacagttatctagtttgaacatagagccaaatttaataaagaatttaagtacaaaattacgcatggttgcttaatactgttaggatttatggaatgtcactggttgtgctacaccgtttggaacagctctatcacacacagcagtctgccatctgttcgtgtcttactgtgtagtggttgggtcggggttatgtagatgagtagacccagggtcccaaccctccccaggggcagccccaggcagtgcgggagcagcaccgaccctgctgcagccctcaccatgccac

SEQ ID NO: 46928 - DNA, 599 bp, Chicken  19866894288480_1
  misc_feature (1)..(202): n is any nucleotide
nnnnnnnnnnnnnnnnnnnnnnnnnnnnnnnnnnnnnnnnnnnnnnnnnnnnnnnnnnnnnnnnnnnnnnnnnnnnnnnnnnnnnnnnnnnnnnnnnnnnnnnnnnnnnnnnnnnnnnnnnnnnnnnnnnnnnnnnnnnnnnnnnnnnnnnnnnnnnnnnnnnnnnnnnnnnnnnnnnnnnnnnnnnnnnnnnnnnnnnnnnaaggattcaaacggaaatatgtgatgcatcacccctcagccagctttgaattacagcttgcttcacagggaacaaaacagggaggggtgggaagcgcrtggtgacggaggaccaggcaaggtcagtacgcggtgcccgcagctccctgcttgttccccacactgccgcagcacagcccgcgcttgctcctctccacgtgcctcgtgcgtgagaggcctgcgttcagctttaaaaataacaacagggatgggagaaaggcacggggatgctactggagagccacttctggaggcagcacaatgaatccgaaacgaggggaggacaccgggaaggagtggctccagatgtgtacggcacacagcttctcgcagcccagcagcacggagctgtcgctggc

SEQ ID NO: 46929 - DNA, 600 bp, Chicken  19866894288480_2
cggaggaccaggcaaggtcagtacgcggtgcccgcagctccctgcttgttccccacactgccgcagcacagcccgcgcttgctcctctccacgtgcctcgtgcgtgagaggcctgcgttcagctttaaaaataacaacagggatgggagaaaggcacggggatgctactggagagccacttctggaggcagcacaatgaatccgaaacgaggggaggacaccgggaaggagtggctccagatgtgtacggcacacagcttctcgcagcccagcagcacggagctgtcgctggcaggcagrgagctgcaagtttttatttttcctcttcgaagagccacgtaattgttctgactaataacaacggacctgcaactgctcccgctgtcctcggagggagccaaatcaggtttggcatttgtaattatgtaggctaaaataaaagttatcaaatgtcacgctgggagaatagagggcacgatcccgggcagcgccgcgtgctctgagcctcgttcagcccaacggctgagcaccagttcttgattttggtatttcatttatataccttgaagtcactctgctcgtgtccgaaggaggcaccac

SEQ ID NO: 46930 - DNA, 599 bp, Chicken  19866894288483_1
  misc_feature (1)..(24): n is any nucleotide
nnnnnnnnnnnnnnnnnnnnnnnnttctccttcacaccagctcagctgggggcgctgtgtaactgatgcactgctgtttcctatcctccaaaacagtttgagcattgatcaactctttctgctttcaggctgtggagatcctgaagacagcccgtgaaatcaccatgcgtgtgcgttacttcccttacagtaagtgcctgctagctccaaatctggtcacctagcaccgtttctccttgggcaagactgctctgcatccctgctgatccacctgggcttagcagtgatgagtctgcaatygtaggtgttgtcacacaagcagtgttcagatcagaaaacactggtcttcagtctggggatcagaaaagttactgattcaaaacagcagggattagcttcaactgctcacgcatagaatcttgtagagcaggacttaagaaaacagtgctaaaagctgagatggtttctcatggaagtgtacaagaacctgcttatccttgagtaacacaggaaccagttctgttgctagcggacctatgctgatggtagatagacactgtgttttcagtccatytctataaggatgtttaaatattgcc

SEQ ID NO: 46931 - DNA, 600 bp, Chicken  19866894288483_2
ggcttagcagtgatgagtctgcaatygtaggtgttgtcacacaagcagtgttcagatcagaaaacactggtcttcagtctggggatcagaaaagttactgattcaaaacagcagggattagcttcaactgctcacgcatagaatcttgtagagcaggacttaagaaaacagtgctaaaagctgagatggtttctcatggaagtgtacaagaacctgcttatccttgagtaacacaggaaccagttctgttgctagcggacctatgctgatggtagatagacactgtgttttcagtccatytctataaggatgtttaaatattgccaaggggaaaaacttcttagctattgatttctgaacccataatgtccagagatactcagagggagaaaggaggagtggggaaaggtcaaatgaagccaaacaaggattcttcataaaatagggaactgacccttaaatgtaagtataggaaaataaggagcaagggaagagaggactttaaaacaagcactgaaataacttgaaacaactagctgagatgtgaatgtgctattttaaaaccagctgctatctatgaaggcagcaaacactgcatct

SEQ ID NO: 46932 - DNA, 600 bp, Chicken  19866894288485_1
aatcttcacaagagcaggcattgggatcatggtgcctttgctgcctccagctgaggctgcctgaccattcttgtgcagttgtctctggttgtgttgcttggcagcaggagccaagctatccctgcctgtgctgtcccaggattgacagctttcctcttgatcttgcaaaacctaccagcagttcaaagccactgtgtgttacttcagttgcattttactgcgtcctctattccctcttcttcatgactgctcccagattgcccagcaacagggattgttaccctacacacagcttgtgtrgggtaaagcagtcycaacgggcaaggacaaaacctcatttatgttcttatttttggtttcttgcatatgtaccttgttaggcttgtgcagtctatagaggtgctatgtccacgaggccattttgtttmacactcagcagctgtgctgacctgcagtatccccacctgaacagagacagttagtttaaatgcatggtttgttgcctgagtagaatcatagaatccttagatctattccctttgagaagggacctctgaaggccacctaatccaactccctggcaatgcacagggacaccac

SEQ ID NO: 46933 - DNA, 600 bp, Chicken  19866894288485_2
caggcattgggatcatggtgcctttgctgcctccagctgaggctgcctgaccattcttgtgcagttgtctctggttgtgttgcttggcagcaggagccaagctatccctgcctgtgctgtcccaggattgacagctttcctcttgatcttgcaaaacctaccagcagttcaaagccactgtgtgttacttcagttgcattttactgcgtcctctattccctcttcttcatgactgctcccagattgcccagcaacagggattgttaccctacacacagcttgtgtrgggtaaagcagtcycaacgggcaaggacaaaacctcatttatgttcttatttttggtttcttgcatatgtaccttgttaggcttgtgcagtctatagaggtgctatgtccacgaggccattttgtttmacactcagcagctgtgctgacctgcagtatccccacctgaacagagacagttagtttaaatgcatggtttgttgcctgagtagaatcatagaatccttagatctattccctttgagaagggacctctgaaggccacctaatccaactccctggcaatgcacagggacaccacagctagatcaggtt

SEQ ID NO: 46934 - DNA, 600 bp, Chicken  19866894288485_3
tgctgtcccaggattgacagctttcctcttgatcttgcaaaacctaccagcagttcaaagccactgtgtgttacttcagttgcattttactgcgtcctctattccctcttcttcatgactgctcccagattgcccagcaacagggattgttaccctacacacagcttgtgtrgggtaaagcagtcycaacgggcaaggacaaaacctcatttatgttcttatttttggtttcttgcatatgtaccttgttaggcttgtgcagtctatagaggtgctatgtccacgaggccattttgtttmacactcagcagctgtgctgacctgcagtatccccacctgaacagagacagttagtttaaatgcatggtttgttgcctgagtagaatcatagaatccttagatctattccctttgagaagggacctctgaaggccacctaatccaactccctggcaatgcacagggacaccacagctagatcaggttgcctagggcctgatccagcctcaccttgaaagtctccagggatggggcaccaaccacaacactgggcaacctgttccagtgcctcaccaccctcactggagaagattttttccg

SEQ ID NO: 46935 - DNA, 600 bp, Chicken  19866894288488_1
catcacgcaggaaactgacgtctgcttctttgaaatcacctcagcctctgctctggggaaagagtctgcagaacaagatactcacagatctataaaaagtgaatgcaaaaaaaaaaaccggagcaatttagaatatatatacataatactatagtaatactatatataaatattgctttataacagaagctctccatgcaatagaatcattttctgttattatttgtggagatttttacaaactggtagggaagaaagggctatttaacccatattactcctaaaatcttcccctgcacrttgcaacaggctcaggaggactgtctgtgtcagcactgtcccagaggaacatggatgtttatattttaagcatgaccatttccatgcatcttaactcatgacttctgatgatcttaggtgtaagaagaggcaaaaatcacaagttacagttctgaatatgtacaggtgtaaggtgcatacaaccacaaaattatagaatcaccaaggttgtaaaagacctccaagatcatccagtccaaccgtccacctatcaccagtattttccccctaaaccatgtccctcagtacaacagctaaaca

SEQ ID NO: 46936 - DNA, 599 bp, Chicken  19866894288490_1
  misc_feature (1)..(199): n is any nucleotide
nnnnnnnnnnnnnnnnnnnnnnnnnnnnnnnnnnnnnnnnnnnnnnnnnnnnnnnnnnnnnnnnnnnnnnnnnnnnnnnnnnnnnnnnnnnnnnnnnnnnnnnnnnnnnnnnnnnnnnnnnnnnnnnnnnnnnnnnnnnnnnnnnnnnnnnnnnnnnnnnnnnnnnnnnnnnnnnnnnnnnnnnnnnnnnnnnnnnnnnctgttccttggctgagtagtcctaccagagctggaataagtatttgttaggaactgcagtaactgggtttttaaaagcaagagcttgtaatgagatgtgtwatctgggataccttcctaatcgggctgtgagttcttacaactagaattacctcaatttcatgctatattttttcagggcatgctcagaacatattttttcccctagtctgagaatctcagatcccagtatgctatggcctgaaggctaatgagtgcaggcagttgttgactcaactatgtagctggaagaaggcacgaaatcatataataagttttgtgtacaagtgtggtgttgattggaagagggatggtattggtgactcccaggtcagtgctcagtggtgtagcctgtccctaat

SEQ ID NO: 46937 - DNA, 600 bp, Chicken  19866894288490_2
tcccaggtcagtgctcagtggtgtagcctgtccctaatgatactgttgtccttctgtccttgggttttgatggacaagcactggatggcttgattggggaacgatgtattcatgccacagccactccaggtctgggtgcagctgaggaggttaaccataaatattaatgtagggagcaggaacaaaacagctgggaacatgggggctgtcttagactattgcacaagtttttgctcagttactgagtgcttactctttcctcccagcacctgtggctgcactctttgctactatgatgaygtgttcatacatcctacattcattacataatggccatgatataatgtggttcaggggcattgtcactgatgataaaagagcaggcatgtaagaagtaaagccaggtgtgcaccccatggattgcagtctagctggctctgaggatgggattagctagcagtaccaggtgcatgctgtttctgcaggtcatccagagctcacargttaaggatgtgtaacatttgggaaaggaagaggtgaattaaacatctacacacactcatctgtatggatgtggacaaatatttgctaaagaatcac

SEQ ID NO: 46938 - DNA, 600 bp, Chicken  19866894288490_3
ggctgtcttagactattgcacaagtttttgctcagttactgagtgcttactctttcctcccagcacctgtggctgcactctttgctactatgatgaygtgttcatacatcctacattcattacataatggccatgatataatgtggttcaggggcattgtcactgatgataaaagagcaggcatgtaagaagtaaagccaggtgtgcaccccatggattgcagtctagctggctctgaggatgggattagctagcagtaccaggtgcatgctgtttctgcaggtcatccagagctcacargttaaggatgtgtaacatttgggaaaggaagaggtgaattaaacatctacacacactcatctgtatggatgtggacaaatatttgctaaagaatcacatgccaatgaaatcctcacaccagtatttagaggtacagttaaacctgttgatactttgaaagggaaacatgcacagcaattgctcaaggagaaaacaaagctttgtgtttccagtgtgagcaacaactgctgttaygtgggacacactgctccctgraggcagcgtatctctttccattctcaactccattgagaatttctt

SEQ ID NO: 46939 - DNA, 600 bp, Chicken  19866894288490_4
ctgaggatgggattagctagcagtaccaggtgcatgctgtttctgcaggtcatccagagctcacargttaaggatgtgtaacatttgggaaaggaagaggtgaattaaacatctacacacactcatctgtatggatgtggacaaatatttgctaaagaatcacatgccaatgaaatcctcacaccagtatttagaggtacagttaaacctgttgatactttgaaagggaaacatgcacagcaattgctcaaggagaaaacaaagctttgtgtttccagtgtgagcaacaactgctgttaygtgggacacactgctccctgraggcagcgtatctctttccattctcaactccattgagaatttctttttagcagaaacagtttttttcctctttgtgtgaatgggccgtttcctttagagtatatgtaagatagggaccacaaggtgtcactgcctcaaaagaaaagcatgtgtttctagaggtataagactgaattgcacttggttgctgcactgtggtattttttgagtgtttgtttttcgtccccttggctacatttgctctcttagaagcaccatgttagggttctgctttgtcgt

SEQ ID NO: 46940 - DNA, 600 bp, Chicken  19866894288490_5
agtaccaggtgcatgctgtttctgcaggtcatccagagctcacargttaaggatgtgtaacatttgggaaaggaagaggtgaattaaacatctacacacactcatctgtatggatgtggacaaatatttgctaaagaatcacatgccaatgaaatcctcacaccagtatttagaggtacagttaaacctgttgatactttgaaagggaaacatgcacagcaattgctcaaggagaaaacaaagctttgtgtttccagtgtgagcaacaactgctgttaygtgggacacactgctccctgraggcagcgtatctctttccattctcaactccattgagaatttctttttagcagaaacagtttttttcctctttgtgtgaatgggccgtttcctttagagtatatgtaagatagggaccacaaggtgtcactgcctcaaaagaaaagcatgtgtttctagaggtataagactgaattgcacttggttgctgcactgtggtattttttgagtgtttgtttttcgtccccttggctacatttgctctcttagaagcaccatgttagggttctgctttgtcgtgtagctgcttcctggaagtag

SEQ ID NO: 46941 - DNA, 600 bp, Chicken  19866894288496_1
ggtggcagcagctttagtatggaatcctgctcatttcaatgaggggtttttgaattggctgtttagtggtttctaacgttcatacaactaaatgtatatgtttcttctttaagtaatcccaagtaaatataacacaccgtaagtctataaatatcacgattctttgttaatattcgaagctgaggcttgcattttaagctatgccaaagactagctgcttggagccatggtcttgttttggtctgactctggccataacactaaaagttagatggcctaactgagtgccagcagccctcycttgctttatgatgccagttgagggatttatttaaaacactacatctgagcccttgaaaacgagaaataacacaaaatacattatgtagcaaaatctcatcaacttaaaacaacctcgcttttacgcaacttcttcgctatcttctttccacttgcaatcgtgagcttttctgggacaacattcagaaagatcaagcaaacgtaacttctatctttgtgtttaacttgataagaacgtttgccaagggcaattcggacatcacttccaccatttcttgggtctgtcctagcattcctttc

SEQ ID NO: 46942 - DNA, 600 bp, Chicken  19866894288502_1
tcttgaatgcttccagggatggtgactctaccacctccctgggcagtctgtgttaccagtctttgcattaccagtctttctgagaataaatgtttcctaatatcctatctgaacttccactggtgcaacttaaggccatttcctctcatcctgtcgctgatacctagaagaagaggccaacccccatctcaccacaacctcctttcaggcagttgtagagagagataaggtctcccctgagccccctcttcttcagactgaaccatcccaattccctaagctgctcaccataatacctgyactccagactccacacctttgctgcccayctttggaaatgcagttattagtaataactacataattgtaattagtaataattattcaactttattaattattattactatgaacagttctctagatcctactttttcacatacaattttccagaccttctccaaagggggtcttctgaattgtttcagagacaaatgtcagaggcacattcttaatatttgtggcaaggtttttaagatgaaaatcttacaaatcttctgtgtgtgaagaaccctctggtccaatatttcccctttcaac

SEQ ID NO: 46943 - DNA, 600 bp, Chicken  19866894288502_2
accacctccctgggcagtctgtgttaccagtctttgcattaccagtctttctgagaataaatgtttcctaatatcctatctgaacttccactggtgcaacttaaggccatttcctctcatcctgtcgctgatacctagaagaagaggccaacccccatctcaccacaacctcctttcaggcagttgtagagagagataaggtctcccctgagccccctcttcttcagactgaaccatcccaattccctaagctgctcaccataatacctgyactccagactccacacctttgctgcccayctttggaaatgcagttattagtaataactacataattgtaattagtaataattattcaactttattaattattattactatgaacagttctctagatcctactttttcacatacaattttccagaccttctccaaagggggtcttctgaattgtttcagagacaaatgtcagaggcacattcttaatatttgtggcaaggtttttaagatgaaaatcttacaaatcttctgtgtgtgaagaaccctctggtccaatatttcccctttcaacacaatctgcttcctctcttgcaattttct

SEQ ID NO: 46944 - DNA, 600 bp, Chicken  19866894288504_1
tagtgcttaaagaaaaaagaaccagttctccccccagttatcagaaagacatggttaaaataatattaatctgctcttgcatggggaaatgttaagtacagaattgggaataaaagtttttcatgtaaacgtatataaatatatgagagaaaaaatacattggagagaggaaaggtgtaaaaccaatgatttctggaaatgataatatacaggcactcaggaaccaaagcacagatctacagattgatcaaggtaaacaactcagaggttcataaacgcaggaaattgtttctctacacwcaacactttgaagtaatactagaggaacagtgatgcaaataaggacttcttttctctccatctcatttgacaacacttcctctccatgtgaagaaatgtccagtgtaacaagtgaactgcatctgaaatgttactgaaatattttcatagaaccatagaatcactcaagttggaaaagaccttaaagatcatcgagtccaagcatgacctaaccatactaccctaactaacttatcccccgctaaatcatgttttgctgatgtatataagcttaataaggaagaaatgtagggagtcttg

SEQ ID NO: 46945 - DNA, 600 bp, Chicken  19866894288507_1
ctccggtgaccccaaaaatgtgtaggcatgagtttgtatggctttggaaggagccatgcatcctttttgagctctgcagaaccacagatggactggcctgtagatgccagaagtctatgggtggtgagatgccctctgacatgctctgctttgtcactgcagcgtgccaagatggaagctgccattgctgaagctgaggaacgtggtgagctggctgtcaaagacgccagggcaaagctggaggagctggaggctgctctgcaaaaggcaaagcaggacatggcccgacagctgcgtgartaccaggagctgatgaacgtcaagctggccctggacattgagattgcaacctacaggaagctgctggagggcgaggagagcaggtgggtgctgcctggggatttccatgatgaaggatccaaccctttgtatcgtggtgacatcatgagggcccagttccaatttctggaaggaaacrtggaagagaaatccttacgttttaaactgatctttgcttctttgctttggccatagagccaaactgtcaagctctggggaagagttcgatgaaaacataccaggaaacaagtgctgttttca

SEQ ID NO: 46946 - DNA, 579 bp, Chicken  19866894288507_2
ctgccattgctgaagctgaggaacgtggtgagctggctgtcaaagacgccagggcaaagctggaggagctggaggctgctctgcaaaaggcaaagcaggacatggcccgacagctgcgtgartaccaggagctgatgaacgtcaagctggccctggacattgagattgcaacctacaggaagctgctggagggcgaggagagcaggtgggtgctgcctggggatttccatgatgaaggatccaaccctttgtatcgtggtgacatcatgagggcccagttccaatttctggaaggaaacrtggaagagaaatccttacgttttaaactgatctttgcttctttgctttggccatagagccaaactgtcaagctctggggaagagttcgatgaaaacataccaggaaacaagtgctgttttcatgtggaagatgatttccaagtggttaaatccccatagaattaagccacagttccttgtgctctttcagcacctccccccccaggtgataacagagcttgtaaatgtagggccagaacaaagcactggatggcacacttatcttgtctgaattattta

SEQ ID NO: 46947 - DNA, 599 bp, Chicken  19866894288519_1
  misc_feature (1)..(61): n is any nucleotide
nnnnnnnnnnnnnnnnnnnnnnnnnnnnnnnnnnnnnnnnnnnnnnnnnnnnnnnnnnnnncataggtctatttttagtatgtcatctgtcttcgatcaggatcaaaagcttggattttcatacagacctggagcagccaaggaacactgtgctcttctattacctgtgaagagaccacaatctggtcatttcagatctgtcacctacttaacacttcaaatgttcgaaagaattgggcttatatcttaaagttatatttgactggtcatttaagaacagttacacatacctgcttctcytttttctttagtctcactttatcctacatttcatagcaaaagtgatgggttctaaactagatgcagctctgttcctggttaggttttcttcttatggtaatttaaagttcatttcagagaaargtgtacataggttcatcacttgtcaggagataattttaagtattaaatcatattgatttaagcaagccctttattttatttgcatttccaaatgctttcctgaacacagagaccattctatggagaatacttcactgtttgtttacataactctcctttctactttttttttattt

SEQ ID NO: 46948 - DNA, 600 bp, Chicken  19866894288519_2
cagacctggagcagccaaggaacactgtgctcttctattacctgtgaagagaccacaatctggtcatttcagatctgtcacctacttaacacttcaaatgttcgaaagaattgggcttatatcttaaagttatatttgactggtcatttaagaacagttacacatacctgcttctcytttttctttagtctcactttatcctacatttcatagcaaaagtgatgggttctaaactagatgcagctctgttcctggttaggttttcttcttatggtaatttaaagttcatttcagagaaargtgtacataggttcatcacttgtcaggagataattttaagtattaaatcatattgatttaagcaagccctttattttatttgcatttccaaatgctttcctgaacacagagaccattctatggagaatacttcactgtttgtttacataactctcctttctactttttttttatttttttcttcagaaacttattatctactccaagattaaaagcattctaaaacatataagctgcaagaaatggctatcttgttgattttcaggaagtctacaatactccatctaatgtattcaatga

SEQ ID NO: 46949 - DNA, 600 bp, Chicken  19866894288521_1
gttagtatctctcccccaaaaatctacatcatctttgctcctgcaactcaggacttcctctgagattccatatcaaagtatttgcacagtgagcgtctgtccactcctagcttagaggagcaatagctacaatggacagggtgctgctacgacctacagttaatatggaaacaaaatatagagagccaaaatttatattaaatagaacaacgccacccggataagtggagcttgtacctctatattattgtgagttcttatgctctccattgggcttaaatttataataaattattagtrcgtgtataattttacagatacatatatactgctacatatacawgtgtatttttatacatacaaacataaaggrctctgattaaatctttatgttctctgtaccaaggaaagatcagattcggtattctctatggatgttactgagatttgaaaattctattcttggaaaagtaattgttcatagatttatagtgagataaactttttagttatagtgtaatatggatgttctacacacaaaacacacatgcaatcacataaacactcagtgttttaggaaggttattttcattagctcat

SEQ ID NO: 46950 - DNA, 600 bp, Chicken  19866894288521_2
caactcaggacttcctctgagattccatatcaaagtatttgcacagtgagcgtctgtccactcctagcttagaggagcaatagctacaatggacagggtgctgctacgacctacagttaatatggaaacaaaatatagagagccaaaatttatattaaatagaacaacgccacccggataagtggagcttgtacctctatattattgtgagttcttatgctctccattgggcttaaatttataataaattattagtrcgtgtataattttacagatacatatatactgctacatatacawgtgtatttttatacatacaaacataaaggrctctgattaaatctttatgttctctgtaccaaggaaagatcagattcggtattctctatggatgttactgagatttgaaaattctattcttggaaaagtaattgttcatagatttatagtgagataaactttttagttatagtgtaatatggatgttctacacacaaaacacacatgcaatcacataaacactcagtgttttaggaaggttattttcattagctcattctgaagagaaatatttagtgaaatgtttgatcttacagttca

SEQ ID NO: 46951 - DNA, 600 bp, Chicken  19866894288521_3
caaagtatttgcacagtgagcgtctgtccactcctagcttagaggagcaatagctacaatggacagggtgctgctacgacctacagttaatatggaaacaaaatatagagagccaaaatttatattaaatagaacaacgccacccggataagtggagcttgtacctctatattattgtgagttcttatgctctccattgggcttaaatttataataaattattagtrcgtgtataattttacagatacatatatactgctacatatacawgtgtatttttatacatacaaacataaaggrctctgattaaatctttatgttctctgtaccaaggaaagatcagattcggtattctctatggatgttactgagatttgaaaattctattcttggaaaagtaattgttcatagatttatagtgagataaactttttagttatagtgtaatatggatgttctacacacaaaacacacatgcaatcacataaacactcagtgttttaggaaggttattttcattagctcattctgaagagaaatatttagtgaaatgtttgatcttacagttcaaaaaagtatcaagcattccttttagaatga

SEQ ID NO: 46952 - DNA, 600 bp, Chicken  19866894288522_1
aggcaccagcaccatcacaacaagcatagtccgcttgcacacccggtgctttaaacagctccaaaccacagcccttgcgactcaccttgtccccgtggggatagttcttcagttcaaccaggacctgagggatctgaaagacatggggcatgcggacacgactgagagacagacccagtgctcccagcagcacaggcagcaggagctcgagcaaaacccgcctgcaaggagcagctgctctgccagcccagcagaaggatttctggagcagcctttgcaccctggggactgtcctcccarctcccctctgcagagcccttccaacatcacaaggagcagcagggcayggccaggcaggggactacggctgcagagcccagcataggccagagcacatcaggcctgaaattacacataaatcccttttgtctggcacaaagacaagaagcaaggcagactgctgcggggctgcccaccactgagctgtgggagcgccagcccagagactgctttggcatccttcaaaggccacaatttcccccacaacttcctaggaaaacaaaacaaagtggggctgggctgaaaagatgccccagacag

SEQ ID NO: 46953 - DNA, 600 bp, Chicken  19866894288522_2
gctttaaacagctccaaaccacagcccttgcgactcaccttgtccccgtggggatagttcttcagttcaaccaggacctgagggatctgaaagacatggggcatgcggacacgactgagagacagacccagtgctcccagcagcacaggcagcaggagctcgagcaaaacccgcctgcaaggagcagctgctctgccagcccagcagaaggatttctggagcagcctttgcaccctggggactgtcctcccarctcccctctgcagagcccttccaacatcacaaggagcagcagggcayggccaggcaggggactacggctgcagagcccagcataggccagagcacatcaggcctgaaattacacataaatcccttttgtctggcacaaagacaagaagcaaggcagactgctgcggggctgcccaccactgagctgtgggagcgccagcccagagactgctttggcatccttcaaaggccacaatttcccccacaacttcctaggaaaacaaaacaaagtggggctgggctgaaaagatgccccagacagcaaagtgtgttgcaggagggctgcctgtgggctcagccatcttgcat

SEQ ID NO: 46954 - DNA, 599 bp, Chicken  19866894288525_1
  misc_feature (1)..(59): n is any nucleotide
nnnnnnnnnnnnnnnnnnnnnnnnnnnnnnnnnnnnnnnnnnnnnnnnnnnnnnnnnnnaaggctggcgagcggtgattgaagcagaactgaatgaaatatatactatgaagaggacaaaaattgaatgtttttgagcctgaattcctaaataaataaggtttatgcaatcctgtttgtcctaggtgaggatgcctgcgataggatattccctccacacagcccacaccagagtttgatcctgctgacctattgtcaatggcttctggtagaggcggaagcaactgactccttccatttkggatggaaacagatgtcaatgtctcatgggtggaaagtttcataaattcactctttgttaggtatcaggctatcatcaaaagaggacatgggcttctgaaaaccacacccacatgttctgcagcccacagaaactcctctccacaatcaatctacactgactcttgccagtctgacaaaatctctgtgtatatttcagtgtatttgtcagcttaaaaaaatgaaccctatgcattagggttgatgagccggttgcctggaaagaggtccctgtgagcagtcatagagtccaattcagtc

SEQ ID NO: 46955 - DNA, 600 bp, Chicken  19866894288526_1
aagtggaagaatgcaggaattaataggaacagtgaaagtacatacttaaaaataggggatttttcctattaaaaacatgcctgtaatacatccagtagacaatacttaagaattttgttaccacgtgtaattttaaatgctcttcaggagtagaaaaggaacttatctacgtgtagtggaaatgctgagtcatggcctgaagcagtgattgagcacctggtggaaggcagggccaaccaaggggggcacagctgcacgcaatgcacctgagtgactggaagggatggagtcaggatccgrcccttcacagacctcatttaagggctggcrggggaggtgaggggaggctgtgggagatccctgtgtacctgtggtgttatgaaggtaagtggtttctttcttttgtttctgagtccatagctgttgtatttgggcaagtcctttgtggctgtagcctgggattttgctactctattattgatgtgctttctgatgtgttacagtattacactaagctacttcaatgataagataaaaaagcctttgcctgtgtgagcattgctctttgtaaccgaattgctgtttgcgtttgagttgtgc

SEQ ID NO: 46956 - DNA, 600 bp, Chicken  19866894288526_2
agtgaaagtacatacttaaaaataggggatttttcctattaaaaacatgcctgtaatacatccagtagacaatacttaagaattttgttaccacgtgtaattttaaatgctcttcaggagtagaaaaggaacttatctacgtgtagtggaaatgctgagtcatggcctgaagcagtgattgagcacctggtggaaggcagggccaaccaaggggggcacagctgcacgcaatgcacctgagtgactggaagggatggagtcaggatccgrcccttcacagacctcatttaagggctggcrggggaggtgaggggaggctgtgggagatccctgtgtacctgtggtgttatgaaggtaagtggtttctttcttttgtttctgagtccatagctgttgtatttgggcaagtcctttgtggctgtagcctgggattttgctactctattattgatgtgctttctgatgtgttacagtattacactaagctacttcaatgataagataaaaaagcctttgcctgtgtgagcattgctctttgtaaccgaattgctgtttgcgtttgagttgtgcacacaaatgagtgaacttctatttagagca

SEQ ID NO: 46957 - DNA, 600 bp, Chicken  19866894288531_1
ccgacagcagtcacgctgtgtgttattcaagagtgccctctaacgaagctgcagccacgcttcacaacacgtacacagactacaaaaaccccaaatgacactttccagaaatttctcattaaactccaagctttgttttccattgaacaaaagggaaaaacagatgatacacagtgactggtgactgctcctgcacagacgctttatattcccttctgttatgaaagtcttcattggtaaatatatcagtaggcaacaggacaaaagagaaaaacggaaaaattcagagttctcactttytgagaaaggaatctgaatgagatgtgataccagggcacttaaccaagtacaacttaaagataaactgagttctacacaatctactttatctgtaaggaactgctggggtagcttttcaacacggggtacagttaaattaacctttacaaaaataacaatatcatgaagttcacaaatcaaaattgaatcctcaaatccactccttaatacactgcagtatcataaaacattgcttttctgaagggatgtcttcattttaagagcagccatgtaaatacaagggatgaaataatttcctac

SEQ ID NO: 46958 - DNA, 600 bp, Chicken  19866894288533_1
tccccttggtcaatccatgttgatcactcctgataatcttctcttctaattgcctggaaagaatatccagaacaagtttttctaccacctttccagatacagaagtcagactgactggcctgtagtttcccaaatcctctttcttgccctttttgaagactgaagtgacattagctattctccaaacttcagacacctctcccattcaccaagattcatcacaaagatgacagagagcagttcagcaatcaccgctgccagttccttcagcagacatggattcatcccatcagggcccayggatttgtgtcattgaatttagctagacgctctctgaccagatcctctgcaaccaaaaggaagtcttcctttccctagactctctctcttacctccagggtctgggatttctgagcactgaagacttcagcaaggaaggcattcagcatctcctattaccagggcacctacctcatttagttagggacaaacattttccctagttttccttttactgttgacatacttaaaaagaaaagttttttaatattttatctcctttacaagatttaatcccatgagggccttaggcttccttct

SEQ ID NO: 46959 - DNA, 600 bp, Chicken  19866894288537_1
ttgccttgtaaatattaacaaacccttgccgacctctgctatgggatcttttgttatgttaaaatgctttaagagttgtgaagcatcttccatgggcctagcagtacaattgtcaaagctggagaaattcaggcacaaagagtgttctgttcattgttgctcagagggtcaaccagatgcctgacctgccttccagtctctccttttacctggtacacattgttcatgattcaaagagtgcccgcagccaactgagcatggaaaaatgacacaagtgggtttgtggtgatatcactgagracggatcatgatctgtgaactcgactggtcctcctcctccccttcccagaaattcgcagaaaactggagatggaaaaaaacattcctcttgttattaatggaagtctaacttgtgcactgtccctggagacaggcgtggacacatatgcacaccagcccctctgcaaaagagaccttgtgctgggtaacactgatgttagcacggtgatgacttagcaccttgccctgaaatcacatgtgaagccctggctggcaggaaggggcttattaatgtggagtccctgagtcttgggaatgcag

SEQ ID NO: 46960 - DNA, 600 bp, Chicken  19866894288553_1
gctataagactttgctgtggagtagtcagaagaaccatcagagttccccggggaaagcaaacccccatagaggagaaccttctttccatggccaggagggacagcggcactaaacctttctcctttctgctgatgaagggaaatgagggtgggtacatcttgggataccattgcaccagaatggcttctatcagcatgggggttttaactggtgagatataggcaacaccccaaagtacagagcctgcaaagtgcagaatgtatctggaatatgcagctggtctcctagcagagatgctkcaaagaagcagagaggctgaaagggacggaagaagagacagatcatcccttcggagctcaaaaactgcatgactcaaatgagacatgccaaaaatcaaggtaagttacaacctgcaaataaaatatagtttaaaaaagaacagaaacaatcttaggtcacacaggcaaaacaaaacaaaaaaaaaatgaaaacaagaagaagcatggagctactatactgggaggagaaggatgaaataaaagatagatgtagttatagccaaaaacgaaatgagtactttgcttcagttttcaataaag

SEQ ID NO: 46961 - DNA, 522 bp, Chicken  19866894288553_2
acggaatggcaaacgtgcttatcccaggcaacatttttccactagaaatgggccaacatgggttccatgtccctggtcaggtgcagtcacatccaggaggacatcctaccacccctgctggaggaccaggaatgaaggggaaaggctcagaaggggccatatggcctgagaggaagggcttggcaggaaataggaaaaatcaacagccaatcaatcagtatcttggcaggataggaaaaatcaacagccaagggaggcagtgagagaagggaacaaatagggaggagaaacaatgctgcytatgctaaaggactaactcagaacaagaacaaacagaacgtgctgactgtggaaagcatttaggaggctgtatgatttctaatgggagagttgtaacaatctgaaagagtccagaagtttaggggaaggaggacactgaagctagacttgagtaagagatggacgtactcctgatgggcctctcctcatcgcccagtcctgyagtttgggaaggggatgtgg

SEQ ID NO: 46962 - DNA, 320 bp, Chicken  19866894288553_3
acagccaatcaatcagtatcttggcaggataggaaaaatcaacagccaagggaggcagtgagagaagggaacaaatagggaggagaaacaatgctgcytatgctaaaggactaactcagaacaagaacaaacagaacgtgctgactgtggaaagcatttaggaggctgtatgatttctaatgggagagttgtaacaatctgaaagagtccagaagtttaggggaaggaggacactgaagctagacttgagtaagagatggacgtactcctgatgggcctctcctcatcgcccagtcctgyagtttgggaaggggatgtgg

SEQ ID NO: 46963 - DNA, 600 bp, Chicken  19866894288557_1
gcatcacagttgccgtattcccagcaacagggatatcacctgggcttggaaatctgctgcttaggtctcatccaatgtgcaacattcagcattcggagagctgacaactaacagcaatagccctacgaaaagaaaatgttattgaatcacatcatgggtcttgctaaaaacgctgtgaagccatgggaaacgctcagaagggttttatgttatttcttccataacaagctcagctctagtctatcctctactggaagctactctatttttttgtagtcaaaagacattccgagaaagcaygagccgtcacggcttcatatggtaaccttcttccagcacaaactaattaatgttgtgtgacctctaccccgaagcattttttctttcttttcccaggcagacagccccaaaacagccccaggaagaactaaatgaagtctctgagaaacaaggagattagaaaaggattaccccccttccgccatagttaacagctgactgacaaaaagtagaactacactgctgttttacagtagcaaagaacaaggagggaagccagcctggcttagatgygtcagcctgggctgatgmctggccaga

SEQ ID NO: 46964 - DNA, 600 bp, Chicken  19866894288557_2
tagtcaaaagacattccgagaaagcaygagccgtcacggcttcatatggtaaccttcttccagcacaaactaattaatgttgtgtgacctctaccccgaagcattttttctttcttttcccaggcagacagccccaaaacagccccaggaagaactaaatgaagtctctgagaaacaaggagattagaaaaggattaccccccttccgccatagttaacagctgactgacaaaaagtagaactacactgctgttttacagtagcaaagaacaaggagggaagccagcctggcttagatgygtcagcctgggctgatgmctggccagagcaagaaggaaaacagtgagaacccaatgaacaagcaaagtgatttttcctaaatatccttgcaggtgaagaggtaagcccacatcctgagatctcagtttagaaatggagaagagaggaaattcctagcaaaataacttcatygagacgtgcagccaatgcaacgggctgtgatgtcctgaaaggcgagcagtccagtggcaaaggcacatcrcttccttctggatggctgctatctcctccagccacgaatccacgaccactatagrcttt

SEQ ID NO: 46965 - DNA, 600 bp, Chicken  19866894288557_3
agaaagcaygagccgtcacggcttcatatggtaaccttcttccagcacaaactaattaatgttgtgtgacctctaccccgaagcattttttctttcttttcccaggcagacagccccaaaacagccccaggaagaactaaatgaagtctctgagaaacaaggagattagaaaaggattaccccccttccgccatagttaacagctgactgacaaaaagtagaactacactgctgttttacagtagcaaagaacaaggagggaagccagcctggcttagatgygtcagcctgggctgatgmctggccagagcaagaaggaaaacagtgagaacccaatgaacaagcaaagtgatttttcctaaatatccttgcaggtgaagaggtaagcccacatcctgagatctcagtttagaaatggagaagagaggaaattcctagcaaaataacttcatygagacgtgcagccaatgcaacgggctgtgatgtcctgaaaggcgagcagtccagtggcaaaggcacatcrcttccttctggatggctgctatctcctccagccacgaatccacgaccactatagrctttttatgcatccactcagca

SEQ ID NO: 46966 - DNA, 600 bp, Chicken  19866894288557_4
gaaacaaggagattagaaaaggattaccccccttccgccatagttaacagctgactgacaaaaagtagaactacactgctgttttacagtagcaaagaacaaggagggaagccagcctggcttagatgygtcagcctgggctgatgmctggccagagcaagaaggaaaacagtgagaacccaatgaacaagcaaagtgatttttcctaaatatccttgcaggtgaagaggtaagcccacatcctgagatctcagtttagaaatggagaagagaggaaattcctagcaaaataacttcatygagacgtgcagccaatgcaacgggctgtgatgtcctgaaaggcgagcagtccagtggcaaaggcacatcrcttccttctggatggctgctatctcctccagccacgaatccacgaccactatagrctttttatgcatccactcagcaggtctttaacagcagaggtttattccatgtgagttctgtgaaatccttctctcagtacgtttgtggggaagctgacagagcaggactggaagcaccatgcctttggagaacgtcatgctcaacattctaagcatgcacaggaagaagcagaga

SEQ ID NO: 46967 - DNA, 600 bp, Chicken  19866894288557_5
ctacactgctgttttacagtagcaaagaacaaggagggaagccagcctggcttagatgygtcagcctgggctgatgmctggccagagcaagaaggaaaacagtgagaacccaatgaacaagcaaagtgatttttcctaaatatccttgcaggtgaagaggtaagcccacatcctgagatctcagtttagaaatggagaagagaggaaattcctagcaaaataacttcatygagacgtgcagccaatgcaacgggctgtgatgtcctgaaaggcgagcagtccagtggcaaaggcacatcrcttccttctggatggctgctatctcctccagccacgaatccacgaccactatagrctttttatgcatccactcagcaggtctttaacagcagaggtttattccatgtgagttctgtgaaatccttctctcagtacgtttgtggggaagctgacagagcaggactggaagcaccatgcctttggagaacgtcatgctcaacattctaagcatgcacaggaagaagcagagaagactctgactgaactgcttgctaccattgagaaaaccagcagtgtgaggagcagcaatcctcaaatgct

SEQ ID NO: 46968 - DNA, 600 bp, Chicken  19866894288557_6
atgygtcagcctgggctgatgmctggccagagcaagaaggaaaacagtgagaacccaatgaacaagcaaagtgatttttcctaaatatccttgcaggtgaagaggtaagcccacatcctgagatctcagtttagaaatggagaagagaggaaattcctagcaaaataacttcatygagacgtgcagccaatgcaacgggctgtgatgtcctgaaaggcgagcagtccagtggcaaaggcacatcrcttccttctggatggctgctatctcctccagccacgaatccacgaccactatagrctttttatgcatccactcagcaggtctttaacagcagaggtttattccatgtgagttctgtgaaatccttctctcagtacgtttgtggggaagctgacagagcaggactggaagcaccatgcctttggagaacgtcatgctcaacattctaagcatgcacaggaagaagcagagaagactctgactgaactgcttgctaccattgagaaaaccagcagtgtgaggagcagcaatcctcaaatgctttctggaatcaggtccagcctcttcattggaaaggaaatacagaaagtggaagat

SEQ ID NO: 46969 - DNA, 600 bp, Chicken  19866894288561_1
atgttttgattattattcctattaatatgcacatgatagaagttaatgccatactgacagatttaatgctttgtaaatgtgctgaattgaagtagaaaggtaaaagcagccattaccctaagacctaaaagagagacactaatcagctggcttttttcctcatatccttttcacagatggaatacaagttttatttaaaatgcaaagctacaaaaagattagccacaggaaaaagaaaaggtcttgacccttatatattgattccattctattgattacgagagttggggatggagagaytttttaaaatgtaatcctaaaaagaaaatgtaggtaaagatcaggcttagcttttttatttacaggactgtgtagttgcagaatagaagacaaagygggggagaaccgagcacacatggacaccagagctgataccagacctcatagactcagctgtcagaagccttctcctttcctggcaggagtgctcatgctgtcagtggaagctgtgatatccagcaagggcaggttttacatgtgttggtagattgcctgctgtggacgaaggggcacattgctgaagtgtcctttttctctagc

SEQ ID NO: 46970 - DNA, 600 bp, Chicken  19866894288561_2
aaggtaaaagcagccattaccctaagacctaaaagagagacactaatcagctggcttttttcctcatatccttttcacagatggaatacaagttttatttaaaatgcaaagctacaaaaagattagccacaggaaaaagaaaaggtcttgacccttatatattgattccattctattgattacgagagttggggatggagagaytttttaaaatgtaatcctaaaaagaaaatgtaggtaaagatcaggcttagcttttttatttacaggactgtgtagttgcagaatagaagacaaagygggggagaaccgagcacacatggacaccagagctgataccagacctcatagactcagctgtcagaagccttctcctttcctggcaggagtgctcatgctgtcagtggaagctgtgatatccagcaagggcaggttttacatgtgttggtagattgcctgctgtggacgaaggggcacattgctgaagtgtcctttttctctagccatgctgaatggtatagcaaggggagagcttccagtcaccgacaactgtggagagaaggcaacaagtctataacctcacactttgaactaagcttt

SEQ ID NO: 46971 - DNA, 600 bp, Chicken  19866894288568_1
ccatgagtgtaaatccagagttgacttcacgtccataggtgtcttaatctcttattgctaatttggagtttaagtgtagccaacctcttgtgcatttccaaagccctctgtgcaccccaacagctgttatggatgatgatccatgtgcctcctgctttctcccccaagcagggcaccctcccagagctggtcccaccatccctcccatctccatcccctcattccaatcactgcacattacccccctggctgcatggggtgaaggatcaatgcgtgcacatgggataggagctggcagayggaaacartcaccacagtggtcrgatgcaacacacaggagatgaggcgtagaaatactcctcaggtttacccacagcaccgggaaaacagacatacagtaaggcagactgtgcttggygttatcttggcagtgtgctgggttctggcagcgtgtgcttgggctgtcagctctgggagatgagggcttgttttgtgtttgcacagtgccggggccygtaactggggctgcaaggaatgcaaacaacccacagctcaggaaggcaccagtgtgctgcagtgagtggtctcagcctcttactg

SEQ ID NO: 46972 - DNA, 600 bp, Chicken  19866894288568_2
gtaaatccagagttgacttcacgtccataggtgtcttaatctcttattgctaatttggagtttaagtgtagccaacctcttgtgcatttccaaagccctctgtgcaccccaacagctgttatggatgatgatccatgtgcctcctgctttctcccccaagcagggcaccctcccagagctggtcccaccatccctcccatctccatcccctcattccaatcactgcacattacccccctggctgcatggggtgaaggatcaatgcgtgcacatgggataggagctggcagayggaaacartcaccacagtggtcrgatgcaacacacaggagatgaggcgtagaaatactcctcaggtttacccacagcaccgggaaaacagacatacagtaaggcagactgtgcttggygttatcttggcagtgtgctgggttctggcagcgtgtgcttgggctgtcagctctgggagatgagggcttgttttgtgtttgcacagtgccggggccygtaactggggctgcaaggaatgcaaacaacccacagctcaggaaggcaccagtgtgctgcagtgagtggtctcagcctcttactgagctcctg

SEQ ID NO: 46973 - DNA, 600 bp, Chicken  19866894288568_3
acttcacgtccataggtgtcttaatctcttattgctaatttggagtttaagtgtagccaacctcttgtgcatttccaaagccctctgtgcaccccaacagctgttatggatgatgatccatgtgcctcctgctttctcccccaagcagggcaccctcccagagctggtcccaccatccctcccatctccatcccctcattccaatcactgcacattacccccctggctgcatggggtgaaggatcaatgcgtgcacatgggataggagctggcagayggaaacartcaccacagtggtcrgatgcaacacacaggagatgaggcgtagaaatactcctcaggtttacccacagcaccgggaaaacagacatacagtaaggcagactgtgcttggygttatcttggcagtgtgctgggttctggcagcgtgtgcttgggctgtcagctctgggagatgagggcttgttttgtgtttgcacagtgccggggccygtaactggggctgcaaggaatgcaaacaacccacagctcaggaaggcaccagtgtgctgcagtgagtggtctcagcctcttactgagctcctggagcccaggctgagg

SEQ ID NO: 46974 - DNA, 600 bp, Chicken  19866894288568_4
aacagctgttatggatgatgatccatgtgcctcctgctttctcccccaagcagggcaccctcccagagctggtcccaccatccctcccatctccatcccctcattccaatcactgcacattacccccctggctgcatggggtgaaggatcaatgcgtgcacatgggataggagctggcagayggaaacartcaccacagtggtcrgatgcaacacacaggagatgaggcgtagaaatactcctcaggtttacccacagcaccgggaaaacagacatacagtaaggcagactgtgcttggygttatcttggcagtgtgctgggttctggcagcgtgtgcttgggctgtcagctctgggagatgagggcttgttttgtgtttgcacagtgccggggccygtaactggggctgcaaggaatgcaaacaacccacagctcaggaaggcaccagtgtgctgcagtgagtggtctcagcctcttactgagctcctggagcccaggctgaggtcagtgcaggtatgcttgcctcacgtcccaagtgtcacaagctgttaccccagtacctggagtgcttttctccaaagaaaggcatgctctgattc

SEQ ID NO: 46975 - DNA, 600 bp, Chicken  19866894288568_5
ccctcattccaatcactgcacattacccccctggctgcatggggtgaaggatcaatgcgtgcacatgggataggagctggcagayggaaacartcaccacagtggtcrgatgcaacacacaggagatgaggcgtagaaatactcctcaggtttacccacagcaccgggaaaacagacatacagtaaggcagactgtgcttggygttatcttggcagtgtgctgggttctggcagcgtgtgcttgggctgtcagctctgggagatgagggcttgttttgtgtttgcacagtgccggggccygtaactggggctgcaaggaatgcaaacaacccacagctcaggaaggcaccagtgtgctgcagtgagtggtctcagcctcttactgagctcctggagcccaggctgaggtcagtgcaggtatgcttgcctcacgtcccaagtgtcacaagctgttaccccagtacctggagtgcttttctccaaagaaaggcatgctctgattcctgtgatttcaatttatttgctaattgctgatgaaaaagctgagagctggcttggccacgctgctctgcagagcatccctgcaacctgcctggggag

SEQ ID NO: 46976 - DNA, 599 bp, Chicken  19866894288572_1
  misc_feature (1)..(102): n is any nucleotide
nnnnnnnnnnnnnnnnnnnnnnnnnnnnnnnnnnnnnnnnnnnnnnnnnnnnnnnnnnnnnnnnnnnnnnnnnnnnnnnnnnnnnnnnnnnnnnnnnnnnnnacctctctgcatgaactggatctaaaacttgtagaagacttgatttcctccatgggagcaatgtggacactttgcttgatataaactgttttttctaatggttttcagtgacccattcatagggagaaaaattggcagatgccctgaattctatgtaaaggctgtgcaagaaaaccttgatatctttaagacaggacwtgaactgttgtgatgggcacagaatgaatgagatgctgatgtcagagactagttaattaaaatgttggggtctctctcttcaagccttctcatcattgtttctatgtaccatctagcaatctgtgacccttctgtacaaaaacgcccactatgctctcaaagtcatcttcaagacaaattgaaagctctgctcagtcatctcaataatgcagaagagaggggaggatatgtatatggtacaagagatgatggcaaattattactctgtgttgccatgttacatctgagtccacatggat

SEQ ID NO: 46977 - DNA, 600 bp, Chicken  19866894288574_1
caaacttcattctgaggggaacaaagggaaagtgattcaagaccatgttctgcattatttgctcactcaccgtttatggaaatgatacacttcacagcaacatagttctgcgtattttgcaaatgtggatccagtcctgtgtttctgccacgccaagcacctctcttcacagtgcagaagtttggaatttgccaggaatgggagggcaaacagtcatataagtgctctcttgacatgaattacagctgagataaggccagaggtttacaacagtagtatcatttagattgtagccagtamactgcagtctttatctttttgctgcccaggcttccaggacttgsctgatgttctgcttcctgccatgtttcccaagtgctacatcaactctcacagtcactgagcagacagggccacatcttcttacactctgcctctcagcctgggacactggtatctttgtcatgtgagcaggccctatccacatccctagtgctgcttcccatattccttacactttcatttatttaaaaaataaaacacataaaagacagaatgtccatttcagacatcacgcaatgcaatcactgtcaaatagtg

SEQ ID NO: 46978 - DNA, 600 bp, Chicken  19866894288574_2
atgttctgcattatttgctcactcaccgtttatggaaatgatacacttcacagcaacatagttctgcgtattttgcaaatgtggatccagtcctgtgtttctgccacgccaagcacctctcttcacagtgcagaagtttggaatttgccaggaatgggagggcaaacagtcatataagtgctctcttgacatgaattacagctgagataaggccagaggtttacaacagtagtatcatttagattgtagccagtamactgcagtctttatctttttgctgcccaggcttccaggacttgsctgatgttctgcttcctgccatgtttcccaagtgctacatcaactctcacagtcactgagcagacagggccacatcttcttacactctgcctctcagcctgggacactggtatctttgtcatgtgagcaggccctatccacatccctagtgctgcttcccatattccttacactttcatttatttaaaaaataaaacacataaaagacagaatgtccatttcagacatcacgcaatgcaatcactgtcaaatagtgtgccctacaagagctatatatggatttctttaggaatcagcagc

SEQ ID NO: 46979 - DNA, 600 bp, Chicken  19866894288576_1
tttgcaagaaagcatgctgtgcagttagtgctgaaatagtaattctggaaatgcagaggcctccttttgcctgcagagcacagattgtaggctgcagtgcaatgtaaggttcatgacggaggcggcagtccaagggatgtcacaagggatgtgcttcatcagtggaatcttgagagtgtttgagaaaatggctgaatggaggatgcattcaggagtaatgcattcaggatgcattactgagctcagcagtaattgcgtgttcacgcacccatcgtgagccaaaaactggatcagaaactyagggctgagttcaaagggtgttaaaataagaagttatctgaagcattttgatgtgatatccaaaggatttactcaggtcagagcaacctgagggactcacttgaaagtgaacctgcttggaagctttccttcatcgtggaaaaagcaatgctgttcccacaggcagtgtgatattcagctcacacagtctttataatacataggacaggaaaagagggtgataggataaaggttgggaaataatattctatcccatgtacgcccactaaggtcctatacataaacaaacgtgctcacatg

SEQ ID NO: 46980 - DNA, 600 bp, Chicken  19866894288578_1
gatttctttgctcaaaagaggtttgtaattaaaaagctttgtcgtggtctctagtagctttaaatttaagatgtttgttccatgttgctcggttgctgtacagctgcagcagtaaattaatgttagagcagaacagacatctgctgtgcttgtgtatcacctacacaagctacaggtgacttgaaagagggagggcagtgctacattttagatgctggcggagacagtttgtcataccgacattgctaatgcatttgatttcaatctgaaagcagtttacacacgtcctgactaacagtrtctgggtttcttttggttttctatacataatctataggtatcaatgaaaagcaggaaagtctcatttgttttttgttaggtgaatttttgagcccyagggttaaaagggaaacttgttcctggtagattgatgtcacaaagtcatgccacatttgtccacactttttctttctcaatgtcctccatcaaaattggccttttttattttgtatttatgsgttctgaactttcctttgcgttctcagaattaaaggtcttataaagtactgtcattgcacaaccacagattctatgttcagt

SEQ ID NO: 46981 - DNA, 600 bp, Chicken  19866894288578_2
tgtacagctgcagcagtaaattaatgttagagcagaacagacatctgctgtgcttgtgtatcacctacacaagctacaggtgacttgaaagagggagggcagtgctacattttagatgctggcggagacagtttgtcataccgacattgctaatgcatttgatttcaatctgaaagcagtttacacacgtcctgactaacagtrtctgggtttcttttggttttctatacataatctataggtatcaatgaaaagcaggaaagtctcatttgttttttgttaggtgaatttttgagcccyagggttaaaagggaaacttgttcctggtagattgatgtcacaaagtcatgccacatttgtccacactttttctttctcaatgtcctccatcaaaattggccttttttattttgtatttatgsgttctgaactttcctttgcgttctcagaattaaaggtcttataaagtactgtcattgcacaaccacagattctatgttcagtattgtgttattacttgctaatgaaaattcgttcttatccttattttcccaaatcttccccagcgctcacatttgatcagtaaatatatttgtatct

SEQ ID NO: 46982 - DNA, 600 bp, Chicken  19866894288578_3
cggagacagtttgtcataccgacattgctaatgcatttgatttcaatctgaaagcagtttacacacgtcctgactaacagtrtctgggtttcttttggttttctatacataatctataggtatcaatgaaaagcaggaaagtctcatttgttttttgttaggtgaatttttgagcccyagggttaaaagggaaacttgttcctggtagattgatgtcacaaagtcatgccacatttgtccacactttttctttctcaatgtcctccatcaaaattggccttttttattttgtatttatgsgttctgaactttcctttgcgttctcagaattaaaggtcttataaagtactgtcattgcacaaccacagattctatgttcagtattgtgttattacttgctaatgaaaattcgttcttatccttattttcccaaatcttccccagcgctcacatttgatcagtaaatatatttgtatcttcacgtatctgaatacttgtagtattcttatttttaagttgcatctctgtggcaaagaaaatacagttgaaagtcagcaaatctaacagaagaaatctgtccactactggaactgaatttct

SEQ ID NO: 46983 - DNA, 600 bp, Chicken  19866894288578_4
aaatacagttgaaagtcagcaaatctaacagaagaaatctgtccactactggaactgaatttctgcttgttcaaaatacatagggaaacacttgcagaactttgaggaagtcttttttgtggtttaatagctgaaacataactattgagggcagtataacctttaggcatatgtacagagtcactgatatggtctcagttcctcccgtccttgcctttgtcattcagcaggtgtgactgtgcgatgtgtttgttggttttggcaggagcagttctgtggagtttccggtatacatgtttyctaatgcagtgtaagtttgttcttgttgatttaatactatcaaaactattgtaggctgttgactgctgccttattgttggcatgtgccaacactgtaacgtatcctgctcagagattagtaatgctgaaacaacagtctaatgaaaagagagagggccctgcacagcaggaggaggaacttgctctggttcctgctgaactgcaaacacaagtttgacacatttctccctccttccttggcacaaggagcagacttaggctgagtgccctacccctacccttcactgcctgtgtgcaacc

SEQ ID NO: 46984 - DNA, 600 bp, Chicken  19866894288578_5
ttgttgctcaatcagtagaagctgtagaaaatgacacagctttaagtaacatcagctttccaagataatgtgttttatgactggagaggaattaaagatcttgatgggaagccagcagccagatggcttggcagtagccatgccccgttactgcgaatgctgggatcaaaaccggagtgctctgggattgttcacatctttgctgatctcacagttccttcgcatggatgtgtctacaagatttgcattctgaaatcaaaatcaactcagcttcattactggtattgttatatctcagaytgaagtggcccacagggaattcagaggactggatgcagagttcacaggaagcgtttcttggaccaactcctaaatttaagattgagagatgtaactgaccctgacataactggtgctgcataaccactctaaagctgaagtaatgtctgttcctaggatgggctgaagctgtatctctaatttttgtacgtgtgcacttggtatagctctttatgtactgtgatttactagatgtttagagcacttttaagcaggcaaataatttccttctatcacagaccataaaagttaaatactggt

SEQ ID NO: 46985 - DNA, 600 bp, Chicken  19866894288579_1
aaaaaacggtggcatcatctacctcaactcccatatattaccctaatcaggggctgaaatacatctgaaaacataatttagggtaaaacaggcttagacgcctcaccagaggaataaaggaaagctcacaccactgtatgggtgtgagggaacagcttgcactttgctgggacaacacagggatctgcacctctcctgcctccactccagaaatgcactccctagaacatgttttggttttatgtggtttttaattaacgattcccagactaatgtttcccaggaatcccagttaaaaarcctgcagaggattttgaagagaagaaagttgttactgttatgaggaagaagacttctcttggcaggacgctggctctcgtaaaggctctgtgatgtgargcaagcctctgcaatctgagctgacctatttgttgctgtatttcaggtagccagatgtctcagtactttaggaattcagaagaaaatgatattctagtgtatgccctggttttcttgcagtcagccagctggctatccaccgctcccttctcgtcctccccccgataagccccccaggtcacttgctgatccgaggcacat

SEQ ID NO: 46986 - DNA, 600 bp, Chicken  19866894288579_2
gcctcaccagaggaataaaggaaagctcacaccactgtatgggtgtgagggaacagcttgcactttgctgggacaacacagggatctgcacctctcctgcctccactccagaaatgcactccctagaacatgttttggttttatgtggtttttaattaacgattcccagactaatgtttcccaggaatcccagttaaaaarcctgcagaggattttgaagagaagaaagttgttactgttatgaggaagaagacttctcttggcaggacgctggctctcgtaaaggctctgtgatgtgargcaagcctctgcaatctgagctgacctatttgttgctgtatttcaggtagccagatgtctcagtactttaggaattcagaagaaaatgatattctagtgtatgccctggttttcttgcagtcagccagctggctatccaccgctcccttctcgtcctccccccgataagccccccaggtcacttgctgatccgaggcacatccctccctaccttcagagatgaacctggggtccagctacatctgtgctggggcctctcgttgtgtgtctggcacacaacggacacaaggctctccaaat

SEQ ID NO: 46987 - DNA, 599 bp, Chicken  19866894288580_1
  misc_feature (1)..(180): n is any nucleotide
nnnnnnnnnnnnnnnnnnnnnnnnnnnnnnnnnnnnnnnnnnnnnnnnnnnnnnnnnnnnnnnnnnnnnnnnnnnnnnnnnnnnnnnnnnnnnnnnnnnnnnnnnnnnnnnnnnnnnnnnnnnnnnnnnnnnnnnnnnnnnnnnnnnnnnnnnnnnnnnnnnnnnnnnnnnnnnnnnnnnatttgctagcgtgccaggcaattaataacacttatagcttactttgatttttaaagcagctctgtgcactcagtgttgctactaatcaggtgtatggatttgagtcagccaaaagaagargatggtactctgatttcatatacatgtaaaaatccagcttgtctgatagctatggcttgtctggtactacctgccccgcagagcttcacagcagcaatcttcacctgcatagcccagactgaccactttataaggttgatcctgtgggaaaattaattttgcagccctccatcattaaagaatgctacagtgcaggatggcaataatgcaaactttgttctgcaattcctagctctggagtgattagcaataacagtttttaatgttacacatgtgtgaattctggagcttttaaaaga

SEQ ID NO: 46988 - DNA, 600 bp, Chicken  19866894288581_1
tgaggctatggctgtattagacactagaaaccagctcatgcaggttctggtatcacagagtggtcactggtagcacaaaatgtccatgtaatgagcaattcagtgcagaccacaaaacccacacaagaaacagagtgggtacttgggagcagctgaccttgaactaaacagcaactgcatctgtgctcagcgagggagtttgtagctgggacacagcctccaggctcttctatggctgtggtgcagaagcatgctaggctgggtcactgagctgaacagctgcatttgttgcaaaagccrggctggttttgtcatcgatgatccctccttacaaggtaactgagctgctggtgaaagcaactcaaaagcagtgcattaactcaatagaagaaacgttaacaagtaatagcatcttaacacgataagagcgcccatatggctggatttgggaaaggtcctgtctgtggagtctgtatgtgtcaactacaccagagtaaagggtaacccaaggcaaattcaagcaattcagtagctacagcagagcttgtggcacactggatctctgcgccgccttgatgtctttgtagaagttttttggtg

SEQ ID NO: 46989 - DNA, 600 bp, Chicken  19866894288582_1
ctgcccagggctgtgggcatggcactgagctgctggagtccaggaagcatttggaccgtgctctcacatctagggcttggatttttgggtggccctctgtgaagccaggagttggaccttgcgagtcccttccaacttgagatattctgtgattctgagctggctcccctcccctgaaagaaggaggaggtgggaaagcacccacaagaaaagaagggtggagggaaggaaataggaaggacgtgttgctctcctgttactagtcttggactcaagatgcagatatcatcctcctctctkgtgcttattgcatgtgtgggctttaaaaacaaaaaaaccttccttccatctggtggctgctcttcttcccttgtcggcttctggctcctctgtaaaccattttgggagtgcagagagagagctgtttatactgaagttaaatttgttagtagaagaatctcttttttaacctccttctctaatcctcagggttaaatgttttcagcacatagttcatttgcagttatttgtagctggctgtgccatttgctctgtaattcaattcagatgatgcttcttggcccaaattagagcagacta

SEQ ID NO: 46990 - DNA, 600 bp, Chicken  19866894288585_1
catctggtatgataacactcactcctcacactagcaaaaaggaaggatagatacactgatgtgtaggtgtaaatacttgtcactcctacacagaaaggagctgctggaagcaactgagttacattttatttcaaagataataacatacatgcacaaaaaaaagcagaaagcacagttctagctctactcatcagtatgatttcacattccttatcttgaaacagatacaagacacagcatctctcttcaaactactagactgagtctttctacagcccttttcatctccccagagaaaamcctcaatttacaacagtaaattttgtcctttcagtactgcatgagctaaccaatctgaatacagcagaaacaaaggactgtcaacctctgcaaaagcatctgggatgttaaatttttagattttaaaratttcagtgtcactattgtacttctaaatacattrttatcatacagtctcaaatgacagaaataattaagtgttcaaatacatacttctctttcacagccttagcattcttttcatttaccactccaatgggtttggatagatccctaaagactgctggattattcagatct

SEQ ID NO: 46991 - DNA, 600 bp, Chicken  19866894288585_2
tttcaaagataataacatacatgcacaaaaaaaagcagaaagcacagttctagctctactcatcagtatgatttcacattccttatcttgaaacagatacaagacacagcatctctcttcaaactactagactgagtctttctacagcccttttcatctccccagagaaaamcctcaatttacaacagtaaattttgtcctttcagtactgcatgagctaaccaatctgaatacagcagaaacaaaggactgtcaacctctgcaaaagcatctgggatgttaaatttttagattttaaaratttcagtgtcactattgtacttctaaatacattrttatcatacagtctcaaatgacagaaataattaagtgttcaaatacatacttctctttcacagccttagcattcttttcatttaccactccaatgggtttggatagatccctaaagactgctggattattcagatctagttcttcagatgtataatctcgtaagatccaggggaactggaaacaaaaaaagtaagtcaaacagattaaacccatctttaaaaaacaggaaaaatacataactttagcaaaaacttaaaaagtaat

SEQ ID NO: 46992 - DNA, 600 bp, Chicken  19866894288585_3
cagaaagcacagttctagctctactcatcagtatgatttcacattccttatcttgaaacagatacaagacacagcatctctcttcaaactactagactgagtctttctacagcccttttcatctccccagagaaaamcctcaatttacaacagtaaattttgtcctttcagtactgcatgagctaaccaatctgaatacagcagaaacaaaggactgtcaacctctgcaaaagcatctgggatgttaaatttttagattttaaaratttcagtgtcactattgtacttctaaatacattrttatcatacagtctcaaatgacagaaataattaagtgttcaaatacatacttctctttcacagccttagcattcttttcatttaccactccaatgggtttggatagatccctaaagactgctggattattcagatctagttcttcagatgtataatctcgtaagatccaggggaactggaaacaaaaaaagtaagtcaaacagattaaacccatctttaaaaaacaggaaaaatacataactttagcaaaaacttaaaaagtaataattaccacgggatattgagcaagatcattgtaag

SEQ ID NO: 46993 - DNA, 600 bp, Chicken  19866894288590_1
cacagaggagcctggtttccaggactaggtcttcccctgctctgctaccctatggaaagctccactgttcccagagagctgccagctggtgtggtgccctgacatctggcacctctcatgtctcaggtgaagagtgtgaagtacagctcccaaatggtagggcaggtgaatgagtcaagaagaaggggcaaataaaaatgaagtcattaaaaaagtgagaatagaggcaacacattttctggaaagatttgaagagtctgtaatgaggtaaggaataaacgtttcagtgagaaatctcastgtagaccaaacatttgtagttgaaattcagctgtcagtaggaggacagagatgcccataaaatgcaaagaaatgagacagcagtttcatgagctgatgccaggttcccaagacctgggagggtagcagcgaacatggttggtcaagggcccttcctgctttgcttgcatccacaccagctgtacagctgctcttaagaacagatctaaggatcctggagtctatcaggggcagctgctgtggagggggatgtaaatttacatgaagtgtaaaggctacaaaaagacactgaactgcatt

SEQ ID NO: 46994 - DNA, 600 bp, Chicken  19866894288591_1
atagctcccgtccgagacctgtggtgaataaactgtcacgagatgaatgtggaggagcagctcttctgctctctgaagaagccttagtacaaaggtgccatgaagctcaccttgccgctccccagtgccagggccatgccatgtgtggttactctcaaccacttgccagctgcccagagagcctggggtcggtgtgtcctttgctctggtccttccctttggcagtagaaaaggaagtctgaggtaggagctttgatgtcatcagggaatctgccttcctagtgcttgggcctcatgcarcatcccttgaagccaaacaactaattcatatctgcgtctgggcctacgggtgtgtccctacaagattgagttctgctgacaacagctctgttacacctgaggacctggttggtcgagttcttcaggaatggtctaaaaatactgtaaaaatataaatatatttaattacatgtactgaaaacagaaatcctatttgttgtggtcagagttcagattactatgtgagttttgatttcttagtcatacctgcatatatattgctttaactattgtgtgtgaaagaggaagtgattctaaagt

SEQ ID NO: 46995 - DNA, 600 bp, Chicken  19866894288591_2
atgcagtttttttgcattagaatatgtgtgtatatcatacacctgcattttatatataatatattatatatttggtactaactttgtattttccctgaaatttgccaaatcttgaagacaaatgttctcacttgtaagactttggtacttaataactgaatgtatatgaaatgctctggtatgaaagacagtaatgttgtacagtaccccacaatacagatgtctcaaccagcaggcgtgttgccttctttgcgtgttacatctcaatccactgcagcatcaccttatgtctcatgaaawattgtctgtgtttttaactaaactgcggagctgcccttacagtacagctgacaacagttctatcatgtgtgctggctggtaggagtaagaatacagtagtcaccagtgtgccacaaatgcatttgttaaatgcagaaatacacatttctacaaaggccaaaatcgtatgttgtatgttcctttcttgtcattacattgtatgatattgtaagattattgtatgtcctaatttgcattataaaatgttttttcctacttaaaggcataaatatagcaactttgtataaaggtagctttcta

SEQ ID NO: 46996 - DNA, 600 bp, Chicken  19866894288593_1
gatgataagcagcatccattcaactgcacatcacaatgagttacaacagattgggttagaaagaattcaggcaggacttcataaacaccttgcagctgctgaatatttctacaggcagcaacaggttatcgacagatggctattcacatggctctgaaatacagagttcacagctaaggacagtcagtgtcccaggtcagccttacctaggtgagcaatggatgcttccaacaccttcacagccgcagcataaatccctgtatgctttgagttcaggttgtctgtgactgctgctaccaragagaccagcactgggtgtaaggtgtctctgagaatgggtataactgaagccagagcttccagtgactgctgtttcactttcttattggaatcttgaagtctcaggacaaaaacatcaaaaatctgttaagaaaacaaacaacatgaaagctgggttaaaatgtctgtctttctacaagggcatgaattctacaattctttctacaagcatgaattcactgtcttcctgagggctacttactacagtctttccacaacctcaggcttgtttaaaagattttcaggttgtattacaaggtt

SEQ ID NO: 46997 - DNA, 600 bp, Chicken  19866894288601_1
ttaataaaaacacactagtagggcagactcaaggcaaacaaaagaagaggactgcttcttcatgatgcaagatagaacacctctttctaacagttgagtaaaaaaaacaaactcaaagaactgactgacttcagggaaggattaaagaacaaagcagacaggcttgtgaaggaagaagaaaaacacctgtaggccctgaagtaagaacagtttcttccttcccttcacacagtatctcaccacactaaatgcaaaattcacttatttcctaaaggctgcagcctctccttaatcctacayctgttttgctaatgaaagataatcagttatgcacatccgcatcccacgtaagattaatgagcaatgaagtgttctatccattatgccatctctactgccactatttccccagttcacatctttgaagtagttagtcctagtatttccaacacccattgtcaccaaagatgctgagttgaactttgtgccttccatctatgctttctatactttattagtatctttgctttgcagttaaaggctcccctggtagaagtcctgggacacagatactgtgtactgcacttggaaaatagtcta

SEQ ID NO: 46998 - DNA, 600 bp, Chicken  19866894288604_1
cattcaccaacaagagagttgcttttattgattaagagatatacgaaaaaaaaagggggagaaaacctcaatatcctgtagctttctgtttcagaacatcaacaacttactctctgtgtttggactcacagtactaacaaaggacatgttgaagaaaacagggactgaaattacagaagcaaatttgtttgggcctcttgtgcaggaataagctttctgctggcccctgtagtgaccttcctgcgtctgttatcagaaaggcgctctcagcctttcttctgagtttttctgtaaggtgcrggaggaaaaaaagtgaaaaataaaagtggggtagcaaagtctttgcytacagcaaatgaggatgagcccmaaagcagcagctgtagacacaaaaattaagaaaaagaactacttacctttagaaggctacaggcakrcagagatctccagcaagatccccttgcctccactgccaacccttaaatgaggtctgggaaggggtgaatyctggctccatcccttccggtcactcaggttcattgcatgcacctgagctccactgggttggccctgccttccctccaggtgctcaatcactgc

SEQ ID NO: 46999 - DNA, 600 bp, Chicken  19866894288604_2
aaaaaaagggggagaaaacctcaatatcctgtagctttctgtttcagaacatcaacaacttactctctgtgtttggactcacagtactaacaaaggacatgttgaagaaaacagggactgaaattacagaagcaaatttgtttgggcctcttgtgcaggaataagctttctgctggcccctgtagtgaccttcctgcgtctgttatcagaaaggcgctctcagcctttcttctgagtttttctgtaaggtgcrggaggaaaaaaagtgaaaaataaaagtggggtagcaaagtctttgcytacagcaaatgaggatgagcccmaaagcagcagctgtagacacaaaaattaagaaaaagaactacttacctttagaaggctacaggcakrcagagatctccagcaagatccccttgcctccactgccaacccttaaatgaggtctgggaaggggtgaatyctggctccatcccttccggtcactcaggttcattgcatgcacctgagctccactgggttggccctgccttccctccaggtgctcaatcactgcttcaggcagtgactttgcatttccacagaattgacaaatattttgca

SEQ ID NO: 47000 - DNA, 600 bp, Chicken  19866894288604_3
atatcctgtagctttctgtttcagaacatcaacaacttactctctgtgtttggactcacagtactaacaaaggacatgttgaagaaaacagggactgaaattacagaagcaaatttgtttgggcctcttgtgcaggaataagctttctgctggcccctgtagtgaccttcctgcgtctgttatcagaaaggcgctctcagcctttcttctgagtttttctgtaaggtgcrggaggaaaaaaagtgaaaaataaaagtggggtagcaaagtctttgcytacagcaaatgaggatgagcccmaaagcagcagctgtagacacaaaaattaagaaaaagaactacttacctttagaaggctacaggcakrcagagatctccagcaagatccccttgcctccactgccaacccttaaatgaggtctgggaaggggtgaatyctggctccatcccttccggtcactcaggttcattgcatgcacctgagctccactgggttggccctgccttccctccaggtgctcaatcactgcttcaggcagtgactttgcatttccacagaattgacaaatattttgcattcaaaaatgaatacatctctcc

SEQ ID NO: 47001 - DNA, 600 bp, Chicken  19866894288604_4
acaaaggacatgttgaagaaaacagggactgaaattacagaagcaaatttgtttgggcctcttgtgcaggaataagctttctgctggcccctgtagtgaccttcctgcgtctgttatcagaaaggcgctctcagcctttcttctgagtttttctgtaaggtgcrggaggaaaaaaagtgaaaaataaaagtggggtagcaaagtctttgcytacagcaaatgaggatgagcccmaaagcagcagctgtagacacaaaaattaagaaaaagaactacttacctttagaaggctacaggcakrcagagatctccagcaagatccccttgcctccactgccaacccttaaatgaggtctgggaaggggtgaatyctggctccatcccttccggtcactcaggttcattgcatgcacctgagctccactgggttggccctgccttccctccaggtgctcaatcactgcttcaggcagtgactttgcatttccacagaattgacaaatattttgcattcaaaaatgaatacatctctccctatcttcttcctctttataagatagttccctaatgtgatctgaaaaatactgagataggaaaagg

SEQ ID NO: 47002 - DNA, 600 bp, Chicken  19866894288604_5
caaaggacatgttgaagaaaacagggactgaaattacagaagcaaatttgtttgggcctcttgtgcaggaataagctttctgctggcccctgtagtgaccttcctgcgtctgttatcagaaaggcgctctcagcctttcttctgagtttttctgtaaggtgcrggaggaaaaaaagtgaaaaataaaagtggggtagcaaagtctttgcytacagcaaatgaggatgagcccmaaagcagcagctgtagacacaaaaattaagaaaaagaactacttacctttagaaggctacaggcakrcagagatctccagcaagatccccttgcctccactgccaacccttaaatgaggtctgggaaggggtgaatyctggctccatcccttccggtcactcaggttcattgcatgcacctgagctccactgggttggccctgccttccctccaggtgctcaatcactgcttcaggcagtgactttgcatttccacagaattgacaaatattttgcattcaaaaatgaatacatctctccctatcttcttcctctttataagatagttccctaatgtgatctgaaaaatactgagataggaaaagga

SEQ ID NO: 47003 - DNA, 600 bp, Chicken  19866894288604_6
ataagctttctgctggcccctgtagtgaccttcctgcgtctgttatcagaaaggcgctctcagcctttcttctgagtttttctgtaaggtgcrggaggaaaaaaagtgaaaaataaaagtggggtagcaaagtctttgcytacagcaaatgaggatgagcccmaaagcagcagctgtagacacaaaaattaagaaaaagaactacttacctttagaaggctacaggcakrcagagatctccagcaagatccccttgcctccactgccaacccttaaatgaggtctgggaaggggtgaatyctggctccatcccttccggtcactcaggttcattgcatgcacctgagctccactgggttggccctgccttccctccaggtgctcaatcactgcttcaggcagtgactttgcatttccacagaattgacaaatattttgcattcaaaaatgaatacatctctccctatcttcttcctctttataagatagttccctaatgtgatctgaaaaatactgagataggaaaaggattccactctgcagagctgcaagtggatattatcttgctaaatgtttgtatctgtatccttagatatctca

SEQ ID NO: 47004 - DNA, 599 bp, Chicken  19866894288610_1
  misc_feature (1)..(57): n is any nucleotide
nnnnnnnnnnnnnnnnnnnnnnnnnnnnnnnnnnnnnnnnnnnnnnnnnnnnnnnnntcctctctgcgagttcaggtgctatgattcatgagtggacaagagtcacattagaacagacacaaagactgagttacaattaaattgagagacagcaaacatttttttcctctcttcttcccctcccctttgcagtgatgcaaatcttcaatgaaataatattcattaaacctcattattcatattagattgaagataatcattacaggtgtttattaatgatagtattaacctgatctccaygtaaaacaggaaaggttcagcataaattctgtaaaagctgaaaatgtggacctacatacatcgtaagatgtaaaagagaaattaagttttgcagaaacttaaatggtgaggaagaaggtaacagtggtaagtattcttgttgcaaatatacgctgacaggtgcaagcccagtggttttatcaaactaaaataggccttgcctaatcatccaggtattatgacagaaaagtaaatcaggagatctaatttccccttgtaactgaaagacatcaatctttaatgagaatgtgaataattta

SEQ ID NO: 47005 - DNA, 600 bp, Chicken  19866894288611_1
cgaagagccaagagagacagcacttgcaaagtatgcatatctgaccactcaggtactatcccatgatgctctctgcagacataccagttaaccttgataatagctgccacatttccagtatgttgtcaaatgaagctgtccctgcaggtgtgagtggagtgaatattttctcaagcaagctgtgcctgcttgtgagccagtgctgagggatccttctggaggaacaatactttcccagtgcagatgtaacactcattctgcgactgttctagggaaggcaaagagctaaggagcacaatygagcacaatctgtgaggcagagtggattacctaatctatctcatggggtatttttaatggattagtaagtattagagtgggatattgcaaatatcccatggaaatttggaagtgagagacaacaatcaaccggctgcaaaaacagtgtaaaggttgtcccagaggtatcaaaggattacagagcaagctaaatcaaggctgactttaaaagatgttgctagacagcttaccaagctgaataaaaacaagatctcaatgtacaggcttaaaaatggaacaagagagtagacatcaacctta

SEQ ID NO: 47006 - DNA, 599 bp, Chicken  19866894288614_1
  misc_feature (1)..(80): n is any nucleotide
nnnnnnnnnnnnnnnnnnnnnnnnnnnnnnnnnnnnnnnnnnnnnnnnnnnnnnnnnnnnnnnnnnnnnnnnnnnnnnnntctgccttcctgcacagcacgaggaacctgagcaggtaagagggaattcacaaaccctggctgtgcagcagtgctgcaatatatgcagcagttgttcttggagctattagtaagttcagatttcgatattatgacacacgacacttggtgcctctccattcctcatttaatttgggctcaccagttaccctttgagttcacaggaaatgtgatcaggacrttcatcttataacacaatgcctcctaaaccctccagggtgacaaatacccctatttcctattgcaaacaatccacatttgttgggaakttgaaagtactgagcactttggacgccccagcctacagaaaagccaatcagctaattactcttcacggttgcacagctccttatgggaccacgctgccccgagcgaacacgacctcactaacttttggccgtgagctgtgggggtggagttgtgaccaaaccaatgtgttcatttggaagggaagacagagactacatcacgcttgagcat

SEQ ID NO: 47007 - DNA, 600 bp, Chicken  19866894288614_2
cctgcacagcacgaggaacctgagcaggtaagagggaattcacaaaccctggctgtgcagcagtgctgcaatatatgcagcagttgttcttggagctattagtaagttcagatttcgatattatgacacacgacacttggtgcctctccattcctcatttaatttgggctcaccagttaccctttgagttcacaggaaatgtgatcaggacrttcatcttataacacaatgcctcctaaaccctccagggtgacaaatacccctatttcctattgcaaacaatccacatttgttgggaakttgaaagtactgagcactttggacgccccagcctacagaaaagccaatcagctaattactcttcacggttgcacagctccttatgggaccacgctgccccgagcgaacacgacctcactaacttttggccgtgagctgtgggggtggagttgtgaccaaaccaatgtgttcatttggaagggaagacagagactacatcacgcttgagcatcccttagcaaccagagtcaaatggcaccrcagctctggggaggctgtcagcctgtcctgtactggaacagtgtctagtgcagttcccac

SEQ ID NO: 47008 - DNA, 600 bp, Chicken  19866894288614_3
ccctccagggtgacaaatacccctatttcctattgcaaacaatccacatttgttgggaakttgaaagtactgagcactttggacgccccagcctacagaaaagccaatcagctaattactcttcacggttgcacagctccttatgggaccacgctgccccgagcgaacacgacctcactaacttttggccgtgagctgtgggggtggagttgtgaccaaaccaatgtgttcatttggaagggaagacagagactacatcacgcttgagcatcccttagcaaccagagtcaaatggcaccrcagctctggggaggctgtcagcctgtcctgtactggaacagtgtctagtgcagttcccactgctgcagaaaggacaacatttccagctcaaaaagtagaagcaacastggtgatctaaccgtacgatttcctttgtttctgtttataggaaacagcttattttcagcaaggctttctaatggaaggatagggagcccagttaacctggggaacacatgaaacaaacggttcttacagcaacacttttatctctgacttactttagacattttccacttaaaaatccagactgcagctggt

SEQ ID NO: 47009 - DNA, 600 bp, Chicken  19866894288614_4
tcagctaattactcttcacggttgcacagctccttatgggaccacgctgccccgagcgaacacgacctcactaacttttggccgtgagctgtgggggtggagttgtgaccaaaccaatgtgttcatttggaagggaagacagagactacatcacgcttgagcatcccttagcaaccagagtcaaatggcaccrcagctctggggaggctgtcagcctgtcctgtactggaacagtgtctagtgcagttcccactgctgcagaaaggacaacatttccagctcaaaaagtagaagcaacastggtgatctaaccgtacgatttcctttgtttctgtttataggaaacagcttattttcagcaaggctttctaatggaaggatagggagcccagttaacctggggaacacatgaaacaaacggttcttacagcaacacttttatctctgacttactttagacattttccacttaaaaatccagactgcagctggtaacctccttctctgtgctaccagggtgcacctacaaagagccaggtgtgcgtggaaaaaaaacaaacacagagaaaatactctcctatttaaagctgtcaggtgtgg

SEQ ID NO: 47010 - DNA, 600 bp, Chicken  19866894288618_1
tctacctcctgcagaagattactaaggagaacaacgcccacacggtgaagagccggctggaggaactggatgaaaggtaagagaaaccgagcagctgagtagctgtgctagggcctcttgctttctaaaggacagcctttattgatttgcggtcatgcatggtgtgtctaatcacctttttttcagagttctgtgctggtgctgacaggcagaaaggtaggtgcccacaggtaaggttctgctcaggggctcagtttgccaagtggccgtggtggcacaggtttgtcttctttcctgtcytcttcctcccctttccccgttcgttgctgtttgactgcaggtctgaggtggcagaagagctgagcctgcccttcattcagttctaacagaacagcagaagaggcacagtgaggtaaaggcattgcagcattcccttcgctggtcggtatctgccttctctgtcataaacccaagcacacaaagagtgggtagttgttctgcgagtcctcacttgaaaggaaagagaaacagtgtcatgctctttattgagatgtgacagcttctgactactcttactgttttggttttgttgttgttgtt

SEQ ID NO: 47011 - DNA, 599 bp, Chicken  19866894288626_1
  misc_feature (1)..(65): n is any nucleotide
nnnnnnnnnnnnnnnnnnnnnnnnnnnnnnnnnnnnnnnnnnnnnnnnnnnnnnnnnnnnnnnnntcaaactcaaactcagcaagcaacttttccgccttgcacccactgactgcgcaacactcccttgctcgggggaacaggaaaggcagcagcccttctgaagaagggaaggactgacagcgtctagacggtgtgactaagggaggacctggctgaatgtttgcacagctttgaagagcataaacaccgtcccagctccttcaaagcagaggaatccggcgctgcgatgaaagcgcasggaaattctgcctgtgcctccgagcrgagctgctaacgagaaggggaccctcgataagaaatccccgaggcctgactcattttagagaagcccatgagctggcaaagatgctgtgggcaggtgcatgccgagctgccctcttgggagcgagcaggactttccctgcagctcttgctctgtgctgcagcctggctgtaagcgttctgaaaatgaaacaggaggtgctgggaatcccgctgtgcccgaccacgagctgtgtgtgcttctgctgaatttccttcagctcacaaaagaaaatg

SEQ ID NO: 47012 - DNA, 599 bp, Chicken  19866894288626_2
  misc_feature (1)..(39): n is any nucleotide
nnnnnnnnnnnnnnnnnnnnnnnnnnnnnnnnnnnnnnntcaaactcaaactcagcaagcaacttttccgccttgcacccactgactgcgcaacactcccttgctcgggggaacaggaaaggcagcagcccttctgaagaagggaaggactgacagcgtctagacggtgtgactaagggaggacctggctgaatgtttgcacagctttgaagagcataaacaccgtcccagctccttcaaagcagaggaatccggcgctgcgatgaaagcgcasggaaattctgcctgtgcctccgagcrgagctgctaacgagaaggggaccctcgataagaaatccccgaggcctgactcattttagagaagcccatgagctggcaaagatgctgtgggcaggtgcatgccgagctgccctcttgggagcgagcaggactttccctgcagctcttgctctgtgctgcagcctggctgtaagcgttctgaaaatgaaacaggaggtgctgggaatcccgctgtgcccgaccacgagctgtgtgtgcttctgctgaatttccttcagctcacaaaagaaaatgtyctttgagaggtttggtttgctttc

SEQ ID NO: 47013 - DNA, 600 bp, Chicken  19866894288626_3
gaaattctgcctgtgcctccgagcrgagctgctaacgagaaggggaccctcgataagaaatccccgaggcctgactcattttagagaagcccatgagctggcaaagatgctgtgggcaggtgcatgccgagctgccctcttgggagcgagcaggactttccctgcagctcttgctctgtgctgcagcctggctgtaagcgttctgaaaatgaaacaggaggtgctgggaatcccgctgtgcccgaccacgagctgtgtgtgcttctgctgaatttccttcagctcacaaaagaaaatgtyctttgagaggtttggtttgctttctgttttctttttttttttttttctttttttttttacaactttaaatacagtactgaatataaattaatcttacgttaaaaaaaaaaagcaaaaaaaaaattaaaataaaataaagcctcaccatctttacaaactgaaggaaacattttggaagaggaaagcgaagcgccttaagactcgagggctggggggctgagcccatacacaacctgagaggccccacactgtggctctgcccccatccccagctcccccgggggctttgctgggtgactc

SEQ ID NO: 47014 - DNA, 600 bp, Chicken  19866894288632_1
tttagccgtcgtgatccttttaaaacgatgctgaggtgtaatttccctactctctattgcatccagaaatagacattgtcacttggtttgattgaagccattccatgacttaatgagagcaggcctatgctgtgttgggattcagacttgtaatgtggatggtaggtatgggatgttgatgtctgcatttcctaacgctcatgtcattttttgtactgttaatatctaaggtgaggaatttccctgctctcagagttgaaaaaagtgagcagaaaggattaaatggattaaatatttttkggggaaacagtgtgatactataacacttagccctgaagaatgatatatacagatttcatttgaacacacttcgtgattgtggtaattgctagttggaaagatgcaacctgttcacaaatgcttaggattaatgttggttcagatcagaagcaagttttgccacctgtgcagtgggagaaaagaaatgagtcttgttgagtgaaggacggctaagaaatatggtaagaactgttgtccatttgtttgtttttacttgcatttctgatgtttcagatcacctacaaaatacggtctggtaac

SEQ ID NO: 47015 - DNA, 600 bp, Chicken  19866894288633_1
catggtgatgtctgggacgatgaagattgttctttgagtatctctgaaatacattcgcttgctctgagaattcatttaattacaattcaccgaagctgtgtctctggactagctctgtatcagcatccataaaaagctggagttcatccaggctgagcacactgccacttgatataactaacatgatcggcaattcaactcctaatattgattcaaggaaagatggcacagaaaagtgctggagctaaaagatggaaccaggcttgccaaggggctgcagcaagcaggctccagaaggcygaggaagctgaagcctcagtgcttcaatttcyggtcaccaagactaggggaaagccagatgttgascactgtgcctccagctctgctaccttatgcagaaggacggagcctggactcagcatctcattctgttctccaccaccaccaccactctggcttcatagcaacatggtgggaaggatttgaatgcagacaaaacaagggtataagtatttacaataatggcttcaggtctaaccataaatggtcattaaaaaatgggaagcaagagygcttcttatgcgcatttagaaagaacta

SEQ ID NO: 47016 - DNA, 600 bp, Chicken  19866894288633_2
tttgagtatctctgaaatacattcgcttgctctgagaattcatttaattacaattcaccgaagctgtgtctctggactagctctgtatcagcatccataaaaagctggagttcatccaggctgagcacactgccacttgatataactaacatgatcggcaattcaactcctaatattgattcaaggaaagatggcacagaaaagtgctggagctaaaagatggaaccaggcttgccaaggggctgcagcaagcaggctccagaaggcygaggaagctgaagcctcagtgcttcaatttcyggtcaccaagactaggggaaagccagatgttgascactgtgcctccagctctgctaccttatgcagaaggacggagcctggactcagcatctcattctgttctccaccaccaccaccactctggcttcatagcaacatggtgggaaggatttgaatgcagacaaaacaagggtataagtatttacaataatggcttcaggtctaaccataaatggtcattaaaaaatgggaagcaagagygcttcttatgcgcatttagaaagaactatcattgtgcagaaaggaaattcatgcaaacta

SEQ ID NO: 47017 - DNA, 600 bp, Chicken  19866894288633_3
agaattcatttaattacaattcaccgaagctgtgtctctggactagctctgtatcagcatccataaaaagctggagttcatccaggctgagcacactgccacttgatataactaacatgatcggcaattcaactcctaatattgattcaaggaaagatggcacagaaaagtgctggagctaaaagatggaaccaggcttgccaaggggctgcagcaagcaggctccagaaggcygaggaagctgaagcctcagtgcttcaatttcyggtcaccaagactaggggaaagccagatgttgascactgtgcctccagctctgctaccttatgcagaaggacggagcctggactcagcatctcattctgttctccaccaccaccaccactctggcttcatagcaacatggtgggaaggatttgaatgcagacaaaacaagggtataagtatttacaataatggcttcaggtctaaccataaatggtcattaaaaaatgggaagcaagagygcttcttatgcgcatttagaaagaactatcattgtgcagaaaggaaattcatgcaaactagtccatgttgcctgtatatgcccaatcatcccat

SEQ ID NO: 47018 - DNA, 600 bp, Chicken  19866894288633_4
ggctgcagcaagcaggctccagaaggcygaggaagctgaagcctcagtgcttcaatttcyggtcaccaagactaggggaaagccagatgttgascactgtgcctccagctctgctaccttatgcagaaggacggagcctggactcagcatctcattctgttctccaccaccaccaccactctggcttcatagcaacatggtgggaaggatttgaatgcagacaaaacaagggtataagtatttacaataatggcttcaggtctaaccataaatggtcattaaaaaatgggaagcaagagygcttcttatgcgcatttagaaagaactatcattgtgcagaaaggaaattcatgcaaactagtccatgttgcctgtatatgcccaatcatcccatgctctctgctaatttgatgactgaaagcacaccctgtcatcaaaatgccaagaaatcctcatagagtctcatcctattaaaaaaatccccagaagcttcctattgattttaatgaaagcagaaaatgcctttagagaacaaagatgaaacatttttagactcagctttcatagattttcactgcttttccaatggtgtgatatcca

SEQ ID NO: 47019 - DNA, 600 bp, Chicken  19866894288646_1
attattctctttcacttcatctcattgttacagtactgtgtgttgcttcctgtttccctaagaatggctacacagtgacaaagtgaaggtctggggaggtattcagttccaggaagtgtctgcctaaggaggtggtaaagtcactgtttctggaggttttcaagaggtgtagatgtggtaccaagggacatggttctgtgggaagagtggttatgggttgatggctggactagatgatcttagtggacttttccaaccttaataattgtatgattctatgaattagtatgctgatagaasgatcactctttgctagaatctgatgcatgttgctcttctgtgagaggtactggttttcaatatagaataaagtctttgtaattaggttaataaccctaaatatttgcattcaccatagtagatggaagagaggagctacctgaatactcagatcaagaacgagtgtcagagtggctacaaatgagaggcaagtaatagatgccatgtgtaatgttgggcagtaaaaacaatggtaaaatattatataacaatatcatatataatatataatgtataatacaatacaatacaataatataa

SEQ ID NO: 47020 - DNA, 600 bp, Chicken  19866894288665_1
acctacttatgaataaatgagtcatgttgtattgttcggtctggaagcccaaaatcccattcctcaccacgtgttaatggcattgcttttcaataatattaaaaaggtttttaccttacttaattaaaataggaattttaataagcaggaactgtaggttgtggtcttcaaagcttattcatgttatcctgttgcctttgttctcagtcttgatattaagcgaagtcaatagtaaagactaactttcagtacttcttcattacaaaagaacacttctacatgtatgaatgctaattaatrtaaaagrggaaataagaattaaccaagaaaaggtggaaactttgaatatggaaggttwgaagttgggaatgtattgagggtaaacagcagcgagtcagcagctctggtttggtttggwcaaacagaacgtgataatggatggtgtgcttctggctgccactgctggcatgctgggagccccgagggctctgccctctgaaggaaatcagtttwacagaagagggagtagaaattcaagcagtcctgtaactttgaggagatatgtacaatccctcagttttaacatctgtcacttctatc

SEQ ID NO: 47021 - DNA, 600 bp, Chicken  19866894288665_2
tatgaataaatgagtcatgttgtattgttcggtctggaagcccaaaatcccattcctcaccacgtgttaatggcattgcttttcaataatattaaaaaggtttttaccttacttaattaaaataggaattttaataagcaggaactgtaggttgtggtcttcaaagcttattcatgttatcctgttgcctttgttctcagtcttgatattaagcgaagtcaatagtaaagactaactttcagtacttcttcattacaaaagaacacttctacatgtatgaatgctaattaatrtaaaagrggaaataagaattaaccaagaaaaggtggaaactttgaatatggaaggttwgaagttgggaatgtattgagggtaaacagcagcgagtcagcagctctggtttggtttggwcaaacagaacgtgataatggatggtgtgcttctggctgccactgctggcatgctgggagccccgagggctctgccctctgaaggaaatcagtttwacagaagagggagtagaaattcaagcagtcctgtaactttgaggagatatgtacaatccctcagttttaacatctgtcacttctatcttcgtgc

SEQ ID NO: 47022 - DNA, 600 bp, Chicken  19866894288665_3
cccaaaatcccattcctcaccacgtgttaatggcattgcttttcaataatattaaaaaggtttttaccttacttaattaaaataggaattttaataagcaggaactgtaggttgtggtcttcaaagcttattcatgttatcctgttgcctttgttctcagtcttgatattaagcgaagtcaatagtaaagactaactttcagtacttcttcattacaaaagaacacttctacatgtatgaatgctaattaatrtaaaagrggaaataagaattaaccaagaaaaggtggaaactttgaaratggaaggttwgaagttgggaatgtattgagggtaaacagcagcgagtcagcagctctggtttggtttggwcaaacagaacgtgataatggatggtgtgcttctggctgccactgctggcatgctgggagccccgagggctctgccctctgaaggaaatcagtttwacagaagagggagtagaaattcaagcagtcctgtaactttgaggagatatgtacaatccctcagttttaacatctgtcacttctatcttcgtgcgccaagagcatgattggaccattcacgaagacaaaaagag

SEQ ID NO: 47023 - DNA, 600 bp, Chicken  19866894288665_4
attcctcaccacgtgttaatggcattgcttttcaataatattaaaaaggtttttaccttacttaattaaaataggaattttaataagcaggaactgtaggttgtggtcttcaaagcttattcatgttatcctgttgcctttgttctcagtcttgatattaagcgaagtcaatagtaaagactaactttcagtacttcttcattacaaaagaacacttctacatgtatgaatgctaattaatrtaaaagrggaaataagaattaaccaagaaaaggtggaaactttgaatatggaaggttwgaagttgggaatgtattgagggtaaacagcagcgagtcagcagctctggtttggtttggwcaaacagaacgtgataatggatggtgtgcttctggctgccactgctggcatgctgggagccccgagggctctgccctctgaaggaaatcagtttwacagaagagggagtagaaattcaagcagtcctgtaactttgaggagatatgtacaatccctcagttttaacatctgtcacttctatcttcgtgcgccaagagcatgattggaccattcacgaagacaaaaagagctgtgcaatca

SEQ ID NO: 47024 - DNA, 600 bp, Chicken  19866894288665_5
cttaattaaaataggaattttaataagcaggaactgtaggttgtggtcttcaaagcttattcatgttatcctgttgcctttgttctcagtcttgatattaagcgaagtcaatagtaaagactaactttcagtacttcttcattacaaaagaacacttctacatgtatgaatgctaattaatrtaaaagrggaaataagaattaaccaagaaaaggtggaaactttgaatatggaaggttwgaagttgggaatgtattgagggtaaacagcagcgagtcagcagctctggtttggtttggwcaaacagaacgtgataatggatggtgtgcttctggctgccactgctggcatgctgggagccccgagggctctgccctctgaaggaaatcagtttwacagaagagggagtagaaattcaagcagtcctgtaactttgaggagatatgtacaatccctcagttttaacatctgtcacttctatcttcgtgcgccaagagcatgattggaccattcacgaagacaaaaagagctgtgcaatcaacagactttgttcaatattcccacatagaggggatttgcaataaataatatgaaagactt

SEQ ID NO: 47025 - DNA, 600 bp, Chicken  19866894288665_6
tattaagcgaagtcaatagtaaagactaactttcagtacttcttcattacaaaagaacacttctacatgtatgaatgctaattaatrtaaaagrggaaataagaattaaccaagaaaaggtggaaactttgaatatggaaggttwgaagttgggaatgtattgagggtaaacagcagcgagtcagcagctctggtttggtttggwcaaacagaacgtgataatggatggtgtgcttctggctgccactgctggcatgctgggagccccgagggctctgccctctgaaggaaatcagtttwacagaagagggagtagaaattcaagcagtcctgtaactttgaggagatatgtacaatccctcagttttaacatctgtcacttctatcttcgtgcgccaagagcatgattggaccattcacgaagacaaaaagagctgtgcaatcaacagactttgttcaatattcccacatagaggggatttgcaataaataatatgaaagacttcagtcaaacgcaaatggcgttatatttaatgcacccaatttagaaacatgccactcagaggtaaaattaagcaaaatagaaatacacactttttt

SEQ ID NO: 47026 - DNA, 600 bp, Chicken  19866894288691_1
gattgcttgattgggcagcccctgccaaagctcagtcatcacctaggcagtatccaaagcattttcaaaagacactgttcttttaacctcaccttgtccactgtacaaagcagcattaaatgcagcatgtggtcagacaggccagatatcaaaatcaccagggctaaccacacacaagttgctatttatagaacttggggaatacagaaaataaactgggtaagtcatcagacattactcaaaaaagagtttcttttccaacatagagctctttgaaaatatgttggcttgaggagtggrgcttcccaaagcagccaaatcaccagactaggctgacagtatcttgttccctgacaggatcacagaggagctgagtctaagctgaacctgagttcaaaacccagctggaccaggaacgaggcagcttgccacagcctgagttcagccccgtaccgagctggcagcagccttcccaactccctctccaccttccccacatattcccactatttttgttcctggctcatgacccaccaaacgaggtcagctcatttacattggacagacagcaacagcagcccaagacctgttctttcttgg

SEQ ID NO: 47027 - DNA, 600 bp, Chicken  19866894288691_2
aagcagccaaatcaccagactaggctgacagtatcttgttccctgacaggatcacagaggagctgagtctaagctgaacctgagttcaaaacccagctggaccaggaacgaggcagcttgccacagcctgagttcagccccgtaccgagctggcagcagccttcccaactccctctccaccttccccacatattcccactatttttgttcctggctcatgacccaccaaacgaggtcagctcatttacattggacagacagcaacagcagcccaagacctgttctttcttggagctggakttctgccrgtagcttttccaagactgtgaccaatttaatgtcatttactttgtgttatgaacccacatggttgctcctcagtgaagaagttactgcattcataaagcagctgaagattatgtgcacatatttttactgtaattagcaagtagcacaatttgagcagtctttattagtgttgacttgtattattaaaattaaaattgagtaataaatagtggcatttaaaatttatggtcttcctctaaaatccttaatatgaatctttaaaaacagaataaactcccagcctctcagctg

SEQ ID NO: 47028 - DNA, 600 bp, Chicken  19866894288691_3
aaatcaccagactaggctgacagtatcttgttccctgacaggatcacagaggagctgagtctaagctgaacctgagttcaaaacccagctggaccaggaacgaggcagcttgccacagcctgagttcagccccgtaccgagctggcagcagccttcccaactccctctccaccttccccacatattcccactatttttgttcctggctcatgacccaccaaacgaggtcagctcatttacattggacagacagcaacagcagcccaagacctgttctttcttggagctggakttctgccrgtagcttttccaagactgtgaccaatttaatgtcatttactttgtgttatgaacccacatggttgctcctcagtgaagaagttactgcattcataaagcagctgaagattatgtgcacatatttttactgtaattagcaagtagcacaatttgagcagtctttattagtgttgacttgtattattaaaattaaaattgagtaataaatagtggcatttaaaatttatggtcttcctctaaaatccttaatatgaatctttaaaaacagaataaactcccagcctctcagctgaaaaaata

SEQ ID NO: 47029 - DNA, 600 bp, Chicken  19866894288696_1
ctgctccggctgtcgcgtcaggcactggcttggttttgcgttccttcgggacgtcgaagccctgagcgagtgctgcggtctcggcactgagtgtgtgtgggacggtttgctgggttcgggtgctgtttcagaggaagtgcagcttaaaggctgagacgggaacttcgtgaggtgtttaatgcgagtgcgcacgggcagtgcttagatgtctcttttaccaagtggtctgcctggtttagtctgcatgccttaataactgcctccagcaccctgggtggtaggtaaggcagccttccagcrggggtcagctgcctggccggcctctgtaatgttggatctgaatatagtttgcattatgactaaactgaactcactggaagatgaattgtgcttcaagctgtttgtgctgcttaaggggtgtcttctcagtgtcttctgcaacctcctgggaggtgccttgaagggctagcaatgcccctctaaaagaggggagacttaaattagatatkaagtggaatttttttttttactcagagatagtgaggctctgccacagctgcccatagagctgtgggtgccccatccctggaggtgctcaag

SEQ ID NO: 47030 - DNA, 600 bp, Chicken  19866894288696_2
ctcttttaccaagtggtctgcctggtttagtctgcatgccttaataactgcctccagcaccctgggtggtaggtaaggcagccttccagcrggggtcagctgcctggccggcctctgtaatgttggatctgaatatagtttgcattatgactaaactgaactcactggaagatgaattgtgcttcaagctgtttgtgctgcttaaggggtgtcttctcagtgtcttctgcaacctcctgggaggtgccttgaagggctagcaatgcccctctaaaagaggggagacttaaattagatatkaagtggaatttttttttttactcagagatagtgaggctctgccacagctgcccatagagctgtgggtgccccatccctggaggtgctcaaggccaggttcaatggggctttgggcagcctgatctggtgtggggggggcagccctgcccatggctgggggttggaattggattgaatttaaggtcccttccagatgtaaaaaatacacctgacttgaacaattttgttaaataatctcttcccttcatctgcttccctcaaacatcaatcttttataacaaagttgacctattgaactga

SEQ ID NO: 47031 - DNA, 600 bp, Chicken  19866894288713_1
acacttttaatggtacagagtctggagaaaaatcatcttagaggctctcttaaaatagaacgtattatttctctcttcattttcagaatgagaggcagacctagaaagctcaagccccagcacacagccctgtgcttcagttcctgagcaacagcatgaaagccacgttacagctggccactaaacttggactgcatctcctaaaagctactgtttcagtagcacattctgtatctacattagggttttgttcttgctacattaaacactgcctgatttaggtacaattctgcatgctgytctccctttccccacctgagaaataattatatgagacaccagcagcaaaacttcacgctaagcacacactacgtggcttctgcatatgcatgagtagaaaggtctttctcacctgggaatgcatttatatcaatgactgcatgctgcccggtctgattgttaatgatgatatcgattccaaagagggaaactcccagagcttgccgcagtgccttagagatttcccggatgacatcatcatctggccgctcaaacaccccttcgattttatccagctataggggaaaaggacacattact

SEQ ID NO: 47032 - DNA, 600 bp, Chicken  19866894288717_1
gatttgattctgccatatttctgatggcagaatgttttttatagatctgcttggtaactgtcatggataagagtgaagaatccctgggtccttcacttggtgtgacatgtaaagtagaagttccttgccattacaaattggaaggcaggggactgatgtatgaatggttctataaaattacattgtctgttttccataggaattagacagtgattgtgacagtcccttttgtcctctaaaaatgagaatttgacttctgtgatgttcctctgtcagatactgagtttatgattgtagtgratttgatttttaagggcacagattttagttgcaactgtggtgttttgagtgcaaacagacttgcagttggtttcttcagtctgcaaaacagacaaagaaaaaagatggaagagattatcttcagtagtggtggcagaagggtcaaaataaaatcataataaacttgtagkcagctcttgttagtgattttttatttatttattttaagctgaggactaatttaggtagctacttaaaagtaactgaaagagtactgtctgaaagaaactgagaataagggatagaaatacagagaagttt

SEQ ID NO: 47033 - DNA, 600 bp, Chicken  19866894288717_2
tataaaattacattgtctgttttccataggaattagacagtgattgtgacagtcccttttgtcctctaaaaatgagaatttgacttctgtgatgttcctctgtcagatactgagtttatgattgtagtgratttgatttttaagggcacagattttagttgcaactgtggtgttttgagtgcaaacagacttgcagttggtttcttcagtctgcaaaacagacaaagaaaaaagatggaagagattatcttcagtagtggtggcagaagggtcaaaataaaatcataataaacttgtagkcagctcttgttagtgattttttatttatttattttaagctgaggactaatttaggtagctacttaaaagtaactgaaagagtactgtctgaaagaaactgagaataagggatagaaatacagagaagtttttacgacataaaatacattatttctagcagacagtggacttcttgcttagcaagctttcctaccacataaattttccttactgtatcccccagaaggctgaatgctgttatctcctgcaggcaatgcagcaatgcccttattttgtactagcgaaacacttttccattca

SEQ ID NO: 47034 - DNA, 600 bp, Chicken  19866894288719_1
agcatttcaagcagctggtggacgaactacaggcaaaaggagtgggaacggtgaacaaggccttgacggagtccttcaaaatcctgagggaggtgagaggctctctgctgatgctcacacagggcatatgtatgcctgctctcccctttgtatctgctgttgcacagtcatcatgatgctgtgggaggagttgatatgggtggtgcaaactactctcgcgggtctcaaatctgtgacaagagtgaccaagtgtaggtttgtgtgtgatgctactgaacgtgcccaggatggcagttgagygcccaggggagcagtgctcgtgggcatggggactccacagatgggggggacatctcctcacttggccccactgaatcagcctctcctccttattgctgtattgcactggctcatcacaggccaggaaggttttggctgtggtaagactcataaataattcattgccttatgtgaacacttgcgatttctgcttggaggtaaatgtgtgactgaattccattccttaagaaatattaacaaaaaaaaggcccaagagctgctggatacttccacctcctcactactctgtctgtagtgagt

SEQ ID NO: 47035 - DNA, 600 bp, Chicken  19866894288720_1
gcttagggttgtggggtaataagacacacgtggaatctccaaattagggccccaaataagcaaaggactggaacagcatgtctgagttaagcaagcacacatgtcctgttgcagtgagtaatgcttggtcacatgttcagctgctttgccaaaaaggagcatccagaagcaaggctggaaggcaggttagcagagctgggacaagtttggcattgctgggagtgccagagacatgaagcagatgccacatagactgagagtgtactggggactaggatggccatggggtggaagatcacrtgtgctgtgatgcagtgatgtacagggcaggtgccacatctcgaggcagaaaaaggtgaggtgcttcagcatggctctgtgctgggatcagggcatgtacaagacacgggttgcatcttagcataaccaaattgagagcataaatgtttacagaggtggaatatcactcctggtgttgccagccaggagacaatcagagccagagagctccaagctggctgttcccaaaaaaaagcatgcagacagtggtacacgtatgagacataaacagctcctgctactgcagctgtgtgccttaag

SEQ ID NO: 47036 - DNA, 599 bp, Chicken  19866894288722_1
  misc_feature (1)..(37): n is any nucleotide
nnnnnnnnnnnnnnnnnnnnnnnnnnnnnnnnnnnnnggcaccccctgcagcaagcagcgccaggcacaaggacatccccaccaccctctgcacaaacctctccaaggcatcccctgagctcctggagctgaggaggaacctggccacctcaagtggccaccagctggtttggggcagcagctacgggccggtggcattcccatccctcagcccatgccaaagacagctgcatggcgtggggcacagtgagcggggactccaccacctggagaccctctcccaccagcactgctctcggytgttacttaaccattcccgtggctgcgggtccggcggcaggcaggattagtgctgaccacagcrcctaatccagctcagggcaagaaggcacggcgctgccaggggctttgggatatcgttgctgtctgtctgtctgcacccatcagatcatcctgcggcagtgtgtgcatgagtggagctgcacgcagcacggggacccacaggtaaggcttcgtgctgttcatcaaataggagatcatcgcccagccatacacccaacacagggatggtggggctgcagacccccggtgtcccattg

SEQ ID NO: 47037 - DNA, 600 bp, Chicken  19866894288722_2
gcacaaggacatccccaccaccctctgcacaaacctctccaaggcatcccctgagctcctggagctgaggaggaacctggccacctcaagtggccaccagctggtttggggcagcagctacgggccggtggcattcccatccctcagcccatgccaaagacagctgcatggcgtggggcacagtgagcggggactccaccacctggagaccctctcccaccagcactgctctcggytgttacttaaccattcccgtggctgcgggtccggcggcaggcaggattagtgctgaccacagcrcctaatccagctcagggcaagaaggcacggcgctgccaggggctttgggatatcgttgctgtctgtctgtctgcacccatcagatcatcctgcggcagtgtgtgcatgagtggagctgcacgcagcacggggacccacaggtaaggcttcgtgctgttcatcaaataggagatcatcgcccagccatacacccaacacagggatggtggggctgcagacccccggtgtcccattgccatgctgcagccacagcaacgcgagtaggcacccagatggggctgcacccagacctccaccact

SEQ ID NO: 47038 - DNA, 600 bp, Chicken  19866894288728_1
taacattcatcactgttatttcttagtatctgctgtacttttcttgctatacgatgttattctcaaactaataatattatttgagtactagaatatcagtatggcatttagataaactgtggaagcattttttccattctttttctttcccagaagagtattggaatattggaggggtggaattaaggcacagtttctactgtttatattttatttacttcagaagtgtggtttggattacatataatgctgtagaaaatactgatgtttatatttatgaaattaattcataagtataaygtagagtacatttctaattcttggagctacatggaagatacctgcccttcyrtattgaaagcaggaatgaaataaaatggaaaaaacaaaaagattttactgatgatagtggaaatgcttccagtaactcaagtgagctttggaatggacttagtattctggctgaagatgaagtatcttctcttttccaaccctagcagcctcctttttgtggcttttggtaatgccagaacttacattaaaaattattctttgagtcctagtgaaagtaagtttgttggttttggctatgagtatctg

SEQ ID NO: 47039 - DNA, 600 bp, Chicken  19866894288728_2
cgatgttattctcaaactaataatattatttgagtactagaatatcagtatggcatttagataaactgtggaagcattttttccattctttttctttcccagaagagtattggaatattggaggggtggaattaaggcacagtttctactgtttatattttatttacttcagaagtgtggtttggattacatataatgctgtagaaaatactgatgtttatatttatgaaattaattcataagtataaygtagagtacatttctaattcttggagctacatggaagatacctgcccttcyrtattgaaagcaggaatgaaataaaatggaaaaaacaaaaagattttactgatgatagtggaaatgcttccagtaactcaagtgagctttggaatggacttagtattctggctgaagatgaagtatcttctcttttccaaccctagcagcctcctttttgtggcttttggtaatgccagaacttacattaaaaattattctttgagtcctagtgaaagtaagtttgttggttttggctatgagtatctgtagtatggactctcttctctcattaacactgacttgtcattcttcacgtta

SEQ ID NO: 47040 - DNA, 600 bp, Chicken  19866894288728_3
gatgttattctcaaactaataatattatttgagtactagaatatcagtatggcatttagataaactgtggaagcattttttccattctttttctttcccagaagagtattggaatattggaggggtggaattaaggcacagtttctactgtttatattttatttacttcagaagtgtggtttggattacatataatgctgtagaaaatactgatgtttatatttatgaaattaattcataagtataaygtagagtacatttctaattcttggagctacatggaagatacctgcccttcyrtattgaaagcaggaatgaaataaaatggaaaaaacaaaaagattttactgatgatagtggaaatgcttccagtaactcaagtgagctttggaatggacttagtattctggctgaagatgaagtatcttctcttttccaaccctagcagcctcctttttgtggcttttggtaatgccagaacttacattaaaaattattctttgagtcctagtgaaagtaagtttgttggttttggctatgagtatctgtagtatggactctcttctctcattaacactgacttgtcattcttcacgttaa

SEQ ID NO: 47041 - DNA, 600 bp, Chicken  19866894288729_1
tcactgacatatataatccactcctttacagaagcctcaattgatggtaacacaagttgagaaatgaatctgatgttgattttgcttattttggcatggtattttaaatataatgaaaagcttttataggcatccttacacttacttttgataaagccaaccaaaaaggtatttaaatagccttcttttcaggatttgttagtgggaaacaagttcctggcgtatccactatactcaaatgcagtctgaagtcctttgtctcagtcaaaagaatatgattccagaaacagactgacttastgagctacrtgagcttcarttgttttatcagcgtttttaagagacaaaaacctgataaattagtagttctgtacagcaaaaatgaacctaatgttttctagcaagagtttctagaaacctgtgctacaatcccagctttgaatacgtatgaattatttgcattactgaaactagttactatgccccaaactcttaactacgtaagatttcagcgagaaacagtggaaaccactcactttgcattagtaagtaatgaaacagcaacgtaggggccagttttgcatcttctcttagttctca

SEQ ID NO: 47042 - DNA, 600 bp, Chicken  19866894288729_2
tatataatccactcctttacagaagcctcaattgatggtaacacaagttgagaaatgaatctgatgttgattttgcttattttggcatggtattttaaatataatgaaaagcttttataggcatccttacacttacttttgataaagccaaccaaaaaggtatttaaatagccttcttttcaggatttgttagtgggaaacaagttcctggcgtatccactatactcaaatgcagtctgaagtcctttgtctcagtcaaaagaatatgattccagaaacagactgacttastgagctacrtgagcttcarttgttttatcagcgtttttaagagacaaaaacctgataaattagtagttctgtacagcaaaaatgaacctaatgttttctagcaagagtttctagaaacctgtgctacaatcccagctttgaatacgtatgaattatttgcattactgaaactagttactatgccccaaactcttaactacgtaagatttcagcgagaaacagtggaaaccactcactttgcattagtaagtaatgaaacagcaacgtaggggccagttttgcatcttctcttagttctcatgaattatt

SEQ ID NO: 47043 - DNA, 600 bp, Chicken  19866894288729_3
actcctttacagaagcctcaattgatggtaacacaagttgagaaatgaatctgatgttgattttgcttattttggcatggtattttaaatataatgaaaagcttttataggcatccttacacttacttttgataaagccaaccaaaaaggtatttaaatagccttcttttcaggatttgttagtgggaaacaagttcctggcgtatccactatactcaaatgcagtctgaagtcctttgtctcagtcaaaagaatatgattccagaaacagactgacttastgagctacrtgagcttcarttgttttatcagcgtttttaagagacaaaaacctgataaattagtagttctgtacagcaaaaatgaacctaatgttttctagcaagagtttctagaaacctgtgctacaatcccagctttgaatacgtatgaattatttgcattactgaaactagttactatgccccaaactcttaactacgtaagatttcagcgagaaacagtggaaaccactcactttgcattagtaagtaatgaaacagcaacgtaggggccagttttgcatcttctcttagttctcatgaattattcttaaagttt

SEQ ID NO: 47044 - DNA, 599 bp, Chicken  19866894288730_1
  misc_feature (1)..(12): n is any nucleotide
nnnnnnnnnnnntctctctctgcatgctgattctcttctgaaattctttgtttctactgttgcagctggaccacaaacacacttctaaagcaagttggcttcatttaatgttcttggtgtgaatttcaccaatatcttggatgatgtgaactggcttatttttcacattaaactgtgctggaggatgagctccagaagagcatctaatgccactaacaagcttttcgtacacacaaccagtgtgttgtgtgatagtgataggacaaggggagaatgattttaaactgagacaggggagayttaggttagatatcaggaggaggtttttcacacagagggtggtgacacactggaacaggttgcccaaggaggttgtggatgccccatccctggaggcattcaaggccaggctgkatgtggctctgggcagcctggtctggtggttgktgaccctrcacatagcaggggggttgaagctggatgatcactgtggtcctttttaacctaggccrttctatgattctatgaaccacactggagatgttctatggcaaaacatgtgagaggcatttggtagacacagggtgaccaccttattt

SEQ ID NO: 47045 - DNA, 600 bp, Chicken  19866894288730_2
tggtgtgaatttcaccaatatcttggatgatgtgaactggcttatttttcacattaaactgtgctggaggatgagctccagaagagcatctaatgccactaacaagcttttcgtacacacaaccagtgtgttgtgtgatagtgataggacaaggggagaatgattttaaactgagacaggggagayttaggttagatatcaggaggaggtttttcacacagagggtggtgacacactggaacaggttgcccaaggaggttgtggatgccccatccctggaggcattcaaggccaggctgkatgtggctctgggcagcctggtctggtggttgktgaccctrcacatagcaggggggttgaagctggatgatcactgtggtcctttttaacctaggccrttctatgattctatgaaccacactggagatgttctatggcaaaacatgtgagaggcatttggtagacacagggtgaccaccttattttcctttgggctacccatgtcattgaggacacagccctggggcacaaaaccccagatcactgcagaaacatgtgagtgaagaggtgaaaggaaaggagtcgtggttgatgagtcac

SEQ ID NO: 47046 - DNA, 600 bp, Chicken  19866894288730_3
gaactggcttatttttcacattaaactgtgctggaggatgagctccagaagagcatctaatgccactaacaagcttttcgtacacacaaccagtgtgttgtgtgatagtgataggacaaggggagaatgattttaaactgagacaggggagayttaggttagatatcaggaggaggtttttcacacagagggtggtgacacactggaacaggttgcccaaggaggttgtggatgccccatccctggaggcattcaaggccaggctgkatgtggctctgggcagcctggtctggtggttgktgaccctrcacatagcaggggggttgaagctggatgatcactgtggtcctttttaacctaggccrttctatgattctatgaaccacactggagatgttctatggcaaaacatgtgagaggcatttggtagacacagggtgaccaccttattttcctttgggctacccatgtcattgaggacacagccctggggcacaaaaccccagatcactgcagaaacatgtgagtgaagaggtgaaaggaaaggagtcgtggttgatgagtcacacttggattcatttgtccaaccagtgctcccca

SEQ ID NO: 47047 - DNA, 600 bp, Chicken  19866894288730_4
ttatttttcacattaaactgtgctggaggatgagctccagaagagcatctaatgccactaacaagcttttcgtacacacaaccagtgtgttgtgtgatagtgataggacaaggggagaatgattttaaactgagacaggggagayttaggttagatatcaggaggaggtttttcacacagagggtggtgacacactggaacaggttgcccaaggaggttgtggatgccccatccctggaggcattcaaggccaggctgkatgtggctctgggcagcctggtctggtggttgktgaccctrcacatagcaggggggttgaagctggatgatcactgtggtcctttttaacctaggccrttctatgattctatgaaccacactggagatgttctatggcaaaacatgtgagaggcatttggtagacacagggtgaccaccttattttcctttgggctacccatgtcattgaggacacagccctggggcacaaaaccccagatcactgcagaaacatgtgagtgaagaggtgaaaggaaaggagtcgtggttgatgagtcacacttggattcatttgtccaaccagtgctccccagcagcagg

SEQ ID NO: 47048 - DNA, 600 bp, Chicken  19866894288730_5
ctaacaagcttttcgtacacacaaccagtgtgttgtgtgatagtgataggacaaggggagaatgattttaaactgagacaggggagayttaggttagatatcaggaggaggtttttcacacagagggtggtgacacactggaacaggttgcccaaggaggttgtggatgccccatccctggaggcattcaaggccaggctgkatgtggctctgggcagcctggtctggtggttgktgaccctrcacatagcaggggggttgaagctggatgatcactgtggtcctttttaacctaggccrttctatgattctatgaaccacactggagatgttctatggcaaaacatgtgagaggcatttggtagacacagggtgaccaccttattttcctttgggctacccatgtcattgaggacacagccctggggcacaaaaccccagatcactgcagaaacatgtgagtgaagaggtgaaaggaaaggagtcgtggttgatgagtcacacttggattcatttgtccaaccagtgctccccagcagcaggtgattatggccttcactgtagcttgttgcctggccatgtctccttactgaacaccay

SEQ ID NO: 47049 - DNA, 457 bp, Chicken  19866894288730_6
ttctatgattctatgaaccacactggagatgttctatggcaaaacatgtgagaggcatttggtagacacagggtgaccaccttattttcctttgggctacccatgtcattgaggacacagccctggggcacaaaaccccagatcactgcagaaacatgtgagtgaagaggtgaaaggaaaggagtcgtggttgatgagtcacacttggattcatttgtccaaccagtgctccccagcagcaggtgattatggccttcactgtagcttgttgcctggccatgtctccttactgaacaccayaccagctgcaagcctcactcgtgatggactcagacctcaccgaagcacagctgagaagcacactgatggtatgtatactgtttaaattaatagatagctaatagccttgcatatgcttgattagcctctgtgttatgcctgaagaggaccactacca

SEQ ID NO: 47050 - DNA, 599 bp, Chicken  19866894288734_1
  misc_feature (1)..(43): n is any nucleotide
nnnnnnnnnnnnnnnnnnnnnnnnnnnnnnnnnnnnnnnnnnntcaaaacccaagctgagctcttcttttatgactcacctccatggataacaacagaagcagttaatagcacctcctgccatacttaatatactttgttggctgtgctatttgttaatataacaatagcacgtggcaacctggaatcagaaatagcaaaactaatatcagtgacatttatttctaagtgtaaacacctcgatcttgaaaccctaaattggagtctgaacagcttcttaccatcagctaaataccacacrttgtgcctgaaaatgagctgcaaaacagaatgccagacagctctgcatcagtttgcttgggtggtttgcttcatctgtcccaaccattttagctctgaaaactacttcccaattttttaaataatagaaatgctctttataggatttttttcccccccaaactccaccatattttaagttcggggcaaaatctctgtttgttccacgttccttattcttgttccaagttgagccgaacctatgatagtactaataggcttaaggatggaaagttttattcagatttatcttttttctcc

SEQ ID NO: 47051 - DNA, 600 bp, Chicken  19866894288738_1
caaataaaccagtagagataaggctgtgagtatgcattagctcactccaccccagcaattttaactgctggaaacttctggctcatgatagctacagaacaatagaatgcatcaaaaacaaatacagtctctcataatgaggatgttttactcagatcttacccaaccttcctccacagttaaagtacattactagccaatgaacaaaagtaactttgcaacataagcacagtactacccattcaaggcacagaaattaaagcacagaaatttggaataactgagcagatttactgctgrtggcacaggggtattaagtgcactccttgataatttgaacacaaagactagagagaagactctcggtttgaggtttgtgttccatggtactgcggtggatgtgagaaaacccttaccaatctaagcaaacgtggctcagtgtcaaaacagttaacataaaaagagctctgtttccttggtcaatataatactaaatttaaagacctagtcctatcatatttggttccaatttccacagtatcaaagcagccaataagcctctctctgtatctctgcaagrcaggaaagcggtctctctat

SEQ ID NO: 47052 - DNA, 600 bp, Chicken  19866894288738_2
ctgagcagatttactgctgrtggcacaggggtattaagtgcactccttgataatttgaacacaaagactagagagaagactctcggtttgaggtttgtgttccatggtactgcggtggatgtgagaaaacccttaccaatctaagcaaacgtggctcagtgtcaaaacagttaacataaaaagagctctgtttccttggtcaatataatactaaatttaaagacctagtcctatcatatttggttccaatttccacagtatcaaagcagccaataagcctctctctgtatctctgcaagrcaggaaagcggtctctctatcagttatagtgaatagaggaataattgatagtgggaatgctctttgtgcaatcccagtccatttcagtgcagagcaaaaataggtcagcacaagccagcctgtgcatgctgttctactccaagtcagaagagactaaccagtgaagtgcatcaccttggtagaaggggtggtaatttctgactgcaaggcagctattttttaagttgtgaagcagttggcagctgctcatataaatagcatccatgagaccaggccaaggccacgtgggaagtctggtga

SEQ ID NO: 47053 - DNA, 575 bp, Chicken  19866894288738_3
tctttgtgcaatcccagtccatttcagtgcagagcaaaaataggtcagcacaagccagcctgtgcatgctgttctactccaagtcagaagagactaaccagtgaagtgcatcaccttggtagaaggggtggtaatttctgactgcaaggcagctattttttaagttgtgaagcagttggcagctgctcatataaatagcatccatgagaccaggccaaggccacgtgggaagtctggtgagggtcttcgggtctgcagcagcactcactggttcaaaacagatggcaacatttcttttcygatactgaacaaagccaaggcttcctgaactgcagagtgcattgtccaagcccccttcttggcttggttttctagtgttacagcagctgcgagagaagtctgtaagctactcatagatgtgaagtgcatcctcactgctaagtatcttatatttttgttgagtacaaataacatttctgttatagcagaaatgaaagaatagaatgtcgtcatagtttccatcagagtaaaagtttgtggctacatggataacccacagaagagctacagagaga

SEQ ID NO: 47054 - DNA, 510 bp, Chicken  19866894288739_1
ctgcttggtaattaaagccattcatagataataagaaatgcaataagcagttaacagtcttcctattatacttatcatttaattagcattttatgaggactgtttattgagaacaagaaacatctttccagccctctcaaaacgaactatgcggattcagaaccagaattgaattcccaagcatttccaattgcagtccacagctgtgagtgttcctgccctggctgggcagcaccgtgatctactggcctgagcaaacagagccagatgcacactggatccttacttcagatggcattytgtaggatttggcacatcacttgacctgttttcarctcagcttgaaagatccctgaaaagccagcaccctggtgcaaagcagacgctttgtgacaacaggttttcaggctcagtttgtaggctgttaaggcaaagattgcaccaataggaaaccggctctagaagaaatagtgccaaggcacaatacttcacatcctgacacagtaattt

SEQ ID NO: 47055 - DNA, 475 bp, Chicken  19866894288739_2
aaatgcaataagcagttaacagtcttcctattatacttatcatttaattagcattttatgaggactgtttattgagaacaagaaacatctttccagccctctcaaaacgaactatgcggattcagaaccagaattgaattcccaagcatttccaattgcagtccacagctgtgagtgttcctgccctggctgggcagcaccgtgatctactggcctgagcaaacagagccagatgcacactggatccttacttcagatggcattytgtaggatttggcacatcacttgacctgttttcarctcagcttgaaagatccctgaaaagccagcaccctggtgcaaagcagacgctttgtgacaacaggttttcaggctcagtttgtaggctgttaaggcaaagattgcaccaataggaaaccggctctagaagaaatagtgccaaggcacaatacttcacatcctgacacagtaattt

SEQ ID NO: 47056 - DNA, 600 bp, Chicken  19866894288761_1
cagcagtgctgatatttatctaacagattgaaaaactattctaatttttgggatttttttcctccctggcaactcggcatggataaaaaacaacgagcagctctcattcatctcgtgcatttctgaacgtcacggcagccactgtcagacaatgcaatcacgttcctctcctagcatttatttggcatgtttccttgtccctgtgcagggctgaggacacacacagaggacggtgtcacagtttcatcagtgccggatgctgaaaggacccacagaacccaaagcccggagcacacccascccttctggcgctgctccctgcactcagtgtagggctggcgtggggtaaatgggcggcagctcgcttctcccaattgcatggggcagtgcgtacctcagaagctgcactccaggtggaacatgggcttatcacagcctaatcccacagacagcagatgtgaaggtgcctcctggctggtggagctcggttgcactcatctgggtttagcagatgggagcagtacgtgttaaacacagacacctgcagggcccagccccatgcactgcctcagccctgggcagccactgggatcagagtgg

SEQ ID NO: 47057 - DNA, 600 bp, Chicken  19866894288761_2
gtaaatgggcatttctttttatattcccaaattaaaccgtttgcacgttaacctaaatgcaggcggctggctcaaatgggatgcagctcctgctgcaatggccctgaccaacagctctgctctgcactgaccacgcagtgctgccctgccctgggctgccccctgagcccccgtccatgcaggtggggcacagcgcatcacccacgggcacagacccacccaccctcagcgcatggctcaccctgggcccatcacacagggcagatcccctccgtggggcacaccgctcccacccgccgrgccccgcctgcctgcagccctttgtctgagacgaagccacgcgtgcaagtttattaagaagtgtgctttatggatttaattaaagcgcagcggaggaggcctcgctaatcctgttggcgccgcaccgtatggcagtgtggaaatcaatatcttygagtttgaatcttttatgatggcaaactgttcaatattaatgacgcaccgcgcagtcagcgtcaccacttctgtccttcctgcagggagtgtgcagagcgtcaggaaaaccccctgctctgcgkgctcctggtgggctgtttgctt

SEQ ID NO: 47058 - DNA, 600 bp, Chicken  19866894288761_3
gctgccccctgagcccccgtccatgcaggtggggcacagcgcatcacccacgggcacagacccacccaccctcagcgcatggctcaccctgggcccatcacacagggcagatcccctccgtggggcacaccgctcccacccgccgrgccccgcctgcctgcagccctttgtctgagacgaagccacgcgtgcaagtttattaagaagtgtgctttatggatttaattaaagcgcagcggaggaggcctcgctaatcctgttggcgccgcaccgtatggcagtgtggaaatcaatatcttygagtttgaatcttttatgatggcaaactgttcaatattaatgacgcaccgcgcagtcagcgtcaccacttctgtccttcctgcagggagtgtgcagagcgtcaggaaaaccccctgctctgcgkgctcctggtgggctgtttgcttctgggctcagggaacagacagaacagacgtgtctgatggccttcgggtggggatccctgctctgtgcaccaacactgcaaagcctggggctgggcggaggcttctggggtgaaagcatccattttgggggtgaaagtgtgggtgaaaaatgccc

SEQ ID NO: 47059 - DNA, 508 bp, Chicken  19866894288761_4
gcacaccgctcccacccgccgrgccccgcctgcctgcagccctttgtctgagacgaagccacgcgtgcaagtttattaagaagtgtgctttatggatttaattaaagcgcagcggaggaggcctcgctaatcctgttggcgccgcaccgtatggcagtgtggaaatcaatatcttygagtttgaatcttttatgatggcaaactgttcaatattaatgacgcaccgcgcagtcagcgtcaccacttctgtccttcctgcagggagtgtgcagagcgtcaggaaaaccccctgctctgcgkgctcctggtgggctgtttgcttctgggctcagggaacagacagaacagacgtgtctgatggccttcgggtggggatccctgctctgtgcaccaacactgcaaagcctggggctgggcggaggcttctggggtgaaagcatccattttgggggtgaaagtgtgggtgaaaaatgccccctttggggggggaaaatgcccctttgggggg

SEQ ID NO: 47060 - DNA, 600 bp, Chicken  19866894288769_1
gttagttattgtttcttctggaatgtaataagggactttgttcatgctcctaatctattgctaagttacctaaacccacctttgtacatggttaatgccattagaggcgtttcagatgcctgctttgctttgcactatgaaaggttggaagtgctcacaagatagttatctcaccagtgcagagggacgttacttcttaagcagtaagtgagaaacaaaaacaaaagctagaaaagtagtgactagtagtatgaagagcagataaagtatttttcctgttgtgagcccaaaaggtctttycctcaacacaaaatagtactgaaattggtgtctccaaggatacacttggattttgatatctaaggaatttgctttttgtagtgagaaaagtatttatcaggggtctttggctttatcctcctcatctcactctttctggctctgcttcttcttcagcgtgcctgctatctgtccataaacccccagaaggatgagactctggagaccgagaaggctcagtactacctgccagatggaagcactattgaggtttgtaaaagatgggagatttagtgcaatgtggggtgagagaggataatt

SEQ ID NO: 47061 - DNA, 600 bp, Chicken  19866894288769_2
tacacttggattttgatatctaaggaatttgctttttgtagtgagaaaagtatttatcaggggtctttggctttatcctcctcatctcactctttctggctctgcttcttcttcagcgtgcctgctatctgtccataaacccccagaaggatgagactctggagaccgagaaggctcagtactacctgccagatggaagcactattgaggtttgtaaaagatgggagatttagtgcaatgtggggtgagagaggataattttaaagaccaaaatgcatcccaggctgttgagctggggtsctagaatttttagggaaagagaacattattagaaatcttactaattctactggaattcttgggtaaggataaagcatgaccatagagtctgagaactgtttgagtgcagattctgatctagtaaatctttatgaggatcaggtatggagtgtgggttggagctgtaaattgtgctgtggttttgtatgtggctttttttcctgcccagatgaacagaaactactggtttgaagagtgacttgggaatattctttaagccttctgtagaatggttgaaggagaggaaatacaagtcttacc

SEQ ID NO: 47062 - DNA, 600 bp, Chicken  19866894288774_1
tgagagagtggtgaggtgctggcacaggctgcccagagaggctgtggatgccccatccctggaggcgttcaaggccagcttggatggggccctgggaaaactggtctagtacttgcctgtggcaggagcattggaacttgaggatccttgtggtcccttccaacccaagccattctgtgatcaaactgtgggtcactggctcttagcagtggatgacaacaaatgagccacgttatctgtaaacagcatttccatctcagtattgaaaagcctgtgcaaatctgtagtgggcttttccamctaggatattctatcgtgtgttttaggttgaagtcttgtatgggtttgattagcaaacatctaaaagtaacgattaagggctgattatcaggtactcagcatttcctgttgataagggctgggctgtgtggacctttcattcttccaagccacagcttctcattcatcactgtaggatggtggatttggcaattaggcttccaccggtcctaatggaaatgtgagtaatctgaatgcagcaaagcacagtccgtgtttgcactgttaaggaggagaacacttcattaatgccttaagaaa

SEQ ID NO: 47063 - DNA, 599 bp, Chicken  19866894288776_1
  misc_feature (1)..(129): n is any nucleotide
nnnnnnnnnnnnnnnnnnnnnnnnnnnnnnnnnnnnnnnnnnnnnnnnnnnnnnnnnnnnnnnnnnnnnnnnnnnnnnnnnnnnnnnnnnnnnnnnnnnnnnnnnnnnnnnnnnnnnnnnnnnnnnnnnccagcctcaaggcaaagggtttctgctggagaagcacacagggccaggatcaaaatctctgggtttggatgctagatcaacacatttccaggtcagcatcacaaaaatgccccagctagcaaatcctattgtgggatagattcagttgtcttcatagatttcctgctgccrgagaaagctccgggcagcaggcaccacaaacaaaggataaacatcttctgatagcatctatgtctgccatcccattcccagtgcaattccagagtgactctggagacaacccacaccatggaacagtgtgaactgaatggtttgagccttactttgttctccgtagccagcaccaccaagcagcaagcttccacrggtaccacaccgctctccgacagcgagcccgaggtgagagctttggagctctcagcactgagactctggcttggggagatcccggggtcctgagctgagaaaca

SEQ ID NO: 47064 - DNA, 600 bp, Chicken  19866894288776_2
ggatgctagatcaacacatttccaggtcagcatcacaaaaatgccccagctagcaaatcctattgtgggatagattcagttgtcttcatagatttcctgctgccrgagaaagctccgggcagcaggcaccacaaacaaaggataaacatcttctgatagcatctatgtctgccatcccattcccagtgcaattccagagtgactctggagacaacccacaccatggaacagtgtgaactgaatggtttgagccttactttgttctccgtagccagcaccaccaagcagcaagcttccacrggtaccacaccgctctccgacagcgagcccgaggtgagagctttggagctctcagcactgagactctggcttggggagatcccggggtcctgagctgagaaacacacaaatcatcacagaaaggccaaggtagtaagcaaacaatcagtccttgcaagccaggctgggcacagagctttctatgcagtgaaaatagaaattacagcaaagctttagggaggttctgcacaccggtctggtctctaaccctgcagggatagcaaagcccacagaacaggagagcacaggatcccacaacca

SEQ ID NO: 47065 - DNA, 600 bp, Chicken  19866894288776_3
tctcagcactgagactctggcttggggagatcccggggtcctgagctgagaaacacacaaatcatcacagaaaggccaaggtagtaagcaaacaatcagtccttgcaagccaggctgggcacagagctttctatgcagtgaaaatagaaattacagcaaagctttagggaggttctgcacaccggtctggtctctaaccctgcagggatagcaaagcccacagaacaggagagcacaggatcccacaaccagcagaaaacataccagaggagaaagcccataggggatccacctgagatrgagagatgcattatttgttcaaagcatttgaatgaagaacctgtaatttagagcaggttcctgacaactccatgaatcgccggcttcatttccatggctcagacagcctcaggaatccaacagcrgaattacagccttgtaagtcagttattcattcattctctagactgtccttcgctgtcacagggtttgtaatccagtaagtctgtcattacatcttttaagtagctcaaccttccccaaacacttcagccccaaaccatgcaggtttaacaaagacagagctgctggggacagatt

SEQ ID NO: 47066 - DNA, 577 bp, Chicken  19866894288776_4
gctttctatgcagtgaaaatagaaattacagcaaagctttagggaggttctgcacaccggtctggtctctaaccctgcagggatagcaaagcccacagaacaggagagcacaggatcccacaaccagcagaaaacataccagaggagaaagcccataggggatccacctgagatrgagagatgcattatttgttcaaagcatttgaatgaagaacctgtaatttagagcaggttcctgacaactccatgaatcgccggcttcatttccatggctcagacagcctcaggaatccaacagcrgaattacagccttgtaagtcagttattcattcattctctagactgtccttcgctgtcacagggtttgtaatccagtaagtctgtcattacatcttttaagtagctcaaccttccccaaacacttcagccccaaaccatgcaggtttaacaaagacagagctgctggggacagattcccaggcccctctcagtgcagactgaacattaagaaaatattctacaccagagagtggtgggtatggaacaggaaactggtcgcagccctgagctgccaaag

SEQ ID NO: 47067 - DNA, 599 bp, Chicken  19866894288780_1
  misc_feature (1)..(58): n is any nucleotide
nnnnnnnnnnnnnnnnnnnnnnnnnnnnnnnnnnnnnnnnnnnnnnnnnnnnnnnnnnaaatgcctgtggaggaagacatacatatctacattagaagacgtacatggactgcacttattgttgtgtacacttcctgaataatcttaactattactgtggcaggagaggtgttaaataacattagacaaagtagaaatactgtaaaccagagaaggttaaatgctacaagtctaattccaacttcagctatacttatgagagctgataggcaataaagtaacaggaaagcaccgtaggcraggagggagagatgatccatgatgtgacgtctgtgggataaacagagaaaaaagctggactgcaaacagcaaggaggcgtacctgctggccctaaaagatagagatcatttcttaatagagattagataataaaagaagagctcaacctctgtgtgagctcatgttcaagggaagattcctaactgtagataacttgggagagtccttagagctcaggtaaatttaagtaagagagaactggcctccctatcactgagtgatctttcaggcaggattgagagctttccgctataattcc

SEQ ID NO: 47068 - DNA, 600 bp, Chicken  19866894288781_1
gtgactgaaatagctgtgttgttcaggcataagtaaaatactgtttattattctactccgcttatacttcagttcatctgtcccaaaacagctgcatgaggcaataacgttgacagagttctgagcaatgtgaatcaaggttttacagtccagtgtaatagattaatgtaacttcttaccagtttcaccgtactggtggaacagccactgcagccccatgtctttttaatgacttaaatatcaaaggaactggaagagtctcacaactaagattttggaggaagctgaaggagtgagtcmcaagcggtcatctggtcagttggtaagtgtttctcaggcctatttttaatcgtctccaatgatgaagacccaaagcctactccaagaaagctgttgttttattgctttgctatccagtgccagaaaacatttccctcatgctaacctaaaattcaatggctgtcatgctagtgatgcactctggtgttgaaacattttttggtaagcgtatgacaccgctgggatgccttttgttgtgatcttattcagaaccgatactcagcctcattttttatccatcatgtgtttcactcagactac

SEQ ID NO: 47069 - DNA, 600 bp, Chicken  19866894288784_1
tttggcactacagaagcttagagttatgatcatttcctcccaagaaatactatttcattaaaacatttctctacagaagtttgataatttataacattgacaaatctgcctcataatagctactatttccaagttatttgcaggaggacaaatatctctattcacccaaattaatgcaagttggtttaaggtactgctgaagagaagagcatcttttccataaaagcatgttattgcccaccctccccaagaacctgaggcctaacaaaggactcaatgcacataacaatatgatcagaraaacaagaaagattaaaaacagaaagagaaaagaaaaggacacagccttagaggaatgagacattacctttggagcgcacgatgtaacactgtttctgtaaattttacacaaaaatggcagaaataaattgtaatacattttcagacaaaactgagtctatgtttttattaaatacaagtttaaaattaatattaatcaagttgtatgcagaacaaggatgcctaaaaagagggctctaaattttctttagaatacaaggcactttgaaaactacagtcagttctcttgaacaacacaaa

SEQ ID NO: 47070 - DNA, 599 bp, Chicken  19866894288787_1
  misc_feature (1)..(89): n is any nucleotide
nnnnnnnnnnnnnnnnnnnnnnnnnnnnnnnnnnnnnnnnnnnnnnnnnnnnnnnnnnnnnnnnnnnnnnnnnnnnnnnnnnnnnnnnntatcctggctttggcactgcgtggtttttcgagcaattacatgggctttcctatgcctcgttttttctcatctatgaatggaaacagaaatatatcagtgaatacaaacaatacctatttatacttcaataatcagcatgctttctagtcaaagcaatggaataaatacagtagtagattcataatgaacgtctttgtgcttaacaggctrattggatgagaaggtgtaagtattgtttaatttatgctcatgtagtagtgtgaacttacaaagtgctttagtaattgtactatagaatacactgagttggaaaagacccgacaaagatcattaagtccaactcctagcaccacacctgactaccccaaatccaagccctgtgtctgagcattgtccagtgctccttaaactctggcagcttggcaccataaccactgccctgaggagcctcttcagtgtctgaccaccctctggtgtagaatcttttcctaacactcagcctgaccctc

SEQ ID NO: 47071 - DNA, 440 bp, Chicken  19866894288787_2
ccgacaaagatcattaagtccaactcctagcaccacacctgactaccccaaatccaagccctgtgtctgagcattgtccagtgctccttaaactctggcagcttggcaccataaccactgccctgaggagcctcttcagtgtctgaccaccctctggtgtagaatcttttcctaacactcagcctgaccctcccctgacacagccccatgccactccctcagatcctcctgctgtcaccagagagcagagctcagcgcagcccctctgctccctgtgaggagctgtaggctgccatgggkcctccyctgctctggactgagcagaccaatgggcctctgccactcctcatatttcttgccctccagactcttcaccatctttgttgccctcctttggacatgctctaatagttttatatggactcctgatctgaatcttg

SEQ ID NO: 47072 - DNA, 434 bp, Chicken  19866894288787_3
aagatcattaagtccaactcctagcaccacacctgactaccccaaatccaagccctgtgtctgagcattgtccagtgctccttaaactctggcagcttggcaccataaccactgccctgaggagcctcttcagtgtctgaccaccctctggtgtagaatcttttcctaacactcagcctgaccctcccctgacacagccccatgccactccctcagatcctcctgctgtcaccagagagcagagctcagcgcagcccctctgctccctgtgaggagctgtaggctgccatgggkcctccyctgctctggactgagcagaccaatgggcctctgccactcctcatatttcttgccctccagactcttcaccatctttgttgccctcctttggacatgctctaatagttttatatggactcctgatctgaatcttg

SEQ ID NO: 47073 - DNA, 599 bp, Chicken  19866894288789_1
  misc_feature (1)..(3): n is any nucleotide
nnnctggggtggcaatacagtgggaaacactgaagagaacaacagtctttatattctacccctttcctgggcaccttacacaaaatgtcaggaaatttatctcctacactcaggatgaaatgttaaacatcttcactcgacagggatagtaggcacctcctttccatctcccttctctcctctgccaatggtagcacatcctctggctctgtagtcagtgcactcatgaaggactgagatgtgggtttagatactacactcagattatctcccacctccaattaaagattaaaagcgtgkcctctctcctccctcttttgtgttgatgagctctggagctgcagccagatcaggctccacatgaggcaggcaggaggaatactgataattgtctctgcctgaagagatgcttttcattgtcagcactgagacacttcttcaaacacaggaaagaatttgaaatgaccaatgtattctgctatgaaagaaatagatcattatgtatctaccataatggggaaatggtgtgcaatgattttgtgggttgacgcttttagcgtgggcaagtaacatggtaagttaggtcacagaactcattc

SEQ ID NO: 47074 - DNA, 600 bp, Chicken  19866894288790_1
acatttgggaagactgatcagttcctcagctctgagcagtacgaggctatgctggaaatgttataactgtgcagaaaaactggaggatggaaactgcctgttgtgcaacacagtttgttggggactcagcagccaggagaggtggatgagtgctccaggacccggcccctgccattttgctgtttaggagacggtggcagcagccactgcagacactgggtgcagccgtgtgtgcttcaacatgtttatcccgtaggagaaatgtaggctcttctgggtgattcaggcttccttaaggartaaaacatgggaaatggtgaatgggaggagaagaggtgggtcgtctgcctgagtaaagaccaccctttaaaagcttgtatgttctgatttctaaggtgatggtaaatggtagaaagatgtgtaccaaaaaaagctgcctctgtcctgcagctgtatttcagtaaggacccagtaarctctcacagataccaatggcattcctgtttgtactgcagcctcccacgtgaaatgaaccaactgatatctgctgggctcctgagagcccttggcctgaagcaggggggggttaaacaaaccagc

SEQ ID NO: 47075 - DNA, 600 bp, Chicken  19866894288790_2
ttgctgtttaggagacggtggcagcagccactgcagacactgggtgcagccgtgtgtgcttcaacatgtttatcccgtaggagaaatgtaggctcttctgggtgattcaggcttccttaaggartaaaacatgggaaatggtgaatgggaggagaagaggtgggtcgtctgcctgagtaaagaccaccctttaaaagcttgtatgttctgatttctaaggtgatggtaaatggtagaaagatgtgtaccaaaaaaagctgcctctgtcctgcagctgtatttcagtaaggacccagtaarctctcacagataccaatggcattcctgtttgtactgcagcctcccacgtgaaatgaaccaactgatatctgctgggctcctgagagcccttggcctgaagcaggggggggttaaacaaaccagctgttacagcagagaaccctgaaaatacaacagctcctttaataaagtgccaggggtgagaaaataggtgatgtgttttttttcttcttaatgaatcaatgagaaaacccccaaatctcgaaatccaagactcagaacgtaattatttttttaaaacaaaacattgcaaaatctttt

SEQ ID NO: 47076 - DNA, 600 bp, Chicken  19866894288794_1
ctaagcttggtatgcagtgctagtaatgaagaaagaaagagaaaaaaggagagcttagaccatacagagaaatgactggagtcaatgctaaaggtatctatgttcattagtacattacagttatcatgtccagtgacacatggcttatggtaagatgaatcatagaatcaaagaatttctcaggttggaaaagatcttaaagatcttaaaagatcatcgagtttaaccacagactaaccatactaccctaactctagcagccctctgctaaatcatgtccctgagcaccacatccaaackgtttttaaacacatccagggatggtgactcaaccactttcctggggaccctattccagtgcttaacaaccctttctgtaaaggagtccttccagatatccaacctaaagcttaaggccatttctcctcgtcctgtcacctgtcaccagtgagaagagaccaaccccgctctcgctgtaagcacctttcagatattggaagagagcaataaggtctcccctcagcctcctcttccccagactgaacagccccagttccttcagtcactcctcgtagggcatattctccaagaccttcacaa

SEQ ID NO: 47077 - DNA, 599 bp, Chicken  19866894288795_1
  misc_feature (1)..(30): n is any nucleotide
nnnnnnnnnnnnnnnnnnnnnnnnnnnnnnatctttactctcccctccaaagtaagccattctatgattctatgatttcctttagaattgctacatcatggttcaattttataatatgagagctctgttttcaactcttattcctgttcagcaccaaagctagtattgctgggatatttaacttagtggtacctgaggtcacctgtcttttctcattcacagtgatctatatttaatgcacaataactgtgactgtgtatgttttcattaatccccatgactttacacttcactgcataktcatggtttcttgttagaccatgtaattaaaataaataataaaacaataataaaaacaagactagatttcactgagatacaaataataaaataataataataaataacaactccccccccaaaaaacttcagttacaagaaacagtattctcattttcactgtaattaatttcaataagtgttttattttttcatcaaattctagctgaaatgaacctgatttttcttcttgcattcaatgatctctacatatattggatatggtattatctaaacagatttatagggttaaaataaaa

SEQ ID NO: 47078 - DNA, 600 bp, Chicken  19866894288796_1
gactgttctcatgcaatctttcatgttttgttcttgatcaatgaacaatccagaacttcgtggctctcccattaatgtttccctacaagatagcttctacagtagaacagctttaactttgaaacacagaccttcattaggaaaccaaagtgcataaaaaccctgagaacagttctttttgcaattgatgcccatttagattacgtgcctacatgcttcacctgaagaaacagtggcggaatgtcaaaatggaagaaggaatgaaagacaaagctaaaatgctgaagaaattcttttgcracaagtgatcatatcacatgttatgaaatttaactgctgcttaagaaactctgggaacttccaacttccactttcaagaatgtaactgcctaattctaggaagctggacgctgtatcagaactgcagaagtttatcactggttacaaaaaggactccaccagttttgcccaagatgtctacattgcttatctaaagggaaaggctccaacatgccccaaaccaagtacgctcaatctttgcaaccaacttaatcaagtttttctccacctaaggcattttaggcttttttttttttttta

SEQ ID NO: 47079 - DNA, 599 bp, Chicken  19866894288804_1
  misc_feature (1)..(202): n is any nucleotide
nnnnnnnnnnnnnnnnnnnnnnnnnnnnnnnnnnnnnnnnnnnnnnnnnnnnnnnnnnnnnnnnnnnnnnnnnnnnnnnnnnnnnnnnnnnnnnnnnnnnnnnnnnnnnnnnnnnnnnnnnnnnnnnnnnnnnnnnnnnnnnnnnnnnnnnnnnnnnnnnnnnnnnnnnnnnnnnnnnnnnnnnnnnnnnnnnnnnnnnnnnagagcacgctgctggccctgcagagcagcacagtgggggcaccaacccaacccccagggtctgagtgccctcaccctctgattgccaaagccatgccrggctcagggtgtgtgccctgccccagccctgccccagctcctccccaccaggaagctctctcagcatctgggaagaccccgaggctgcataaaacttcagcccatgattcacttccttcctcttcaggactaggctaatttgagagtgtgcactgagcattaattactgtccttgccatggtttcctatccaggcgtcctttcccagctgactttctgctcgctygggtccaaggccgtwaaaactcccccattaggaaaggaaatattttacatcaggtttrtactgtatgcctgagg

SEQ ID NO: 47080 - DNA, 600 bp, Chicken  19866894288804_2
agcagcacagtgggggcaccaacccaacccccagggtctgagtgccctcaccctctgattgccaaagccatgccrggctcagggtgtgtgccctgccccagccctgccccagctcctccccaccaggaagctctctcagcatctgggaagaccccgaggctgcataaaacttcagcccatgattcacttccttcctcttcaggactaggctaatttgagagtgtgcactgagcattaattactgtccttgccatggtttcctatccaggcgtcctttcccagctgactttctgctcgctygggtccaaggccgtwaaaactcccccattaggaaaggaaatattttacatcaggtttrtactgtatgcctgaggtcatcagaagtacagatcgagtggcagaaataaacactgcgctctctctttccagcatgaaaaaggaatcaataactcattgatttaaattaaaatgtcttctttgcaaaatgcctctgagcggtgatgtttgcagccccgtgtgttgtgatggtgatggaaagcagctgcccctgtgctgcaggcatggctccatccccggtgaggtgcccacaggctgcgtccc

SEQ ID NO: 47081 - DNA, 600 bp, Chicken  19866894288804_3
gcaccaacccaacccccagggtctgagtgccctcaccctctgattgccaaagccatgccrggctcagggtgtgtgccctgccccagccctgccccagctcctccccaccaggaagctctctcagcatctgggaagaccccgaggctgcataaaacttcagcccatgattcacttccttcctcttcaggactaggctaatttgagagtgtgcactgagcattaattactgtccttgccatggtttcctatccaggcgtcctttcccagctgactttctgctcgctygggtccaaggccgtwaaaactcccccattaggaaaggaaatattttacatcaggtttrtactgtatgcctgaggtcatcagaagtacagatcgagtggcagaaataaacactgcgctctctctttccagcatgaaaaaggaatcaataactcattgatttaaattaaaatgtcttctttgcaaaatgcctctgagcggtgatgtttgcagccccgtgtgttgtgatggtgatggaaagcagctgcccctgtgctgcaggcatggctccatccccggtgaggtgcccacaggctgcgtcccatcccctgcaaggat

SEQ ID NO: 47082 - DNA, 600 bp, Chicken  19866894288804_4
ttgccaaagccatgccrggctcagggtgtgtgccctgccccagccctgccccagctcctccccaccaggaagctctctcagcatctgggaagaccccgaggctgcataaaacttcagcccatgattcacttccttcctcttcaggactaggctaatttgagagtgtgcactgagcattaattactgtccttgccatggtttcctatccaggcgtcctttcccagctgactttctgctcgctygggtccaaggccgtwaaaactcccccattaggaaaggaaatattttacatcaggtttrtactgtatgcctgaggtcatcagaagtacagatcgagtggcagaaataaacactgcgctctctctttccagcatgaaaaaggaatcaataactcattgatttaaattaaaatgtcttctttgcaaaatgcctctgagcggtgatgtttgcagccccgtgtgttgtgatggtgatggaaagcagctgcccctgtgctgcaggcatggctccatccccggtgaggtgcccacaggctgcgtcccatcccctgcaaggatgcaacatgggcagcttttggaaatcacctctcctggggcatga

SEQ ID NO: 47083 - DNA, 600 bp, Chicken  19866894288806_1
acaagaaagcaatgctatgatggcacttatgaacagactgctattgtgatagttttcctgtcctaatcctgaatgtgtgtaaggaaatgagttatcatatatttcaatcttattaagaagttgaatttacaggtagaaataataaatgcactcacaccttcacttgagtctcctcctgcaggggctgttgatatcctgcatgccggtttgattcccttactcgtggtcagattgaagactgagtcggatgaaatccaggagttaatcctaggcacactctccaactgtctgcgtgtggargcttctgaagctctrgcaactgatgccatcaccattctgaaggaaaagctcacacatccctcagcaaccatcagaaacaaagcagctcaggtcattttagaaatcgggtaatgaaaatctatagtatttaatccaagaaaatactcatttcatgactgaatcaagtccactagtggtacagtagtattccagcatacactgaaggtggtacatttcacaagtaatatcagcctgtatgcacatgcagacagaagacttcttaaagtcatgactgctacagatcactcagaaagcagaagc

SEQ ID NO: 47084 - DNA, 600 bp, Chicken  19866894288806_2
tatgatggcacttatgaacagactgctattgtgatagttttcctgtcctaatcctgaatgtgtgtaaggaaatgagttatcatatatttcaatcttattaagaagttgaatttacaggtagaaataataaatgcactcacaccttcacttgagtctcctcctgcaggggctgttgatatcctgcatgccggtttgattcccttactcgtggtcagattgaagactgagtcggatgaaatccaggagttaatcctaggcacactctccaactgtctgcgtgtggargcttctgaagctctrgcaactgatgccatcaccattctgaaggaaaagctcacacatccctcagcaaccatcagaaacaaagcagctcaggtcattttagaaatcgggtaatgaaaatctatagtatttaatccaagaaaatactcatttcatgactgaatcaagtccactagtggtacagtagtattccagcatacactgaaggtggtacatttcacaagtaatatcagcctgtatgcacatgcagacagaagacttcttaaagtcatgactgctacagatcactcagaaagcagaagctgatgagaastcatt

SEQ ID NO: 47085 - DNA, 600 bp, Chicken  19866894288806_3
ctctrgcaactgatgccatcaccattctgaaggaaaagctcacacatccctcagcaaccatcagaaacaaagcagctcaggtcattttagaaatcgggtaatgaaaatctatagtatttaatccaagaaaatactcatttcatgactgaatcaagtccactagtggtacagtagtattccagcatacactgaaggtggtacatttcacaagtaatatcagcctgtatgcacatgcagacagaagacttcttaaagtcatgactgctacagatcactcagaaagcagaagctgatgagaastcattccttctcctcctatttgcrcttctgtactagcaatgaaatcagggcttttcctggtatagtactgctaggaagaaaagcttgcatgagaaatcatgagcagtcrggtagggaagaagctcccttactttacagggcaactgcttcttcagaaatttaaaggtctttatattaaatttgtatattaaactgggtgaaagtccattgtctgacaatcacaaaaaaaaaaaaagggctcaatagatgtctggtttaaaaaggtctgcaaatcgtgttgtttacaaaagaattggcaca

SEQ ID NO: 47086 - DNA, 600 bp, Chicken  19866894288806_4
ttctgaaggaaaagctcacacatccctcagcaaccatcagaaacaaagcagctcaggtcattttagaaatcgggtaatgaaaatctatagtatttaatccaagaaaatactcatttcatgactgaatcaagtccactagtggtacagtagtattccagcatacactgaaggtggtacatttcacaagtaatatcagcctgtatgcacatgcagacagaagacttcttaaagtcatgactgctacagatcactcagaaagcagaagctgatgagaastcattccttctcctcctatttgcrcttctgtactagcaatgaaatcagggcttttcctggtatagtactgctaggaagaaaagcttgcatgagaaatcatgagcagtcrggtagggaagaagctcccttactttacagggcaactgcttcttcagaaatttaaaggtctttatattaaatttgtatattaaactgggtgaaagtccattgtctgacaatcacaaaaaaaaaaaaagggctcaatagatgtctggtttaaaaaggtctgcaaatcgtgttgtttacaaaagaattggcacaaaaaacttcttaacttccaacaac

SEQ ID NO: 47087 - DNA, 600 bp, Chicken  19866894288806_5
tatagtatttaatccaagaaaatactcatttcatgactgaatcaagtccactagtggtacagtagtattccagcatacactgaaggtggtacatttcacaagtaatatcagcctgtatgcacatgcagacagaagacttcttaaagtcatgactgctacagatcactcagaaagcagaagctgatgagaastcattccttctcctcctatttgcrcttctgtactagcaatgaaatcagggcttttcctggtatagtactgctaggaagaaaagcttgcatgagaaatcatgagcagtcrggtagggaagaagctcccttactttacagggcaactgcttcttcagaaatttaaaggtctttatattaaatttgtatattaaactgggtgaaagtccattgtctgacaatcacaaaaaaaaaaaaagggctcaatagatgtctggtttaaaaaggtctgcaaatcgtgttgtttacaaaagaattggcacaaaaaacttcttaacttccaacaacaaaatgaggtcttagagaaagagactgtagatacagtgagtgatagaaaaaagtcaggaattgacctacagtatggccatcctct

SEQ ID NO: 47088 - DNA, 600 bp, Chicken  19866894288810_1
gatactacttagaaacacaggtatgaatatgttaaacacatcggacttaaagcaaatgagccacacatgaataagtcaagagccaggcaaaattgtgttaacacacaaagaacgtgaaaaaccatgggctattttgtaaatggtctttcatatggtacttggttcaaatggtacttccatatgaaagtttttactttggaatggtacttccaagggcactgatagatactcccttctaagtgcagctggaacactggagaacaccgtctccaaacactcactaatggtcaccctttgcawggtttttcagataaccttactatttttgtaccaaagagaatttcagggaacacgctcactcagtctggtctaccaatcacaactatggacaaagtagtgtccagagtaaggatggtaatgatgggtacaattaaaccatttcagtcacatgcaatatgaacgtgttccatgtgctctcttaaatacttattgaaagggataaatttagactcaggactcccatttcacactaaccaagatgtgaagttacagtgcatccaaagtcagacagaaagaaccttcaataaacgtcaatcattt

SEQ ID NO: 47089 - DNA, 600 bp, Chicken  19866894288818_1
atgccatattgacaaaatgagtaaattgttagtgttctttcattttgctaagactttttttttttcttgagtatttgggtgtcaaagtgaataagcgaacacgcaattcccacatcacatggtgagcattgactattatgctatactgttacatgaatgagggccaactgctacagatgcaggacagcataaaggtccacactagaactgaataatctttcagaagagcctttctcagaaacaatcagttcttctgccagcaccatgtacaggtcacattgaaaagaatgctcaagagcycatggaggaaacagatgcttcaacagtaccttgtaaaaatgatgttgtgatagaaaacataaaagatgtgactaatttgatgagcatagcacagaaccctgcaatggattgcagcctgttcagcacccgcaggtttgtgtgcacacctgcagcagaagtgctaagtcataacctgaaggagtgattgagcacctggtgggaaggcagggcaaaactagggggactcaggtgcatgcaatatacctgagaggaagggggtagagccaggatccaccccttcccagacctcatttaagggct

SEQ ID NO: 47090 - DNA, 600 bp, Chicken  19866894288824_1
tgctttcttttatcgtatgttctgttgagctggctagtgaactagattctgtttgttactgtatgttctattaagcaacatgtatctgggcttcctgctgcatctaatcaactcaagtatttgcacagtgaagcagtggcctttgttttcatttgtagctggttgctttttatgctgtttctctttacagatggaaaaattggtggattcgtggaattctaacgctggctatgatttccatgttttttctgatcatatacatgggatctttcatgctgatgcttctggtgagtttgtttraatgctctgtattgtgcaagagttacttaatctcttcgtcatgcataagaaatagctggaagcaaagtgtagacgttacagaaagcaatttttctcttctgtaaatgtaggtatctttgaactactgaaaagattctcagttgggtgattttggatgaagacctccttgataacttgatttaggaagaaattaaacaagtcgaacagatttttgccttgaagcttatgaaattactgtaatctatttgcttgtctgattcccattactttctcataccctcctttggttttgtttgaaat

SEQ ID NO: 47091 - DNA, 599 bp, Chicken  19866894288826_1
  misc_feature (1)..(92): n is any nucleotide
nnnnnnnnnnnnnnnnnnnnnnnnnnnnnnnnnnnnnnnnnnnnnnnnnnnnnnnnnnnnnnnnnnnnnnnnnnnnnnnnnnnnnnnnnnnngaaagggaagggcaagagaagcagtgatcttacagctagaaggatatggttgtgaagggatctaagtttcagggaacagagggaaattcatctgggtgtaggttttactttccactcctggtatgcaatgacagttgcacaaaacagagatgtttaattgcagtgctctgtttctctgaccagtctggaaagctatgtgtgccaacaraattgagctccaactcacggttttgagtagggtatttctccctgttttctgagatttcttcccattttcaagatacttctttatcaaaaaagatgtgacgtaagccttgtagtcttgatatgcttaagtgtttgttgagctgacaagacaattaaaatgctaaatgcatggaaaattgggttcttaatttttgaaggtagtaagtttcctgaattgtcttttgagagcttggagtacagatgactttgtcttaattttttttaccagttggtttaaagtctaatttattagtacttaca

SEQ ID NO: 47092 - DNA, 600 bp, Chicken  19866894288826_2
aactcacggttttgagtagggtatttctccctgttttctgagatttcttcccattttcaagatacttctttatcaaaaaagatgtgacgtaagccttgtagtcttgatatgcttaagtgtttgttgagctgacaagacaattaaaatgctaaatgcatggaaaattgggttcttaatttttgaaggtagtaagtttcctgaattgtcttttgagagcttggagtacagatgactttgtcttaattttttttaccagttggtttaaagtctaatttattagtacttacatcaccatgtccyttctgkytttttttccaaaaacaggatgataccactttcatctcagacactgatgatgaatcttcatcatggccaaacacaggaatatgtgatcaaacccaagtattatccagtaaaaaaagtgatttcaggagagcaatccactgagggctcattaccactgagactcggccaagatcaacttgcgtcatcttttcaatgtaagtacgattgcaaaaagcatactataagcctcttttatttaaggtcttgaaaatttatctgttcatctgaattgcagtaacacttaaagataaaaaa

SEQ ID NO: 47093 - DNA, 600 bp, Chicken  19866894288826_3
cggttttgagtagggtatttctccctgttttctgagatttcttcccattttcaagatacttctttatcaaaaaagatgtgacgtaagccttgtagtcttgatatgcttaagtgtttgttgagctgacaagacaattaaaatgctaaatgcatggaaaattgggttcttaatttttgaaggtagtaagtttcctgaattgtcttttgagagcttggagtacagatgactttgtcttaattttttttaccagttggtttaaagtctaatttattagtacttacatcaccatgtccyttctgkytttttttccaaaaacaggatgataccactttcatctcagacactgatgatgaatcttcatcatggccaaacacaggaatatgtgatcaaacccaagtattatccagtaaaaaaagtgatttcaggagagcaatccactgagggctcattaccactgagactcggccaagatcaacttgcgtcatcttttcaatgtaagtacgattgcaaaaagcatactataagcctcttttatttaaggtcttgaaaatttatctgttcatctgaattgcagtaacacttaaagataaaaaaaaaaat

SEQ ID NO: 47094 - DNA, 600 bp, Chicken  19866894288826_4
ggttttgagtagggtatttctccctgttttctgagatttcttcccattttcaagatacttctttatcaaaaaagatgtgacgtaagccttgtagtcttgatatgcttaagtgtttgttgagctgacaagacaattaaaatgctaaatgcatggaaaattgggttcttaatttttgaaggtagtaagtttcctgaattgtcttttgagagcttggagtacagatgactttgtcttaattttttttaccagttggtttaaagtctaatttattagtacttacatcaccatgtccyttctgkytttttttccaaaaacaggatgataccactttcatctcagacactgatgatgaatcttcatcatggccaaacacaggaatatgtgatcaaacccaagtattatccagtaaaaaaagtgatttcaggagagcaatccactgagggctcattaccactgagactcggccaagatcaacttgcgtcatcttttcaatgtaagtacgattgcaaaaagcatactataagcctcttttatttaaggtcttgaaaatttatctgttcatctgaattgcagtaacacttaaagataaaaaaaaaaatt

SEQ ID NO: 47095 - DNA, 599 bp, Chicken  19866894288835_1
  misc_feature (1)..(207): n is any nucleotide
nnnnnnnnnnnnnnnnnnnnnnnnnnnnnnnnnnnnnnnnnnnnnnnnnnnnnnnnnnnnnnnnnnnnnnnnnnnnnnnnnnnnnnnnnnnnnnnnnnnnnnnnnnnnnnnnnnnnnnnnnnnnnnnnnnnnnnnnnnnnnnnnnnnnnnnnnnnnnnnnnnnnnnnnnnnnnnnnnnnnnnnnnnnnnnnnnnnnnnnnnnnnnnntgtaaagcttgggaacactcaatgtatttcaaaagtcactacgtataagcttgatattatagaagatgatactcaaagacttctgtgtagggyggttcttcaggtagaargacttgggatttcaggactgagtcatagaatgtacatcagcctttgacctttttcatgatctttttctaagaattgacaaaatatataaatattatataaatattaacacaaaatgatgccaagctctgaagaatttgactgtcccactgaaagagtgaacagaacggaatagttcagttggaagagaccttcagagatcatcaagtccaacagcctgaccatttcagggccaatcaaaagctgtcactgctaataggtgtcactgcatgtctacacttggc

SEQ ID NO: 47096 - DNA, 599 bp, Chicken  19866894288835_2
  misc_feature (1)..(190): n is any nucleotide
nnnnnnnnnnnnnnnnnnnnnnnnnnnnnnnnnnnnnnnnnnnnnnnnnnnnnnnnnnnnnnnnnnnnnnnnnnnnnnnnnnnnnnnnnnnnnnnnnnnnnnnnnnnnnnnnnnnnnnnnnnnnnnnnnnnnnnnnnnnnnnnnnnnnnnnnnnnnnnnnnnnnnnnnnnnnnnnnnnnnnnnnnnnnnntgtaaagcttgggaacactcaatgtatttcaaaagtcactacgtataagcttgatattatagaagatgatactcaaagacttctgtgtagggyggttcttcaggtagaargacttgggatttcaggactgagtcatagaatgtacatcagcctttgacctttttcatgatctttttctaagaattgacaaaatatataaatattatataaatattaacacaaaatgatgccaagctctgaagaatttgactgtcccactgaaagagtgaacagaacggaatagttcagttggaagagaccttcagagatcatcaagtccaacagcctgaccatttcagggccaatcaaaagctgtcactgctaataggtgtcactgcatgtctacacttggcatgagtacccatcagta

SEQ ID NO: 47097 - DNA, 600 bp, Chicken  19866894288835_3
gactgtcccactgaaagagtgaacagaacggaatagttcagttggaagagaccttcagagatcatcaagtccaacagcctgaccatttcagggccaatcaaaagctgtcactgctaataggtgtcactgcatgtctacacttggcatgagtacccatcagtaaatgcagtattaatttacagtgcactatttttgacactattaaaagcaaactgttccaccaaagcatgccataaccacaaagcctgcagctgctttgaaattgtgctggaagcagtatttgatgtgagtcatcactgycactaactagtcaaaacatgcctttttgtcctgatctgaacttggattgctttagtaatttgattctcaggcttttctgacaagcttatcattttccataccctggagatgagtgtttgggcactgatgttacacatcagggcacacaacattcacttttggtaaatgtcttgcagggaagcctgtggttttccagctttgactgagaggtatccaggacttctgcccatgattcttggctgtcagagctcatccagacttgagtgtgtttgctgctctgggcatctcttctctcagaag

SEQ ID NO: 47098 - DNA, 600 bp, Chicken  19866894288835_4
gacttgagtgtgtttgctgctctgggcatctcttctctcagaagtgccagattttcatcaattatgtaagtggatgttcttttccatggcaatctaaaggatgatgagctgccataatttggctgtctacatgggtttgcaatggacaatttttctgcaggttttatgcagttactttcagatggagagtgaaacttccaatacagattgctgcagtgatgtgatttgagtgaatgtataccaataggcccgatgacagtgcagtgtgggatatcaccagtgatcatgatcactcacagmaattcattcttgatataggtcacggcataaaattatagctatgcatttctacacatagcaaattgaatgattttcactgcacagtggttcttttwaaaaaaaaaaaaaatcaaacccaatctgaatgtttttaactatggctattttgtcacagcatctccagacatctgccagccacttcaggctctgaaccataccaataactgtgacctaggaaaactggcatgaagtagataatacttagtgactcacagatatgactgttggatagatccctagtttggactccaatgccatata

SEQ ID NO: 47099 - DNA, 600 bp, Chicken  19866894288835_5
aaaggatgatgagctgccataatttggctgtctacatgggtttgcaatggacaatttttctgcaggttttatgcagttactttcagatggagagtgaaacttccaatacagattgctgcagtgatgtgatttgagtgaatgtataccaataggcccgatgacagtgcagtgtgggatatcaccagtgatcatgatcactcacagmaattcattcttgatataggtcacggcataaaattatagctatgcatttctacacatagcaaattgaatgattttcactgcacagtggttcttttwaaaaaaaaaaaaaatcaaacccaatctgaatgtttttaactatggctattttgtcacagcatctccagacatctgccagccacttcaggctctgaaccataccaataactgtgacctaggaaaactggcatgaagtagataatacttagtgactcacagatatgactgttggatagatccctagtttggactccaatgccatatactgtagagtgtctgaagcccatggaacaacccactggtgttgatatttgcttttctgagtgacgttgccttagcccagacgggtatttggagttg

SEQ ID NO: 47100 - DNA, 600 bp, Chicken  19866894288837_1
gtgatgctgtgggacccagtgacacagtgtcccatggggcaccaggtagctggagagccaccttccttggagagcagagtgcagcacaaaggaaatagcaggggctggctggagttgcccaggagacagcagggcagcaggctaaggaaggcagacggcccacaacaggacatgcacggtgcagcacggagctgggctcgcagcacactctagcgacccaaaatctgcacagtacattcagtgctgtgctcagggtgactaataaaaggagatttgaactctgcctccgtttagaaagcrtttagtacttgctaggaagcaaaaaggtttacaagtgtcagtctggaatcaccaatcatttgctcttgatagaagacaaaggcaagggtggtttttatacagtttgtcacatgttagggtcagatacaaacactgacagttaatcagatgcaagttagtgctttgctctcagtttatctggctaaatgctgccacgtgccaggccaccgtgccacacctgcctgcatcagagtccttgcacgaaggtaccagacccaggagatctgggcacctctgataaaaatctgtttatatactggt

SEQ ID NO: 47101 - DNA, 600 bp, Chicken  19866894288839_1
gttgtcctttgctttgactttctatcttaccaaaagtatattgcttatgatcagatgtcagattgacatgactgagttatgctgatctgctaatattaccagcttttctgatctgataagatgttcatttcaaaaatactttataaaaaaaagatgaaggtctcaatgtccttctaccatgttatttaacatcaaacatgctcatgaattcttgaacattgttttactctgatgactgcagttctcactactgagatacaataaagatactacatttaaaaatagggacggttagttgcygtttatttttattaattttatcctgttttcaaaatgaggattaaactatacaaccttcacaatggttcactcatattctttgtagctctttaaaatattttctcttcattagctgatttcagtttgttttcaaacatacattctgatggataaatctgaccctttaaattgccagccaatctgctaatatactagaatgaaacttcagctacatttcagtaacaggaacatctctsctyctttagccaaagggagaaataaagtgatccccacacttccccyttcagcactggtgcacag

SEQ ID NO: 47102 - DNA, 600 bp, Chicken  19866894288839_2
tgcagttctcactactgagatacaataaagatactacatttaaaaatagggacggttagttgcygtttatttttattaattttatcctgttttcaaaatgaggattaaactatacaaccttcacaatggttcactcatattctttgtagctctttaaaatattttctcttcattagctgatttcagtttgttttcaaacatacattctgatggataaatctgaccctttaaattgccagccaatctgctaatatactagaatgaaacttcagctacatttcagtaacaggaacatctctsctyctttagccaaagggagaaataaagtgatccccacacttccccyttcagcactggtgcacagaaaagcatacttggcttctgtaggaaatatgatcaagcagcacagtatggcgaatatacaggtttattgaaacaaatgagatatccttgaaaattatcatatagaaccactagaaagtcttggtgcctatacagactatggtttcatttttcrtaacagaagccagagacacaggaagataaaacttagtaaagatggctttagaaggccactggcttcctcagccacatttccag

SEQ ID NO: 47103 - DNA, 600 bp, Chicken  19866894288839_3
agttctcactactgagatacaataaagatactacatttaaaaatagggacggttagttgcygtttatttttattaattttatcctgttttcaaaatgaggattaaactatacaaccttcacaatggttcactcatattctttgtagctctttaaaatattttctcttcattagctgatttcagtttgttttcaaacatacattctgatggataaatctgaccctttaaattgccagccaatctgctaatatactagaatgaaacttcagctacatttcagtaacaggaacatctctsctyctttagccaaagggagaaataaagtgatccccacacttccccyttcagcactggtgcacagaaaagcatacttggcttctgtaggaaatatgatcaagcagcacagtatggcgaatatacaggtttattgaaacaaatgagatatccttgaaaattatcatatagaaccactagaaagtcttggtgcctatacagactatggtttcatttttcrtaacagaagccagagacacaggaagataaaacttagtaaagatggctttagaaggccactggcttcctcagccacatttccagctg

SEQ ID NO: 47104 - DNA, 600 bp, Chicken  19866894288839_4
tagggacggttagttgcygtttatttttattaattttatcctgttttcaaaatgaggattaaactatacaaccttcacaatggttcactcatattctttgtagctctttaaaatattttctcttcattagctgatttcagtttgttttcaaacatacattctgatggataaatctgaccctttaaattgccagccaatctgctaatatactagaatgaaacttcagctacatttcagtaacaggaacatctctsctyctttagccaaagggagaaataaagtgatccccacacttccccyttcagcactggtgcacagaaaagcatacttggcttctgtaggaaatatgatcaagcagcacagtatggcgaatatacaggtttattgaaacaaatgagatatccttgaaaattatcatatagaaccactagaaagtcttggtgcctatacagactatggtttcatttttcrtaacagaagccagagacacaggaagataaaacttagtaaagatggctttagaaggccactggcttcctcagccacatttccagctggtgcacatcagcagagctctgctgaagtctaaagcaccagagg

SEQ ID NO: 47105 - DNA, 600 bp, Chicken  19866894288839_5
atctgaccctttaaattgccagccaatctgctaatatactagaatgaaacttcagctacatttcagtaacaggaacatctctsctyctttagccaaagggagaaataaagtgatccccacacttccccyttcagcactggtgcacagaaaagcatacttggcttctgtaggaaatatgatcaagcagcacagtatggcgaatatacaggtttattgaaacaaatgagatatccttgaaaattatcatatagaaccactagaaagtcttggtgcctatacagactatggtttcatttttcrtaacagaagccagagacacaggaagataaaacttagtaaagatggctttagaaggccactggcttcctcagccacatttccagctggtgcacatcagcagagctctgctgaagtctaaagcaccagaggtgccagcgcagaatctastattaatatcaacatatattagctaaagatggggtaacttgagatgtctaacactgagctgggcttgttttcaatgataccacccatatttcctaccagttttctgctcatggaaatgtttgtgtaaagctagattacagatcgctaccgaag

SEQ ID NO: 47106 - DNA, 600 bp, Chicken  19866894288839_6
aaaagcatacttggcttctgtaggaaatatgatcaagcagcacagtatggcgaatatacaggtttattgaaacaaatgagatatccttgaaaattatcatatagaaccactagaaagtcttggtgcctatacagactatggtttcatttttcrtaacagaagccagagacacaggaagataaaacttagtaaagatggctttagaaggccactggcttcctcagccacatttccagctggtgcacatcagcagagctctgctgaagtctaaagcaccagaggtgccagcgcagaatctastattaatatcaacatatattagctaaagatggggtaacttgagatgtctaacactgagctgggcttgttttcaatgataccacccatatttcctaccagttttctgctcatggaaatgtttgtgtaaagctagattacagatcgctaccgaagaaacaaaaccacatttaattaaaaacaattaactgtgaattccagagttgtcgcaaggcttcttttacttaactgtgcttctgtccataccttgttataagctatcaaacagacaccataaattcaaactgttcacaacgggcatgg

SEQ ID NO: 47107 - DNA, 600 bp, Chicken  19866894288840_1
ttcttgttttctcccacccaaaagaaaagaaaaatttaaaaaaattaaaacaattaaaacattgtatgttttcacagaacacatcaatttagagctaactgaatttgctaatggaaactcagtcctgctggaataacctggtcagtcctagtgaggacattcagtctgtccccatgaatgcttacttttcccttcctgtttgccctctcatacatgttctgaaggcacagttaatttttagtcacttaaaaatatttttcagtctttttttcccctcctactctgtattttatttataayagatatatctttctacgtttgtgctttacttaaagcaaaattagctaggtgaaaagggaagaaattttcttatgtttggaagtatttcctttgttttttgtcttagaagcagctggaaaaaggatcccctatttattttttaatcatgcacacccacagctatgtaaaagaagtgattgctcaccgccgttgctagataatgtcacagtgctctgctcctgctgtttagcaatgggaagagctttctaacgaacctgacactgccagaaaccatgctgcttttagatagtccagaagcat

SEQ ID NO: 47108 - DNA, 600 bp, Chicken  19866894288844_1
tgtgttgaaaaagagcgttttatagctgagaatttgctctatcaagtagtgctattatgtacactgtatctgttgttgtttccgtggaaataaataggaggcattacttttagggcaacctatgtaatacacctgatacttcctgtcttgtttcatgtcttatttacatatcttgcattgtacggtgtgactaaaaagttgatatcctggatataatgactgctgtgggatatattgtgttcatgtcagtatgtggggtggtacaggaatgtgctggttattaatatcgagggtaggatkcacaaggaccagtcattggtcaacatctctgctcactggtgacaatgacaggagagagggaatggtgtggagctgtgtcaggttgggaaaagattctttaccacagagtggtttgctactgaaacaggctccccagggcaacaagctgcctgagttcaagaagtgtttggcccacyctcagacatacagtttgaattttgggtgctcctacgtgtagccaggagttggactcaatgatccttgtggttcccttccaactggggatattctgtgattgtgtaagatgacattattgaagag

SEQ ID NO: 47109 - DNA, 600 bp, Chicken  19866894288844_2
attgtacggtgtgactaaaaagttgatatcctggatataatgactgctgtgggatatattgtgttcatgtcagtatgtggggtggtacaggaatgtgctggttattaatatcgagggtaggatkcacaaggaccagtcattggtcaacatctctgctcactggtgacaatgacaggagagagggaatggtgtggagctgtgtcaggttgggaaaagattctttaccacagagtggtttgctactgaaacaggctccccagggcaacaagctgcctgagttcaagaagtgtttggcccacyctcagacatacagtttgaattttgggtgctcctacgtgtagccaggagttggactcaatgatccttgtggttcccttccaactggggatattctgtgattgtgtaagatgacattattgaagaggtagtagctgaatttatttacagagtcaaaaattgaacgactaagtatgtataactaccctgttatacgttgccccgtatgcaaagtgaaagaattgcaaaagattcactgaactcagtttgcatctgttcagaagattcatgttgctacaggcagcacctctgttcatgaggtga

SEQ ID NO: 47110 - DNA, 600 bp, Chicken  19866894288847_1
cgggtatagtgcaagttgggaaagtgaacccctgataaatgcctaagagatggggaagttttgtttatttagtaataatataaagttgaggtttatctagaactgtccccttggatcatttcagagcgactcagaacagccaaaggacagcctcccagtggagaagcagacaagtgctaaacaaagggcactgtaaggtactctctcaaaaccagtaggaaaggaaataggaaaagtctcctgagttataaaggtagaattgaagtaaaaaccaactgcaaagaaagtaactttagattyctttcaaccagctggaagcaggatctgggtctttcagatattgagacgctatcattaaatgcatagggatttagcagagggagttccagatccatcagtgcctgggagatgataaagagaaatgatgccctgaggtactacagagcacctggaattcatacaataaggaggagctaagggattaagctaggacttgacaccttttctcttcatgacacaggacagatttcaacaacttgagcattaaaatattttttatctatagattacattattctttcctagttcttctcttgggaa

SEQ ID NO: 47111 - DNA, 600 bp, Chicken  19866894288851_1
ccatgaaaaggtctggcccagttgtagccattcaacaaacaagctcagtttgcaatgaaaggtgtatctgtaggtttctagtgtaggatgggtaacagctggtgaagcttatgtcccagtgcataaagttctaaacaaattcagatgattttttcagctgatctctgtaattaaaagtggtggtatgatagagggggtggagggacaaaaactctttcggtaatggaccagcagctaaaataaacattcttccctatgagtagtagtcaatgaaggagattaaggttggtaaattacagkgagattttgataaaaccttctttctgtctcagctttctatcttttccagggacactaatggtccatttggatcatagcattataaacaagctttctaacagttaaatactgcattctcagacagtgaagttgcagcccacttgattttatggttgatttggggttttaaatacatgtaggcatgtatatatgtttgtatactggactaaaaaagtaattgctagcagaatcttcctttcaatcactgttctttcttcctatttttacaatatgactgtttacagtcatgctctccatacg

SEQ ID NO: 47112 - DNA, 600 bp, Chicken  19866894288852_1
aaagatgaagttggcaaacttactcgaatcattcaagagaaagacttagaaatacaagctctcagtgctagagtttcctcagcttcctatcggcaggatgttcttggtcttcagcagcagctacaagcttatgtcatggaaagagaacaagtactggctgttctaagtgaaaagacaagagagaacagtcagttaaaaactgagtatcataagatcatggatatggtggctgctaaagaagcagctttggtaaggttgcaagaagagaatcaaaaattatctaatagatttgaaaatagyggtcaagacatgtttagagaaactattcaaaatttatcccgtatcattcgagaaaaagatattgaaatagatgctctcagtcaaaaatgccaaaccttattgactgtcttgcagacatccagtacgggtactgataatggctcaggaggtgttaacagtaaccagtttgaggaacttttacaagaacgtgataaattaaaacagcaggtaaagaagatggaagagtggaagcagcaggtaataaccacagttcagaacatgcagcatgagtcagctcatctccaagaagagctacaaaag

SEQ ID NO: 47113 - DNA, 599 bp, Chicken  19866894288861_1
  misc_feature (1)..(28): n is any nucleotide
nnnnnnnnnnnnnnnnnnnnnnnnnnnnctcagaggttgtactgtgagatggctttttgagggcagtggggctgggggtctgtgtggagcctcaactggtggaggcagcagtgggggcattgctagggcagggatgggaacatgggaaaatggggatttaaacggagttcagctctatagagcccccaggagttggaaagaagcgaggctgagtgcctcatctgtggagagaacagacaggctgaattcgtccctatctcagagactcagaggacctccaatctgaatgccctgcacctsctctgacactgcatttctctcctgcagacgatgtgccttggtggccctgcaggacgtgaaggcgtacctcctggaggagtgtggacagatagctgtaaggctcttcccagccaaacgcaccacggggactttatatctgggttgttcaaagctgcccagagcattggggaacccagttgaaatcccaaatcatttggggctgctttagaagctgtrgataaactttctcattgccacttatttcctggtaggtgtttgatgcaaccaacacaactcgggaaagacgggacctgatctta

SEQ ID NO: 47114 - DNA, 600 bp, Chicken  19866894288861_2
ctcatctgtggagagaacagacaggctgaattcgtccctatctcagagactcagaggacctccaatctgaatgccctgcacctsctctgacactgcatttctctcctgcagacgatgtgccttggtggccctgcaggacgtgaaggcgtacctcctggaggagtgtggacagatagctgtaaggctcttcccagccaaacgcaccacggggactttatatctgggttgttcaaagctgcccagagcattggggaacccagttgaaatcccaaatcatttggggctgctttagaagctgtrgataaactttctcattgccacttatttcctggtaggtgtttgatgcaaccaacacaactcgggaaagacgggacctgatcttaaattttgctaaggaaaatgctttcaaggtaacgctgctgcatttaatttgtgcttgggatcacagtgctggagctgttcttgacttctgattaaaaccagagctctcggtcctctgaaacatgtttcactgcctccttcacaggtgttctttgtggaatccgtgtgtgatgatccggaggtcatcgctgccaacatcctggtgcgtggccaagctct

SEQ ID NO: 47115 - DNA, 600 bp, Chicken  19866894288864_1
taggacgcagacaagtgaatgtaaaacaatgaaataggtgggcaatattttagcatggacttcatcttcagtatggccattagacttatcgcacggtgacaacctttcttgctcatctgtgcacaaatttcatcacctctactcgtatttttgcttttaaatgtaatatatcttcttttccatctcttccatctttgaggtgatctaaaaaaaaaaaaatcttttttctcaatatttgttaactgaaaccagtcaaaaaatattccagggaggtacaagtaaaaagcaagactttttttyccagacttttaatgtaattttccaagaattctttttcttccttaaataaaagaagtgcatatatttatatgtacatacatatgtatacatatatatatgtacagagacataaggacacataattccaattcactgataaatgcctggagcatctcctgtttgatgagaggctgagagacctggggctttcagtctggaggacagaaggctgagaagagatctcatcactgtttattaatatctgaagtgcaggagccaagtcaatggaggcaaagtctttttggtggcgtgcaggaatag

SEQ ID NO: 47116 - DNA, 600 bp, Chicken  19866894288864_2
tttagcatggacttcatcttcagtatggccattagacttatcgcacggtgacaacctttcttgctcatctgtgcacaaatttcatcacctctactcgtatttttgcttttaaatgtaatatatcttcttttccatctcttccatctttgaggtgatctaaaaaaaaaaaaatcttttttctcaatatttgttaactgaaaccagtcaaaaaatattccagggaggtacaagtaaaaagcaagactttttttyccagacttttaatgtaattttccaagaattctttttcttccttaaatyaaagaagtgcatatatttatatgtacatacatatgtatacatatatatatgtacagagacataaggacacataattccaattcactgataaatgcctggagcatctcctgtttgatgagaggctgagagacctggggctttcagtctggaggacagaaggctgagaagagatctcatcactgtttattaatatctgaagtgcaggagccaagtcaatggaggcaaagtctttttggtggcgtgcaggaatagaacatgggagcaaggggcagaaactgaaacagaggcagttccatacaa

SEQ ID NO: 47117 - DNA, 600 bp, Chicken  19866894288864_3
ttagcatggacttcatcttcagtatggccattagacttatcgcacggtgacaacctttcttgctcatctgtgcacaaatttcatcacctctactcgtatttttgcttttaaatgtaatatatcttcttttccatctcttccatctttgaggtgatctaaaaaaaaaaaaatcttttttctcaatatttgttaactgaaaccagtcaaaaaatattccagggaggtacaagtaaaaagcaagactttttttyccagacttttaatgtaattttccaagaattctttttcttccttaaatayaagaagtgcatatatttatatgtacatacatatgtatacatatatatatgtacagagacataaggacacataattccaattcactgataaatgcctggagcatctcctgtttgatgagaggctgagagacctggggctttcagtctggaggacagaaggctgagaagagatctcatcactgtttattaatatctgaagtgcaggagccaagtcaatggaggcaaagtctttttggtggcgtgcaggaatagaacatgggagcaaggggcagaaactgaaacagaggcagttccatacaag

SEQ ID NO: 47118 - DNA, 580 bp, Chicken  19866894288869_1
tgtcatataccagagaagggctcttcacagcaatgttttactagtaagtgaaggaaaacgaagtaaaaataggccttgttttgccaagaggggcctggtagaggcacgaaaaatacatatccaaatgttctatggcatctgtgtcttttcctattccacaaagacagccttgctcagatatagaagtctgtactacaggtgcctacacttccactccagttaacaggaggactgcagccacacaattatatcttatttggaatgagaggtagctaaggaagttaaaaactattgcagagrgagggttattgtagggattggcaccaagccrgraaytcagaaaatctactaaataaagagctgccaaatttcttgccagttcatcaactaataaaccaaaacctactgtaacccttatacatttctgtctctcaactcaagttaaacagtgatataaataagttacgttcttggtttttgtttttttaaacactagaattaaacatcatcataattatcagaatatcccacttctgcaaaatgattcaaaatgaatgcaatataaaattcctgtgttagg

SEQ ID NO: 47119 - DNA, 549 bp, Chicken  19866894288869_2
aatgttttactagtaagtgaaggaaaacgaagtaaaaataggccttgttttgccaagaggggcctggtagaggcacgaaaaatacatatccaaatgttctatggcatctgtgtcttttcctattccacaaagacagccttgctcagatatagaagtctgtactacaggtgcctacacttccactccagttaacaggaggactgcagccacacaattatatcttatttggaatgagaggtagctaaggaagttaaaaactattgcagagrgagggttattgtagggattggcaccaagccrgraaytcagaaaatctactaaataaagagctgccaaatttcttgccagttcatcaactaataaaccaaaacctactgtaacccttatacatttctgtctctcaactcaagttaaacagtgatataaataagttacgttcttggtttttgtttttttaaacactagaattaaacatcatcataattatcagaatatcccacttctgcaaaatgattcaaaatgaatgcaatataaaattcctgtgttagg

SEQ ID NO: 47120 - DNA, 547 bp, Chicken  19866894288869_3
tgttttactagtaagtgaaggaaaacgaagtaaaaataggccttgttttgccaagaggggcctggtagaggcacgaaaaatacatatccaaatgttctatggcatctgtgtcttttcctattccacaaagacagccttgctcagatatagaagtctgtactacaggtgcctacacttccactccagttaacaggaggactgcagccacacaattatatcttatttggaatgagaggtagctaaggaagttaaaaactattgcagagrgagggttattgtagggattggcaccaagccrgraaytcagaaaatctactaaataaagagctgccaaatttcttgccagttcatcaactaataaaccaaaacctactgtaacccttatacatttctgtctctcaactcaagttaaacagtgatataaataagttacgttcttggtttttgtttttttaaacactagaattaaacatcatcataattatcagaatatcccacttctgcaaaatgattcaaaatgaatgcaatataaaattcctgtgttagg

SEQ ID NO: 47121 - DNA, 544 bp, Chicken  19866894288869_4
tttactagtaagtgaaggaaaacgaagtaaaaataggccttgttttgccaagaggggcctggtagaggcacgaaaaatacatatccaaatgttctatggcatctgtgtcttttcctattccacaaagacagccttgctcagatatagaagtctgtactacaggtgcctacacttccactccagttaacaggaggactgcagccacacaattatatcttatttggaatgagaggtagctaaggaagttaaaaactattgcagagrgagggttattgtagggattggcaccaagccrgraaytcagaaaatctactaaataaagagctgccaaatttcttgccagttcatcaactaataaaccaaaacctactgtaacccttatacatttctgtctctcaactcaagttaaacagtgatataaataagttacgttcttggtttttgtttttttaaacactagaattaaacatcatcataattatcagaatatcccacttctgcaaaatgattcaaaatgaatgcaatataaaattcctgtgttagg

SEQ ID NO: 47122 - DNA, 600 bp, Chicken  19866894288870_1
aaaattttacattcccatatttgacagttcagtacgaggacgatgccagaagacccagaaatgaaattacagagaaagtcaaaaactgcagggcttccttcagcatggaaaaggtacctgcaaatgggcagtgccactgaaacccagatagttacaatagatagatactgagatatcaaatatgacactacttttctatatcaactttaaaacatcttccagtgactgctcccgtaatatcaagtaccattacagaattaaaacgaggaatatgttcttcagaatattcagatatgaccrattctgactatggcaagagtactgcctagcacagatctatacctaagtgaaagtttcaacatttatcttgatgaagycatgcaaataagtgtattaattgcatacagctctctcacagaccagggagayggctcttgaatttcagaactgctcasttcagtctttagcagcacttaagccaaattccctaacacagcccagctgttctacattgctctgttatgtatagcagctgtaagcccgccttaatcaagcagttgtacagctggcttgcatcactgcctgttggagggaacaaga

SEQ ID NO: 47123 - DNA, 600 bp, Chicken  19866894288870_2
gtcaaaaactgcagggcttccttcagcatggaaaaggtacctgcaaatgggcagtgccactgaaacccagatagttacaatagatagatactgagatatcaaatatgacactacttttctatatcaactttaaaacatcttccagtgactgctcccgtaatatcaagtaccattacagaattaaaacgaggaatatgttcttcagaatattcagatatgaccrattctgactatggcaagagtactgcctagcacagatctatacctaagtgaaagtttcaacatttatcttgatgaagycatgcaaataagtgtattaattgcatacagctctctcacagaccagggagayggctcttgaatttcagaactgctcasttcagtctttagcagcacttaagccaaattccctaacacagcccagctgttctacattgctctgttatgtatagcagctgtaagcccgccttaatcaagcagttgtacagctggcttgcatcactgcctgttggagggaacaagacctttaattataaggcaaatttaaaagtatttgctagataattcatttttaaaatgctacattagccaaaacaacag

SEQ ID NO: 47124 - DNA, 600 bp, Chicken  19866894288870_3
agtgccactgaaacccagatagttacaatagatagatactgagatatcaaatatgacactacttttctatatcaactttaaaacatcttccagtgactgctcccgtaatatcaagtaccattacagaattaaaacgaggaatatgttcttcagaatattcagatatgaccrattctgactatggcaagagtactgcctagcacagatctatacctaagtgaaagtttcaacatttatcttgatgaagycatgcaaataagtgtattaattgcatacagctctctcacagaccagggagayggctcttgaatttcagaactgctcasttcagtctttagcagcacttaagccaaattccctaacacagcccagctgttctacattgctctgttatgtatagcagctgtaagcccgccttaatcaagcagttgtacagctggcttgcatcactgcctgttggagggaacaagacctttaattataaggcaaatttaaaagtatttgctagataattcatttttaaaatgctacattagccaaaacaacaggtacaaattaatatattggaatcaatttagcagcactccagagaaaagctga

SEQ ID NO: 47125 - DNA, 600 bp, Chicken  19866894288870_4
aatagatagatactgagatatcaaatatgacactacttttctatatcaactttaaaacatcttccagtgactgctcccgtaatatcaagtaccattacagaattaaaacgaggaatatgttcttcagaatattcagatatgaccrattctgactatggcaagagtactgcctagcacagatctatacctaagtgaaagtttcaacatttatcttgatgaagycatgcaaataagtgtattaattgcatacagctctctcacagaccagggagayggctcttgaatttcagaactgctcasttcagtctttagcagcacttaagccaaattccctaacacagcccagctgttctacattgctctgttatgtatagcagctgtaagcccgccttaatcaagcagttgtacagctggcttgcatcactgcctgttggagggaacaagacctttaattataaggcaaatttaaaagtatttgctagataattcatttttaaaatgctacattagccaaaacaacaggtacaaattaatatattggaatcaatttagcagcactccagagaaaagctgattcagctactagatgtattaaaacct

SEQ ID NO: 47126 - DNA, 600 bp, Chicken  19866894288875_1
gctgtgttactaacactcgtggcagcagaaggcatttcctgcccatgtttctacatgcagaatttgtataccttgtcgttgccagaaaactaatttcggaataacagaatcattgtcaacctggggatgaagtggggacagcagggtctagcaagtgcatgggggactacaaaataacgtttcttaaaaataaataaataaatccacttgggcaaatatggaaaaaagttcattaaaaaagaaacaaaatgaaatatgtcaaactccccagtgacttctcacaacctttaccgcattagyagtacagaccacagcgcagcatctgaacactattaaaggatgcagaccacacaaacagttcaacaatgcttccttgggataaagtattattgctcccagtactagtctttctgatcatatgtgttggggatttaaggaaatgtttttcccactttaggaaaagactagatcatttcattaagccaaaaataaattaataaataaattttacttggagacgcattttgtcatcacttgcacaatgttttgttaaaagatacccaagtaagcactgagcaaatcagtgtaccagtgtgaatc

SEQ ID NO: 47127 - DNA, 600 bp, Chicken  19866894288878_1
atttatttggggtgcttcatatcctggtgatacccattttttggaaaccaatgagtaggttagctctcagcctcacctcaactgtgcccattgtggtacagccagtgacacaggcaccaagtcatgccatagctgaacgtgcccatacaataagccaagaaaaagtcctcactcacactttgtgtatttgctgttctacagtatctgaaaccatcaggtttggcttgttagttctaatgtggatattacttcagatcgttagctacagctactctgtatttgcagagtgaacaatacagytgctggagctgctggaaaaataagttcttagccatctctaattcagttttgaccctccaccctagacatggcaagacttctatgaaaacaaacattcgttcctgaataaacatcttcagatgaggaaaaatgaataattacttcttaatgtctttttataataagagactattttctctgtacaaaggaggagtcacttcctgacaacagaaacacaatctctctttcggcaaagatagaggtacattcaacttcctacattaatatttctaggcctgttaaaagagaacagacaaagaa

SEQ ID NO: 47128 - DNA, 595 bp, Chicken  19866894288878_2
aagatagcattggcctgaaaatacagtgaaattgcatatgaatatgtgaaattgcataccccagccaagaaggtaataccacatcaagtgctgtttgtcagcaaaaacggccaccacaataagagtatgcaggtgaatgccttcacatagcatccagaagtagttgcaacccattaggtactggtagataaacatcgccactttgcagctaatctgtagaaaagaaagcacagtacaaaataaattcttaagttgcaaaaatctcagagaaatacttggaaaaagtatttatttttatakaattaaaattccatattttatagccagtctatttttactaagcaaacataagaagcaaacatcctaaagcatgatggtaggaagcagtaatgataatatttccctttgtcacaaatagtgacacatttgatcattccagttaaaatggagtcctcaaattagcagatgcatgaaaaaacaccctttgaagaagctaattctctgggaccttcaagatcatgtaattccaacccccctgccatgggtaagattgccaaccaccagatcaggctgcccagggccccatcctacctgg

SEQ ID NO: 47129 - DNA, 599 bp, Chicken  19866894288882_1
  misc_feature (1)..(26): n is any nucleotide
nnnnnnnnnnnnnnnnnnnnnnnnnntaccaatattcagtgctattttaagtgtatatgccctactgatgattcttagagcacaaaataatgatgacacccccatgcagaggtcttgcttgcctgaggctagtggtctgaatgcgctaggtgcagacacttctgtttgctgatgaaagtgttgaaaaggagcaggatttcactgcttccttttatttggttttgtaaaagtcttcttttttttaatttgcttttaattaagctgcagtcaattaacatctgaagtcgtttgaagaatatraagagatgtstgagtacttctgggaaggaggtttgaagcttaattttggcaaaactaagattcacttgattacctgatagtggcaagaagaaggccaggcattttgggtgatrtgtgccaagccaggggcaaggtagcttttcagggaaaggaatgaggatcctgacagacttcctagcaagtggggcagagaagtgttgccagtaagtgattagagaaacacctaacgagacagaaagaagtcaagaaggctaagaaaaagtatgggaagtacattacagcaggcaggttaaggagga

SEQ ID NO: 47130 - DNA, 599 bp, Chicken  19866894288882_2
  misc_feature (1)..(16): n is any nucleotide
nnnnnnnnnnnnnnnntaccaatattcagtgctattttaagtgtatatgccctactgatgattcttagagcacaaaataatgatgacacccccatgcagaggtcttgcttgcctgaggctagtggtctgaatgcgctaggtgcagacacttctgtttgctgatgaaagtgttgaaaaggagcaggatttcactgcttccttttatttggttttgtaaaagtcttcttttttttaatttgcttttaattaagctgcagtcaattaacatctgaagtcgtttgaagaatatraagagatgtstgagtacttctgggaaggaggtttgaagcttaattttggcaaaactaagattcacttgattacctgatagtggcaagaagaaggccaggcattttgggtgatrtgtgccaagccaggggcaaggtagcttttcagggaaaggaatgaggatcctgacagacttcctagcaagtggggcagagaagtgttgccagtaagtgattagagaaacacctaacgagacagaaagaagtcaagaaggctaagaaaaagtatgggaagtacattacagcaggcaggttaaggaggaggcggctgga

SEQ ID NO: 47131 - DNA, 600 bp, Chicken  19866894288882_3
cttgcttgcctgaggctagtggtctgaatgcgctaggtgcagacacttctgtttgctgatgaaagtgttgaaaaggagcaggatttcactgcttccttttatttggttttgtaaaagtcttcttttttttaatttgcttttaattaagctgcagtcaattaacatctgaagtcgtttgaagaatatraagagatgtstgagtacttctgggaaggaggtttgaagcttaattttggcaaaactaagattcacttgattacctgatagtggcaagaagaaggccaggcattttgggtgatrtgtgccaagccaggggcaaggtagcttttcagggaaaggaatgaggatcctgacagacttcctagcaagtggggcagagaagtgttgccagtaagtgattagagaaacacctaacgagacagaaagaagtcaagaaggctaagaaaaagtatgggaagtacattacagcaggcaggttaaggaggaggcggctggagcgtgtgtgctcagggctcatcacggggaggttgtctgagatatgtacaaaacagttccggtttgcatccaaggcattccagtggtttccagatgttttcgtct

SEQ ID NO: 47132 - DNA, 600 bp, Chicken  19866894288883_1
tcatgctttctggtgggagaagagctgctgatgagcaggcttctttttacagttaaaactattccctgcatcaggagcacccacagtacaagagtgcattaaatgcacatttagcatcacagatctgaaagttttggccaaacagctcaggtgagcttcatggtgcccatggctgcttgtggctgcctaggcactgcagtgctggaggtttcctttccagagtggtgtggccaactgggcccagcatctgggccagtgtttggctaaatccctttcagcaaatacaacaattttttttcrtttttttttcttttttttttttttggattgggtgtgcaacatgctaataacaaaggcaatacttctcttcttcctctatcattctttttgtctgtatgacattatgtgtatgcctggcacaaaaatgtataggaaagtgaacaagtggaaatacctggcagagtttttgtgcatggtgattattcatgtggaaatgcagtttttggttggccaaaatattgatagttttaagttagagacagcaaataggttctggtgacattttcagataaaagcaaaaatcaaaacatgaaaactgag

SEQ ID NO: 47133 - DNA, 599 bp, Chicken  19866894288886_1
  misc_feature (1)..(208): n is any nucleotide
nnnnnnnnnnnnnnnnnnnnnnnnnnnnnnnnnnnnnnnnnnnnnnnnnnnnnnnnnnnnnnnnnnnnnnnnnnnnnnnnnnnnnnnnnnnnnnnnnnnnnnnnnnnnnnnnnnnnnnnnnnnnnnnnnnnnnnnnnnnnnnnnnnnnnnnnnnnnnnnnnnnnnnnnnnnnnnnnnnnnnnnnnnnnnnnnnnnnnnnnnnnnnnnnaggactctgaactctctccccttggttggttggacagcacaagccctgcaagggtggaaatcacacagcacagcctcacaaactgccctcckgctgcactgctttggctaggaaactcgtctctgcccttgccccaggcagcacaggaggtctctggctctgctcaccctgctgcattcctccttccaaggactgtgtgggctttgagcaagcactgcaagatctgctttgccttgagtttcctcttccagtgmaagggctccacactggtgttcccatgggctggcaccgctcatcgccctgcagtgacaatgacacagctcacctgaagtgcagcacttgggacttcactccacagaccaggttctccccatgccagcacggcgagcag

SEQ ID NO: 47134 - DNA, 599 bp, Chicken  19866894288886_2
  misc_feature (1)..(46): n is any nucleotide
nnnnnnnnnnnnnnnnnnnnnnnnnnnnnnnnnnnnnnnnnnnnnnaggactctgaactctctccccttggttggttggacagcacaagccctgcaagggtggaaatcacacagcacagcctcacaaactgccctcckgctgcactgctttggctaggaaactcgtctctgcccttgccccaggcagcacaggaggtctctggctctgctcaccctgctgcattcctccttccaaggactgtgtgggctttgagcaagcactgcaagatctgctttgccttgagtttcctcttccagtgmaagggctccacactggtgttcccatgggctggcaccgctcatcgccctgcagtgacaatgacacagctcacctgaagtgcagcacttgggacttcactccacagaccaggttctccccatgccagcacggcgagcaggagcatcctcagagctctctggtctttgttttgagagcagaagggcttgctgtgctccgggcagagggtgatcatattgcaacatttcggccratgccatgacgcaacagcagcaggcaggcagtcaaactaagtaaagaccacaaattctttacatattaa

SEQ ID NO: 47135 - DNA, 583 bp, Chicken  19866894288886_3
tccaaggactgtgtgggctttgagcaagcactgcaagatctgctttgccttgagtttcctcttccagtgmaagggctccacactggtgttcccatgggctggcaccgctcatcgccctgcagtgacaatgacacagctcacctgaagtgcagcacttgggacttcactccacagaccaggttctccccatgccagcacggcgagcaggagcatcctcagagctctctggtctttgttttgagagcagaagggcttgctgtgctccgggcagagggtgatcatattgcaacatttcggccratgccatgacgcaacagcagcaggcaggcagtcaaactaagtaaagaccacaaattctttacatattaattgttgatttcaatttttcgtcgcgttgaaagtcaggcgtgagaatatgctgaaaacattcctgcatctgtttagttccacccttccattaattccgcgtactctaaacccaaacaacaagacactacattttcttcagaaaacttaagatgatgatctgctgagctgtacagcggaacatatgcacaagatgctcagtgctttcatctggata

SEQ ID NO: 47136 - DNA, 600 bp, Chicken  19866894288891_1
tcgagatctttagaattaaaaatcagtccacacaatagaagtattttaagtatctcatgtgaaatcaaaaattgtttgacccttccagttatttaaaaccatgtttttcattttcgtatattctaaacttagatctcaattgatgtctgatttcaagggaactgagacatgaggaagtacatcaggctatgaataaataaaatttctctctagttaatcttggtgttgttttaactatgacactgaataactttaatcagtgtagtaaacgtacaaaaattactcttgagttgttatggraaatgcatttacttacccatgataaacctttgctacatatttccctggaatataattctctcgtcctgttgtaagggaatggactctccaccaacctccttcactgtgaaagcaagacaagggatattttcagatgcacctttggagcttgtcctcattttggaagtgagttaagacttacaggctaggctgtaaccttctatctgtgttcttgaattctcacactcagaaaaggacccaagtttgtttcatttagagaagtttctttaagattaaatttggatacagaaataagctgca

SEQ ID NO: 47137 - DNA, 600 bp, Chicken  19866894288893_1
catggccagagaagatcctcttcattccatgtttctcatttcagctagagaaaaatggttgtgaatgttctctgatggtttctgataaccactaattcccagaaccagagtgcttatgtgctgatctaaagtctccacacagtggcttcaagttggagtattagatgcataagtaaatctggaggataatatctcagccaagagaaagtgcattaaagagagaggtgtctgaaatctagtatacttgaatcaggtgcttcatttcaatccttttataagtctgagtaaaacatgattaaractatgtctatacatagtccagaaccccctccaggagtatggtgtcccggccatacatcagagacagtgaggggcacacactttgactatagaaatgattgctgaagaactgcagaagagtcccctgatacactgtgcaccagactgagaaaaaggacccctagttctgaggtcataaaatcatgaaatggcttgggttggaaaggtccttaaagatcatctagttccaaacaccctgttgtgtgcagggctrccacccaccagctcaggctgccctgggccccatccaacctggccttg

SEQ ID NO: 47138 - DNA, 479 bp, Chicken  19866894288893_2
gtgcttcatttcaatccttttataagtctgagtaaaacatgattaaractatgtctatacatagtccagaaccccctccaggagtatggtgtcccggccatacatcagagacagtgaggggcacacactttgactatagaaatgattgctgaagaactgcagaagagtcccctgatacactgtgcaccagactgagaaaaaggacccctagttctgaggtcataaaatcatgaaatggcttgggttggaaaggtccttaaagatcatctagttccaaacaccctgttgtgtgcagggctrccacccaccagctcaggctgccctgggccccatccaacctggccttgaatgcctccagggatggagcatccacagttctctgagaagactgtgccagggcctcaccaccatctgagtaaaaaaatctcttcttaacatctaacctaaatctccactctttcatatttagaccattcccc

SEQ ID NO: 47139 - DNA, 600 bp, Chicken  19866894288896_1
gtggggcgctagggggcgctatggggctctacgggggcgctgtggggcgctgtggggctctacgggggcgcttgggggcgctgtggggcgctgtggggctctacgggggcgctagggggcgctgtggggcgctgtggggctctacggggcgctagggggcgctgtggggctctacgggggcgctagggggcgctgtggggcgctacggggttctatggggctctatggggctctgtgtctcgccacgctgcgcctccgggtcgtcggtacgccgctagggggcgctgtggggctctatgsggttctatgaggctctctggggggggctatggggctctgaggtcgctatggggctctatggggctctatgggtgcctattggggctctatggggctctacggggggggctgtggggctctatgggtcgctaagggtggctatggggtcgctatggggctctatggggctctgtgtctcgccacgctgcgcctcagggtcgtcggtacgccgctagggggcgctgtggggcactatggggctctacgggggcgctgtggggctctacggggttctatggggctctatgggggtggctatgg

SEQ ID NO: 47140 - DNA, 600 bp, Chicken  19866894288911_1
ccagttggcatcctgtcttaggtaccatacagtgtcattaaagtatgtgtgaaagatttggacccagtccagatcagtaaacattaaagaacttaagccttataaaggcatctgcaagtgaggaaactaattcagtcttgcaaaagtgcaactcctgaaggtgaaggatgacaagtactataagcatcatttggatgcctatttgcttactgtgaagttaagatgtcctaactgtcttaataaattgtcatgtttagtactagcacaaatcacaacctctgcacatttaagaaaagctcyatggcttctgctactggggagtcaagctgaattgttctcatatgacataaacagagtttcccaagtctaaaaccagaacagccaataggaacagacaagcaggacaacacaactgccatcatcatagagcttgcaaagacatgtaagttttyattaaaacaagagattagaggtagaaacttagtttaaggaagatatgtgtccttccgttaatcagttttcagttgatgaaaaatacaccayttcccaaattaagatatttcaactgcaaattacagatactgctgaaaatttcttcca

SEQ ID NO: 47141 - DNA, 600 bp, Chicken  19866894288911_2
tcctgaaggtgaaggatgacaagtactataagcatcatttggatgcctatttgcttactgtgaagttaagatgtcctaactgtcttaataaattgtcatgtttagtactagcacaaatcacaacctctgcacatttaagaaaagctcyatggcttctgctactggggagtcaagctgaattgttctcatatgacataaacagagtttcccaagtctaaaaccagaacagccaataggaacagacaagcaggacaacacaactgccatcatcatagagcttgcaaagacatgtaagttttyattaaaacaagagattagaggtagaaacttagtttaaggaagatatgtgtccttccgttaatcagttttcagttgatgaaaaatacaccayttcccaaattaagatatttcaactgcaaattacagatactgctgaaaatttcttccatgcttgtaacgaaaatgtgcttagcttctcctcaattccattctccacatttataaaatctttcatctccatacaaatccaattggaggtagatggcactcagtcaatatgggatcatccacatagatttcactgcaagattgaaacaatat

SEQ ID NO: 47142 - DNA, 600 bp, Chicken  19866894288911_3
attgtcatgtttagtactagcacaaatcacaacctctgcacatttaagaaaagctcyatggcttctgctactggggagtcaagctgaattgttctcatatgacataaacagagtttcccaagtctaaaaccagaacagccaataggaacagacaagcaggacaacacaactgccatcatcatagagcttgcaaagacatgtaagttttyattaaaacaagagattagaggtagaaacttagtttaaggaagatatgtgtccttccgttaatcagttttcagttgatgaaaaatacaccayttcccaaattaagatatttcaactgcaaattacagatactgctgaaaatttcttccatgcttgtaacgaaaatgtgcttagcttctcctcaattccattctccacatttataaaatctttcatctccatacaaatccaattggaggtagatggcactcagtcaatatgggatcatccacatagatttcactgcaagattgaaacaatatgtgtgtgttgtatctatacatactctgcttttaatattaatgctgtagatagtgagcttgttgtatgcgtggagttgatgtatttgcagcc

SEQ ID NO: 47143 - DNA, 599 bp, Chicken  19866894288913_1
  misc_feature (1)..(55): n is any nucleotide
nnnnnnnnnnnnnnnnnnnnnnnnnnnnnnnnnnnnnnnnnnnnnnnnnnnnnnnagaaggacatcacaatgaaagaaggaacctgagaaaattggggtgtggaggaattacaagaatgtaaaataaaaatgtcactgaagcagctcagtcataataccacaaagttatctgtgccttctgcaataaagtgcctctaaagtgatgcccttaaaacattccgctatgactgtccgaaaaatgatcaagcaaaatgtcttgagagctcctcctgccggctgttttcttagctgtccaagccyttgccaatagacccaatttggggtttgtctttttaagaagttggaaaacatggaaggcaaaacgaatgcaacgtttcttttatttgtcatagcaagaagccagcatgacctcccagcatctctcatactactgcccacttactctctaattttccagacagagatgctgggctggcaggctgaggtcaatgctgggagcagggcagtgtggcagctgcagaggagcacaaggcaagcctggcactctgtgatagcagggcaggcagagacctcagtagtaggcacagtaccacagtgcc

SEQ ID NO: 47144 - DNA, 600 bp, Chicken  19866894288914_1
cttctatccaacagaaaattagagatgtttcaaccctaaaagtacaaaacaacataagactcaattcattttttgatgtcatgccactcttcatgtttgccttttgcttgtttaaaatatttaacactgtctttaaacaaccttagaaatcaaaaatacgtttttaataagttttacagcttttatgagtccattgcacaggtctgtcacccatgtcttcagacagtgacaacagtgaagcaacgcatgcaacttttgccttcacttggaacagcagaatgatgaagctgattccctttktatgctcagacacctgaaacagtattggcccgtgccccaggtgtgaacacaaacctggtgcccacaggcagaggatttggtcatctcacaaatgcctgcatctgtgacaaagagacagggccagtgacttaggaaatctgagaagcttacaagcctcagcatacagaagctgcccagaaaacatgagaaagtgcacacttcatcaagtgcgctggcttccagtggcctgaagcaaagagcaaaaacaaggcctcattgttaaaaaatgatctttgttttgctttctttcctcaaaaagtg

SEQ ID NO: 47145 - DNA, 600 bp, Chicken  19866894288914_2
gaaacagtattggcccgtgccccaggtgtgaacacaaacctggtgcccacaggcagaggatttggtcatctcacaaatgcctgcatctgtgacaaagagacagggccagtgacttaggaaatctgagaagcttacaagcctcagcatacagaagctgcccagaaaacatgagaaagtgcacacttcatcaagtgcgctggcttccagtggcctgaagcaaagagcaaaaacaaggcctcattgttaaaaaatgatctttgttttgctttctttcctcaaaaagtgagcagagaatcaaayaaacttcatgtgctcagctgcagtgacctcagaatagcagtccacagacacgtgctggatatacaaaaagccgtttagaaaacaaaacaaacagaaacaaaacaaccaaacaaaaaacccacattgactgtgaaaacagaaaagaggacgggaaaaagttatctacagaaggaygcaacagatctctcacctacaaaccgtaaaggagaacgctaacttattgaccacatggctgttaaaatgaatcattggatactgaacacatcaccaaagcacaacatttaaagttactgccttcag

SEQ ID NO: 47146 - DNA, 600 bp, Chicken  19866894288914_3
agtgcacacttcatcaagtgcgctggcttccagtggcctgaagcaaagagcaaaaacaaggcctcattgttaaaaaatgatctttgttttgctttctttcctcaaaaagtgagcagagaatcaaayaaacttcatgtgctcagctgcagtgacctcagaatagcagtccacagacacgtgctggatatacaaaaagccgtttagaaaacaaaacaaacagaaacaaaacaaccaaacaaaaaacccacattgactgtgaaaacagaaaagaggacgggaaaaagttatctacagaaggaygcaacagatctctcacctacaaaccgtaaaggagaacgctaacttattgaccacatggctgttaaaatgaatcattggatactgaacacatcaccaaagcacaacatttaaagttactgccttcaggtcctaaagcccaccaaaacttcctgtgtttgttttaaacttgcatggatagtacttagaaaaaaaagttccattgcattagctatgctccagaatccaaaatgtgatgaaacttggtagtttaattcatgttctatatgtacaatcttctgttgctgtggatttgttttaaat

SEQ ID NO: 47147 - DNA, 600 bp, Chicken  19866894288920_1
tgaggttttgtcatagaggtccttaaatactgttgatctaagtgatacaatggcatattaattcactagtgagtaagcaaagaaaaaaaacacccaaaagacatgtggacaaatgtttttagtaacaacaaggtaaaagtggaaagctacagctgataaaatagtgagactatatagtaaccttttttaaagtatacatatccagaagaaatgctacatagtactaattgtgatgactgggaaataaatggctcacaagtttctgaaagcatcctcctgcagatcgtttgggagactccyratgacatcaggttggagataactcactgctgacattcgcaaaatctggcttaggatatccacacagtccatagctctcagagtcagaaagcatctctccagtgttataagaaacaaggttctgttcactcctggaatttggaaaattctctcccgagtcttttcccagtcaagaataacatttcccatttcctgcaaacaacacwgggttaaaataatgtctttctgattaattccataaattgttcattttgaagcctcacagaaagcaccctacaaacaatatggtgctattctcat

SEQ ID NO: 47148 - DNA, 600 bp, Chicken  19866894288920_2
gaggttttgtcatagaggtccttaaatactgttgatctaagtgatacaatggcatattaattcactagtgagtaagcaaagaaaaaaaacacccaaaagacatgtggacaaatgtttttagtaacaacaaggtaaaagtggaaagctacagctgataaaatagtgagactatatagtaaccttttttaaagtatacatatccagaagaaatgctacatagtactaattgtgatgactgggaaataaatggctcacaagtttctgaaagcatcctcctgcagatcgtttgggagactccyratgacatcaggttggagataactcactgctgacattcgcaaaatctggcttaggatatccacacagtccatagctctcagagtcagaaagcatctctccagtgttataagaaacaaggttctgttcactcctggaatttggaaaattctctcccgagtcttttcccagtcaagaataacatttcccatttcctgcaaacaacacwgggttaaaataatgtctttctgattaattccataaattgttcattttgaagcctcacagaaagcaccctacaaacaatatggtgctattctcatg

SEQ ID NO: 47149 - DNA, 537 bp, Chicken  19866894288920_3
agaaatgctacatagtactaattgtgatgactgggaaataaatggctcacaagtttctgaaagcatcctcctgcagatcgtttgggagactccyratgacatcaggttggagataactcactgctgacattcgcaaaatctggcttaggatatccacacagtccatagctctcagagtcagaaagcatctctccagtgttataagaaacaaggttctgttcactcctggaatttggaaaattctctcccgagtcttttcccagtcaagaataacatttcccatttcctgcaaacaacacwgggttaaaataatgtctttctgattaattccataaattgttcattttgaagcctcacagaaagcaccctacaaacaatatggtgctattctcatgaaaaaatagctgcaaaacatggcctgggttgtgtttcttcagataattcctgcttgggggttggccacagaccagcttgaatctttttacaaaatcaaaatgaaaaacagaaaaagccaaatggctcaaattacagcacata

SEQ ID NO: 47150 - DNA, 599 bp, Chicken  19866894288924_1
  misc_feature (1)..(106): n is any nucleotide
nnnnnnnnnnnnnnnnnnnnnnnnnnnnnnnnnnnnnnnnnnnnnnnnnnnnnnnnnnnnnnnnnnnnnnnnnnnnnnnnnnnnnnnnnnnnnnnnnnnnnnnnnntgctgcacttctgcagatggcccttgtgtttcttactgtccccaccagtgcattatctctaccttttgctgggcttttcctaggctggaacatgtgtggcagcaagtaacactgaccatgacgatgtgtggttgcatggccctaaaccaaccatgctttgaacacccatcagctcttgccacaagacgttgacrtttgctggatgtgaacgtgttgctgagtcatatggaaagccatcgggacctattggcacgttgaaattttgctgctgcgaagactcgtaatttaatgcattctatcatctattctgggtaagttgatgggtccattcaaatgttgtccactgaaaggtcagcaatggctgcctacctgggagaggctgtgcgtggtgaggagagctggcactcacctcgttggtgatcctccaggatgttatttatcatgcaaggtcataaaattgtctccttgcacagggctttagctctgggaaatg

SEQ ID NO: 47151 - DNA, 600 bp, Chicken  19866894288929_1
ctgcagacagcaggcaaccctgcaatgaacctgaaattaaagccacactttgcacaaacacacacgggtttaagacactctgtaggatgcaaaggactgcagacactgctctctgacccgagccccaggctccaccatgcttggagctgaagaagtcttaattaagagcatcccctcagagcgtgctgcccagatacagatgtgaaagcagagaaagagctgtttaggagagcacagcaagctaggagaggagctgagcccaaccccctaagttcagtgctcaaggtagtgaagcagttyctcaaacgagtttcaggtccaagatctcacatgagatatgaaccctccccctgcaatcaaagttagttcatggcagagctcaggtggtgcactgaggctgcaacgatccgggtggaacccacctgcagtggggacaaatgtcacagtggtaagtgcaggccagggacaagggagaagcactggctatgcacaccctccttgctcccttttcactgccaggaaccatcatcccatctctctgctctcaagagaccaccaaccctccctgctctcattaaacccctctgttccatgagctca

SEQ ID NO: 47152 - DNA, 599 bp, Chicken  19866894288932_1
  misc_feature (1)..(25): n is any nucleotide
nnnnnnnnnnnnnnnnnnnnnnnnnttcacagcagttattgatggtggtacctaattcctcttcttgtcaaaggttttcttgtcaagggcccccaacagcaggcagaggtcccaacaaagaggtctcaccagcactgaagctgtggcttccttcagcctctgaactggggggagagctgtcctccaggagggatgctgcagctttctgtcagcaccctgtgtgcagcatactggcagggattgttgcaggcagcagcagtgagtccagcggtgaagcaggcaggacctcaccctggggargagagccctgcctgcagggtgctgccctcatgcattctgacctactctgttgtgtcgaacagtggctgygggcacggtcctaacccaaagaaaggaacagctcaagtcctcctaaatagattgctctttattgggtcgttagcatacacatacgcaacacagtcactgtgcaaagtgtgctgctctgggtgggacacatacagccctagaagcaggggatggacagccatggagtcacagctgtgagcaaatcagctgttcagtgggactgctgtgctcagggagcacatgcacagaat

SEQ ID NO: 47153 - DNA, 600 bp, Chicken  19866894288932_2
aaaggttttcttgtcaagggcccccaacagcaggcagaggtcccaacaaagaggtctcaccagcactgaagctgtggcttccttcagcctctgaactggggggagagctgtcctccaggagggatgctgcagctttctgtcagcaccctgtgtgcagcatactggcagggattgttgcaggcagcagcagtgagtccagcggtgaagcaggcaggacctcaccctggggargagagccctgcctgcagggtgctgccctcatgcattctgacctactctgttgtgtcgaacagtggctgygggcacggtcctaacccaaagaaaggaacagctcaagtcctcctaaatagattgctctttattgggtcgttagcatacacatacgcaacacagtcactgtgcaaagtgtgctgctctgggtgggacacatacagccctagaagcaggggatggacagccatggagtcacagctgtgagcaaatcagctgttcagtgggactgctgtgctcagggagcacatgcacagaatgtcactgcagtgaggtgcatcattaccttctgygctgtggtgaggaggagcagttcagggaggtgttcaa

SEQ ID NO: 47154 - DNA, 600 bp, Chicken  19866894288932_3
cattctgacctactctgttgtgtcgaacagtggctgygggcacggtcctaacccaaagaaaggaacagctcaagtcctcctaaatagattgctctttattgggtcgttagcatacacatacgcaacacagtcactgtgcaaagtgtgctgctctgggtgggacacatacagccctagaagcaggggatggacagccatggagtcacagctgtgagcaaatcagctgttcagtgggactgctgtgctcagggagcacatgcacagaatgtcactgcagtgaggtgcatcattaccttctgygctgtggtgaggaggagcagttcagggaggtgttcaaagtatccgggtttgatctgcctgggactttgtctgcgggctgtcatgtggaggctttgggttggtggggcaacgctcctgccactggtttgagttgggaaggtgtaaaggagcagtctggctgaggagcacagcagtgaggttttgtgcccctcagcgggggatagcacagagctggtagtagggaggaacatttcctgtcccactcagtgtaggggtgatgctgagttcctcagggctgatgacaggcttcaaggtgaagtt

SEQ ID NO: 47155 - DNA, 599 bp, Chicken  19866894288933_1
  misc_feature (1)..(95): n is any nucleotide
nnnnnnnnnnnnnnnnnnnnnnnnnnnnnnnnnnnnnnnnnnnnnnnnnnnnnnnnnnnnnnnnnnnnnnnnnnnnnnnnnnnnnnnnnnnnnnnaatcacacatttacaatgtgcttacagaggggcttcctcccagctttaagcatagccctcccctcattaaaagcttttgttgcaccttttctcacctggggcagcagcagcacgtccttccgtcactgcagaggtctgggtgagaggtgtccttaatgccacccaaaggccaaggcacagctgtccccttgcagctccctgtgcmggggcttgggccgttggtctctcagccccatgctgcaggaggaggcacgcagcacagatgctcctctgtcacccaccagggccgggctctgcctgcaccacattgcgctgcaccctgtgggtctctctcctctctctgcaagtcctgcattgtggcaaggacagctctgggcccagatccgctggctctgcctgcagcacatcccgtgtgctctctctctgcccacaccctcagccaagagctgccaatggaagagcgggcagatgcagaaggcagcacctttgtgcttgcccaaaagc

SEQ ID NO: 47156 - DNA, 600 bp, Chicken  19866894288940_1
agcccttctgtcacaattaatgaagctcttccaggaggacctccttcacctttacagcatgcatctcaatatttgcctgtcactactgccttcccgtttccatctccttagggccgggatccaggctgtctgtgatgttattggtgataacaccaggcctcgtcgggggaggggggggcacgaggattattcaggacaagaagctacatcatctcgtgccttcttaaaatcagctttgctttttatttatttattttataactgtctttggctgtgggaacttcagatacagcagaacamattctgtaataagccggcgtggtctccttgtagacctctccgggtcttgcagtacttcttaccttgtcaggctgatgattttctttcccttcaagtttcttattttgctgtcgttgagcctcctgctctaactctgtaggagatgaaaggattagtggataacatgtgctggacatagggaatgtgtcttgttaatgtgtcttctattgccattttcccctcttgcagttgcagccctgctgataagcgtgttatcaggctctagaatggagaagaggtctaagatgatcttctttcctc

SEQ ID NO: 47157 - DNA, 599 bp, Chicken  19866894288943_1
  misc_feature (1)..(180): n is any nucleotide
nnnnnnnnnnnnnnnnnnnnnnnnnnnnnnnnnnnnnnnnnnnnnnnnnnnnnnnnnnnnnnnnnnnnnnnnnnnnnnnnnnnnnnnnnnnnnnnnnnnnnnnnnnnnnnnnnnnnnnnnnnnnnnnnnnnnnnnnnnnnnnnnnnnnnnnnnnnnnnnnnnnnnnnnnnnnnnnnnnnnccttttggcagccgctggcttccttgtaacctgaacggctcagggagaagagacaaacttctctgggtgatgcaggggggaaaaagcatttggtcgaggctttcggtgagctcctgcctygctcagcctgtgcggcccggtgtcactggggtcaaaacaattttgtcacctgaagggtgatgtccctgcgtgacttcctgccgtaataaccttcctggggagatgaagcaaaggtctcctcgctggctggggtgtttgagcccagagttcccggtgatggctgtgcttgaaggcagctgccttgggggcatgacgggatgcgtggcacccagctcgatcccagtgcccccgtgcactgtgctgagtgtcagtgacacccatcgttcccaccttgctgaaaaccaaaggctgcctgcaga

SEQ ID NO: 47158 - DNA, 599 bp, Chicken  19866894288948_1
  misc_feature (1)..(159): n is any nucleotide
nnnnnnnnnnnnnnnnnnnnnnnnnnnnnnnnnnnnnnnnnnnnnnnnnnnnnnnnnnnnnnnnnnnnnnnnnnnnnnnnnnnnnnnnnnnnnnnnnnnnnnnnnnnnnnnnnnnnnnnnnnnnnnnnnnnnnnnnnnnnnnnnnnnnnnnnnnnnnnnctaagattgtctgtagagatgtttccagtattcaaaatgaacctcttgaaaaaaatgagaacaattgctcttgaaaagatggaagggcaccaagatagagagcagttgtttggatgtgatagtgttcacacacttctgttsggtctcttctgtctgtttcactygtttgttgttagatctctgaggagtcctgtcaagaaagagacataaactaacttaaaatttatgtggaacccaacaagaggaagtgatgcatgcatttcttttaattccactgtagagtccttttgttaagcatctttgcacaccctgtagaatgcaatttctgtgggtggcggggaaagtttttggctaaagcacggtatgaaggagattactatcttagttttagcttctgttcaggattctggtaacttcttaagaacctcaggcagcaattt

SEQ ID NO: 47159 - DNA, 599 bp, Chicken  19866894288948_2
  misc_feature (1)..(136): n is any nucleotide
nnnnnnnnnnnnnnnnnnnnnnnnnnnnnnnnnnnnnnnnnnnnnnnnnnnnnnnnnnnnnnnnnnnnnnnnnnnnnnnnnnnnnnnnnnnnnnnnnnnnnnnnnnnnnnnnnnnnnnnnnnnnnnnnnnnnnnnnctaagattgtctgtagagatgtttccagtattcaaaatgaacctcttgaaaaaaatgagaacaattgctcttgaaaagatggaagggcaccaagatagagagcagttgtttggatgtgatagtgttcacacacttctgttsggtctcttctgtctgtttcactygtttgttgttagatctctgaggagtcctgtcaagaaagagacataaactaacttaaaatttatgtggaacccaacaagaggaagtgatgcatgcatttcttttaattccactgtagagtccttttgttaagcatctttgcacaccctgtagaatgcaatttctgtgggtggcggggaaagtttttggctaaagcacggtatgaaggagattactatcttagttttagcttctgttcaggattctggtaacttcttaagaacctcaggcagcaattttactctgtgccatggttccttca

SEQ ID NO: 47160 - DNA, 600 bp, Chicken  19866894288953_1
tgattaattactttaagcaatcagttttacagataatcacagttctttatttaaactgaaaagcaaaaggggatctcatgaataaaacataaaagggggaaaaaaagaaaaaaaatagctttcaattcaataagagtgaactcagcatagaaatagttcttcaagtaggcaaatcttgttaaaattatgccccttttcttattagctattaattataggattattctgtattaatacagttggaacatgagcttcaacagaagtgtaataaaaaaatcaagtttctgttaaaatgtctcrttgctacacattctttgattttttttttttkgggggggggggtccaattgatcctaataaccataaccaataaccaaaaactgaaaatagaacaagaaaaccagtactgagaagcagaagagaggtcttgtagttatgtgtacttgatttgtatgcagtgacttccttttcatacaggtatcttgtccaaaatggatgagaaaatccttatcttcctgggcgaaacatgacatggaaggtgtatgcttacatcttctgaaactcatagcattttctgtgtctctcaaactagtgctgtct

SEQ ID NO: 47161 - DNA, 600 bp, Chicken  19866894288953_2
gataatcacagttctttatttaaactgaaaagcaaaaggggatctcatgaataaaacataaaagggggaaaaaaagaaaaaaaatagctttcaattcaataagagtgaactcagcatagaaatagttcttcaagtaggcaaatcttgttaaaattatgccccttttcttattagctattaattataggattattctgtattaatacagttggaacatgagcttcaacagaagtgtaataaaaaaatcaagtttctgttaaaatgtctcrttgctacacattctttgattttttttttttkgggggggggggtccaattgatcctaataaccataaccaataaccaaaaactgaaaatagaacaagaaaaccagtactgagaagcagaagagaggtcttgtagttatgtgtacttgatttgtatgcagtgacttccttttcatacaggtatcttgtccaaaatggatgagaaaatccttatcttcctgggcgaaacatgacatggaaggtgtatgcttacatcttctgaaactcatagcattttctgtgtctctcaaactagtgctgtctttggagtctgcaagctaatccaggattatac

SEQ ID NO: 47162 - DNA, 600 bp, Chicken  19866894288953_3
ataatcacagttctttatttaaactgaaaagcaaaaggggatctcatgaataaaacataaaagggggaaaaaaagaaaaaaaatagctttcaattcaataagagtgaactcagcatagaaatagttcttcaagtaggcaaatcttgttaaaattatgccccttttcttattagctattaattataggattattctgtattaatacagttggaacatgagcttcaacagaagtgtaataaaaaaatcaagtttctgttaaaatgtctcrttgctacacattctttgattttttttttttkkggggggggggtccaattgatcctaataaccataaccaataaccaaaaactgaaaatagaacaagaaaaccagtactgagaagcagaagagaggtcttgtagttatgtgtacttgatttgtatgcagtgacttccttttcatacaggtatcttgtccaaaatggatgagaaaatccttatcttcctgggcgaaacatgacatggaaggtgtatgcttacatcttctgaaactcatagcattttctgtgtctctcaaactagtgctgtctttggagtctgcaagctaatccaggattataca

SEQ ID NO: 47163 - DNA, 600 bp, Chicken  19866894288953_4
taaccataaccaataaccaaaaactgaaaatagaacaagaaaaccagtactgagaagcagaagagaggtcttgtagttatgtgtacttgatttgtatgcagtgacttccttttcatacaggtatcttgtccaaaatggatgagaaaatccttatcttcctgggcgaaacatgacatggaaggtgtatgcttacatcttctgaaactcatagcattttctgtgtctctcaaactagtgctgtctttggagtctgcaagctaatccaggattatacaaacagaagaggagctccaggagtgkcttttattattagctgactattactcaggtaattcaagagcaactgggtagaaacacaatcatagatatcaaagtaattgcagcatgaaaacccgaggcatgtatgataacgcatcaaaaacagacatcatgcatcagaaatgctatttgcaacttaaacacctgaattttttggtaggtcttcagcactgatagtctcagtaatattcgaatggactattccagacagtggaagaaaatagagaaggaaagcttttccatacttcaacagtcaaattcttgtggtatccaccatgttgt

SEQ ID NO: 47164 - DNA, 600 bp, Chicken  19866894288957_1
tattatttcatgaggtcacatagctgaaaaaactcttctgtgtcttcagaagggccttggagactgtgtatacagactggcagaatgctgcttgttgaactgaatttcactgagaaataatttcattaaggaaatctcaaaaagtattttgacacccaaatctatttgtgagcagtaaaaggattaaactacaaaatataatctggtcatatccagatgtctcctcccacacacagcttctactctagctgtagcggtttctactctagctgtaactcagtacaatattaccttttcccytcctagtgtgaaactctgaataaagtcattccatgctatattataaaaaactcctctgctgtgtcactgatgacagaatatgagtactgctattcagttgccatgcctgccaagagatgactagactgtagtggtaaacggattttatttacatccactcacacagaatatcatgtggtaccctgctctcatagaatatcctttgtagccctcctytggagactctctaatggttttgtgcccttctgttgtggcacccacacctgcacccagtgctgaaggtgaggccacacagcacag

SEQ ID NO: 47165 - DNA, 600 bp, Chicken  19866894288957_2
atgtctcctcccacacacagcttctactctagctgtagcggtttctactctagctgtaactcagtacaatattaccttttcccytcctagtgtgaaactctgaataaagtcattccatgctatattataaaaaactcctctgctgtgtcactgatgacagaatatgagtactgctattcagttgccatgcctgccaagagatgactagactgtagtggtaaacggattttatttacatccactcacacagaatatcatgtggtaccctgctctcatagaatatcctttgtagccctcctytggagactctctaatggttttgtgcccttctgttgtggcacccacacctgcacccagtgctgaaggtgaggccacacagcacagagcagagggaacaactcctcccctcaccccgtggcagtgctgggcctgctgcaccccagggcatggttggatcttctggctgccagggcacactgctgactcacattcaacctgctctcaacataatcataacatatatatttgcagaagatgaatgtacttagcggtaattttgtttgcttatttatgagggagagggagaaggattttactcat

SEQ ID NO: 47166 - DNA, 599 bp, Chicken  19866894288960_1
  misc_feature (1)..(206): n is any nucleotide
nnnnnnnnnnnnnnnnnnnnnnnnnnnnnnnnnnnnnnnnnnnnnnnnnnnnnnnnnnnnnnnnnnnnnnnnnnnnnnnnnnnnnnnnnnnnnnnnnnnnnnnnnnnnnnnnnnnnnnnnnnnnnnnnnnnnnnnnnnnnnnnnnnnnnnnnnnnnnnnnnnnnnnnnnnnnnnnnnnnnnnnnnnnnnnnnnnnnnnnnnnnnnnaggatccctcgcagaagtgagcatctgcaaggccctgggtgatgaatattaacgagcctcaaaacagaaatagttctctagcggctgagcttgkctctttgtaacattttatggatatatagacccaaaatgtgcaatgtaacagcagagaaccaggcctggctgctctttgggagccctctccatcaccagacctgcaatcaggccgatggttttagggcccgtgcrcacctaaatgactccctgcactaagtagctccacttcattgagccactcatgtcccamagtgatggcttagtggggtcggcaggcagcaagcctcactgcaaaccaggggaaagtygaaggggctcaaatctaaaggttatggaagcatatggccaaaaatgttc

SEQ ID NO: 47167 - DNA, 599 bp, Chicken  19866894288960_2
  misc_feature (1)..(72): n is any nucleotide
nnnnnnnnnnnnnnnnnnnnnnnnnnnnnnnnnnnnnnnnnnnnnnnnnnnnnnnnnnnnnnnnnnnnnnnnaggatccctcgcagaagtgagcatctgcaaggccctgggtgatgaatattaacgagcctcaaaacagaaatagttctctagcggctgagcttgkctctttgtaacattttatggatatatagacccaaaatgtgcaatgtaacagcagagaaccaggcctggctgctctttgggagccctctccatcaccagacctgcaatcaggccgatggttttagggcccgtgcrcacctaaatgactccctgcactaagtagctccacttcattgagccactcatgtcccamagtgatggcttagtggggtcggcaggcagcaagcctcactgcaaaccaggggaaagtygaaggggctcaaatctaaaggttatggaagcatatggccaaaaatgttcaacttttgttcatgtgcactttgcacgtagcgatataaactccggtgctgtctgcagcacttttattgtcttttgtttaggtgtctctgagcagtcaatagtttattcattaaaatgtttatgattccccagag

SEQ ID NO: 47168 - DNA, 599 bp, Chicken  19866894288960_3
  misc_feature (1)..(14): n is any nucleotide
nnnnnnnnnnnnnnaggatccctcgcagaagtgagcatctgcaaggccctgggtgatgaatattaacgagcctcaaaacagaaatagttctctagcggctgagcttgkctctttgtaacattttatggatatatagacccaaaatgtgcaatgtaacagcagagaaccaggcctggctgctctttgggagccctctccatcaccagacctgcaatcaggccgatggttttagggcccgtgcrcacctaaatgactccctgcactaagtagctccacttcattgagccactcatgtcccamagtgatggcttagtggggtcggcaggcagcaagcctcactgcaaaccaggggaaagtygaaggggctcaaatctaaaggttatggaagcatatggccaaaaatgttcaacttttgttcatgtgcactttgcacgtagcgatataaactccggtgctgtctgcagcacttttattgtcttttgtttaggtgtctctgagcagtcaatagtttattcattaaaatgtttatgattccccagagttccacagactttggcacaacccatcacttgtctgagagttttgcagtgaaagcgcat

SEQ ID NO: 47169 - DNA, 600 bp, Chicken  19866894288960_4
aatattaacgagcctcaaaacagaaatagttctctagcggctgagcttgkctctttgtaacattttatggatatatagacccaaaatgtgcaatgtaacagcagagaaccaggcctggctgctctttgggagccctctccatcaccagacctgcaatcaggccgatggttttagggcccgtgcrcacctaaatgactccctgcactaagtagctccacttcattgagccactcatgtcccamagtgatggcttagtggggtcggcaggcagcaagcctcactgcaaaccaggggaaagtygaaggggctcaaatctaaaggttatggaagcatatggccaaaaatgttcaacttttgttcatgtgcactttgcacgtagcgatataaactccggtgctgtctgcagcacttttattgtcttttgtttaggtgtctctgagcagtcaatagtttattcattaaaatgtttatgattccccagagttccacagactttggcacaacccatcacttgtctgagagttttgcagtgaaagcgcattattcattagtccttatccatcatttgcagtttgtcatttgttattctcttgttttaaa

SEQ ID NO: 47170 - DNA, 600 bp, Chicken  19866894288977_1
aagtgaaaatggtttctttaagctcgtactctggatttttttggacttgttctttaggctgacttactatcaagaatggaaatggctttagttttgaagaaagagttgcttgcttcttgctttttgtcattcttaatttgtaaagctcccatcagtagctgagggagttctaagtaacccagaatgtaactgggtatgagactcagacgtgaacacaagtctctttctttcttcatctctgaaataccaaaccagtcacatgagttcataatgatcatttcttgtggaagtttctgtccygtttcagtcactcactgaagatatgcatcttcccctctggcacaacatcaactcatgcaaatctgcatagaagcaccgacgtttgtaaaggactgctcacttctatcagctgatgcattctgctgtttccttaaatgtgctgacattgctcacagttttatggcagacttcatttgggtaactcatacctcttcagatccattgttgacagagcaaggttacagagatctttatcttcacagattttgcaataaaatcttgaagtctatttctgtcaaacttgctcgttctgttattcct

SEQ ID NO: 47171 - DNA, 600 bp, Chicken  19866894288978_1
atttaagcgcacctaatcaggaaatctgtttcattggcatatctcacttagaaatcagggatgcttactaacaatgactgcatcttgatcgggatggtaatatcgcttaattgggatgccttcaggtatcttagtggtttgagttctttatgtctcaagctcaagctagtcttgtctgtctgctcctcataaaacagctttcagttcctccttgataatgatacaggcaaacgatgatgtaagctgctcgaacatttcttgctcctggctgtcagttgctgtgggaggggcacattacckgctgctgtgggtgttcttgccacagggacggctgcaggagcctcagtcaccatctcatgcagagcttcttgctgtccccaaaggcctcttgccgtccgcgtggcctcccgctgtccccacaggcctcctgctgtccccactgtaacccagagcaaagagcgtgtggtgaaggaagagctggacgtgcctctgtgcccagccagccacgcgggtaccccacagtcagacacacgtcattactactaagcgtaagcctcagctgaaaatctctgcctctccttgagggattatcaagttaaa

SEQ ID NO: 47172 - DNA, 600 bp, Chicken  19866894288979_1
agaacctgcagccagatctgcctcaatgctccaggaacctacagctgtggctgcctctctggctacctgctggagcctgatggccacatctgcaaactcagtggtaagtcctaagagggcaggcagcactgggcacctcctggtatgccaggagccagtgggtacctgctcctatgtgccttctgcctgtgggaagccctgtggtcccctccctgtcccgttggccatcactgttacttgtcagcccatggccatggcagtaggactgcatcccagcagtctcaggctctgatgcctgaratggctatgttccttggagtcaccagtgctgagagcctctgtgtcaccccaggaccagagcccatgctgctggtggctgtgcaatcagaggtgctgtcctatggccttcggagtgggcgcgaggaggtgctgctgaccagtgacaaggaacggaccatcttctcactcgactatgacctggtggaaaggaaagtcttctggatggacctggccacagagagcatctcctggcagagtctagattcaaggaaaaagggcacactggtgaaaggtaagctgtgatagcttggggctggtgag

SEQ ID NO: 47173 - DNA, 600 bp, Chicken  19866894288981_1
aaaagattattttcttttctgaaagcagaagttcatctcttagttcatgattcataactatccaatcactctcttgaaggcatttttggtccagaaattttgctgtggaaaatgatttttggagtggactgtaatcttttagtattatccatgtgggaaaatgcatttaaagtaaaaaggcaatactaagtgtttactcagaaaaacctttccatttctagaaatttctgaactttggaaacaaaactcaaactgcctgtcagttgctgtttgttttgactgttgttgcagatatttttrttggcaattagcttaaaaaaattcaaaaaaattcaataatttagttaattactgttgtatggtgttgaattagagaggatgacctgatgtgtaactggcatgtttggccaagtaaatgaaaaatataacttttaatggcaggagcataattacagatgacttcagaatgacaactggcaaaaattgtactataattaaatttccattataaaagtttcatcttttttttttctctttgtctgacatgtaaggctagattgtgaagagtattcatttatgagaggaagaattagagagcta

SEQ ID NO: 47174 - DNA, 493 bp, Chicken  19866894288981_2
attactgttgtatggtgttgaattagagaggatgacctgatgtgtaactggcatgtttggccaagtaaatgaaaaatataacttttaatggcaggagcataattacagatgacttcagaatgacaactggcaaaaattgtactataattaaatttccattataaaagtttcatcttttttttttctctttgtctgacatgtaaggctagattgtgaagagtattcatttatgagaggaagaattagagagctataatttataattcaggataatcaatgaaagcatttcttttgtcaagraacctttcactgataaatagcattgcattggtacttgttctaaaaagaaactaaaaattctttgcttatttatttaatttgctgcaaaaggagacgaaaaattctggtggttgaatggagtcttgctgtaattcagaataatgttatgtagatagggctcctcagtctgtttgtttctttttctccattaaca

SEQ ID NO: 47175 - DNA, 600 bp, Chicken  19866894288984_1
atattattccattgcttattaaaaaagcgaaagcatagacatgtaaagtgaacagctttagttattgattccattacgataatccctactctagtttttcttgtaaaataagaaatcatcaccatcttactgtaaaagagcacattctttcagcactggcataattttcatggcaagagcctatatatactgaattgttagtataatcttcagtgcattttttttttattagactcttcttcagcaggtttacattgtatcctgctggcagtagaattgatgaaagactagagatatttwaaaaaaatagatcttcattgtatgcttgtgattgatgccactccattcctgtggaataaatgcatgaatttacccattgctgtttttgtcatgggaaactgcctaatggttatgcataaaaatcacatccatatgttctgcataacttgactaatttaattcaatataatttttgtatctcttgtcaaaatttaatctcaagtaccttcattccaatacaaaacaaaaaacaaacaaacaaaaaaagactgtctacaacactgacttaatttgccaagtttgtatgtgtttatgtgggaa

SEQ ID NO: 47176 - DNA, 600 bp, Chicken  19866894288990_1
caccattcctgatacaagccaggatgccattggccttcttggccacctgggaacactgctggctcacattcagccaactgtccatcagtacactgaggtcccttcccatcaggcagcattccatctactccttcccaggcctgcacggttggttgcctggggttgttgtgaccaaaatgcaggacccgacacttggccctattgaaactcaaacagttaaccttggcccattgatccagtctatccaggttcctatgtagtgcctttctaccctctggcagatcaacactccctcccaamttggtgtcatctgcaaactcactgaaggtgcatccaatcccctcatcaagatcatcaataaagatgttgaataggagcggcctcaatactgagccatggggaacaccactcatgactggctgccaattggatttatctccattgccacaactcagggcttggccatccagccattgtttcacccagagggagtgtacgcccatccaaaccatgggtagccagcttctccatgagaatgttgtgggcaacagtatcaaaggccttactgaagtccaggtagaccacactgacagccttacc

SEQ ID NO: 47177 - DNA, 600 bp, Chicken  19866894288994_1
aagtgctcttggatagccaggtctggacaggactctttcctctcagtagggctgcagtggcacagactgcccagggaggtgatggggtcaccatggtgtcccagaaccgtggaaatgtggcatttggagacatggtcagtgggcacagtggggttgggtgggacatggacttagtgatcttagaggtccaagatttccaaccttaatgactctatgattctatgactaaggccatgcacacctggatgaggtccagatatattgtaggaagagaagaacctgagaggcagaggcaggtgrgagtggggctcccacactgcagtcartcagagctgttccaatccgattaaatttacaagggttgtgcagaggcttgatagtgattttcaggtcatagcagagagatgtgtgaatctgyagtctagctttctgcaaggctgatgcttcagaaaagcatgtcttgtgctcattgcacttcaggactcatttaactgaagaaggccacagaaatgctcagcatatataaaatcatctgtaaagagcttcttcttggaccaggattcacttctgtgctctgtggcagacattgaagtaaatccc

SEQ ID NO: 47178 - DNA, 600 bp, Chicken  19866894288994_2
acaggactctttcctctcagtagggctgcagtggcacagactgcccagggaggtgatggggtcaccatggtgtcccagaaccgtggaaatgtggcatttggagacatggtcagtgggcacagtggggttgggtgggacatggacttagtgatcttagaggtccaagatttccaaccttaatgactctatgattctatgactaaggccatgcacacctggatgaggtccagatatattgtaggaagagaagaacctgagaggcagaggcaggtgrgagtggggctcccacactgcagtcartcagagctgttccaatccgattaaatttacaagggttgtgcagaggcttgatagtgattttcaggtcatagcagagagatgtgtgaatctgyagtctagctttctgcaaggctgatgcttcagaaaagcatgtcttgtgctcattgcacttcaggactcatttaactgaagaaggccacagaaatgctcagcatatataaaatcatctgtaaagagcttcttcttggaccaggattcacttctgtgctctgtggcagacattgaagtaaatccctcccggcctctgtggttttgtgtgaa

SEQ ID NO: 47179 - DNA, 600 bp, Chicken  19866894288994_3
ggcatttggagacatggtcagtgggcacagtggggttgggtgggacatggacttagtgatcttagaggtccaagatttccaaccttaatgactctatgattctatgactaaggccatgcacacctggatgaggtccagatatattgtaggaagagaagaacctgagaggcagaggcaggtgrgagtggggctcccacactgcagtcartcagagctgttccaatccgattaaatttacaagggttgtgcagaggcttgatagtgattttcaggtcatagcagagagatgtgtgaatctgyagtctagctttctgcaaggctgatgcttcagaaaagcatgtcttgtgctcattgcacttcaggactcatttaactgaagaaggccacagaaatgctcagcatatataaaatcatctgtaaagagcttcttcttggaccaggattcacttctgtgctctgtggcagacattgaagtaaatccctcccggcctctgtggttttgtgtgaatccaggaaaaaaataatgcaagagagagaggggaaaaaaaaaattgtcagatcagctttctaaacagcaactttccttgtgctttcctagaa

SEQ ID NO: 47180 - DNA, 600 bp, Chicken  19866894289008_1
gatcatcactccctgccgtgggctggttgtcctccactggctcaggctgcccagggccccatccaacctggccttaagcacctccgggggatggggcatccacaacttctctggcaactcgctccagtgctttgccacactatgagaaaagaatttctgcctaatatctaatttaaatctcccctcttctaagtttaaagtcattcttccttgtcctatcgcaatctgcccatgtaaaaagtcagtctcctgcccatttgtaagttccaccatgtttctgtgatagcaattaggtcatakttttctaattgcatcacagttttcaactccttctgcttatttcccatgctgcttgcattggtgtaaaggcatttcagctgaagcttggaagcctgtgtggtcacagtggaagtcagatgccgagaactattcttactcagaagagaatcagaaacaacaggatgaatatcagatgatcataatatacacagttggcgtccaattaatagactataaattggaaagtttttggcagataatgcagggatgaataaattacaggattgtaacctgtcagcagacaaagatggtaaatttctt

SEQ ID NO: 47181 - DNA, 600 bp, Chicken  19866894289009_1
tgctgctgtgctgcaggctgcacgggttagtggagcaaatactcacctccttacaagtcatgcagaggttctgctgtatgaacgaaatcctccaccctcagtctgcccataggcaagtacctgaagagtttggaaatattctggttacaggaagtgagacacaaacaattcgtcaaatactggggcttcacaaaatagtttctagtctactcaaaggaactgtggtcaaggggtgattatctgtacccctgggtgagagacccaccagagccctccgcagtgccccagctgattttgtgmgctctgggtggcatgtcagatcctaattaacctgcaggatcctgcatctgccacttctaccccactgccatttcacaacttccatgtttccctctataactggaagaggaagcaaacctggagaagaaaaccacctgcagtttgattcctaggaggcctcagttttgttgagaagaaccaaactcaaaaatctcaatgtgggtacaaagagaggtgtcaagtggcaagggcaggatgagagacctcaaggcagctcctaagcatcagtgtgaaactactctctaacttacataccttgtc

SEQ ID NO: 47182 - DNA, 600 bp, Chicken  19866894289013_1
actgataatgatttgatctgctgagtctcttgtttttactcttagtttcaggtaggatatagtcaaacttggtacaaactgtcttttagcatgttttatcttccaattagaaaaggctgaaagtaaccaagagagcaattatggcatctctattggcatagagtaacttgtggtgtagctcacttctgtctgatgttcatgcatttaatacttgctgcagatgtatagatacttgtgtagatgggggtgtagaactttccttctacatggaaaaaattggtaatcaataactctcacagmtttttttccagacttctatttgtattagcactcagattgsgatgatctgggtggcagaattaggaagttgttcttggtgtgcttatggagaaacatgtactatgagacattcctagttgtagttggaaactgctgttgcacgtgctaagactctagactgtaagtgaaaacagaaggattatgtttctgcttcttgtrtaaggtacttgtcttatgtagctctyggtatgagaggctacagtgttttatgctcccttttctgaggaaggagaagtgttagggtagtcagaatggggggta

SEQ ID NO: 47183 - DNA, 600 bp, Chicken  19866894289013_2
ctgataatgatttgatctgctgagtctcttgtttttactcttagtttcaggtaggatatagtcaaacttggtacaaactgtcttttagcatgttttatcttccaattagaaaaggctgaaagtaaccaagagagcaattatggcatctctattggcatagagtaacttgtggtgtagctcacttctgtctgatgttcatgcatttaatacttgctgcagatgtatagatacttgtgtagatgggggtgtagaactttccttctacatggaaaaaattggtaatcaataactctcacagtmttttttccagacttctatttgtattagcactcagattgsgatgatctgggtggcagaattaggaagttgttcttggtgtgcttatggagaaacatgtactatgagacattcctagttgtagttggaaactgctgttgcacgtgctaagactctagactgtaagtgaaaacagaaggattatgtttctgcttcttgtrtaaggtacttgtcttatgtagctctyggtatgagaggctacagtgttttatgctcccttttctgaggaaggagaagtgttagggtagtcagaatggggggtat

SEQ ID NO: 47184 - DNA, 600 bp, Chicken  19866894289013_3
cttagtttcaggtaggatatagtcaaacttggtacaaactgtcttttagcatgttttatcttccaattagaaaaggctgaaagtaaccaagagagcaattatggcatctctattggcatagagtaacttgtggtgtagctcacttctgtctgatgttcatgcatttaatacttgctgcagatgtatagatacttgtgtagatgggggtgtagaactttccttctacatggaaaaaattggtaatcaataactctcacagttttttttccagacttctatttgtattagcactcagattgsgatgatctgggtggcagaattaggaagttgttcttggtgtgcttatggagaaacatgtactatgagacattcctagttgtagttggaaactgctgttgcacgtgctaagactctagactgtaagtgaaaacagaaggattatgtttctgcttcttgtrtaaggtacttgtcttatgtagctctyggtatgagaggctacagtgttttatgctcccttttctgaggaaggagaagtgttagggtagtcagaatggggggtatagattaaaaatacaaacagaagcattcccagagcactga

SEQ ID NO: 47185 - DNA, 600 bp, Chicken  19866894289013_4
atgcatttaatacttgctgcagatgtatagatacttgtgtagatgggggtgtagaactttccttctacatggaaaaaattggtaatcaataactctcacagttttttttccagacttctatttgtattagcactcagattgsgatgatctgggtggcagaattaggaagttgttcttggtgtgcttatggagaaacatgtactatgagacattcctagttgtagttggaaactgctgttgcacgtgctaagactctagactgtaagtgaaaacagaaggattatgtttctgcttcttgtrtaaggtacttgtcttatgtagctctyggtatgagaggctacagtgttttatgctcccttttctgaggaaggagaagtgttagggtagtcagaatggggggtatagattaaaaatacaaacagaagcattcccagagcactgaaagtgcaagtaaccccaaagctgtgctagggcattctctgtaaagtgagctgaatatctgtcatgaaaaccttctacgatttatataggtcctagtgaaatattcaagcattgaagtgcatgcttgtatatagtagtattgcttcccagatacattaa

SEQ ID NO: 47186 - DNA, 600 bp, Chicken  19866894289013_5
atagatacttgtgtagatgggggtgtagaactttccttctacatggaaaaaattggtaatcaataactctcacagttttttttccagacttctatttgtattagcactcagattgsgatgatctgggtggcagaattaggaagttgttcttggtgtgcttatggagaaacatgtactatgagacattcctagttgtagttggaaactgctgttgcacgtgctaagactctagactgtaagtgaaaacagaaggattatgtttctgcttcttgtrtaaggtacttgtcttatgtagctctyggtatgagaggctacagtgttttatgctcccttttctgaggaaggagaagtgttagggtagtcagaatggggggtatagattaaaaatacaaacagaagcattcccagagcactgaaagtgcaagtaaccccaaagctgtgctagggcattctctgtaaagtgagctgaatatctgtcatgaaaaccttctacgatttatataggtcctagtgaaatattcaagcattgaagtgcatgcttgtatatagtagtattgcttcccagatacattaagtgctgatagaatgattgcccaatgc

SEQ ID NO: 47187 - DNA, 599 bp, Chicken  19866894289014_1
  misc_feature (1)..(66): n is any nucleotide
nnnnnnnnnnnnnnnnnnnnnnnnnnnnnnnnnnnnnnnnnnnnnnnnnnnnnnnnnnnnnnnnnntccctcactgctccccactcccaccaggccctcagatcagagcactgcagccagccctgatgcactcccaggagagacaccagcactgctatcctggttactcctccacctgacaactttctgtattctccagaatttctaaggagtgaggaacgaaacagcctcatggaagaacagctgccacaaagcagctccacgctgcagctcacagctgaactcatacagccacagtcrgcagcagtgtgtctacagagacaccaaaccccacaaacagccccaggagaacaaaaagtaaaagcagagaagggctggagaagcgagaaacaggaactgaaagcwacaacagacagaaaggacaggcaggcaggaagtaacaataacagctaaagcacagtgctcttgkggggtctctgcagcacaacacctgataagcttcccccctcccctgcttgtcagctttcactgctgtgcaagggacaggcacgaagcactgcagagatctaccaaacttccaacctcacatcacctccaga

SEQ ID NO: 47188 - DNA, 600 bp, Chicken  19866894289014_2
gagcactgcagccagccctgatgcactcccaggagagacaccagcactgctatcctggttactcctccacctgacaactttctgtattctccagaatttctaaggagtgaggaacgaaacagcctcatggaagaacagctgccacaaagcagctccacgctgcagctcacagctgaactcatacagccacagtcrgcagcagtgtgtctacagagacaccaaaccccacaaacagccccaggagaacaaaaagtaaaagcagagaagggctggagaagcgagaaacaggaactgaaagcwacaacagacagaaaggacaggcaggcaggaagtaacaataacagctaaagcacagtgctcttgkggggtctctgcagcacaacacctgataagcttcccccctcccctgcttgtcagctttcactgctgtgcaagggacaggcacgaagcactgcagagatctaccaaacttccaacctcacatcacctccagagaaggacaagaagtgctcccgcttggactctggaactcacgtgatcttcatcagtgatggtattagtcacatttagaacaactgtgctatttttattaaataacag

SEQ ID NO: 47189 - DNA, 600 bp, Chicken  19866894289014_3
ctccacctgacaactttctgtattctccagaatttctaaggagtgaggaacgaaacagcctcatggaagaacagctgccacaaagcagctccacgctgcagctcacagctgaactcatacagccacagtcrgcagcagtgtgtctacagagacaccaaaccccacaaacagccccaggagaacaaaaagtaaaagcagagaagggctggagaagcgagaaacaggaactgaaagcwacaacagacagaaaggacaggcaggcaggaagtaacaataacagctaaagcacagtgctcttgkggggtctctgcagcacaacacctgataagcttcccccctcccctgcttgtcagctttcactgctgtgcaagggacaggcacgaagcactgcagagatctaccaaacttccaacctcacatcacctccagagaaggacaagaagtgctcccgcttggactctggaactcacgtgatcttcatcagtgatggtattagtcacatttagaacaactgtgctatttttattaaataacagaagttttagcaaagctctgagcaggctccaagaaaaataaatagctagaacttgtattttagac

SEQ ID NO: 47190 - DNA, 600 bp, Chicken  19866894289017_1
cctgggttcaattcccgaccaaactctcagaagacttcatttttctgtttccattttccatttggagggaaagataaaatggactaggagtcacaagactgccctttttgctccctggccactttacttacagcattagagtaaggattttggtttcagaaactctctctctttcacatttatttcatatattagcttaaatttcaatcattttggattatattgcattatctcacattctgctactatattcagaaaactaagttttctttctttagctcgttgctgctgttttcctcrtctaggcccatctccctaccttttccttttcacccacctcactcttcccggggctgtggatctgtgggttcctttgcccccttgtgatggaaaccatgtcaaattgtgataattttagaacttgggtcatatatgggtaaaaggagagttgacagaagatgttgacttcttggtgattgctgttcactatcatattctttgtgcttatttgaatgtgatttgacacaagattaatgacagacaccttgtttgttttcatgactgcactgaaatgctaggcataatattatgaactggcaa

SEQ ID NO: 47191 - DNA, 600 bp, Chicken  19866894289035_1
ctgaagaaatataacagatcaccccggtatcctacaacaagggaatatttttcagtgaccaacagggattttcagctacttcttgggctggtacagatcatggctataacgcacatgcatacaccaatttgcagcataagacgtgtaatgctcattactggaagacagccccaaagcaggaggaaacaaaactttaatgtacagctttttaagaggtgattcacatagaatttgagagaggtgaaagtagtacattttgcagtgtcattaccagagttttaacctggtactttgttctcraaaaactaacaagacacactaatagcaaaagcatttacataaccacaataattcttttctaaggcaggaatgtttatgcatatttaaataaagaaaagccatataacttgacaaataccaaagtatgagtgctaaatcataaggtcatctgttaatcaaatagaaacatttaaatccttgtgactgtcctttaatcacagacaaatatcacacgctgttctcataggctctttttcttaagcccagctttcaataccaaggagttgtattccaagacaaacacctccacctctagagagg

SEQ ID NO: 47192 - DNA, 600 bp, Chicken  19866894289035_2
ataaggtcatctgttaatcaaatagaaacatttaaatccttgtgactgtcctttaatcacagacaaatatcacacgctgttctcataggctctttttcttaagcccagctttcaataccaaggagttgtattccaagacaaacacctccacctctagagaggctctgctcctcaggcagagatgccatccccacactttagtagataacccgctgcaggctcaacacacctaaccagcctgccacatcccatccaagcaaggcagcagtgtgacaagcagcaatggaacagtgccagacrtgctggttgccccaaaactgcaacagctcgccctaagcagtgttgggaaccacagcccatgacccagtagaaggctgctgctgagtaaagagaagcatccagcatcatctgcgttctctgagtcacctgaaatcgcattgtcaccatcagtgaagtttaaaaaacaaaaacaaaacacagccacctgcatggatgatgcaggtaccttaaggcacaagggaaaatcatcttctcacaacaatgagcacattgtaaatatgcaaaaggacaaaccatcctcaaattgacctcctctcttcg

SEQ ID NO: 47193 - DNA, 600 bp, Chicken  19866894289039_1
attctgatctcagcatcaaaatacagagtcctaagcatagaggatcaagtcatttcaataatatgaacctcattgtccttttgttgtctggcttaacgacacctgccttaataaaccccagaccatcccagtccctaaagctaggttgaaggttgtttttgcagatgaaccaatttaagcttgataaaatcacagcaggcctgggaaataaggaggtaatacatctgcaggaacaaaagctgtaagagaatgtggattacatatgaggatatttttggaactgtgtaagtgtacatggtmgtgaacggagtgataagagaacaagctcccagctgatcggctgcatacgtgctggctcatccttagccttctaccatgtgaatgtactgtcagcagcaggcttctgctgagtgggctgctraggtctytgctcttcatcatcctccytatgcccttcagcaacttgagaagcttggactaaggtgaaaaattccaggcaaaggcattctcaaaaatcatcactttccacttctytcctcttatcctgrcctctttcaccaaccacttttttatgtttggtctctacgacatcaaaaaaaa

SEQ ID NO: 47194 - DNA, 600 bp, Chicken  19866894289039_2
accatcccagtccctaaagctaggttgaaggttgtttttgcagatgaaccaatttaagcttgataaaatcacagcaggcctgggaaataaggaggtaatacatctgcaggaacaaaagctgtaagagaatgtggattacatatgaggatatttttggaactgtgtaagtgtacatggtmgtgaacggagtgataagagaacaagctcccagctgatcggctgcatacgtgctggctcatccttagccttctaccatgtgaatgtactgtcagcagcaggcttctgctgagtgggctgctraggtctytgctcttcatcatcctccytatgcccttcagcaacttgagaagcttggactaaggtgaaaaattccaggcaaaggcattctcaaaaatcatcactttccacttctytcctcttatcctgrcctctttcaccaaccacttttttatgtttggtctctacgacatcaaaaaaaaaaaaaaaaagaaagatcctttgccaaaagacagggaaaaggtaggaagaggaataaatwccctgtgacgtctccccagaggaagcttccttactgcatggttggaaccctctaatataagt

SEQ ID NO: 47195 - DNA, 600 bp, Chicken  19866894289039_3
cagtccctaaagctaggttgaaggttgtttttgcagatgaaccaatttaagcttgataaaatcacagcaggcctgggaaataaggaggtaatacatctgcaggaacaaaagctgtaagagaatgtggattacatatgaggatatttttggaactgtgtaagtgtacatggtmgtgaacggagtgataagagaacaagctcccagctgatcggctgcatacgtgctggctcatccttagccttctaccatgtgaatgtactgtcagcagcaggcttctgctgagtgggctgctraggtctytgctcttcatcatcctccytatgcccttcagcaacttgagaagcttggactaaggtgaaaaattccaggcaaaggcattctcaaaaatcatcactttccacttctytcctcttatcctgrcctctttcaccaaccacttttttatgtttggtctctacgacatcaaaaaaaaaaaaaaaaagaaagatcctttgccaaaagacagggaaaaggtaggaagaggaataaatwccctgtgacgtctccccagaggaagcttccttactgcatggttggaaccctctaatataagtgaccctg

SEQ ID NO: 47196 - DNA, 600 bp, Chicken  19866894289039_4
gaaggttgtttttgcagatgaaccaatttaagcttgataaaatcacagcaggcctgggaaataaggaggtaatacatctgcaggaacaaaagctgtaagagaatgtggattacatatgaggatatttttggaactgtgtaagtgtacatggtmgtgaacggagtgataagagaacaagctcccagctgatcggctgcatacgtgctggctcatccttagccttctaccatgtgaatgtactgtcagcagcaggcttctgctgagtgggctgctraggtctytgctcttcatcatcctccytatgcccttcagcaacttgagaagcttggactaaggtgaaaaattccaggcaaaggcattctcaaaaatcatcactttccacttctytcctcttatcctgrcctctttcaccaaccacttttttatgtttggtctctacgacatcaaaaaaaaaaaaaaaaagaaagatcctttgccaaaagacagggaaaaggtaggaagaggaataaatwccctgtgacgtctccccagaggaagcttccttactgcatggttggaaccctctaatataagtgaccctgcaattttcttcctgggatg

SEQ ID NO: 47197 - DNA, 600 bp, Chicken  19866894289039_5
aaaagctgtaagagaatgtggattacatatgaggatatttttggaactgtgtaagtgtacatggtmgtgaacggagtgataagagaacaagctcccagctgatcggctgcatacgtgctggctcatccttagccttctaccatgtgaatgtactgtcagcagcaggcttctgctgagtgggctgctraggtctytgctcttcatcatcctccytatgcccttcagcaacttgagaagcttggactaaggtgaaaaattccaggcaaaggcattctcaaaaatcatcactttccacttctytcctcttatcctgrcctctttcaccaaccacttttttatgtttggtctctacgacatcaaaaaaaaaaaaaaaaagaaagatcctttgccaaaagacagggaaaaggtaggaagaggaataaatwccctgtgacgtctccccagaggaagcttccttactgcatggttggaaccctctaatataagtgaccctgcaattttcttcctgggatgctgtggaagaatacaatgatgtaaagagcatttaagctggaaaaaaataaccagtataggaaaggaacattctttacatttttttcc

SEQ ID NO: 47198 - DNA, 600 bp, Chicken  19866894289039_6
aatgtggattacatatgaggatatttttggaactgtgtaagtgtacatggtmgtgaacggagtgataagagaacaagctcccagctgatcggctgcatacgtgctggctcatccttagccttctaccatgtgaatgtactgtcagcagcaggcttctgctgagtgggctgctraggtctytgctcttcatcatcctccytatgcccttcagcaacttgagaagcttggactaaggtgaaaaattccaggcaaaggcattctcaaaaatcatcactttccacttctytcctcttatcctgrcctctttcaccaaccacttttttatgtttggtctctacgacatcaaaaaaaaaaaaaaaaagaaagatcctttgccaaaagacagggaaaaggtaggaagaggaataaatwccctgtgacgtctccccagaggaagcttccttactgcatggttggaaccctctaatataagtgaccctgcaattttcttcctgggatgctgtggaagaatacaatgatgtaaagagcatttaagctggaaaaaaataaccagtataggaaaggaacattctttacatttttttcctacttttcatcaaa

SEQ ID NO: 47199 - DNA, 600 bp, Chicken  19866894289039_7
tccttagccttctaccatgtgaatgtactgtcagcagcaggcttctgctgagtgggctgctraggtctytgctcttcatcatcctccytatgcccttcagcaacttgagaagcttggactaaggtgaaaaattccaggcaaaggcattctcaaaaatcatcactttccacttctytcctcttatcctgrcctctttcaccaaccacttttttatgtttggtctctacgacatcaaaaaaaaaaaaaaaaagaaagatcctttgccaaaagacagggaaaaggtaggaagaggaataaatwccctgtgacgtctccccagaggaagcttccttactgcatggttggaaccctctaatataagtgaccctgcaattttcttcctgggatgctgtggaagaatacaatgatgtaaagagcatttaagctggaaaaaaataaccagtataggaaaggaacattctttacatttttttcctacttttcatcaaaatgcatgtcacaaatcctttaaatggaatttaagaaagcactattatggaatttcccttggctcagtttctaactacatcctcagtcttttataccttacagggtagggct

SEQ ID NO: 47200 - DNA, 600 bp, Chicken  19866894289041_1
tgcaagttaaatgtgaagaacgattttattgctttttaaaaaaaaatattctgaagttttcatatgatgtatttctataaaatcactcaaataaatagcagaaaataaaattccagtaatattttcacagaaacatagggcttggcaaggacctctggagatcatctagtctgcctgctaaagcagattccctagagtaggttgtgcagggaaaagggtccagatgggttttgaacatctccagagaaggagactccacaacttctctgggcagcttgttccaagctcaaagtaccctcmaattatagatctttttttctcatgttcatatgaaaattcctgtgcttcagtttgtgctctttgtcctgttgctaggaaccactgaaaagagtctggctccatctacttgacaccctttcttcagatatttataagagttgatataatccccccttagtcttctcttctccaggctgaacagtcccaggcctctcagcctttcttcatgagggagatgttctaggcccatattcatctttgtaggcctctgttggactttctccagtaattcccctacctttcatgagctgaggagcccag

SEQ ID NO: 47201 - DNA, 600 bp, Chicken  19866894289041_2
gtgaagaacgattttattgctttttaaaaaaaaatattctgaagttttcatatgatgtatttctataaaatcactcaaataaatagcagaaaataaaattccagtaatattttcacagaaacatagggcttggcaaggacctctggagatcatctagtctgcctgctaaagcagattccctagagtaggttgtgcagggaaaagggtccagatgggttttgaacatctccagagaaggagactccacaacttctctgggcagcttgttccaagctcaaagtaccctcmaattatagatcmttttttctcatgttcatatgaaaattcctgtgcttcagtttgtgctctttgtcctgttgctaggaaccactgaaaagagtctggctccatctacttgacaccctttcttcagatatttataagagttgatataatccccccttagtcttctcttctccaggctgaacagtcccaggcctctcagcctttcttcatgagggagatgttctaggcccatattcatctttgtaggcctctgttggactttctccagtaattcccctacctttcatgagctgaggagcccagaactgagcacag

SEQ ID NO: 47202 - DNA, 514 bp, Chicken  19866894289047_1
ctcaaaaacacccaaattctgccgggatgaggtccatttactgcctttaggactgcatacgaagacccctccggaggttctaggtcctccaacagttctgagccaaaaaaccatagatttgggttaaagaagtgacactttggaccccaaaatgaaacccccaaagcccccaaatcccccaaagcctcaaaaacacccaaattctgccaggatgaggtcaatttattgcctttaggactgcatacgaagacccttccggaggttccaggtcctccaacgatgtcctgcgccaaatccaasgggttcgggttaaaaaccgaagctttccacccccgtaccgatgaaccsccccccaaagacaccccgattttgccagcagggcccccctttattgcctttaggagttggcgttggggcccttcttcttgccaaaggtgggcaccacgttgacgaagcgccggttgtactgcatgcgccgcttggcgcgggccggcttcttcttcttcttctcctg

SEQ ID NO: 47203 - DNA, 466 bp, Chicken  19866894289047_2
aggactgcatacgaagacccctccggaggttctaggtcctccaacagttctgagccaaaaaaccatagatttgggttaaagaagtgacactttggaccccaaaatgaaacccccaaagcccccaaatcccccaaagcctcaaaaacacccaaattctgccaggatgaggtcaatttattgcctttaggactgcatacgaagacccttccggaggttccaggtcctccaacgatgtcctgcgccaaatccaasgggttcgggttaaaaaccgaagctttccacccccgtaccgatgaaccsccccccaaagacaccccgattttgccagcagggcccccctttattgcctttaggagttggcgttggggcccttcttcttgccaaaggtgggcaccacgttgacgaagcgccggttgtactgcatgcgccgcttggcgcgggccggcttcttcttcttcttctcctg

SEQ ID NO: 47204 - DNA, 600 bp, Chicken  19866894289048_1
attaactcctggggtgcaccactagtgaatggtctccagatgggcttcatgctactgatcacaaccatttgagctcagtagttcagctagctttcgagccacctcactgttcatttatgtcatctatatttcatcagttcatctatgaggatgttacggcagacagcgctgaaaaccttgttaaaaatggcataaacaacatcctctgctatcccctcatgcaccaaggcagtcatctcatcatggaaggctattgtgatggtcaggcctgattttagcgtatcaagtttaccagagtgwgaggttttgagaaatcagagaaagggagccacacctcatctccctctggccttggttttcataatagttggagggaaattagtgtttgagcttttattgtaactaagaatgcctgtctcccttctggggacttatgtatgtaaggcagaatttactgtaaaagcttagttacatgtgctagaatttttgactctgctttggcatgaactaagaaaaagaataatcatttaaaaataaacctagctattgtatttaaccttggcccgtgcagccagtgatattttgtgagacgttccagct

SEQ ID NO: 47205 - DNA, 482 bp, Chicken  19866894289052_1
agaagccatcagctatcgcagtgagagcacagacccatcaaggctggagaaggcccctgggatcaccctgctggcaggacctgagtgccacagccatcccatagccctgcatggggcagctcctggctcctgccgtccgcactgatcctaacactgcaaatgccaaaagtggatcagaggagaactttttcttcccttgggtctgggtatgtttattttctctgctatgtaatttatctgtagccttttttttccagcagtaaaatatgctgactgtgactgttacatttcccaaacgarctcctctggcgagctctccatctcctcataccgtttggggtgctgatgtaatcctacggctggatgtgaaccgagcagaaaatgacacggtacaaaacttgccctgaaaatctgtgcaggatttaataggttcgttcttatctactttttgcagtaggcgtccaccctattcagcactttca

SEQ ID NO: 47206 - DNA, 600 bp, Chicken  19866894289067_1
gaggtcagtctcatctctgctgcttctggcttccacctgcccaatgtcacactgcactggaatcaagtgtgcaagctctgtctacattaaacgctttccaagtgtgaccaaacttaaatagctgtgacttctagacaaagtaggtgagtgagtagaagcctgaattaatcagctcgtgaatctgtagcatgggataagttactgaagcagctgcagccatccatcaccttggattctgaaatgactgccagtgattgcacctctggtaagagcacagatagggcagcacttcactctgayaatccagctttgcaagcagakaaattagtcctggagtttgaatgggcagtgggatccaggagcaaccagatggaaaactgtgcaaagtgctgaagatcacacaaaactgcacatcctgagtgccctttgctaaggcacactccctgcactgcaccctgacaacaagtgatcacactgctgagcagacagctcctgtgcctgaactcaagacacacatgtggtctgtaggctgagaaacacaggtggcataaaacaggctttcagtcaccagggtgcacttcccagtcctttctgtcccaa

SEQ ID NO: 47207 - DNA, 600 bp, Chicken  19866894289067_2
gcttctggcttccacctgcccaatgtcacactgcactggaatcaagtgtgcaagctctgtctacattaaacgctttccaagtgtgaccaaacttaaatagctgtgacttctagacaaagtaggtgagtgagtagaagcctgaattaatcagctcgtgaatctgtagcatgggataagttactgaagcagctgcagccatccatcaccttggattctgaaatgactgccagtgattgcacctctggtaagagcacagatagggcagcacttcactctgayaatccagctttgcaagcagakaaattagtcctggagtttgaatgggcagtgggatccaggagcaaccagatggaaaactgtgcaaagtgctgaagatcacacaaaactgcacatcctgagtgccctttgctaaggcacactccctgcactgcaccctgacaacaagtgatcacactgctgagcagacagctcctgtgcctgaactcaagacacacatgtggtctgtaggctgagaaacacaggtggcataaaacaggctttcagtcaccagggtgcacttcccagtcctttctgtcccaaagcttaattaccagaacaggg

SEQ ID NO: 47208 - DNA, 600 bp, Chicken  19866894289067_3
gccctttgctaaggcacactccctgcactgcaccctgacaacaagtgatcacactgctgagcagacagctcctgtgcctgaactcaagacacacatgtggtctgtaggctgagaaacacaggtggcataaaacaggctttcagtcaccagggtgcacttcccagtcctttctgtcccaaagcttaattaccagaacagggacaagaccctgaactgaactcaacactttggttctggactgcctatggcaagtgccacacttccaggcctattcacagcacttcccagtcactgcgcacmcaaacccttctccaacaccaaagaaagaccattttggggaactcctgcaatctccagcttctagtttgctggttacagtcagaatcaccaccctaccatctctcccaggatgcccgaccgcactctccggagctcctgcatttggcccccaacaccaagcagcaaaccaaggtggacacaaagcgttcggatgtacgtgcccgcttcacagctcacccagaagatacctgaaacacgagagagaatttacatgtatagctacaagcgagccacatccagaggctccacgtccagcccctc

SEQ ID NO: 47209 - DNA, 600 bp, Chicken  19866894289071_1
ccagagagtagtggtgagtggagttaaatccagctggtgacaggtcatgagtggtgttccccaggggttcgtactggggcctgtcctgtttaatatctttatggattacctggatgagggcattgagagcaccctcagtaagtttgcaagtgacaccaagttggctggaaatgttcatcttccagggggtaggaaggccctacagaggtatctaggcagtctggattgctggactgaagccaatgggatgaagttctgcaagaccaagtgcctggttctgcactttggccacaacaggcsagcattccaagcaacgcttggagtagagttgctggaagactgcatagaagaaatggacctgggggtgttggtcaacactaggctggacatgagccagcagtgtgcccaggtggcccagaaagacaacagcatcctggcttgtggcagaaatagtgttgccagtaggaacacgaaggtgtcagcacagatgaggccacacctcaagtactatgttcagttttgggcccctcactaaaagaaagacattgaggccctggactgtgtccagagaagggcaacaaagacccttaacaaaggtga

SEQ ID NO: 47210 - DNA, 600 bp, Chicken  19866894289072_1
caaacaaaaaccccacaacaacccaacaacaaaaacaaaccccaacaaaacattttcaaagctaacattctgtttaggttcattttgaagatattcacagttcttcattcagggtaaaaaaagagttaactactaagttcttcactcttgattgcagcaggtttcaatgctttcatttaaatacatgatgttaagttttaatacctttttcaatacaggtaaaatgaacagattttactccattttgtcactgccaataacagaaacttcagtgttcatacaggtactctttgcttctcygtgtatcttctgttagtgtagagtatacacagttcagatttcactaaaaatttcttcaccaagtatttactttatatttcagcttagaaagatactatgtaactggaaaatttcttatatgctgctgcagttacaagactgcacataacttcctgcaatactgattttcttggcaatgttttgagctcaagcaggtgacaagcaagcaataaaattgtttttcacactattcatatggatgcaaaagattttatactacaattttaaacaaatactgcagaaggttattcgggaattatt

SEQ ID NO: 47211 - DNA, 600 bp, Chicken  19866894289073_1
agcaagctggtaaagacggcatgccagcactgaggtgtgcatgtggttggaaaaccgggctcctgcttggctctagcactggctgcttgtcactcagagggtggtgacacactggaacaggttgcagaaggaggctgaggatgccccatccctggattcatggctaggctggatgtggctctgggcagcctgttctagtggtcagtgatcctgcccatggaaggggggttgaaattagatgatctctgaggtccttttcaacccaggctgttctatgattctgtgaaacaaatggggaaygagcccttggagcaaagccaggaggaagccttcccagtcctacagccgtgtcttcctgggaaatgaacccccaaagcaccccaagggatgcatagaagggaacgaaacaccctgcactgcagcaccagggctgccagatggcactgggcagctctcggggacgtgaggacagagtttggcagctcccagtccgtgggtgaatatccagacaaactctgccccgctttcacagagtgaaggccaggctgggcttccttacagcagagctgggcgctgtccccagcacgggtacagggcaga

SEQ ID NO: 47212 - DNA, 600 bp, Chicken  19866894289074_1
tttagttaaatttgtacacagagaaaattcaagcctgttcaatgtaaattaaatgagttaaaaagaaaatgtagaaatacccaaactatgcttgaagattatttacttgaacttattgttacctatgctagagattcagggtgctgcaataccggaagcccttcagaattgttagactaatccaataatatatggactcggcagtatatttacactctggtcttctcagtagctttccagtttagacttctgcaaatgtcttttttgctatttcactcattttttattcctctattaagytactttcagagaaatgtcctcaaaacttcagaaagtcccacttatccaaatgcacagttgtctgtctcactcccatttacaagacagagaggaagttctttgatatgtatacacggcatgagattaagaaacaatggttcaaatgttggtctgaccagttaattacaaatcttaatcaggaaagtggggaaggggaggacggacgatttagggtgatggggaagagaaggcgggcagtggaaaaaataggaaagaggcaagaattgcgtaaagcagggatagtcaccaccagaatccagc

SEQ ID NO: 47213 - DNA, 600 bp, Chicken  19866894289075_1
aacatatcttgattcttctaaaagcaagattaatttgcataggcaaaaggacccaaatggaaattgaatgactatttgtggcagaaattattttagcagtaggagaaaggtaaagggatcaattctaaatgacagaatgaatagtatagagggtggagagcaaaagggatgtgtgaaagtgccctttgggagtgtcagagcacaagctcgttttacaaagtccaaaaatatacttttgaggagtgctaaactcagatccttttcttttaagtccaaatgaacattttaatcaataagttyaaaaaaaaaaaaaaaaaagacattagtagaatgcaagtactttgcaggagcagataaactgtgctgtgatggtgttttagagtcccagagacatggagaactttgagaggatagcttttatttaaccagtgaactgcttatttagctgaactcttctgtttcaaatttttcttggtgtcctcaatagttgaacgtggtcacccaggagtactgcatcacaagggagactggacttcattgtgcaatgcattaagaatattttcaagtggtaatttcaaggcacttgactattctttgctg

SEQ ID NO: 47214 - DNA, 600 bp, Chicken  19866894289075_2
acatatcttgattcttctaaaagcaagattaatttgcataggcaaaaggacccaaatggaaattgaatgactatttgtggcagaaattattttagcagtaggagaaaggtaaagggatcaattctaaatgacagaatgaatagtatagagggtggagagcaaaagggatgtgtgaaagtgccctttgggagtgtcagagcacaagctcgttttacaaagtccaaaaatatacttttgaggagtgctaaactcagatccttttcttttaagtccaaatgaacattttaatcaataagttayaaaaaaaaaaaaaaaaagacattagtagaatgcaagtactttgcaggagcagataaactgtgctgtgatggtgttttagagtcccagagacatggagaactttgagaggatagcttttatttaaccagtgaactgcttatttagctgaactcttctgtttcaaatttttcttggtgtcctcaatagttgaacgtggtcacccaggagtactgcatcacaagggagactggacttcattgtgcaatgcattaagaatattttcaagtggtaatttcaaggcacttgactattctttgctgt

SEQ ID NO: 47215 - DNA, 600 bp, Chicken  19866894289075_3
tgcatgtagtttccaggttgatttaaagtttatggaccaaattcatatgctgttcttctaccacaagtaattatggtggatctctgaaccttgtaagaaaactaatatctcattctaatggccatttaaatggcttgcaatcatgcaagtggcactaaattaaaccctaagtttggaggtaaaactattactgagttaccacccccaggacttgtcagcttctggattatttcacgtaagttagaaggaggtaaatgcagttcaccactgacaatgtaagatggctcttgggaacatgcwctaaatgggaacatatccagatgttggactcccagatgtgtaagccattgtggaataatcatccaatcaatcaggttgtgtaaaagcaggaatgaaaaggcaaacagtataaaaaatgtgaattggaacttgaaattcagtggactgtaaggcacaaagatggtcctgtcagtgtgcaggatactggctatatcatgtctgggaagctcagtgtaagaatgtcagtgttattagacaagtaaaagaaggcagaatttagcttctcacttgtgtattgatgtatagtaacaataaacagaa

SEQ ID NO: 47216 - DNA, 600 bp, Chicken  19866894289075_4
tgtgtaagccattgtggaataatcatccaatcaatcaggttgtgtaaaagcaggaatgaaaaggcaaacagtataaaaaatgtgaattggaacttgaaattcagtggactgtaaggcacaaagatggtcctgtcagtgtgcaggatactggctatatcatgtctgggaagctcagtgtaagaatgtcagtgttattagacaagtaaaagaaggcagaatttagcttctcacttgtgtattgatgtatagtaacaataaacagaaattagatgtgcaacacatgaataatggtctgtccarcttgctgaaaatcagatcctctgtttgtttacaaactgtgcctcagattaatgacatttagaaatcatcatttccactgagtatttttataattgatttttttctaatttgtgctttcttaagcacaattaactggctgcattcacatttgatatgatataaatacaaatacttgtagttgaaaggatttataaacaaaaatgcatgagcgaaaaccaccattgtgctttccgtgacccaatatttacacagaaagtttttaattttgacatgactagacagataccaaataccaaatgc

SEQ ID NO: 47217 - DNA, 403 bp, Chicken  19866894289084_1
aacgtttcagtgtcctgcatggctttaagtcccttccatagtaccagaactcatgcctggtttgctctctacagcttctttttcagaaagagtgcggaacatgtctccagatgagatcagaatccctcctgagcctcctggcagatgttctaaccacttgcaggttggtatagaaagtggaaagttggaaaatgtttcagcagggagggggggatgtttggaaactctgctcagtctttttctacaagtcaaaaatccagcattatcgctgagttcctaacacagtgagtttatgcactrtgttttgttgttgttgttgtttttaattttacaggaattctagcttaggaatctcacattagcttaaagttgttttccacagtctgcataggtcatacttcaa

SEQ ID NO: 47218 - DNA, 600 bp, Chicken  19866894289086_1
gttgatggaagaaattgggtagtaaaaaaacgagttagtaatgttaaaaaaaaaaacaaaaacaaaaaccacacaggaggtacgaataatgttttttactgtctttttcaaaagaaaaaattactctttggatctctttctgctccactgagacattgcacctcactttcagtagcaaaaggtgctcagtgtcaggaggtatctcataccactcactgaaagcaactggaaatccagaatttcatatgtttttatgtcaaagtgtgactctcacagattatttctaagtttaggctaccytaaaatattacttttattgtcatttgggatgaaacttgatttctgatttttaatttcagtgttcagtagtttgaaatacgttcagtatttattttctttgtaggactactactgcatgaagtgtcaaaagttttgctgtttcacaaaagctgaccagtcattgtcatttaagagcacttagcctggtatattgatacatcatttataatttgttctattcagagatgctttattaaaacgtgatttcactatttatgtaggtttataaagtgtatgaggaaatacagaatgcttttgcaa

SEQ ID NO: 47219 - DNA, 600 bp, Chicken  19866894289086_2
gtcatttgggatgaaacttgatttctgatttttaatttcagtgttcagtagtttgaaatacgttcagtatttattttctttgtaggactactactgcatgaagtgtcaaaagttttgctgtttcacaaaagctgaccagtcattgtcatttaagagcacttagcctggtatattgatacatcatttataatttgttctattcagagatgctttattaaaacgtgatttcactatttatgtaggtttataaagtgtatgaggaaatacagaatgcttttgcaaaattaggaaatgcaaagyatatctgaaacacttcataaaacttacttggtggcctccacttactgcatttgctggcccacctcttgggagctgccacattttgtgctgggtaacaaactcagttcttcagccacagattcacagaatgtcttgagttagaagtctttacaagtatttggggttgcccgaacccaagtgcagcaccttgcacatggccttgtcgtttctctttaggttcccacaggctcactcttcaagcctatccaggtctctctggatggtatctcttccttctgttgtatcagtcgcaccactcag

SEQ ID NO: 47220 - DNA, 600 bp, Chicken  19866894289093_1
ccaaataaggcttatcaggaagagaaaccaattgaaactcttactaaataaggtttattaggaagaacaaccagttgagactggtgcaggagagaaagaccaacacccatccccttcaaaactctttccacatgatgtcaaatatcatggtatacccctttggccagtctaagagagctgtcctaattctgtaccctcccagctcctcaggcccttcgctgagaacagcctcagctctaaataacactgcctagcagcaactataaacattcacatgttatcaatgttgttttcctcctrgaactaaaacatagcatcatacgagacactctgaagaaaacaatttaatcccagctgaaactaaatcaaatgattttatattttctattctccctctgaaattaaagctattctaaagtatgtcagcaattctttttcataaggaaagaaatcagagcaaaaaatcatgggtagtatacctcagagtaaactgtctcccagtcttctaggaaattactaacgagacttgataattaatgtaaaactatagtagtagacaagctgtaatgaatcataaatcagtttcatatttttcagaat

SEQ ID NO: 47221 - DNA, 600 bp, Chicken  19866894291038_1
aatgctcagcactgcagagccagctcctacgccccttgtacagggcttgcaaatacccttgcagcgcagctcgtgatgctccatgctgaagcacatgaatccttttgtggctttcactcgaagtgaattgctgacttgcactatacagatctgtaggccttttgtcaccaaaggagtccctaattgccagatttcaatgagactgctcgggtgaattagatttgtctggttaaagtcctgtctggggagtaatgggttgaaattacttgtgaggagacttgcgtgggagctgcaggggtwggaagggggtaaagagtcattcattttcttcctctggaagacagccactttgccaacgcacactgtcaaggcagacctgcccatagagcaaattacaaagcgttggccatgtcagaaatgaactccatcattatacattcaaatatcacccagaccgactccagcagatctgtaccatacaagttcggatcaaatattaacgtgcacctgagagagagcgtgtgaataagggaaagcacacgcgtgaagcaccttttctccctctgctatgggaaggcagcaaagtgattattacttgct

SEQ ID NO: 47222 - DNA, 600 bp, Chicken  19866894291065_1
agttagcacagcaggttttctaaaatgattattcttaaataaataaaatcttgaagacctcattatattcttacaatctctggggaaatttaaaacataaaaataaaaataacagcattttttttcagtgtgcaaccctccaatcactttctgaggaagaaggactacatgcatctgtacaggttaggggatgacatgttggaagggagctctgtggaggaggacctgagtgtcccagtggacaacaggttgaccacactgagcagtacattcttgtggccaagaaggtcgatgatatcytgggatgcgttaagaagagcacrgtcagcaggtcaggggttgttatcctttccctctactctgccctggtgaggccacatctgcagtaatgtgcagttctgggctccccagttcaagaaagatgtacttctagagagagtccagtggagagtcacaaaggtgattgattaggggcctggagcatctcccttctgaggaaaggcttagagacatgggaatcctcagcccagaaaagagaagactgaagggaaatcttatcaacactgataactatttcaagagcagttgtcaggagggaaa

SEQ ID NO: 47223 - DNA, 600 bp, Chicken  19866894291065_2
aatgattattcttaaataaataaaatcttgaagacctcattatattcttacaatctctggggaaatttaaaacataaaaataaaaataacagcattttttttcagtgtgcaaccctccaatcactttctgaggaagaaggactacatgcatctgtacaggttaggggatgacatgttggaagggagctctgtggaggaggacctgagtgtcccagtggacaacaggttgaccacactgagcagtacattcttgtggccaagaaggtcgatgatatcytgggatgcgttaagaagagcacrgtcagcaggtcaggggttgttatcctttccctctactctgccctggtgaggccacatctgcagtaatgtgcagttctgggctccccagttcaagaaagatgtacttctagagagagtccagtggagagtcacaaaggtgattgattaggggcctggagcatctcccttctgaggaaaggcttagagacatgggaatcctcagcccagaaaagagaagactgaagggaaatcttatcaacactgataactatttcaagagcagttgtcaggagggaaagtccaggctcctctcagtgatgc

SEQ ID NO: 47224 - DNA, 477 bp, Chicken  19866894291065_3
gtacttctagagagagtccagtggagagtcacaaaggtgattgattaggggcctggagcatctcccttctgaggaaaggcttagagacatgggaatcctcagcccagaaaagagaagactgaagggaaatcttatcaacactgataactatttcaagagcagttgtcaggagggaaagtccaggctcctctcagtgatgcccagcaacagaactagggacaatgggcacaaaaaagaactcagaaagtttcatatgaacatgaggaaaaaattctttactttgggggttacagagcactkaaacaagctcaaggtcgttgagtctctactggagataytcaaaacccacctggatattttcctgtgtaacctacaccaggaaacctactttagcaggggagggatggaataaatgagatgcagagggtcattccaatccctgcaattattgattctgtgactgcaattttatctcac

SEQ ID NO: 47225 - DNA, 439 bp, Chicken  19866894291065_4
gattgattaggggcctggagcatctcccttctgaggaaaggcttagagacatgggaatcctcagcccagaaaagagaagactgaagggaaatcttatcaacactgataactatttcaagagcagttgtcaggagggaaagtccaggctcctctcagtgatgcccagcaacagaactagggacaatgggcacaaaaaagaactcagaaagtttcatatgaacatgaggaaaaaattctttactttgggggttacagagcactkaaacaagctcaaggtcgttgagtctctactggagataytcaaaacccacctggatattttcctgtgtaacctacaccaggaaacctactttagcaggggagggatggaataaatgagatgcagagggtcattccaatccctgcaattattgattctgtgactgcaattttatctcac

SEQ ID NO: 47226 - DNA, 599 bp, Chicken  19866894291071_1
  misc_feature (1)..(159): n is any nucleotide
nnnnnnnnnnnnnnnnnnnnnnnnnnnnnnnnnnnnnnnnnnnnnnnnnnnnnnnnnnnnnnnnnnnnnnnnnnnnnnnnnnnnnnnnnnnnnnnnnnnnnnnnnnnnnnnnnnnnnnnnnnnnnnnnnnnnnnnnnnnnnnnnnnnnnnnnnnnnnnntatattaaaagcaataaatgcaaacaacatcatttttagccacgcttcttctccagatccttaggatctgatgtatttggatggcaatgacatcacccttaggtatcagtaacagtgttggagaaaatcgatgtcacttaytctgatcatctcaaatgtgcagcgggaagagatttaatatgtggagaagtccagagggctctgcactgctcaatgagggatgccaaccgcaggcaggagatagcgtgggctgccaatactatacaactatattctcatttgaggatttatgcattrtctttatctactacgtgaagcacccataaccattgctgcttcttacctgtagagctctgagtcagtccaagccatactttcctagttattagatcatttttctttatgtgtgcgctcacaaacgcattttcctcagcatcccc

SEQ ID NO: 47227 - DNA, 599 bp, Chicken  19866894291071_2
  misc_feature (1)..(3): n is any nucleotide
nnntatattaaaagcaataaatgcaaacaacatcatttttagccacgcttcttctccagatccttaggatctgatgtatttggatggcaatgacatcacccttaggtatcagtaacagtgttggagaaaatcgatgtcacttaytctgatcatctcaaatgtgcagcgggaagagatttaatatgtggagaagtccagagggctctgcactgctcaatgagggatgccaaccgcaggcaggagatagcgtgggctgccaatactatacaactatattctcatttgaggatttatgcattrtctttatctactacgtgaagcacccataaccattgctgcttcttacctgtagagctctgagtcagtccaagccatactttcctagttattagatcatttttctttatgtgtgcgctcacaaacgcattttcctcagcatcccctatggtcagaagggctgctgaaggatctaaggggaagagaaaaatggttagaactgtagcatcrgcagttttcattgcgytcatacacaaagttttccgcaggaacaattgtaatgggaaaagatttgccgatttgggcttataacattaatctga

SEQ ID NO: 47228 - DNA, 600 bp, Chicken  19866894291071_3
cactgctcaatgagggatgccaaccgcaggcaggagatagcgtgggctgccaatactatacaactatattctcatttgaggatttatgcattrtctttatctactacgtgaagcacccataaccattgctgcttcttacctgtagagctctgagtcagtccaagccatactttcctagttattagatcatttttctttatgtgtgcgctcacaaacgcattttcctcagcatcccctatggtcagaagggctgctgaaggatctaaggggaagagaaaaatggttagaactgtagcatcrgcagttttcattgcgytcatacacaaagttttccgcaggaacaattgtaatgggaaaagatttgccgatttgggcttataacattaatctgaagtaaccggcagaaggaaggcagacatctccccttcctcaaatacagtgtaatgttacgcaagacaacctcaggtgactggttatcctggcaggtcccataaaataaattggtgtaatcttactgcagctgtggaatacttacatggatgattccaaaagatacatccctggttcagaattactagtttgacagagaattagtatttg

SEQ ID NO: 47229 - DNA, 600 bp, Chicken  19866894291071_4
atgccaaccgcaggcaggagatagcgtgggctgccaatactatacaactatattctcatttgaggatttatgcattrtctttatctactacgtgaagcacccataaccattgctgcttcttacctgtagagctctgagtcagtccaagccatactttcctagttattagatcatttttctttatgtgtgcgctcacaaacgcattttcctcagcatcccctatggtcagaagggctgctgaaggatctaaggggaagagaaaaatggttagaactgtagcatcrgcagttttcattgcgytcatacacaaagttttccgcaggaacaattgtaatgggaaaagatttgccgatttgggcttataacattaatctgaagtaaccggcagaaggaaggcagacatctccccttcctcaaatacagtgtaatgttacgcaagacaacctcaggtgactggttatcctggcaggtcccataaaataaattggtgtaatcttactgcagctgtggaatacttacatggatgattccaaaagatacatccctggttcagaattactagtttgacagagaattagtatttgtagtgatattgtgtgc

SEQ ID NO: 47230 - DNA, 600 bp, Chicken  19866894291072_1
gtttttgtattcagtaacataagaccctcatcactcaatgcatactagcacttctagtgggattccctctggaagatgtgagcttatttgtgaagaatccaatgatgttgaagaaaagaactgtgttgggaaaaaactgcttgtgttgtgttttgtcttctgcaaatcacgagtggttatagaatctacaaaaattaacagctgatgaattattccctccccacagccccaccaaaatggaaataatttcatcaaagaaacagactgtttcaaaagctctttcttaacttttaagctgtygtcctatataggaataaagaatagttacaatgaaaagctgtatcatacaaagcgtagtcatgcttttttataccttccaggatttcagtaaacaaacacatactcgtaggttacccaaatatgtgtatggatcagctttaatactccttccaagtttttttggagggaaagggaaagagaggccaagaaaaataaaaataaaaaaaatcctattggagtatatggcaaatatatcacattgtatgtttttgttgttgctgtttgtctattttaaatagcatattaaaatatatttgcata

SEQ ID NO: 47231 - DNA, 600 bp, Chicken  19866894291072_2
tgtatcatacaaagcgtagtcatgcttttttataccttccaggatttcagtaaacaaacacatactcgtaggttacccaaatatgtgtatggatcagctttaatactccttccaagtttttttggagggaaagggaaagagaggccaagaaaaataaaaataaaaaaaatcctattggagtatatggcaaatatatcacattgtatgtttttgttgttgctgtttgtctattttaaatagcatattaaaatatatttgcatacttctgcaataagctttgaatggttaaaaaaagttcakttttgatatgaacatttattaaacagaaattggcacaattttattaattttgattaagctatttggattttcatcagatgagaatatatccccttccaaacaaagatttttggtaatgaatcagcaatgtctttctagttgctatttatcttcttgatacatyattacttttaaagatgttttgcaaaatatttagggtataaaaactaaacagtttcctcattctgcctcaatgtaaaagctgatctttgaaaagttaatcatgcaacaagcttccttccacacaggagaaggagagaa

SEQ ID NO: 47232 - DNA, 600 bp, Chicken  19866894291072_3
aaaaaatcctattggagtatatggcaaatatatcacattgtatgtttttgttgttgctgtttgtctattttaaatagcatattaaaatatatttgcatacttctgcaataagctttgaatggttaaaaaaagttcakttttgatatgaacatttattaaacagaaattggcacaattttattaattttgattaagctatttggattttcatcagatgagaatatatccccttccaaacaaagatttttggtaatgaatcagcaatgtctttctagttgctatttatcttcttgatacatyattacttttaaagatgttttgcaaaatatttagggtataaaaactaaacagtttcctcattctgcctcaatgtaaaagctgatctttgaaaagttaatcatgcaacaagcttccttccacacaggagaaggagagaacagaaaaaaaacaacttgattgagataagagactaaatttattagaaggaatgtgagctaatacagaataattaagaataattaatcaaataaaccaaaaatgagaggaaagagagctgggctgagtccatattagcaggcaatcatggctggcttcttggaa

SEQ ID NO: 47233 - DNA, 599 bp, Chicken  19866894291074_1
  misc_feature (1)..(63): n is any nucleotide
nnnnnnnnnnnnnnnnnnnnnnnnnnnnnnnnnnnnnnnnnnnnnnnnnnnnnnnnnnnnnnnctttgttcatgtatttttgctttaaggtttaacagtaagaaatcaaatccagccaactaccaatgggatggctttcagctttccttttcctcatacgcctgtaacacaggtccctcccaaacttaaaaaggaaatccatattttctctacaagcaagtgcttcagataccctgtttatctcagcactttagaagcttctcagcatgagtacagataagccttcttgaaggacagttygtacaaaatgctgaggcatcagcaataacactgcagcacctactgcaccatgccacatcctgaccccacaaagactgtctgcaagataaccaaagtcagctctgccctagagcattccaaaattaagactatctttttatctgtgtgttctgccccacatccagtctgtctaaatcagagagcagctcaaagcagcagtatttaaaaagaaaaaaaaaagctgtttggaggattcattctaacatctggaggtagaggtccgacccctcccttgattgcacttcttgctcacggtaggt

SEQ ID NO: 47234 - DNA, 600 bp, Chicken  19866894291082_1
tgatcaggagtaggagtacgtatgtttttccccaagataccaaatgtggagaatatctttgtgcatagggggaagcgtttgtggtcttttgcactgagtagtcttaagccttcctgctggcacacgtgctcaccgctgctgcacttcaggtaagaagataatgatcacatcattaagacactactgaagctggcattacttgttaggtcaacatatcgatcttgacattacgctgcaagatttttttagataatgcctatctgtcctgcctcctgctccaggaaagagggagagaaaaamcacaaaactaaaactcaactcaagcaacttagcacacatctcttccccaaaataaaagcccttttcttctwtaaggatctgttctgcagaggctcctgccktgttgctgctgatgagatcgtgggccaatgctccttaagttgatgaaaatcccaagggaattgctgggtgcttgggcagatagtttggccacgggttgcacccgaagatctgggtttgtaaatctctagctgtcctttaaagcctgctgtccgtttgcatcacacctgtattctgagcatattaggaaccctggaaatg

SEQ ID NO: 47235 - DNA, 600 bp, Chicken  19866894291082_2
gaagcgtttgtggtcttttgcactgagtagtcttaagccttcctgctggcacacgtgctcaccgctgctgcacttcaggtaagaagataatgatcacatcattaagacactactgaagctggcattacttgttaggtcaacatatcgatcttgacattacgctgcaagatttttttagataatgcctatctgtcctgcctcctgctccaggaaagagggagagaaaaamcacaaaactaaaactcaactcaagcaacttagcacacatctcttccccaaaataaaagcccttttcttctwtaaggatctgttctgcagaggctcctgccktgttgctgctgatgagatcgtgggccaatgctccttaagttgatgaaaatcccaagggaattgctgggtgcttgggcagatagtttggccacgggttgcacccgaagatctgggtttgtaaatctctagctgtcctttaaagcctgctgtccgtttgcatcacacctgtattctgagcatattaggaaccctggaaatgtccttctttgctgtagaaaaatctctctcactttttaataaatttctgggtttttttgttatctcttttgt

SEQ ID NO: 47236 - DNA, 600 bp, Chicken  19866894291082_3
tcttaagccttcctgctggcacacgtgctcaccgctgctgcacttcaggtaagaagataatgatcacatcattaagacactactgaagctggcattacttgttaggtcaacatatcgatcttgacattacgctgcaagatttttttagataatgcctatctgtcctgcctcctgctccaggaaagagggagagaaaaamcacaaaactaaaactcaactcaagcaacttagcacacatctcttccccaaaataaaagcccttttcttctwtaaggatctgttctgcagaggctcctgccktgttgctgctgatgagatcgtgggccaatgctccttaagttgatgaaaatcccaagggaattgctgggtgcttgggcagatagtttggccacgggttgcacccgaagatctgggtttgtaaatctctagctgtcctttaaagcctgctgtccgtttgcatcacacctgtattctgagcatattaggaaccctggaaatgtccttctttgctgtagaaaaatctctctcactttttaataaatttctgggtttttttgttatctcttttgtataggagctgtccaagccagctttcctgat

SEQ ID NO: 47237 - DNA, 600 bp, Chicken  19866894291090_1
gatctggtaggaaaacaaacatttcttgaagctttcttttggcagacattttctgattgctgcactaagctctgtggctgccagcatcgctgactactgactcacttagcaaggcatctggtgggcctccaagtctgtatcagcagtagcagtgctttgcaattagatcttatgcatgtgctagttccttggagctgctcggaggggaagcatatctatatgtaaacattatcaccgtgatgctctaactgacatgataactacatgtgcgtgttgagaaacctccttgtgtcctcccartcagacacaataaagaacagtatagcgaggtactgcacctatctttaagcacctatctattccttacatccctaacatacagcacagtcatttgacacagatggaggacatcagctgtcatcagtccctccrggcatcaccagcacaggaggctgctgttcaacacggtcgtagttccacgtatgggatcacagcaacccttgttaaaggtctcagaaaaggtctcggtagggacttacaatctccactgcagcttctccagttatctgctgccagaactttaagaattcaaaagtttct

SEQ ID NO: 47238 - DNA, 598 bp, Chicken  19866894291090_2
gtctgtatcagcagtagcagtgctttgcaattagatcttatgcatgtgctagttccttggagctgctcggaggggaagcatatctatatgtaaacattatcaccgtgatgctctaactgacatgataactacatgtgcgtgttgagaaacctccttgtgtcctcccartcagacacaataaagaacagtatagcgaggtactgcacctatctttaagcacctatctattccttacatccctaacatacagcacagtcatttgacacagatggaggacatcagctgtcatcagtccctccrggcatcaccagcacaggaggctgctgttcaacacggtcgtagttccacgtatgggatcacagcaacccttgttaaaggtctcagaaaaggtctcggtagggacttacaatctccactgcagcttctccagttatctgctgccagaactttaagaattcaaaagtttctgacctgcaaatattcacctctcactgaattcacctctccagcagccagctggtgtaggaagttctctgagacactcatagcagtgctgtatttaagagagaggactggaagcctctgctgcaatgccacg

SEQ ID NO: 47239 - DNA, 599 bp, Chicken  19866894291094_1
  misc_feature (1)..(133): n is any nucleotide
nnnnnnnnnnnnnnnnnnnnnnnnnnnnnnnnnnnnnnnnnnnnnnnnnnnnnnnnnnnnnnnnnnnnnnnnnnnnnnnnnnnnnnnnnnnnnnnnnnnnnnnnnnnnnnnnnnnnnnnnnnnnnnnnnnnnnctcacacatttctggcacataagatatgatgcacgtacctaattagatagtttactcgacataaatgtgcaagacaaatacttcaaaatgaaagttctgccagaacacagggtaaagaatttctggcctgtatttcctgagtctttccttctacatttcttataatygagttttatatttccctttttccagtcttaagaracttcacctgacagccataacgtcttaacacgaagggcaattcayctgcttctccttccctgcctatctcttttaaaaatcttgtagccctcaattgtatcattccaattatatgattcatcccatgacatttctgtggtagcaattaggtcatagttttctaatttcaytgtggcttcctattcctcctgcatatttcctatgctgtgtgcattggtgcagaggcacttcagctgggctagcagctgtgttaccttcctggagg

SEQ ID NO: 47240 - DNA, 599 bp, Chicken  19866894291094_2
  misc_feature (1)..(99): n is any nucleotide
nnnnnnnnnnnnnnnnnnnnnnnnnnnnnnnnnnnnnnnnnnnnnnnnnnnnnnnnnnnnnnnnnnnnnnnnnnnnnnnnnnnnnnnnnnnnnnnnnnnctcacacatttctggcacataagatatgatgcacgtacctaattagatagtttactcgacataaatgtgcaagacaaatacttcaaaatgaaagttctgccagaacacagggtaaagaatttctggcctgtatttcctgagtctttccttctacatttcttataatygagttttatatttccctttttccagtcttaagaracttcacctgacagccataacgtcttaacacgaagggcaattcayctgcttctccttccctgcctatctcttttaaaaatcttgtagccctcaattgtatcattccaattatatgattcatcccatgacatttctgtggtagcaattaggtcatagttttctaatttcaytgtggcttcctattcctcctgcatatttcctatgctgtgtgcattggtgcagaggcacttcagctgggctagcagctgtgttaccttcctggaggagtccttctgaatttctctgggacaactctgagg

SEQ ID NO: 47241 - DNA, 599 bp, Chicken  19866894291094_3
  misc_feature (1)..(54): n is any nucleotide
nnnnnnnnnnnnnnnnnnnnnnnnnnnnnnnnnnnnnnnnnnnnnnnnnnnnnnctcacacatttctggcacataagatatgatgcacgtacctaattagatagtttactcgacataaatgtgcaagacaaatacttcaaaatgaaagttctgccagaacacagggtaaagaatttctggcctgtatttcctgagtctttccttctacatttcttataatygagttttatatttccctttttccagtcttaagaracttcacctgacagccataacgtcttaacacgaagggcaattcayctgcttctccttccctgcctatctcttttaaaaatcttgtagccctcaattgtatcattccaattatatgattcatcccatgacatttctgtggtagcaattaggtcatagttttctaatttcaytgtggcttcctattcctcctgcatatttcctatgctgtgtgcattggtgcagaggcacttcagctgggctagcagctgtgttaccttcctggaggagtccttctgaatttctctgggacaactctgaggctttcacctgctgyrttctaaagtggcagtgttccctggctcatc

SEQ ID NO: 47242 - DNA, 600 bp, Chicken  19866894291094_4
agacaaatacttcaaaatgaaagttctgccagaacacagggtaaagaatttctggcctgtatttcctgagtctttccttctacatttcttataatygagttttatatttccctttttccagtcttaagaracttcacctgacagccataacgtcttaacacgaagggcaattcayctgcttctccttccctgcctatctcttttaaaaatcttgtagccctcaattgtatcattccaattatatgattcatcccatgacatttctgtggtagcaattaggtcatagttttctaatttcaytgtggcttcctattcctcctgcatatttcctatgctgtgtgcattggtgcagaggcacttcagctgggctagcagctgtgttaccttcctggaggagtccttctgaatttctctgggacaactctgaggctttcacctgctgyrttctaaagtggcagtgttccctggctcatcacacaaaagtgcatccccttccccccatcaaatctagcttaaagctctggtgatgagctcagccaggttgctgtccagaacactcttgccccacctagtcagttgcattctattcagtgtcagcat

SEQ ID NO: 47243 - DNA, 600 bp, Chicken  19866894291094_5
gccataacgtcttaacacgaagggcaattcayctgcttctccttccctgcctatctcttttaaaaatcttgtagccctcaattgtatcattccaattatatgattcatcccatgacatttctgtggtagcaattaggtcatagttttctaatttcaytgtggcttcctattcctcctgcatatttcctatgctgtgtgcattggtgcagaggcacttcagctgggctagcagctgtgttaccttcctggaggagtccttctgaatttctctgggacaactctgaggctttcacctgctgyrttctaaagtggcagtgttccctggctcatcacacaaaagtgcatccccttccccccatcaaatctagcttaaagctctggtgatgagctcagccaggttgctgtccagaacactcttgccccacctagtcagttgcattctattcagtgtcagcatggctgttctctggcatgtttcatcgagggcagatcatacttcatcagtctggtggctttctatggtggtgtcatggcatcagtagaaaaaggaagaacatctaaagtcaccaagctaagattcttctaggtctttaatatcat

SEQ ID NO: 47244 - DNA, 600 bp, Chicken  19866894291094_6
ccataacgtcttaacacgaagggcaattcayctgcttctccttccctgcctatctcttttaaaaatcttgtagccctcaattgtatcattccaattatatgattcatcccatgacatttctgtggtagcaattaggtcatagttttctaatttcaytgtggcttcctattcctcctgcatatttcctatgctgtgtgcattggtgcagaggcacttcagctgggctagcagctgtgttaccttcctggaggagtccttctgaatttctctgggacaactctgaggctttcacctgctgyrttctaaagtggcagtgttccctggctcatcacacaaaagtgcatccccttccccccatcaaatctagcttaaagctctggtgatgagctcagccaggttgctgtccagaacactcttgccccacctagtcagttgcattctattcagtgtcagcatggctgttctctggcatgtttcatcgagggcagatcatacttcatcagtctggtggctttctatggtggtgtcatggcatcagtagaaaaaggaagaacatctaaagtcaccaagctaagattcttctaggtctttaatatcatt

SEQ ID NO: 47245 - DNA, 599 bp, Chicken  19866894291108_1
  misc_feature (1)..(100): n is any nucleotide
nnnnnnnnnnnnnnnnnnnnnnnnnnnnnnnnnnnnnnnnnnnnnnnnnnnnnnnnnnnnnnnnnnnnnnnnnnnnnnnnnnnnnnnnnnnnnnnnnnnnttgcaaaactgaattagggcagggaaacttttcaaaacatttcatagaaaatacaaaaagaaatgatagtcaaaaaatgcaaactttttagtctgaggagcagctcaatcctgtataaagaaacaaacagttaatattactacagtacttctaaatatcagccagtgtaattaaagatcttgcatcaaaatgcaggttcrctactggggatctttcagatatmtgtgcaattatcttaaagcaagattggtctctgagagtcaaaatggaaattctggggtcttctgcatgaaaaaagaccacctttgcctacaaaagcagctattrgtaggaggrgcttttgctttttgtttttattaatattattttcctgttcagattaacagatgaggtggttgagtgatctggccaagtgggtggctcacttagggttagcttccttctacagatttatttttttaagctacactgtttagcgtaaattaactactaagtcaag

SEQ ID NO: 47246 - DNA, 599 bp, Chicken  19866894291108_2
  misc_feature (1)..(77): n is any nucleotide
nnnnnnnnnnnnnnnnnnnnnnnnnnnnnnnnnnnnnnnnnnnnnnnnnnnnnnnnnnnnnnnnnnnnnnnnnnnnnttgcaaaactgaattagggcagggaaacttttcaaaacatttcatagaaaatacaaaaagaaatgatagtcaaaaaatgcaaactttttagtctgaggagcagctcaatcctgtataaagaaacaaacagttaatattactacagtacttctaaatatcagccagtgtaattaaagatcttgcatcaaaatgcaggttcrctactggggatctttcagatatmtgtgcaattatcttaaagcaagattggtctctgagagtcaaaatggaaattctggggtcttctgcatgaaaaaagaccacctttgcctacaaaagcagctattrgtaggaggrgcttttgctttttgtttttattaatattattttcctgttcagattaacagatgaggtggttgagtgatctggccaagtgggtggctcacttagggttagcttccttctacagatttatttttttaagctacactgtttagcgtaaattaactactaagtcaagttcataattttacacttcatcct

SEQ ID NO: 47247 - DNA, 600 bp, Chicken  19866894291108_3
cttttcaaaacatttcatagaaaatacaaaaagaaatgatagtcaaaaaatgcaaactttttagtctgaggagcagctcaatcctgtataaagaaacaaacagttaatattactacagtacttctaaatatcagccagtgtaattaaagatcttgcatcaaaatgcaggttcrctactggggatctttcagatatmtgtgcaattatcttaaagcaagattggtctctgagagtcaaaatggaaattctggggtcttctgcatgaaaaaagaccacctttgcctacaaaagcagctattrgtaggaggrgcttttgctttttgtttttattaatattattttcctgttcagattaacagatgaggtggttgagtgatctggccaagtgggtggctcacttagggttagcttccttctacagatttatttttttaagctacactgtttagcgtaaattaactactaagtcaagttcataattttacacttcatcctaaaagcactctggttataaaactacaaagctgttcatagtgtctggacgatggggatgaatagttgctattgtgcttttagacaaacaatcagtcattgcttagc

SEQ ID NO: 47248 - DNA, 600 bp, Chicken  19866894291108_4
acatttcatagaaaatacaaaaagaaatgatagtcaaaaaatgcaaactttttagtctgaggagcagctcaatcctgtataaagaaacaaacagttaatattactacagtacttctaaatatcagccagtgtaattaaagatcttgcatcaaaatgcaggttcrctactggggatctttcagatatmtgtgcaattatcttaaagcaagattggtctctgagagtcaaaatggaaattctggggtcttctgcatgaaaaaagaccacctttgcctacaaaagcagctattrgtaggaggrgcttttgctttttgtttttattaatattattttcctgttcagattaacagatgaggtggttgagtgatctggccaagtgggtggctcacttagggttagcttccttctacagatttatttttttaagctacactgtttagcgtaaattaactactaagtcaagttcataattttacacttcatcctaaaagcactctggttataaaactacaaagctgttcatagtgtctggacgatggggatgaatagttgctattgtgcttttagacaaacaatcagtcattgcttagcttcactttt

SEQ ID NO: 47249 - DNA, 600 bp, Chicken  19866894291116_1
gtcgtctgtaatcatgtgataagtccaattttactggtcatcatcagtaggagaaattagccttactggtgttattaaaattgaagataacaggtcatagagtaaaaagcaaaagtgaaaactagatctgtggaaataagaattgatagcatgtcccttctccttggtccccaggaaataacagcactcattataacacagttcatcacagacagtcctctggggcttctgtttattgaactgcagagtactaagatgaactcctgcactgcaaggttcaccaacatagaagcaatcatracattaaataygggtataagcaacacaagtgcacatcaggggagacaaaccacttaagttccttagtggtacacacaaatcaatgctttctggctatcatcccaagctaacctgcatgtgctggtgctgcggctctatacatcatctgtcaaaaaagatgatcagttctttcaaataaggagcaaagtgaatgtatttttgtcctttgctgcttccattggaaatacactttagcaaaaatatgcacacgacatatccatattagaacttctacttaatttttggtcctaaaaatgccaa

SEQ ID NO: 47250 - DNA, 600 bp, Chicken  19866894291116_2
tcatgtgataagtccaattttactggtcatcatcagtaggagaaattagccttactggtgttattaaaattgaagataacaggtcatagagtaaaaagcaaaagtgaaaactagatctgtggaaataagaattgatagcatgtcccttctccttggtccccaggaaataacagcactcattataacacagttcatcacagacagtcctctggggcttctgtttattgaactgcagagtactaagatgaactcctgcactgcaaggttcaccaacatagaagcaatcatracattaaataygggtataagcaacacaagtgcacatcaggggagacaaaccacttaagttccttagtggtacacacaaatcaatgctttctggctatcatcccaagctaacctgcatgtgctggtgctgcggctctatacatcatctgtcaaaaaagatgatcagttctttcaaataaggagcaaagtgaatgtatttttgtcctttgctgcttccattggaaatacactttagcaaaaatatgcacacgacatatccatattagaacttctacttaatttttggtcctaaaaatgccaacacaaattcaa

SEQ ID NO: 47251 - DNA, 600 bp, Chicken  19866894291127_1
agggagtagggcagataacagtatgatttcagtgcccactgactcttcagggcaggacttcacttgttacaagcaacaaaactggatgtgcaggggaggaggaggggaggaaggagcatagagtcatagcttgatcttgcccagagctgatttcaacagactccatgggagctaggactattccttacttaacagtgggagctcaggcaattgtgagattgaatcgtatagaagaccatggcttgccaaagggaaagtcaaataacatcaaagcaatcaaaggtgttcttcaggaattastgagtgaaatactctggctcaaacaggactgtaggctaggttaattacaattggcacatctagatctaacacctgtaaatatcacatatcatgtccatttccattttgttcttgcttccacaactttaccttaacatcctgatctggatgaagtaaaacaaggaacaaagaaaggaggaagatcatcatcaggtgatttttaggagggctgacgatagacagaggatgtgaatgtctttgagtyaggtgggtgaaaactaagtgctgcttttgctcaggcaataaatggggacagaagca

SEQ ID NO: 47252 - DNA, 600 bp, Chicken  19866894291127_2
gccaaagggaaagtcaaataacatcaaagcaatcaaaggtgttcttcaggaattastgagtgaaatactctggctcaaacaggactgtaggctaggttaattacaattggcacatctagatctaacacctgtaaatatcacatatcatgtccatttccattttgttcttgcttccacaactttaccttaacatcctgatctggatgaagtaaaacaaggaacaaagaaaggaggaagatcatcatcaggtgatttttaggagggctgacgatagacagaggatgtgaatgtctttgagtyaggtgggtgaaaactaagtgctgcttttgctcaggcaataaatggggacagaagcaagcagtaatgggatggtcccatgaagccagggtgtaaataacactggagatacctgtgcaaaagatctgcccagggaaattccttagcacagctcagagacygaagagaaccaccagtgggtctggttccagaycagcctctgcaacamcaacacactgacatcattgtaataaaacacttacctcactgatcgcacaayaactgagttcctcctgggtctcaccatcagattacacccaagca

SEQ ID NO: 47253 - DNA, 600 bp, Chicken  19866894291127_3
attttgttcttgcttccacaactttaccttaacatcctgatctggatgaagtaaaacaaggaacaaagaaaggaggaagatcatcatcaggtgatttttaggagggctgacgatagacagaggatgtgaatgtctttgagtyaggtgggtgaaaactaagtgctgcttttgctcaggcaataaatggggacagaagcaagcagtaatgggatggtcccatgaagccagggtgtaaataacactggagatacctgtgcaaaagatctgcccagggaaattccttagcacagctcagagacygaagagaaccaccagtgggtctggttccagaycagcctctgcaacamcaacacactgacatcattgtaataaaacacttacctcactgatcgcacaayaactgagttcctcctgggtctcaccatcagattacacccaagcaggaggcagttgagaaatcccacagcactacaagcattcattttccttgtaaggaagaaaggtgggcccatcacagaatcactaaggttggaaaaaaaamcactaasatcatctactctaacagttaacacaaccatgcccaatccttacaagacagca

SEQ ID NO: 47254 - DNA, 600 bp, Chicken  19866894291127_4
catcctgatctggatgaagtaaaacaaggaacaaagaaaggaggaagatcatcatcaggtgatttttaggagggctgacgatagacagaggatgtgaatgtctttgagtyaggtgggtgaaaactaagtgctgcttttgctcaggcaataaatggggacagaagcaagcagtaatgggatggtcccatgaagccagggtgtaaataacactggagatacctgtgcaaaagatctgcccagggaaattccttagcacagctcagagacygaagagaaccaccagtgggtctggttccagaycagcctctgcaacamcaacacactgacatcattgtaataaaacacttacctcactgatcgcacaayaactgagttcctcctgggtctcaccatcagattacacccaagcaggaggcagttgagaaatcccacagcactacaagcattcattttccttgtaaggaagaaaggtgggcccatcacagaatcactaaggttggaaaaaaaamcactaasatcatctactctaacagttaacacaaccatgcccaatccttacaagacagcaagattcagatcttgccttgaagcaccaacccc

SEQ ID NO: 47255 - DNA, 600 bp, Chicken  19866894291127_5
gaagtaaaacaaggaacaaagaaaggaggaagatcatcatcaggtgatttttaggagggctgacgatagacagaggatgtgaatgtctttgagtyaggtgggtgaaaactaagtgctgcttttgctcaggcaataaatggggacagaagcaagcagtaatgggatggtcccatgaagccagggtgtaaataacactggagatacctgtgcaaaagatctgcccagggaaattccttagcacagctcagagacygaagagaaccaccagtgggtctggttccagaycagcctctgcaacamcaacacactgacatcattgtaataaaacacttacctcactgatcgcacaayaactgagttcctcctgggtctcaccatcagattacacccaagcaggaggcagttgagaaatcccacagcactacaagcattcattttccttgtaaggaagaaaggtgggcccatcacagaatcactaaggttggaaaaaaaamcactaasatcatctactctaacagttaacacaaccatgcccaatccttacaagacagcaagattcagatcttgccttgaagcaccaacccctttcaagtcctatca

SEQ ID NO: 47256 - DNA, 581 bp, Chicken  19866894291127_6
taggagggctgacgatagacagaggatgtgaatgtctttgagtyaggtgggtgaaaactaagtgctgcttttgctcaggcaataaatggggacagaagcaagcagtaatgggatggtcccatgaagccagggtgtaaataacactggagatacctgtgcaaaagatctgcccagggaaattccttagcacagctcagagacygaagagaaccaccagtgggtctggttccagaycagcctctgcaacamcaacacactgacatcattgtaataaaacacttacctcactgatcgcacaayaactgagttcctcctgggtctcaccatcagattacacccaagcaggaggcagttgagaaatcccacagcactacaagcattcattttccttgtaaggaagaaaggtgggcccatcacagaatcactaaggttggaaaaaaaamcactaasatcatctactctaacagttaacacaaccatgcccaatccttacaagacagcaagattcagatcttgccttgaagcaccaacccctttcaagtcctatcagagctgaggaatctctgttcttgttccaggga

SEQ ID NO: 47257 - DNA, 438 bp, Chicken  19866894291127_7
ctggagatacctgtgcaaaagatctgcccagggaaattccttagcacagctcagagacygaagagaaccaccagtgggtctggttccagaycagcctctgcaacamcaacacactgacatcattgtaataaaacacttacctcactgatcgcacaayaactgagttcctcctgggtctcaccatcagattacacccaagcaggaggcagttgagaaatcccacagcactacaagcattcattttccttgtaaggaagaaaggtgggcccatcacagaatcactaaggttggaaaaaaaamcactaasatcatctactctaacagttaacacaaccatgcccaatccttacaagacagcaagattcagatcttgccttgaagcaccaacccctttcaagtcctatcagagctgaggaatctctgttcttgttccaggga

SEQ ID NO: 47258 - DNA, 431 bp, Chicken  19866894291127_8
tacctgtgcaaaagatctgcccagggaaattccttagcacagctcagagacygaagagaaccaccagtgggtctggttccagaycagcctctgcaacamcaacacactgacatcattgtaataaaacacttacctcactgatcgcacaayaactgagttcctcctgggtctcaccatcagattacacccaagcaggaggcagttgagaaatcccacagcactacaagcattcattttccttgtaaggaagaaaggtgggcccatcacagaatcactaaggttggaaaaaaaamcactaasatcatctactctaacagttaacacaaccatgcccaatccttacaagacagcaagattcagatcttgccttgaagcaccaacccctttcaagtcctatcagagctgaggaatctctgttcttgttccaggga

SEQ ID NO: 47259 - DNA, 600 bp, Chicken  19866894291130_1
gccccatggccataggcacatcctgcctggatattcttcagcataacctactctagggagcctgctttagcaggggagttggattcaatgatctccagaggtcctttccaacccttatgattgtgtgaaacatgctgtcgagttttagcagcatccagacgatggggctgagatgagggtcctgttgtctttggctttatactggcctgatggagaggtcctcctgcctcaaaacctctctgtgtgacaaaggagtgagtgggcagagcagaccacaggcaaggcatagtcacaggggcrggtacctgatagctccagtcctgctccaataccaccaaagtaaagcacacagaagcacagcacaartttgtgactggggactgattatccagagtgtgtstccagaaagaccatttctccagaagtaaaacaggttcagctgctgtcttcggcctttgctccatggcagctcgctccgtgccacaaaaagcaaggtcagccacaaaaggcacagtgcgactccagctttgatcatatttaggtagtttgacagaagaaggttccagtggcttatcacaagaggaaaaccaacatagaatc

SEQ ID NO: 47260 - DNA, 600 bp, Chicken  19866894291130_2
ttagcaggggagttggattcaatgatctccagaggtcctttccaacccttatgattgtgtgaaacatgctgtcgagttttagcagcatccagacgatggggctgagatgagggtcctgttgtctttggctttatactggcctgatggagaggtcctcctgcctcaaaacctctctgtgtgacaaaggagtgagtgggcagagcagaccacaggcaaggcatagtcacaggggcrggtacctgatagctccagtcctgctccaataccaccaaagtaaagcacacagaagcacagcacaartttgtgactggggactgattatccagagtgtgtstccagaaagaccatttctccagaagtaaaacaggttcagctgctgtcttcggcctttgctccatggcagctcgctccgtgccacaaaaagcaaggtcagccacaaaaggcacagtgcgactccagctttgatcatatttaggtagtttgacagaagaaggttccagtggcttatcacaagaggaaaaccaacatagaatcatttcaaaatatccatcaaggggtgatgtcacctattttgagcagataagtaacgttagtttgagt

SEQ ID NO: 47261 - DNA, 600 bp, Chicken  19866894291130_3
gtcctttccaacccttatgattgtgtgaaacatgctgtcgagttttagcagcatccagacgatggggctgagatgagggtcctgttgtctttggctttatactggcctgatggagaggtcctcctgcctcaaaacctctctgtgtgacaaaggagtgagtgggcagagcagaccacaggcaaggcatagtcacaggggcrggtacctgatagctccagtcctgctccaataccaccaaagtaaagcacacagaagcacagcacaartttgtgactggggactgattatccagagtgtgtstccagaaagaccatttctccagaagtaaaacaggttcagctgctgtcttcggcctttgctccatggcagctcgctccgtgccacaaaaagcaaggtcagccacaaaaggcacagtgcgactccagctttgatcatatttaggtagtttgacagaagaaggttccagtggcttatcacaagaggaaaaccaacatagaatcatttcaaaatatccatcaaggggtgatgtcacctattttgagcagataagtaacgttagtttgagtgaaagaaaagtagagagaaaaggtgtttcactcc

SEQ ID NO: 47262 - DNA, 600 bp, Chicken  19866894291131_1
tgccaatgtagacctgaaaatatttaattacaatgcaactatttataagttaaaattacagcaaaagtatttttaatgaactacagaacaaaagagctcatacatttagattacaaagagagaactctggccaaactgctcttgccaaatccagattgactgtagcaaggtgacacacgtcagcctgaatcttacaatagcaatgtaaagatgaatgaattgctaagttctcatattacagcacagactacatactttactgccaaagccccaggacacagttagcctaaagtgccccaraaggcacccactrtcagtctgaaattcacattagaagtatatctttgtttgaaaaagtagcaattccataaacaaagtacattcccaagtgtatttacaggagtaattctgcatggatacttagtccagtcaataatagcacttagcaaaaataatcccatatgtatatgcagaactgctttattatagtgctgacttgaaaccttctcaagctccttagagcgcaaggccagcagagacagttggctcaccaaatcttatttcttatgtgccctgaactatttgacacaaatattgcta

SEQ ID NO: 47263 - DNA, 600 bp, Chicken  19866894291131_2
ctgaaaatatttaattacaatgcaactatttataagttaaaattacagcaaaagtatttttaatgaactacagaacaaaagagctcatacatttagattacaaagagagaactctggccaaactgctcttgccaaatccagattgactgtagcaaggtgacacacgtcagcctgaatcttacaatagcaatgtaaagatgaatgaattgctaagttctcatattacagcacagactacatactttactgccaaagccccaggacacagttagcctaaagtgccccaraaggcacccactrtcagtctgaaattcacattagaagtatatctttgtttgaaaaagtagcaattccataaacaaagtacattcccaagtgtatttacaggagtaattctgcatggatacttagtccagtcaataatagcacttagcaaaaataatcccatatgtatatgcagaactgctttattatagtgctgacttgaaaccttctcaagctccttagagcgcaaggccagcagagacagttggctcaccaaatcttatttcttatgtgccctgaactatttgacacaaatattgctaagctgagcccaat

SEQ ID NO: 47264 - DNA, 600 bp, Chicken  19866894291135_1
ctaagtaattgactcttttggaagcagttccctcattgccacagtatcaattagtcaatgaaatatcacaaggtaaagtgagaaacagacgagataagtgtatactccacttggcacttcaagttaaaccctccttatactcagctgtttagctgctgctcaaaacttcatatcaccatattcaaatgagcaataattcttactttaggtggaattatggaacgtacagtgatgtgtaaaaaccaacaagagcattccaccaccagtaggtacaggcagggtgtgaagcagaagactgcygtgtgctgtgttaaaccgkcctctattgaagcaggtgcagtgattcaccccggaccacagaaaggacaagtgcttacttccacctgaacgctctcactgctgctcaaggatgctgatatcttgcaggtttgggggcaatacagtaaatactcagttcctttgagtggctgatgcagcattctggactaccactgccactgctgatgcaggggaaaaaaaagctagaagatgagggcaatggtaggctgagctcttgagaagaaaaccagtgaataagcagaaggtggagcctctggaccc

SEQ ID NO: 47265 - DNA, 600 bp, Chicken  19866894291135_2
ggaagcagttccctcattgccacagtatcaattagtcaatgaaatatcacaaggtaaagtgagaaacagacgagataagtgtatactccacttggcacttcaagttaaaccctccttatactcagctgtttagctgctgctcaaaacttcatatcaccatattcaaatgagcaataattcttactttaggtggaattatggaacgtacagtgatgtgtaaaaaccaacaagagcattccaccaccagtaggtacaggcagggtgtgaagcagaagactgcygtgtgctgtgttaaaccgkcctctattgaagcaggtgcagtgattcaccccggaccacagaaaggacaagtgcttacttccacctgaacgctctcactgctgctcaaggatgctgatatcttgcaggtttgggggcaatacagtaaatactcagttcctttgagtggctgatgcagcattctggactaccactgccactgctgatgcaggggaaaaaaaagctagaagatgagggcaatggtaggctgagctcttgagaagaaaaccagtgaataagcagaaggtggagcctctggacccaccagctatgtacaatgag

SEQ ID NO: 47266 - DNA, 600 bp, Chicken  19866894291135_3
catagacacgatgcatttggggttggctgtacttcctttcatgctctgttgtgaaagaacttactatactgggttgtgaaggtgtatgggaaggttcacagttaatgactagccaggcactgctgcttgcttttatattcatccctctcctgtcaaggaaagctcaatagcacatgctctgcatgagagtaatgtaatcaacaccatgttttgaaagattaaactgttcctttatcaggaagtatcagaaaaagtaatttggaaacctgaaaaatctcttgggcagtggagtgtgtgaastacgttttagaaagcccagaaagaaaatgatacgaaaacttcattattgtggactggcctgaattaccaatattctcatgacacaatctgacatgacatatgactgttaccaactgaaatctgattaacaacttcaagtacagtagctgtattcaaacaatgagtaagaattaaagatccaggcaaagtttcacaaagcaaataatttcctcttaattgaaaccgtacgggcatagttttggatgcagtgaatactcccaagtttttgtttcttttgaacatgagtggttttaagcctat

SEQ ID NO: 47267 - DNA, 599 bp, Chicken  19866894291147_1
  misc_feature (1)..(39): n is any nucleotide
nnnnnnnnnnnnnnnnnnnnnnnnnnnnnnnnnnnnnnnagctgggactgcactcttgtgtgggcatatataaatattgataacctaaacctacaactgaggaactgcatgctgtaacgcaccgagcccgactgcttcatgctggcacagacttttttgttgagattaaaacaaaccaagggtgtttttcatccaaaattactgcagctgcaaggccacgggtgggagtgcagatgtgcagcacaaagaaccaccaagcaggagcttctcgggacacattatgctctcaccacattcaayaaacatttacttctacccctccacactccgcatacgcctctgggtatcctcagacaggcaggtgccagccattagaggctcttgcttgagatcccagaggaaggctgaggtctctctgccagaggctcccagggcagcaccagcactgccagcacccccagcccggcctggtgccacagtgtcaccacaatggccgggctgggccctggggagcacagcagggagcgagtgcagggaaggacacagagtcctcacatctccacactctgacccagaggagaaaacattcccatggctgt

SEQ ID NO: 47268 - DNA, 433 bp, Chicken  19866894291147_2
ccctccacactccgcatacgcctctgggtatcctcagacaggcaggtgccagccattagaggctcttgcttgagatcccagaggaaggctgaggtctctctgccagaggctcccagggcagcaccagcactgccagcacccccagcccggcctggtgccacagtgtcaccacaatggccgggctgggccctggggagcacagcagggagcgagtgcagggaaggacacagagtcctcacatctccacactctgacccagaggagaaaacattcccatggctgttagtgagggacaggacrtccgcggcacgagccgcttcctggaggatatttgctcccacacgtcccgctgcaggcggcacaggcccaggccgcaggctgcccccggctcaagggaggtggcaccgcccatcccgggacccctcggcctcac

SEQ ID NO: 47269 - DNA, 599 bp, Chicken  19866894291164_1
  misc_feature (1)..(52): n is any nucleotide
nnnnnnnnnnnnnnnnnnnnnnnnnnnnnnnnnnnnnnnnnnnnnnnnnnnnttctattcaggactaaattcatttgatgcactgtcaaagtgcattcaaattattgaagtcttattcttgctgtagaatacagcattggggtgagaacgctgatctgacatttcatggataacttgaaaatattgagctaaggaactggagaagaaattactcatgattcctacttgtaggtgattgttttcatctcctactacgttttaaaatatcattttcctttgggttgttgtttttttttcttyctctaaccatttagtcaaaagcctcaatttattattctctatagtgrtcatttaaactggaggcactcaagttttcatagctgaagagttggtttaatatcaaactcatttatagaaaaccacaaaagccttgcatgcagcaggaatttggtcaatgcaaatattattatatttattagtgaattttaatgagatctcttgtgatctcttgatcagattgtcaaaagataactaatttctttctaagttgtacaatcactggaatatattacattctgcttgcgtaactgcccataacg

SEQ ID NO: 47270 - DNA, 599 bp, Chicken  19866894291164_2
  misc_feature (1)..(5): n is any nucleotide
nnnnnttctattcaggactaaattcatttgatgcactgtcaaagtgcattcaaattattgaagtcttattcttgctgtagaatacagcattggggtgagaacgctgatctgacatttcatggataacttgaaaatattgagctaaggaactggagaagaaattactcatgattcctacttgtaggtgattgttttcatctcctactacgttttaaaatatcattttcctttgggttgttgtttttttttcttyctctaaccatttagtcaaaagcctcaatttattattctctatagtgrtcatttaaactggaggcactcaagttttcatagctgaagagttggtttaatatcaaactcatttatagaaaaccacaaaagccttgcatgcagcaggaatttggtcaatgcaaatattattatatttattagtgaattttaatgagatctcttgtgatctcttgatcagattgtcaaaagataactaatttctttctaagttgtacaatcactggaatatattacattctgcttgcgtaactgcccataacgctgttggttctctgtcacaaagtctggattaaagagggaaggagcct

SEQ ID NO: 47271 - DNA, 600 bp, Chicken  19866894291174_1
acacactccagaaggctgtgctatcattcagagagacctagacatgctaggcggacaggaaccttatgagattcaacaagggccagtgtagagtcctacacctggggaggaataactccatgcatcagtacaggttatgggctgagctgctggaaaggagctctgcagagaaggacctgggtgccctgttggatatcaggttgaccatgtgtcagcagtgtgcccatgtgacaaagtctgtcatggagttacctagataaatctgtgcccgtgacaggggggcagtaggctcgtgggccygctggcttcccgaaaaaaaaaaaaaatagagcagcagcaacgatctaaggagaacttattttactaactatgatgtcggaaagcaagatgacatgatataatacaatctaattgcaagcaaggataataaatcaaatgaaataagagagagtgagagagttttcaaaaacaaaagccctacttgatgaaggtgcacagcttggaagcacacccactcctctccctggcagcaagcgaaagcgaaagactgtgcacaaccagatgacgtatcttctgtgatgtatcttccttctctgacgg

SEQ ID NO: 47272 - DNA, 600 bp, Chicken  19866894291178_1
atgcctgttacgtctcaggtgataaagcatttggtgacaggctacccaaaggcactaaagcacaatcctacaaatgtctgcttcttctcatatcccttcggattcactctgctcaagtgtttgattgcgtattattcacacagtttaattagaaacacaatgaggattctattaagagagctttagacaacacaaagcccctaacaataggctgaactttaagtatgtgtttaagcactttacccagttgggacccaagaaagctgctgaagcctgacagaaaacagatacgttaatgcrgtaaatgtattaatgtatgtataataccaatgtcctggcatcccactttcagacctaagtgtagcatacatacagcaataaccagctgtgtaaatgagtatcgatgcagccaattaaccatttttcttgtggagagcacatccgtatgtgcatttcagtctatatgctaaacactccgggcttgacagcttaggcctcagtgttactctgcataatggtggcaaagtggaggataaatgctttcctggcttttgcagtacagaatcaccaaccagctcagccccttatttccacagacag

SEQ ID NO: 47273 - DNA, 600 bp, Chicken  19866894291183_1
gaaattcacatcatcttcaaaagtcataaatgagcccttggctactgtgacatatttacttcaacatccaggggtgggactgatgaagcagacttccagcaatgaaggtatagttgcattttctgtctaaatagaatgccaggtctgattagcaagtagcactggtgaattaaaaagacctcatctacaataaaataaccagaatgtgatcactgaggcttatgatagcatggatagttcaggaacagcagggtactcaaggctctaggagtgcaaagaaaatacattcagaagtataamaactagacagatcagtgtggactttaaggaaatagggctctgctcaacagtggaagaggacagatagggcacaaactgggaaattagaagtcacaaagcctggtatcgcttcaacctgttcagttagcagaggagaaagactctcctactgactagaagggctgatgctgtcttatcctttgaagaagcatatgcttctattgagaaattatggttaccaatgattcagcatttgcaacatcatggtagaatgatcatgatcttcaggagataggaaagaagaggaaaggctgtgcccca

SEQ ID NO: 47274 - DNA, 567 bp, Chicken  19866894291208_1
acggaagcaactgggcatcttcctttgacaagtgaccctggcccactgccttctatgcaagacgctgcctcccaattgcatagaccttatgagatggggatacacagccttccggctatgggttaggtggccacacaaagcaacccccaggcccccgggagggaagaacacgacgcaggccactgagcgcattgagtcgccgtggtgcaaaccacccgacctccaataacccatggctcgagtgccgtgtatctgatttataccactcgcacacagccctggaaccttgtgggacgaagmgggggctcctggagggccgtagggacgggggtgaggcaggaggaggactcccgggctgctggcgaggtgggcgctttgaggccagcagcagagcggggtgagtcgcttttctgccagcattcctgggtctgtgtgagcagtgctataaatccacatcaggacagtctctcgtgtatgatttgccttgattaacgggtttcctgttcttttcctgtttgtccgtttgttttttctctcctgtttcctgtactattttgttcgtacgtt

SEQ ID NO: 47275 - DNA, 600 bp, Chicken  19866894291211_1
aaccttacctccatctgcgagatttctgacgttattttcactactttcttttccgtgctcctacaggtgttgggaaagagaaacatcagtcagaattcccatcagcttcacacgcacacctcagtgggagagagatcagggttctcctcctaacccccactgctggggaacccagcagcacctcaagtgaggctctgttctcaagaggacagcagccccaagccagcatccctgttacaggagcaggctgagagccctgacagtgatgctagagtctgaagtctgtgaagcttgcatgtraagtctgaggtgtgtaaggaaacaaatgaactggtgaagacacagccagcagttctcctcctagctcaatgactgcctacagcacccctgagttcctttagcaatgatgggaaaygagytggaagccccaaaarcacacacaagaaccaccctcagcacctcagcactcacacctattctccacataggcttggagagagaacgagctctgtttaaggcacgagaaacatccctgcaatttcagtggggygctgcaggagcacgtggggtgggtattacggcaagaggctgtagatctgc

SEQ ID NO: 47276 - DNA, 600 bp, Chicken  19866894291211_2
acacctcagtgggagagagatcagggttctcctcctaacccccactgctggggaacccagcagcacctcaagtgaggctctgttctcaagaggacagcagccccaagccagcatccctgttacaggagcaggctgagagccctgacagtgatgctagagtctgaagtctgtgaagcttgcatgtraagtctgaggtgtgtaaggaaacaaatgaactggtgaagacacagccagcagttctcctcctagctcaatgactgcctacagcacccctgagttcctttagcaatgatgggaaaygagytggaagccccaaaarcacacacaagaaccaccctcagcacctcagcactcacacctattctccacataggcttggagagagaacgagctctgtttaaggcacgagaaacatccctgcaatttcagtggggygctgcaggagcacgtggggtgggtattacggcaagaggctgtagatctgcatagccaggaacaatctcttgcacatcttaaagctcttaagggcaacattcagctcctgttagaagcccaaagtctcaactgcgtgccccgagaagctttattcctttatggccc

SEQ ID NO: 47277 - DNA, 600 bp, Chicken  19866894291211_3
ctcagtgggagagagatcagggttctcctcctaacccccactgctggggaacccagcagcacctcaagtgaggctctgttctcaagaggacagcagccccaagccagcatccctgttacaggagcaggctgagagccctgacagtgatgctagagtctgaagtctgtgaagcttgcatgtraagtctgaggtgtgtaaggaaacaaatgaactggtgaagacacagccagcagttctcctcctagctcaatgactgcctacagcacccctgagttcctttagcaatgatgggaaaygagytggaagccccaaaarcacacacaagaaccaccctcagcacctcagcactcacacctattctccacataggcttggagagagaacgagctctgtttaaggcacgagaaacatccctgcaatttcagtggggygctgcaggagcacgtggggtgggtattacggcaagaggctgtagatctgcatagccaggaacaatctcttgcacatcttaaagctcttaagggcaacattcagctcctgttagaagcccaaagtctcaactgcgtgccccgagaagctttattcctttatggccctgaa

SEQ ID NO: 47278 - DNA, 600 bp, Chicken  19866894291211_4
atcagggttctcctcctaacccccactgctggggaacccagcagcacctcaagtgaggctctgttctcaagaggacagcagccccaagccagcatccctgttacaggagcaggctgagagccctgacagtgatgctagagtctgaagtctgtgaagcttgcatgtraagtctgaggtgtgtaaggaaacaaatgaactggtgaagacacagccagcagttctcctcctagctcaatgactgcctacagcacccctgagttcctttagcaatgatgggaaaygagytggaagccccaaaarcacacacaagaaccaccctcagcacctcagcactcacacctattctccacataggcttggagagagaacgagctctgtttaaggcacgagaaacatccctgcaatttcagtggggygctgcaggagcacgtggggtgggtattacggcaagaggctgtagatctgcatagccaggaacaatctcttgcacatcttaaagctcttaagggcaacattcagctcctgttagaagcccaaagtctcaactgcgtgccccgagaagctttattcctttatggccctgaaatacaaaggatcatt

SEQ ID NO: 47279 - DNA, 600 bp, Chicken  19866894291211_5
agagccctgacagtgatgctagagtctgaagtctgtgaagcttgcatgtraagtctgaggtgtgtaaggaaacaaatgaactggtgaagacacagccagcagttctcctcctagctcaatgactgcctacagcacccctgagttcctttagcaatgatgggaaaygagytggaagccccaaaarcacacacaagaaccaccctcagcacctcagcactcacacctattctccacataggcttggagagagaacgagctctgtttaaggcacgagaaacatccctgcaatttcagtggggygctgcaggagcacgtggggtgggtattacggcaagaggctgtagatctgcatagccaggaacaatctcttgcacatcttaaagctcttaagggcaacattcagctcctgttagaagcccaaagtctcaactgcgtgccccgagaagctttattcctttatggccctgaaatacaaaggatcattctgttctagttcatgggacagccccaggcagctctccccaggtcagcaccagcgtccygggctcaggctccatttcaaacacacacttcctgaacaatgtgcagctgacaacagca

SEQ ID NO: 47280 - DNA, 475 bp, Chicken  19866894291211_6
ggagagagaacgagctctgtttaaggcacgagaaacatccctgcaatttcagtggggygctgcaggagcacgtggggtgggtattacggcaagaggctgtagatctgcatagccaggaacaatctcttgcacatcttaaagctcttaagggcaacattcagctcctgttagaagcccaaagtctcaactgcgtgccccgagaagctttattcctttatggccctgaaatacaaaggatcattctgttctagttcatgggacagccccaggcagctctccccaggtcagcaccagcgtccygggctcaggctccatttcaaacacacacttcctgaacaatgtgcagctgacaacagcaggaccagtaaaaagaccgaacaaaaatataatggagtgggcgtgctctaaagtttatgctcagaaaacagagctcaggctcgaggggggaaaacaaaggaggaagagacaaagttcg

SEQ ID NO: 47281 - DNA, 600 bp, Chicken  19866894291222_1
aagttctcaaagaaaaactagacaaaaattattgctaaactaagtattgtatttatgtacagaaagaaatactgccatcatatgcattgttattaagtagtcatttctaaggtgatctttcagctggtgataacgtctcttttctagtgttaatgctttagcttgtgagcagaaagatgaaataatgacacagatccaatcaattagacgactgatgaaagaaagtggattggataaatcagaaaaccagatgacaggtatgtccaattttcagtggtatacttatccaattagtttacrttttaaaacagtcaacatctttctgtgataatgttcagctcctgcatcttaggtgagatgagtgtagaattaattctattctgcagttgtactattcttcctgtttgggtggaatctagtatcacwttttttttcatacactgatttatttttttttttaaagaaaaaatgctagaatgcattgaactgccatgttatgctttcaagaagcaagcttcttgaatgagagtccttgagcaacctattagtatcgatctaactttagtctgaggatgcccacrtggggggaccttggaggtt

SEQ ID NO: 47282 - DNA, 600 bp, Chicken  19866894291222_2
gtgataacgtctcttttctagtgttaatgctttagcttgtgagcagaaagatgaaataatgacacagatccaatcaattagacgactgatgaaagaaagtggattggataaatcagaaaaccagatgacaggtatgtccaattttcagtggtatacttatccaattagtttacrttttaaaacagtcaacatctttctgtgataatgttcagctcctgcatcttaggtgagatgagtgtagaattaattctattctgcagttgtactattcttcctgtttgggtggaatctagtatcacwttttttttcatacactgatttatttttttttttaaagaaaaaatgctagaatgcattgaactgccatgttatgctttcaagaagcaagcttcttgaatgagagtccttgagcaacctattagtatcgatctaactttagtctgaggatgcccacrtggggggaccttggaggttatgggcaatacttgcacagttatgctgaacagcaacttgtgtgttagtttcytttggaatcttccaaaaggtgaatagtagtccaagagaaattttaaatgttaggaacagttcattagaattttg

SEQ ID NO: 47283 - DNA, 600 bp, Chicken  19866894291222_3
cttatccaattagtttacrttttaaaacagtcaacatctttctgtgataatgttcagctcctgcatcttaggtgagatgagtgtagaattaattctattctgcagttgtactattcttcctgtttgggtggaatctagtatcacwttttttttcatacactgatttatttttttttttaaagaaaaaatgctagaatgcattgaactgccatgttatgctttcaagaagcaagcttcttgaatgagagtccttgagcaacctattagtatcgatctaactttagtctgaggatgcccacrtggggggaccttggaggttatgggcaatacttgcacagttatgctgaacagcaacttgtgtgttagtttcytttggaatcttccaaaaggtgaatagtagtccaagagaaattttaaatgttaggaacagttcattagaattttggcagtttctccattagttgaattttattaaaagagaggaaatagaaataaatattttacttctgaactgcctctacacttggaacctgtccagtaatttaacttttttttttttggtaaattgtaagatgtcagccacatttgtaatgagaaact

SEQ ID NO: 47284 - DNA, 598 bp, Chicken  19866894291222_4
gtgagatgagtgtagaattaattctattctgcagttgtactattcttcctgtttgggtggaatctagtatcacwttttttttcatacactgatttatttttttttttaaagaaaaaatgctagaatgcattgaactgccatgttatgctttcaagaagcaagcttcttgaatgagagtccttgagcaacctattagtatcgatctaactttagtctgaggatgcccacrtggggggaccttggaggttatgggcaatacttgcacagttatgctgaacagcaacttgtgtgttagtttcytttggaatcttccaaaaggtgaatagtagtccaagagaaattttaaatgttaggaacagttcattagaattttggcagtttctccattagttgaattttattaaaagagaggaaatagaaataaatattttacttctgaactgcctctacacttggaacctgtccagtaatttaacttttttttttttggtaaattgtaagatgtcagccacatttgtaatgagaaacttgaagatctccttcaatcatttgctgaacattctcaagagaaagaaatgaatgacagagaagatgacag

SEQ ID NO: 47285 - DNA, 600 bp, Chicken  19866894291247_1
gtagcagtaccaagtatggggaagggaagggatgctctctcttactgggaaaatgcttttcccgtttgcttctgcgttcatgttactatattaatagctgctgctagagatgatgtctcctcttggtactggagagtaggtgtgtgaggaggaggagaggctgagctgctttctgcatcatactccaaaagcagagcctgagcttgtccatagcagcattacagatttaacctccctttgtgcttttttttttaaatttcaactttaaagctactggcaccttgtacatttttgcctggycccttaatgtgcatggatctacgtgctgaccttcaaggtaacgtctctgcagacagagaaggtgcaggtcaagcccccaccagcgttcaacctggccagccaagggcagctgcagcagagacttcagagcggtggtggtgtccttrggrgctttctgaaggactcctgtctccactgcaggatctgatgggctctcagcactggagaaggaggctgctgagatgagtgggcagcagtgacccagctgcatgacatcccagctctgctatccccctcccgtatcccatgggaaaagtggct

SEQ ID NO: 47286 - DNA, 600 bp, Chicken  19866894291247_2
aggaggaggagaggctgagctgctttctgcatcatactccaaaagcagagcctgagcttgtccatagcagcattacagatttaacctccctttgtgcttttttttttaaatttcaactttaaagctactggcaccttgtacatttttgcctggycccttaatgtgcatggatctacgtgctgaccttcaaggtaacgtctctgcagacagagaaggtgcaggtcaagcccccaccagcgttcaacctggccagccaagggcagctgcagcagagacttcagagcggtggtggtgtccttrggrgctttctgaaggactcctgtctccactgcaggatctgatgggctctcagcactggagaaggaggctgctgagatgagtgggcagcagtgacccagctgcatgacatcccagctctgctatccccctcccgtatcccatgggaaaagtggctccccagacacagggtggcagagccaatcccaccatgaggaataagccccagrtgtcctgagcagaggcactaggagaaggtttcctctttctgagcctgcagggatttaagtgggtcatcaacgaggttgcagcacaaccaagtca

SEQ ID NO: 47287 - DNA, 600 bp, Chicken  19866894291247_3
aggaggagaggctgagctgctttctgcatcatactccaaaagcagagcctgagcttgtccatagcagcattacagatttaacctccctttgtgcttttttttttaaatttcaactttaaagctactggcaccttgtacatttttgcctggycccttaatgtgcatggatctacgtgctgaccttcaaggtaacgtctctgcagacagagaaggtgcaggtcaagcccccaccagcgttcaacctggccagccaagggcagctgcagcagagacttcagagcggtggtggtgtccttrggrgctttctgaaggactcctgtctccactgcaggatctgatgggctctcagcactggagaaggaggctgctgagatgagtgggcagcagtgacccagctgcatgacatcccagctctgctatccccctcccgtatcccatgggaaaagtggctccccagacacagggtggcagagccaatcccaccatgaggaataagccccagrtgtcctgagcagaggcactaggagaaggtttcctctttctgagcctgcagggatttaagtgggtcatcaacgaggttgcagcacaaccaagtcatga

SEQ ID NO: 47288 - DNA, 600 bp, Chicken  19866894291247_4
acagagaaggtgcaggtcaagcccccaccagcgttcaacctggccagccaagggcagctgcagcagagacttcagagcggtggtggtgtccttrggrgctttctgaaggactcctgtctccactgcaggatctgatgggctctcagcactggagaaggaggctgctgagatgagtgggcagcagtgacccagctgcatgacatcccagctctgctatccccctcccgtatcccatgggaaaagtggctccccagacacagggtggcagagccaatcccaccatgaggaataagccccagrtgtcctgagcagaggcactaggagaaggtttcctctttctgagcctgcagggatttaagtgggtcatcaacgaggttgcagcacaaccaagtcatgatcttgctgtagctctatagcacaaaactgccctgtaaccggaggagagagaaagcatctcatcctaccaaagggcagttgtgtggaggcaccaggttggtagcatgggctgctgcggtagaaatgctggtttctgagacgtggctgtgctggaccatcgctgatcctagaagaacacatctcatgctcttctcttggctgaat

SEQ ID NO: 47289 - DNA, 528 bp, Chicken  19866894291266_1
gtggagccaattactatagcggggccattatatggttcatttccccataccagcttggcaagaggtgtacatgggtgtaggaagtgcgaaagagccttcgctaataaagcgcctcaaacacacatacacacattgcaatatctgatgttacagcaaacacttcttcactgagaccgtgccgtgcacacaggaaatactgcagggcagtttgtcatttcaacactatttttcacggttcactttctggcccaacagtaaaataaatgaataaataaataaataaccaaaccaaccttatawaaaaaaaagaaatcttaaataattactccaatacttaatctgcagagcatatttctaccaatacccaaatacatgggtttgaagagtgagagaaatatcagaattgcatgctcttccagaaggacggtatgtttataatagcagaagcactgatattacttattgatcatgtctggtatcatcccattcctaaaggggaaagttgctgttgaaataattattataaaa

SEQ ID NO: 47290 - DNA, 521 bp, Chicken  19866894291269_1
gccactgtccttcaagtagccgcatagtttgcaatctgcattgaccagcatgcagcttggctgtttcagggattcctaggtttggcaagcatgttttatgggcttgctgctgcagctgttattgctaacagatttcccaccactgcattcaagcagggttatttcatacctctcttcgcaacttggcgtgatgtttcctcttgtaagaattgttttactttgagacacttccaggctgtacatcagagagcagggttatatttaactcttcttgttagaatgctggcagtgggaacctgraaaggtgagagagggaaaaaagctttctggcccaacggtccaggctggaaggtcagctctgctactgctgtcacgaacagtcatctacaaccacaagctgactttggcagataagaaaccaaaccatggctctcttcataacctaggtcttcatatcacccactgatgccaatgaaccatgtgcaggtgtgaggagctcactgagaaatggctgtgccttg

SEQ ID NO: 47291 - DNA, 600 bp, Chicken  19866894291277_1
cacgtgcctatactccaaaccacttcatgaagaagtgcattcatctttctgagatgtaaatatgactcaaagtttcaaatcaacctgagaaagttgtctctgggtctgagtaacgttgctgttgctattttctgtccatcacctttcctaagcctctatgctggcattaaaatttagttttcatctctcttgtgtgtgcatctcactgtccagccaagtctttgcactctttttcctttttacaatgttgcttgttcaaaggattgttcaatgtttcttctgtcccagtactgaaattcrtttgtagtatttattgcacaaaattccctggaactgtgaacactttttttttttttctttctttctttttwaaaaaaaaaaaaaattcaattcatggtatacagcctttcagtaaaaccatgtacaatctatgagcaattaaattcttatgtgatacctagcaaacacctggtgtctatattacacagaagttgtaagctttcttcctcctcttgtttcaccctcacccccacagctcctccactcctctgtttacaaaacaaatataatcaagaacaagggaacaagaagaaatgcaaa

SEQ ID NO: 47292 - DNA, 600 bp, Chicken  19866894291277_2
gtttcaaatcaacctgagaaagttgtctctgggtctgagtaacgttgctgttgctattttctgtccatcacctttcctaagcctctatgctggcattaaaatttagttttcatctctcttgtgtgtgcatctcactgtccagccaagtctttgcactctttttcctttttacaatgttgcttgttcaaaggattgttcaatgtttcttctgtcccagtactgaaattcrtttgtagtatttattgcacaaaattccctggaactgtgaacactttttttttttttctttctttctttttwaaaaaaaaaaaaaattcaattcatggtatacagcctttcagtaaaaccatgtacaatctatgagcaattaaattcttatgtgatacctagcaaacacctggtgtctatattacacagaagttgtaagctttcttcctcctcttgtttcaccctcacccccacagctcctccactcctctgtttacaaaacaaatataatcaagaacaagggaacaagaagaaatgcaaatgttaggcgatcaactacagcaatttttgttttcacagggctgtggctgcagagcctgctcttgctgtctt

SEQ ID NO: 47293 - DNA, 599 bp, Chicken  19866894291280_1
  misc_feature (1)..(181): n is any nucleotide
nnnnnnnnnnnnnnnnnnnnnnnnnnnnnnnnnnnnnnnnnnnnnnnnnnnnnnnnnnnnnnnnnnnnnnnnnnnnnnnnnnnnnnnnnnnnnnnnnnnnnnnnnnnnnnnnnnnnnnnnnnnnnnnnnnnnnnnnnnnnnnnnnnnnnnnnnnnnnnnnnnnnnnnnnnnnnnnnnnnnncccaaacagccaaatcctttctccgctgcagtcctgctccaaggatgctctctgctggataccccagggcaaagcattcattcatatggtcactatgcctgagaggtggcttcaaaagywaatctgcctctccaagcagtggaaaaattatagggagcctacctgggggataggggaaagtggagttaatggggttttcaccctataggggacaccgggcagagctgactcctcttctgtgcaacggggcagagcctccagcatgtcgctgtgatttaaaggaacccataaatctgaatgaatgggttwgtgactgaaggttagcaagaggctaggactccggcagccgcccgctgctgctacaacagcttttccccttgaggaactcaaaaagaatcagcatttttctccctaatag

SEQ ID NO: 47294 - DNA, 599 bp, Chicken  19866894291280_2
  misc_feature (1)..(180): n is any nucleotide
nnnnnnnnnnnnnnnnnnnnnnnnnnnnnnnnnnnnnnnnnnnnnnnnnnnnnnnnnnnnnnnnnnnnnnnnnnnnnnnnnnnnnnnnnnnnnnnnnnnnnnnnnnnnnnnnnnnnnnnnnnnnnnnnnnnnnnnnnnnnnnnnnnnnnnnnnnnnnnnnnnnnnnnnnnnnnnnnnnnncccaaacagccaaatcctttctccgctgcagtcctgctccaaggatgctctctgctggataccccagggcaaagcattcattcatatggtcactatgcctgagaggtggcttcaaaagywaatctgcctctccaagcagtggaaaaattatagggagcctacctgggggataggggaaagtggagttaatggggttttcaccctataggggacaccgggcagagctgactcctcttctgtgcaacggggcagagcctccagcatgtcgctgtgatttaaaggaacccataaatctgaatgaatgggttwgtgactgaaggttagcaagaggctaggactccggcagccgcccgctgctgctacaacagcttttccccttgaggaactcaaaaagaatcagcatttttctccctaataga

SEQ ID NO: 47295 - DNA, 600 bp, Chicken  19866894291280_3
ccaaatcctttctccgctgcagtcctgctccaaggatgctctctgctggataccccagggcaaagcattcattcatatggtcactatgcctgagaggtggcttcaaaagywaatctgcctctccaagcagtggaaaaattatagggagcctacctgggggataggggaaagtggagttaatggggttttcaccctataggggacaccgggcagagctgactcctcttctgtgcaacggggcagagcctccagcatgtcgctgtgatttaaaggaacccataaatctgaatgaatgggttwgtgactgaaggttagcaagaggctaggactccggcagccgcccgctgctgctacaacagcttttccccttgaggaactcaaaaagaatcagcatttttctccctaatagagcttcaaaactctgttgtgagcaatttggaaattcacgttgagtttcgggttcattagctgctggctccaaagcgtgtacatagtcaaagctgtctaatatggacgcaccgcaccagtgccttgaattaatgttattgttatttgtgtggacgtagtggggtgcaaacaaggttaattgaaatgagagtg

SEQ ID NO: 47296 - DNA, 600 bp, Chicken  19866894291281_1
catctgtggaagtgagatttaagtcatctgtgtacaaccacaacgaagcaccttcctccagacaccactacaaatgcaacctgaagctggtgttaccattgcctaatgctgttagcccgacgtttgctgcatttcagtctctctgccagtgcacttaatttcattgacgctgaaaccttgttcacattggaaggtgagagggaggaggggagagttgctaggctggcaatactcaccagaacttagttgtgtgatgttcagagaatctgtaattctgcctggtggcaactgcccggctgkgttcagtgcttgacataacgcagcatggcaaggatcattattacaacctcagatctcaagctctagtcctcctgcatcaacttgctgcctgtgtccatagctctactttaacatccctcatacctgggaaccagggcaatcactcactggttttaagggatatagctgatttcttccatccttccttttgttgtttgtttgtgctgctttratgtcctaatgaaccatytccatgttaaccccagatctgcatggtgataaytacagatatcaacttctggctgactgaaaatttagtta

SEQ ID NO: 47297 - DNA, 600 bp, Chicken  19866894291281_2
gagttgctaggctggcaatactcaccagaacttagttgtgtgatgttcagagaatctgtaattctgcctggtggcaactgcccggctgkgttcagtgcttgacataacgcagcatggcaaggatcattattacaacctcagatctcaagctctagtcctcctgcatcaacttgctgcctgtgtccatagctctactttaacatccctcatacctgggaaccagggcaatcactcactggttttaagggatatagctgatttcttccatccttccttttgttgtttgtttgtgctgctttratgtcctaatgaaccatytccatgttaaccccagatctgcatggtgataaytacagatatcaacttctggctgactgaaaatttagttatggytgcacacaagtttgccaaagaaagagggcattttgactgcagcatgccttgaaaaccaattttactgtcaagcccatggtaccaaagtccagccactaaggcagatttcatgggaacaaaaatgaacctcccagccgttaaactgggaatttataaaagtgactctaaaaatctagcaaattacgttgatctaattttctttgatga

SEQ ID NO: 47298 - DNA, 600 bp, Chicken  19866894291281_3
tactcaccagaacttagttgtgtgatgttcagagaatctgtaattctgcctggtggcaactgcccggctgkgttcagtgcttgacataacgcagcatggcaaggatcattattacaacctcagatctcaagctctagtcctcctgcatcaacttgctgcctgtgtccatagctctactttaacatccctcatacctgggaaccagggcaatcactcactggttttaagggatatagctgatttcttccatccttccttttgttgtttgtttgtgctgctttratgtcctaatgaaccatytccatgttaaccccagatctgcatggtgataaytacagatatcaacttctggctgactgaaaatttagttatggytgcacacaagtttgccaaagaaagagggcattttgactgcagcatgccttgaaaaccaattttactgtcaagcccatggtaccaaagtccagccactaaggcagatttcatgggaacaaaaatgaacctcccagccgttaaactgggaatttataaaagtgactctaaaaatctagcaaattacgttgatctaattttctttgatgaaactgaatgccagaatca

SEQ ID NO: 47299 - DNA, 600 bp, Chicken  19866894291281_4
gaatctgtaattctgcctggtggcaactgcccggctgkgttcagtgcttgacataacgcagcatggcaaggatcattattacaacctcagatctcaagctctagtcctcctgcatcaacttgctgcctgtgtccatagctctactttaacatccctcatacctgggaaccagggcaatcactcactggttttaagggatatagctgatttcttccatccttccttttgttgtttgtttgtgctgctttratgtcctaatgaaccatytccatgttaaccccagatctgcatggtgataaytacagatatcaacttctggctgactgaaaatttagttatggytgcacacaagtttgccaaagaaagagggcattttgactgcagcatgccttgaaaaccaattttactgtcaagcccatggtaccaaagtccagccactaaggcagatttcatgggaacaaaaatgaacctcccagccgttaaactgggaatttataaaagtgactctaaaaatctagcaaattacgttgatctaattttctttgatgaaactgaatgccagaatcatgtccttgtcatagaaatcaaagaagtcttcat

SEQ ID NO: 47300 - DNA, 600 bp, Chicken  19866894291281_5
agtgcttgacataacgcagcatggcaaggatcattattacaacctcagatctcaagctctagtcctcctgcatcaacttgctgcctgtgtccatagctctactttaacatccctcatacctgggaaccagggcaatcactcactggttttaagggatatagctgatttcttccatccttccttttgttgtttgtttgtgctgctttratgtcctaatgaaccatytccatgttaaccccagatctgcatggtgataaytacagatatcaacttctggctgactgaaaatttagttatggytgcacacaagtttgccaaagaaagagggcattttgactgcagcatgccttgaaaaccaattttactgtcaagcccatggtaccaaagtccagccactaaggcagatttcatgggaacaaaaatgaacctcccagccgttaaactgggaatttataaaagtgactctaaaaatctagcaaattacgttgatctaattttctttgatgaaactgaatgccagaatcatgtccttgtcatagaaatcaaagaagtcttcatctttgctttaggaactgttctatacaatctcttccacagcgg

SEQ ID NO: 47301 - DNA, 600 bp, Chicken  19866894291283_1
tcccaacaagccaaacccaccgacgttgtactctttttgtgttgcagtggagtttggatgttttccgtgtgatccaaaaattaccgggcattgcttcaactggaattacagatctattgtttgtgatgaatgctcccccactgcactgcacctgctgcccctgacctaaggttaccacgtaaagtctgtgcttctattaccagcctatgagcattgcagtaaacgcatttcagagccacgttcagctaacagagctaaacatagctgccactcaaacgtgcaggacgttgctaactgcayttattacataaccgtgaatttgtttgcagctgcgtcccagcctgacaaaacagatgctggaagatataaaaggattgaattgtctacactgcgtgcccaaacttttggctaaatattttatgtagatcatctggcacacattaattttgctttattattactggtgtggaaaagaaacaagaaaccttttttttttccttctgatttcagcttggaacaaaatgtgaatactgacagtagcgtggtaagcttaatatttatcactaagtgagactgaaacaattacaggagagctgcctg

SEQ ID NO: 47302 - DNA, 600 bp, Chicken  19866894291287_1
gaattactaggagaaattgtccaccaatgaaaaaatccattaggtctatgacaaaggtcagataacattgtttgggttcagccgtaattctttcctatatgaggttcacattaagattttgtgtaatggggaagagaaaaagcacaggtgtgggtattcctcagacaactcagctgttgaatatctttatcagcttctgaccatggaagaaccaagcagactgatatgttctaagagattataacatccccttttaattaagaggagacaaaaaaaatagcctgctaaaactgatgtcartacctctacatatgggcataagtaacaagtgtttaacagcaaaacacataggattgcccttccagacaggttgatatccacaggtgacctgaacaaagacaagacctgagcagtggcaaagacagccctgggagacgctcacctgctgctacatctcccttacggcacaggaggggtttggagttgataaacacacatcaccctcagtgcttatctacctgcacagaagagtacatccctaaatacaaacacaagctgacctaaaagctccgctacaaaacagcactgtttcaaaaggta

SEQ ID NO: 47303 - DNA, 600 bp, Chicken  19866894291297_1
gcagtggaggtgagggtatctcttgctggagatccctgtttgcctgaggccttccattggtaagtaggttctttcgtttgtttctgtgtccacagctgctgcatttgggcttgtccatacttgctgcagcctaggacattgctaacctcctattattgctgtgcttttcattgctttatagcattacatgggtataactcaaaatgtcagtaggactcgacctggcagctcctgtggtagagtggcagggctgtgatgagcacaagtgccaagttgcttcttacagcagtgcaagttgcyggstgggactgcatgctttcagtattggattttgtgggcccaagcacaagattcrgtttcaacatcttcctttagtgcatgccccttgctcaccttggctagtgaggtaatactttttgcatggtgttacagggagaggaggccccaccaggctttggagcaagatgttgaggacttgagatgtacgattaggataagtaggtggtggttcagcagcatcttctcaaacaggagatcgctttctgcaatgcttttcagagcaggagaggttgtctttatgttgaggtcacttgcatgctt

SEQ ID NO: 47304 - DNA, 600 bp, Chicken  19866894291297_2
gtggaggtgagggtatctcttgctggagatccctgtttgcctgaggccttccattggtaagtaggttctttcgtttgtttctgtgtccacagctgctgcatttgggcttgtccatacttgctgcagcctaggacattgctaacctcctattattgctgtgcttttcattgctttatagcattacatgggtataactcaaaatgtcagtaggactcgacctggcagctcctgtggtagagtggcagggctgtgatgagcacaagtgccaagttgcttcttacagcagtgcaagttgcyggstgggactgcatgctttcagtattggattttgtgggcccaagcacaagattcrgtttcaacatcttcctttagtgcatgccccttgctcaccttggctagtgaggtaatactttttgcatggtgttacagggagaggaggccccaccaggctttggagcaagatgttgaggacttgagatgtacgattaggataagtaggtggtggttcagcagcatcttctcaaacaggagatcgctttctgcaatgcttttcagagcaggagaggttgtctttatgttgaggtcacttgcatgcttctt

SEQ ID NO: 47305 - DNA, 600 bp, Chicken  19866894291297_3
attggtaagtaggttctttcgtttgtttctgtgtccacagctgctgcatttgggcttgtccatacttgctgcagcctaggacattgctaacctcctattattgctgtgcttttcattgctttatagcattacatgggtataactcaaaatgtcagtaggactcgacctggcagctcctgtggtagagtggcagggctgtgatgagcacaagtgccaagttgcttcttacagcagtgcaagttgcyggstgggactgcatgctttcagtattggattttgtgggcccaagcacaagattcrgtttcaacatcttcctttagtgcatgccccttgctcaccttggctagtgaggtaatactttttgcatggtgttacagggagaggaggccccaccaggctttggagcaagatgttgaggacttgagatgtacgattaggataagtaggtggtggttcagcagcatcttctcaaacaggagatcgctttctgcaatgcttttcagagcaggagaggttgtctttatgttgaggtcacttgcatgcttctttgctcctcatgcactgtctacctgtgctgcaaaagcagagggggtatgctgc

SEQ ID NO: 47306 - DNA, 599 bp, Chicken  19866894291306_1
  misc_feature (1)..(114): n is any nucleotide
nnnnnnnnnnnnnnnnnnnnnnnnnnnnnnnnnnnnnnnnnnnnnnnnnnnnnnnnnnnnnnnnnnnnnnnnnnnnnnnnnnnnnnnnnnnnnnnnnnnnnnnnnnnnnnnnnnacctgagcggtattgaagctctagagatttgtgaatgataaataaaagattattgtctgtttcagcagcatgtgtccttactactcactgtcatgctgagcagctgaaaatgagatggtggggacgtgatgtagtattgctatgagaaaaaagaagacaaatttgaagtcaaatacaagacctgcrggagcagatctttttttctactctggcactaaatatgctacttttatgactccattgaaaatgaaggcataattaaacaaaccatagaaaaaggtgattttggtagcataagcaaggatgaagagttccattacagactcatactaaaaatgtgtaaggcgcacaagacatctgctatctggaaccaccattcagactgttttcagtaatcagatttctgctggtttaagcacgagttaggcaccaatcctgataactgtgtgcaagagagaaaacgtttcaaatgtcaaagcaaatgc

SEQ ID NO: 47307 - DNA, 600 bp, Chicken  19866894291311_1
cttagtgtccctcagcaatcacctcctttcatttcccaagtcccagttgaccaagatttttcagtcacctcttgaagagaggatttttcttcctgttataatctgattagtaagctcttctccccagtttgtgaatttatctcgtgaacatcagtgttcaagtttgcacaatgtaatctggttgtggcctcacgaggaacagttatcatcactatcctaaccttcactagaggaatttacctgatgaataggaaaaattgcttttcacctggctatactgtattgatggcttacagcaaraacactgacttctgtcctcattcatttccagctgatgagatcacatattctagcagagattcttgttagttctcagtcttgcacttcgaattttgaactgaatccctttcattccctgaggtcagcaaatkctattaggatcctttcgcctcttcaggatgagacatacatatctgcatctatttaaaaactgtccccaaacccaaacagtttgttatgtgatgtttcttgttcttatgtcagagttggaaactaattgcttgttagacaggctcatctgaatcaaaaacacgctgtaaa

SEQ ID NO: 47308 - DNA, 600 bp, Chicken  19866894291311_2
tgaatttatctcgtgaacatcagtgttcaagtttgcacaatgtaatctggttgtggcctcacgaggaacagttatcatcactatcctaaccttcactagaggaatttacctgatgaataggaaaaattgcttttcacctggctatactgtattgatggcttacagcaaraacactgacttctgtcctcattcatttccagctgatgagatcacatattctagcagagattcttgttagttctcagtcttgcacttcgaattttgaactgaatccctttcattccctgaggtcagcaaatkctattaggatcctttcgcctcttcaggatgagacatacatatctgcatctatttaaaaactgtccccaaacccaaacagtttgttatgtgatgtttcttgttcttatgtcagagttggaaactaattgcttgttagacaggctcatctgaatcaaaaacacgctgtaaagaaagctcttccagtaactgaaaaatcatagtgcatttgggtttaaattttggaagaaggtgaatggatttgattgctttatatgtgtgcataataatacctagaattccacatacagataatgaggtgtg

SEQ ID NO: 47309 - DNA, 600 bp, Chicken  19866894291319_1
tcttaaatggtaaagtgtatcaaaactgtccagaaaatattttttagtccctcaaacaaactgaacaaggtgataaaatggagagagactgtgagatatttataactagtggatacatttttgttttcttatggatgtatttgtcactgcgttttcaatgtagacctactgaagaaatgtggagatatgaaaatttaggatggcagaagagcacaataatatttatttttgtgtttgtctggatgaaaataggatgttaattgaagttatttcagtttttaaagtgcagacattcaattratgctgttttaatgtatcttgtgagaaagaagcgaaacacggtggaactaggtgtagctggggaagtaggataaaaattcattggtttattttctaaactagtcttttctagtcttatctataccttcatatttgttattcaaatacttgttccctgtattagccaatagagaatagctgtgagtagagtctatgccctaggtagaagtttctcatgctactgttaacgtgcagagcttccaggacccagaaatcctgatgataagaaaacctatgtctttcctgctgctgagatagaaa

SEQ ID NO: 47310 - DNA, 600 bp, Chicken  19866894291348_1
aagaagatacccaggtattcttagagctatagatttttggtcactcgattttatagaatattttaatacatggaacaaaaggatacgagcaaatttaatccatcgaggtaacgcacagacagggcgtgtgcctgagctggaacgtgtgaatgatcagccatagaagccaccaaaaaaaggttttcctgttgagacagtgatccgaggttgacgtgggccgtaggagggaacatcgggccggcccgtagctggtgtttttggaacagttccggttggccaccagctgtgggggcactcagrtggctcagtgtgtgcatcgggaagtgtcacctcctcaggtttctcctgcgatcagcaggttgcagaggaagcaagaagaggggtgagtttgttaacgcagtcccctctaggaatttcaggtgggctgagtttttgtttggactccatctgacgaagataaaggtaaccaggagatggacggacttgacttcagatgcttgtctcattctactgatgctctaatgtgggttgtgggagaagtcctgtctctgccaccatgccaggcagctggcctcagcagaacagccccagcctcagcct

SEQ ID NO: 47311 - DNA, 600 bp, Chicken  19866894291353_1
attagctggtaaataaagtggtttctttgatgtgcggcatctctgttttctgtacaaattgtattattctgactccctgtagaaacagctccatgtggttggcattaacataaactgagttttgttagctgttcatctggcatcataatctctatatacaaagctaaagctcgtccgaaaaatcccagcttcccctttatgacagaaatcaattatagcacaacaaattttacttagaaagcacctttcaccaaattctctgagtagtacttagctaataaagagtgttgcaaaattgcyatatccacttcctctagccttttttccctttctaattgcactacaaaggctcttcatcccaattagttttgattgggaatgtgcagtcttttggctctgcttcctttgcatgacaaacccaaccagaagggcatgacaagcacagctgtgattttcccttcaccaaatggaaagaacaaaaaccttccttctcttctagtagccaacaggaaacctgtgaacaagaggggtatgctttaccattcaccttcctgtgctggcgctggtttcaggccacacaattggcagggccagcctctg

SEQ ID NO: 47312 - DNA, 600 bp, Chicken  19866894291362_1
aaaaggaatactggtatctaataagtagttccccatttgaagcgtcactgtgagactgaccacccaggacacagaacgggcaactcaggaaacagtcattcaaatagataagtatgtgtttatcatcttacttggtcgctgaagtgccttaattttagactgctttgttgcgtggatcagtggtcggatcttcaacgaagggtaacgccgccccagggcttgagatgcttcaaagaacagaggacaaagtcagcaggaggggaatgggggtgactttcatcacacaaaacacagcccacrgtaccacagtgctgcacaacccacgaagggttgaaggccaactgaaggccaactcatcgcagggctcacctccaccttacatcacccattccttgggcagaaagagctctaaggaaacatacattctaaagaccactctgatgattaggaacacatcccaagaacagagcgggactgctcaggctgtgcatggtgatgggttggtggttggacttgaggatggtggaggtcttttccaaccttaatgattctatgggcatggcggggaggggctgacagccgactcaatgatctcagagg

SEQ ID NO: 47313 - DNA, 600 bp, Chicken  19866894291367_1
aggagatatagatacaactgctaggagccagaaggatttctctatgtcccgtacttctaagttccactgagagaccttatgttttctatgggaattacagatacacaaaatatagcaccaacatcagacagtagcctaagcaaaactataagacaacaaatataatgtctgaatgtatgcttgagatcttagcacagagtaagcatacgtgtatgttttcccttatttaatttcataattgaaaacttgcttctaatttgtagagcaaaattccccctttttttccctttctttttgacrccatagcattcagggtacaaagtgtggggaagaactcagcaaaatgttaaaacacagctttgtgacaaaactgagagatgctatttgatattgcattattctggggttgacaaataagattcactgtcacctgtgtgagccgcccaagctggaattgaaacctattttcatttatgaagcaatttaatatttttaagaaaatctgcttttcttttccagacaatctgaataaagggaaaagtgggactgaatcccagcagtgaaactgtgttttttccacagtagaagttccttaccaac

SEQ ID NO: 47314 - DNA, 600 bp, Chicken  19866894291368_1
tcttgagaccttgttattctggattcttttaaaaaatgtcttctaaaagtactgtttcttttttggtatcataatcactttgcagctctttgtgtttatccctcacttaaaaaatatatatatatatccctcctatatccagtcttgtatatctctgaaattttgtccttaaaatgaagtttgggatctggggtctctacagactcttaacagtatttcctacaataaaaaacatcatatgagagttgattgaaccattaatttttgaagtcttctgttccctttaaccttgtttgttcytttgtctgtctttagcagatggttagattactggtatcctctaaccacgttcagtgctcattagcgccatgtcattttgagtgctgtttccatctttcctgttctcttttctccatttatcagtctatacattcatatgttcagcaagtcattgacagtgatgtaggttttaacacttgactttattattatctccagaaatcttgcttgatgcctaggagaaaaaaagtctacctctgacatacaaagtgattaatgaagtattaaccttagtaactacctttctgagaaactttcaga

SEQ ID NO: 47315 - DNA, 600 bp, Chicken  19866894291373_1
agatcctaaaaacatattagtaatatgtgggtatcatgattccaatccccttgagcatctctctgtaaatgtacttcaaattcatttctaaacaaaagaaaacaacaacaaaaaaaaacctcctaaatcccagacctacacactatataatggggtacaccaccactgcaaaagggatatgctgttttattctaaatactactcatgccatggatgaagcactacataatgcctctgtttgtagagaggactgcttgcatgtgtattatctaaggatatggtctttctgcctgagtaacscacttttatggctctcagaaatgcacatctccaaacaaatcccacagtcacagcagcaacttaactgtgtagcccaaaccctatttctggcccttgatctgcttacgtgcccaattggatcagtcccaggtgctgaggacaatcttcccctgctcttgcaaatgacaggcattacacagctttctctgtgccagcccgcagaggtgctgccatggttaaattgcctggagaagctggtgtttttgctgcagtcatcacacaagtgaraaacagaaccagcccaaatggagacgacagaac

SEQ ID NO: 47316 - DNA, 580 bp, Chicken  19866894291373_2
atctaaggatatggtctttctgcctgagtaacscacttttatggctctcagaaatgcacatctccaaacaaatcccacagtcacagcagcaacttaactgtgtagcccaaaccctatttctggcccttgatctgcttacgtgcccaattggatcagtcccaggtgctgaggacaatcttcccctgctcttgcaaatgacaggcattacacagctttctctgtgccagcccgcagaggtgctgccatggttaaattgcctggagaagctggtgtttttgctgcagtcatcacacaagtgaraaacagaaccagcccaaatggagacgacagaacagcagagaagattaagttgtcacgcacaggtgccatgtgtgccatgtagttgagctcaagatttttcaagctgggctgcaagcagtgagtcacaggcagagaaaagggatatttatgggattttagttcttctgagtgaaaaatatgcaagtcagaaatgacagagaaatgagagtgctggatggtggcaaacaacatatggggaacaggggagagggagcttttggcatcactgccacagcacaca

SEQ ID NO: 47317 - DNA, 599 bp, Chicken  19866894291375_1
  misc_feature (1)..(218): n is any nucleotide
nnnnnnnnnnnnnnnnnnnnnnnnnnnnnnnnnnnnnnnnnnnnnnnnnnnnnnnnnnnnnnnnnnnnnnnnnnnnnnnnnnnnnnnnnnnnnnnnnnnnnnnnnnnnnnnnnnnnnnnnnnnnnnnnnnnnnnnnnnnnnnnnnnnnnnnnnnnnnnnnnnnnnnnnnnnnnnnnnnnnnnnnnnnnnnnnnnnnnnnnnnnnnnnnnnnnnnnnnnatttggctacagttttcccagtaggctggtaaaagaatgcagggtttggctctggccctgtctgttgtcctgtgtgttggaytgcatttctaacagtcctgcaaggaccacattgctacaataaacaaggggtaggtttgctccttgtaataatttggaggatgtttttatttaatggaattagtgaaaaggtctcgtgtgatctctgtccgtggaccttggggatatttgttgctttacaatggcagagtatgtctgaagtccacgagagaaggtggtgtacctttctttgctacctcctttctctcatctagctaaggtgctgtcactgctgaagtcaggtgagagccagagaactgrgagtggctgtgaagctgtctc

SEQ ID NO: 47318 - DNA, 600 bp, Chicken  19866894291375_2
tctgttgtcctgtgtgttggaytgcatttctaacagtcctgcaaggaccacattgctacaataaacaaggggtaggtttgctccttgtaataatttggaggatgtttttatttaatggaattagtgaaaaggtctcgtgtgatctctgtccgtggaccttggggatatttgttgctttacaatggcagagtatgtctgaagtccacgagagaaggtggtgtacctttctttgctacctcctttctctcatctagctaaggtgctgtcactgctgaagtcaggtgagagccagagaactgrgagtggctgtgaagctgtctcatggactggatctaggagacctcttgttccagtattactagatctaggtaaattggggaataccaggaggcatggtacacttgcagaarcactaaataagtggatcctagacataggaagaattaatctttaaatagacctactttgacaggtttttttaatactgttgcagagctagcacaacactgtaatgaaggattaagtaaacaaataacccctttgctgcacccagtcctgtagtgctggcagggagattccttctgagtgaaactgacaggc

SEQ ID NO: 47319 - DNA, 600 bp, Chicken  19866894291375_3
tttaatggaattagtgaaaaggtctcgtgtgatctctgtccgtggaccttggggatatttgttgctttacaatggcagagtatgtctgaagtccacgagagaaggtggtgtacctttctttgctacctcctttctctcatctagctaaggtgctgtcactgctgaagtcaggtgagagccagagaactgrgagtggctgtgaagctgtctcatggactggatctaggagacctcttgttccagtattactagatctaggtaaattggggaataccaggaggcatggtacacttgcagaarcactaaataagtggatcctagacataggaagaattaatctttaaatagacctactttgacaggtttttttaatactgttgcagagctagcacaacactgtaatgaaggattaagtaaacaaataacccctttgctgcacccagtcctgtagtgctggcagggagattccttctgagtgaaactgacaggcctcacaccacagygtaagtagtgctaagtggtctgttcattccagctagctgttaggaggatgagcagaacatggaaaactggtgctggtgaaagtagggctgctgggac

SEQ ID NO: 47320 - DNA, 600 bp, Chicken  19866894291375_4
gctgtctcatggactggatctaggagacctcttgttccagtattactagatctaggtaaattggggaataccaggaggcatggtacacttgcagaarcactaaataagtggatcctagacataggaagaattaatctttaaatagacctactttgacaggtttttttaatactgttgcagagctagcacaacactgtaatgaaggattaagtaaacaaataacccctttgctgcacccagtcctgtagtgctggcagggagattccttctgagtgaaactgacaggcctcacaccacagygtaagtagtgctaagtggtctgttcattccagctagctgttaggaggatgagcagaacatggaaaactggtgctggtgaaagtagggctgctgggaccagaccacgccagcaaatattgttgctgaccttttacaagttcacactgacaaactgagacagtcactgagcagagctgttttcagcagcttacttctaacctctgtactggtttcttgtgtgtgctcctggaatggtgttagctcccaggtaaaaatggctgagcccttgaagaatcatagagctgttacagttgaaaggga

SEQ ID NO: 47321 - DNA, 599 bp, Chicken  19866894291382_1
  misc_feature (1)..(63): n is any nucleotide
nnnnnnnnnnnnnnnnnnnnnnnnnnnnnnnnnnnnnnnnnnnnnnnnnnnnnnnnnnnnnnnctacattggatctgccccactcctttcatccggagaggattttgtgctcagaggagaggtgaggacgtacgatgggtttctgttaaagctctcattttatctcctttccatttagctgtgcggctccgattgctctttaggatcacttccaaagcgctccggcccacccaggtcagctctgtcaccaatacctcccacacgcaatcagtgcacgcaggggcagttaagcagctatckgggggtgacccagaggggcacaatgagggggctgctgttccagcacccactcctgtcccccgtgctatgggatgcagacacaaggatgcgagctcacaaggcaygtgcctacggggcatgaaatagacaccatctccagcagtggtcgcactgctgtacacacagacacggtgattctggagtaaaaagaattgcagtggaccartagagctaaaaaaataaagcatgtagcaggattggggttgttcctttgctgtgggatccaacgtgctcactgcacagcctttggggtcccttcc

SEQ ID NO: 47322 - DNA, 600 bp, Chicken  19866894291382_2
ttgtgctcagaggagaggtgaggacgtacgatgggtttctgttaaagctctcattttatctcctttccatttagctgtgcggctccgattgctctttaggatcacttccaaagcgctccggcccacccaggtcagctctgtcaccaatacctcccacacgcaatcagtgcacgcaggggcagttaagcagctatckgggggtgacccagaggggcacaatgagggggctgctgttccagcacccactcctgtcccccgtgctatgggatgcagacacaaggatgcgagctcacaaggcaygtgcctacggggcatgaaatagacaccatctccagcagtggtcgcactgctgtacacacagacacggtgattctggagtaaaaagaattgcagtggaccartagagctaaaaaaataaagcatgtagcaggattggggttgttcctttgctgtgggatccaacgtgctcactgcacagcctttggggtcccttcccgttcccaatcccaaataagggatgctgtccagtgggaaagtyttcttttggcagagaatggggagcgatggccccgctggggaaaygtggttgtgagaactcgt

SEQ ID NO: 47323 - DNA, 600 bp, Chicken  19866894291382_3
tcacttccaaagcgctccggcccacccaggtcagctctgtcaccaatacctcccacacgcaatcagtgcacgcaggggcagttaagcagctatckgggggtgacccagaggggcacaatgagggggctgctgttccagcacccactcctgtcccccgtgctatgggatgcagacacaaggatgcgagctcacaaggcaygtgcctacggggcatgaaatagacaccatctccagcagtggtcgcactgctgtacacacagacacggtgattctggagtaaaaagaattgcagtggaccartagagctaaaaaaataaagcatgtagcaggattggggttgttcctttgctgtgggatccaacgtgctcactgcacagcctttggggtcccttcccgttcccaatcccaaataagggatgctgtccagtgggaaagtyttcttttggcagagaatggggagcgatggccccgctggggaaaygtggttgtgagaactcgtgtggctctgccatggatggygtgggcaggcagcacagcagtgatgatgggaaatgaaacaaaactcactcacctgattatgttatagaatgggttgggttg

SEQ ID NO: 47324 - DNA, 538 bp, Chicken  19866894291382_4
gcacccactcctgtcccccgtgctatgggatgcagacacaaggatgcgagctcacaaggcaygtgcctacggggcatgaaatagacaccatctccagcagtggtcgcactgctgtacacacagacacggtgattctggagtaaaaagaattgcagtggaccartagagctaaaaaaataaagcatgtagcaggattggggttgttcctttgctgtgggatccaacgtgctcactgcacagcctttggggtcccttcccgttcccaatcccaaataagggatgctgtccagtgggaaagtyttcttttggcagagaatggggagcgatggccccgctggggaaaygtggttgtgagaactcgtgtggctctgccatggatggygtgggcaggcagcacagcagtgatgatgggaaatgaaacaaaactcactcacctgattatgttatagaatgggttgggttggaagggtccttaaagactgtagtgccatgggataggtggaagggcccttacagattctagagccatggaatgggt

SEQ ID NO: 47325 - DNA, 494 bp, Chicken  19866894291382_5
tgcgagctcacaaggcaygtgcctacggggcatgaaatagacaccatctccagcagtggtcgcactgctgtacacacagacacggtgattctggagtaaaaagaattgcagtggaccartagagctaaaaaaataaagcatgtagcaggattggggttgttcctttgctgtgggatccaacgtgctcactgcacagcctttggggtcccttcccgttcccaatcccaaataagggatgctgtccagtgggaaagtyttcttttggcagagaatggggagcgatggccccgctggggaaaygtggttgtgagaactcgtgtggctctgccatggatggygtgggcaggcagcacagcagtgatgatgggaaatgaaacaaaactcactcacctgattatgttatagaatgggttgggttggaagggtccttaaagactgtagtgccatgggataggtggaagggcccttacagattctagagccatggaatgggt

SEQ ID NO: 47326 - DNA, 456 bp, Chicken  19866894291382_6
agacaccatctccagcagtggtcgcactgctgtacacacagacacggtgattctggagtaaaaagaattgcagtggaccartagagctaaaaaaataaagcatgtagcaggattggggttgttcctttgctgtgggatccaacgtgctcactgcacagcctttggggtcccttcccgttcccaatcccaaataagggatgctgtccagtgggaaagtyttcttttggcagagaatggggagcgatggccccgctggggaaaygtggttgtgagaactcgtgtggctctgccatggatggygtgggcaggcagcacagcagtgatgatgggaaatgaaacaaaactcactcacctgattatgttatagaatgggttgggttggaagggtccttaaagactgtagtgccatgggataggtggaagggcccttacagattctagagccatggaatgggt

SEQ ID NO: 47327 - DNA, 599 bp, Chicken  19866894291391_1
  misc_feature (1)..(171): n is any nucleotide
nnnnnnnnnnnnnnnnnnnnnnnnnnnnnnnnnnnnnnnnnnnnnnnnnnnnnnnnnnnnnnnnnnnnnnnnnnnnnnnnnnnnnnnnnnnnnnnnnnnnnnnnnnnnnnnnnnnnnnnnnnnnnnnnnnnnnnnnnnnnnnnnnnnnnnnnnnnnnnnnnnnnnnnnnnnaagttaatacagaaagaaaagtaaacattgtcttcttgctgctaaactggtgctatgtgaattaaatttaaatatgttactttacagtaaagaatagaattgtatataagcactggattacttctgacrctaattttkcatagctgttaaaggatttaacagtaaaaatcccctctgaggaactcaagagtttcacaataagagcttacagttggctgacaccaattccacttgataccggtaggcaaagaaactaatctgctttatttcatgctatctggtctctattgtaccttgtttttagrgctcctgcttctttcacagtgccactgtctgtgactagtgccattcattgtgtgtaactatgtctgccagaatgcctgggtaacatatcagaatgacatatacagctgtgacaaccacctcga

SEQ ID NO: 47328 - DNA, 599 bp, Chicken  19866894291391_2
  misc_feature (1)..(162): n is any nucleotide
nnnnnnnnnnnnnnnnnnnnnnnnnnnnnnnnnnnnnnnnnnnnnnnnnnnnnnnnnnnnnnnnnnnnnnnnnnnnnnnnnnnnnnnnnnnnnnnnnnnnnnnnnnnnnnnnnnnnnnnnnnnnnnnnnnnnnnnnnnnnnnnnnnnnnnnnnnnnnnnnnnaagttaatacagaaagaaaagtaaacattgtcttcttgctgctaaactggtgctatgtgaattaaatttaaatatgttactttacagtaaagaatagaattgtatataagcactggattacttctgacrctaattttkcatagctgttaaaggatttaacagtaaaaatcccctctgaggaactcaagagtttcacaataagagcttacagttggctgacaccaattccacttgataccggtaggcaaagaaactaatctgctttatttcatgctatctggtctctattgtaccttgtttttagrgctcctgcttctttcacagtgccactgtctgtgactagtgccattcattgtgtgtaactatgtctgccagaatgcctgggtaacatatcagaatgacatatacagctgtgacaaccacctcgatgcagagag

SEQ ID NO: 47329 - DNA, 600 bp, Chicken  19866894291391_3
aatacagaaagaaaagtaaacattgtcttcttgctgctaaactggtgctatgtgaattaaatttaaatatgttactttacagtaaagaatagaattgtatataagcactggattacttctgacrctaattttkcatagctgttaaaggatttaacagtaaaaatcccctctgaggaactcaagagtttcacaataagagcttacagttggctgacaccaattccacttgataccggtaggcaaagaaactaatctgctttatttcatgctatctggtctctattgtaccttgtttttagrgctcctgcttctttcacagtgccactgtctgtgactagtgccattcattgtgtgtaactatgtctgccagaatgcctgggtaacatatcagaatgacatatacagctgtgacaaccacctcgatgcagagagacagcacaaagcttaattccctaggaaagtggcacagttaacattttgaacattgttttaggtttttattgaggggaaacctaagttaaatttaacccaagtactagatgatgggagtggtttagtatctcctatcttttctgtagtgtatcttcaacattgcctcat

SEQ ID NO: 47330 - DNA, 600 bp, Chicken  19866894291397_1
acacggtaggatcccacgtctttaactgaagcctacacctgcattttgcatcccctttttaattctgccagggtttaacagaacaaggaacctgctgtcagatgatggtggagactgggaagcagaaacaggtccaaaatcagtgtgtgcagtttctttactatgagagtggtgaggtgctggaacaggctgtccagagaggatgtggatgccttgtccctggaggtgtgaacaccaagccagtttggatgtgaccctgggcagtctggtctagtattaaatggggaagttggtggccckgcctgtgtaagaagggttggagcttcatgatccttgaggtcccttccaacctgagtcattctgtgattctgcgattctaggcccagtttgaatacagcaggtggagcggcctgccttgatggtaaacagcaactgcctgaaatcaagtaagtacagcatctcctaagcatctttgatttccaagatttgtgggactatgtgctacaccacccatgaagcatagaatggaactatgagtttttaatatccttgagaattgaagatgataggtttttttgtatctagttttcccccatagat

SEQ ID NO: 47331 - DNA, 599 bp, Chicken  19866894291403_1
  misc_feature (1)..(81): n is any nucleotide
nnnnnnnnnnnnnnnnnnnnnnnnnnnnnnnnnnnnnnnnnnnnnnnnnnnnnnnnnnnnnnnnnnnnnnnnnnnnnnnnncttcctctactggagaagtgagaaaagagaagcagcattaatcttttttaatatagttgaattatttggggctgtttaaacaaatttgcagtgatcatggatttgctgtgggtagcatccctgctggagcagttttagccatggtcccaagaacagcatctgtgaggagctgattcaaaccatcattaaaacacaccatactggacaggaagataaagyccattttatggatatccagtggttaaaatctgccaacactcctgctaaattgataggcattgatatgttttcatgttgccatctgactcaaaacaggagaggtatctgactgggtcaagcaagagatggataatgagaagtgtctggttcagatgcagttcaaggatacactacttaatgatgctttatagttcctctttttgaagtattacaagtgtgtggcttatgactgacaactgtaattttatttatctgtagacaaccgcttctgtctgagcagagttatgaggctccttcca

SEQ ID NO: 47332 - DNA, 480 bp, Chicken  19866894291403_2
atagttcctctttttgaagtattacaagtgtgtggcttatgactgacaactgtaattttatttatctgtagacaaccgcttctgtctgagcagagttatgaggctccttccatggacttaaaggacaatataaagaagatgacattgaatttgttctttacgttccagtctttaaaaaccagtttagcactttatgctgagtcatgtagattcagattgatccagaagtgtctaaaaagcgaagtgtaattgtattatcataggaaaaatccctacaaaagcaagagtccctaaaggctyttattgcttgagggctcttctggatggttatctgaaggctgacctctaattcaggctcttaataagtgtgaattgatagcttatgaaatttttacaaatgaattcacttatgccatttgtgttaaacacaagaagagtgaaattgatttctagcaaattgagaacagacaatttagcaga

SEQ ID NO: 47333 - DNA, 600 bp, Chicken  19866894291407_1
aatgacaatctactatttgggagttgccagagaatgaggctgtttcctgcattgattgatgctctgaaatgctcacccacaaccaactcaagggtactccttccaagaacacaatgcttgtgactttagtggaaatgagagataaggagaagatcctccaggctgcctggaaagagagaagcattgaattccaagggcaagtgataacaatttctccagacttcagcaagaagatacaagaaagaaggtagaactttaaaaagcctttgtagattttaaatccaagcctgtcgtctcttmtgaaaatgggagttctacatgaaaataaagattactccttctgggatgcagattgagggaaacagtttttaacagatatcacctccattgttgctgtgggccatttggatggattaattcctcgtgttttaatggcagagcccaggtagcacatcctggcattgtgtgctctgtgcacagaaacccttgggagttgcaaactgtccaygaagtctactccatcatggggactgagacagatggcacagctgccaaagctggcagggctgagcatctggtaatgcattgatttaaagcagt

SEQ ID NO: 47334 - DNA, 600 bp, Chicken  19866894291407_2
aatttctccagacttcagcaagaagatacaagaaagaaggtagaactttaaaaagcctttgtagattttaaatccaagcctgtcgtctcttmtgaaaatgggagttctacatgaaaataaagattactccttctgggatgcagattgagggaaacagtttttaacagatatcacctccattgttgctgtgggccatttggatggattaattcctcgtgttttaatggcagagcccaggtagcacatcctggcattgtgtgctctgtgcacagaaacccttgggagttgcaaactgtccaygaagtctactccatcatggggactgagacagatggcacagctgccaaagctggcagggctgagcatctggtaatgcattgatttaaagcagttctcaagcagcgtccgcagtgttgttgarctgagatgagcacagttcagagttactatcctgctggagcccaagggtgttgccacagcctcttattggaagcaagtaccaaatgctttggaaggtgaagaaaagcagcctcccttctgggcaacctgtcaggaactgctgatatcagggagggagtcagagctgtggaaggttactgc

SEQ ID NO: 47335 - DNA, 580 bp, Chicken  19866894291407_3
gattactccttctgggatgcagattgagggaaacagtttttaacagatatcacctccattgttgctgtgggccatttggatggattaattcctcgtgttttaatggcagagcccaggtagcacatcctggcattgtgtgctctgtgcacagaaacccttgggagttgcaaactgtccaygaagtctactccatcatggggactgagacagatggcacagctgccaaagctggcagggctgagcatctggtaatgcattgatttaaagcagttctcaagcagcgtccgcagtgttgttgarctgagatgagcacagttcagagttactatcctgctggagcccaagggtgttgccacagcctcttattggaagcaagtaccaaatgctttggaaggtgaagaaaagcagcctcccttctgggcaacctgtcaggaactgctgatatcagggagggagtcagagctgtggaaggttactgctaccactgtttcacagtgaagtttggattcctttagcaaagctcttgtcaggattttattttatttttggcatgtcagtgctttctctctttctctccctc

SEQ ID NO: 47336 - DNA, 600 bp, Chicken  19866894291409_1
aataagaaatagaccagtgtaaagcagaagtttcatcctaacaaagggccacaccaccgcagaattctaaaaccatctcttgcagtcctcagtggatgttcagcgaactatccctgtagagatctagatctcttggcagagagattaatccacttaagcaacatcccctggtgaaacaaagcacctgaaatgttgaggtctggattggacagctcattatacaaagagttgtagatttgactcaatgtgtaaagggataagcagggataaaaaagatgaaggaggagggctaagcaggarttttcttccagaggagagcctaattacaggcagatacatagaaaaktgtgcagcataagatggtgggagtaggaaagccagaaggagcaatgggaagaagctcagtgggaagagaaaaccrgacaaccaagggggactgtcatcagatagggagctggggatgccttgtgaatgactaggaaacatttattactgtgaagtttttatctcaagccttttataatgcttggtatttattaacacttatctgtgccctgcagcaagatggtgcctgctcttctgcccactctcatcagccac

SEQ ID NO: 47337 - DNA, 600 bp, Chicken  19866894291409_2
ggccacaccaccgcagaattctaaaaccatctcttgcagtcctcagtggatgttcagcgaactatccctgtagagatctagatctcttggcagagagattaatccacttaagcaacatcccctggtgaaacaaagcacctgaaatgttgaggtctggattggacagctcattatacaaagagttgtagatttgactcaatgtgtaaagggataagcagggataaaaaagatgaaggaggagggctaagcaggarttttcttccagaggagagcctaattacaggcagatacatagaaaaktgtgcagcataagatggtgggagtaggaaagccagaaggagcaatgggaagaagctcagtgggaagagaaaaccrgacaaccaagggggactgtcatcagatagggagctggggatgccttgtgaatgactaggaaacatttattactgtgaagtttttatctcaagccttttataatgcttggtatttattaacacttatctgtgccctgcagcaagatggtgcctgctcttctgcccactctcatcagccactttcaaagtcacttctttccccaggttgctggtgagtgaaggagag

SEQ ID NO: 47338 - DNA, 594 bp, Chicken  19866894291409_3
atctagatctcttggcagagagattaatccacttaagcaacatcccctggtgaaacaaagcacctgaaatgttgaggtctggattggacagctcattatacaaagagttgtagatttgactcaatgtgtaaagggataagcagggataaaaaagatgaaggaggagggctaagcaggarttttcttccagaggagagcctaattacaggcagatacatagaaaaktgtgcagcataagatggtgggagtaggaaagccagaaggagcaatgggaagaagctcagtgggaagagaaaaccrgacaaccaagggggactgtcatcagatagggagctggggatgccttgtgaatgactaggaaacatttattactgtgaagtttttatctcaagccttttataatgcttggtatttattaacacttatctgtgccctgcagcaagatggtgcctgctcttctgcccactctcatcagccactttcaaagtcacttctttccccaggttgctggtgagtgaaggagagaaatccatatctcacatataagcattgtagatgtcttaaattaaaattgtggcctcatctcagtatagg

SEQ ID NO: 47339 - DNA, 600 bp, Chicken  19866894291417_1
aagcagtgctggaagtaggttttattcctacacgtgccattgctgaggctcagtgcaacgttactaggggcaatctgagccttgaatggcacctgtggacaagagcagatgagggggctggagtacctcccctacgaggacaggctgagggagctgggcttattcagcctggagaagagaaggctgcggggtgacctcattgcagcctttcagtacctgaagggagcctataaacaggaagggagtaaaccctttgaaagggtaaataacagcaggacaagggggaacggttttaagttraaagagggaagattgaggttggatgttagggggaagttttttaccaggagcgtggtgaggtgctggaacgggctgcccagagagattgtggatgccccatccatccttggaggtgttcaaggccaggttggatggggccctgggcaacctggtctagtaaatgggaaggttggtggccctgcctggcaggggggttggagattcatggtccttgaggtcccttccaacccaggccattctgtgattcagtgtgtgcacagatggacactcagccatctgctgagctgcagctttaactct

SEQ ID NO: 47340 - DNA, 600 bp, Chicken  19866894291418_1
tgagcaaccagatgatgaaaaacagatcgttctcccagagcataaatcttcagtggcttctttgaactctttgaatgctgaaaaaaaaattaaaaaatcaagacttgtaatgcacaccatgtttatcctgaattaatacaaagtagacagaagttaaatatttaagatatgacccacacactggggaaagcaatgtttcttttcataaacagtgtcagatttcagagaagtttttttttctaagtaagtgataaaattcatatctgagaacatttttctactgagagctccctgtgaaakagaacctcatacctcagaatttttgtttgaaatttccattgtaaatcaggctctatgaagctgcttaatttttttaaagaaagaattaacrtctttttctttatgagaggcttaatgcaaacaaagcagcttggataaaataaaaatgactaaatatttttcttttcagtcaaagcaaacatgacctaaacctcttgagagaaccacattgaagaaataatcggtatacttaaagtaatttttcaggygtgtcaggaggaagcataaggaaaaaggtaaaaattaatattaacaaaaaca

SEQ ID NO: 47341 - DNA, 600 bp, Chicken  19866894291418_2
aaaaaatcaagacttgtaatgcacaccatgtttatcctgaattaatacaaagtagacagaagttaaatatttaagatatgacccacacactggggaaagcaatgtttcttttcataaacagtgtcagatttcagagaagtttttttttctaagtaagtgataaaattcatatctgagaacatttttctactgagagctccctgtgaaakagaacctcatacctcagaatttttgtttgaaatttccattgtaaatcaggctctatgaagctgcttaatttttttaaagaaagaattaacrtctttttctttatgagaggcttaatgcaaacaaagcagcttggataaaataaaaatgactaaatatttttcttttcagtcaaagcaaacatgacctaaacctcttgagagaaccacattgaagaaataatcggtatacttaaagtaatttttcaggygtgtcaggaggaagcataaggaaaaaggtaaaaattaatattaacaaaaacaaaaaatgtttttcagcaacagcatgtctgactccagacagcatttgatgaaactgaaaaaaggtactgttaaaagagctgaagttaatatt

SEQ ID NO: 47342 - DNA, 600 bp, Chicken  19866894291418_3
tgataaaattcatatctgagaacatttttctactgagagctccctgtgaaakagaacctcatacctcagaatttttgtttgaaatttccattgtaaatcaggctctatgaagctgcttaatttttttaaagaaagaattaacrtctttttctttatgagaggcttaatgcaaacaaagcagcttggataaaataaaaatgactaaatatttttcttttcagtcaaagcaaacatgacctaaacctcttgagagaaccacattgaagaaataatcggtatacttaaagtaatttttcaggygtgtcaggaggaagcataaggaaaaaggtaaaaattaatattaacaaaaacaaaaaatgtttttcagcaacagcatgtctgactccagacagcatttgatgaaactgaaaaaaggtactgttaaaagagctgaagttaatatttctggtccaaacaaaagatatacttcccacattctcacagagagctcactgcttcatgtcccagttttcctgtcagtaaaactttgagtccattattcatctcagaaaaggaagacaattccagtcccagcagttgctatccttccttgactatgtg

SEQ ID NO: 47343 - DNA, 599 bp, Chicken  19866894291423_1
  misc_feature (1)..(86): n is any nucleotide
nnnnnnnnnnnnnnnnnnnnnnnnnnnnnnnnnnnnnnnnnnnnnnnnnnnnnnnnnnnnnnnnnnnnnnnnnnnnnnnnnnnnnnacttaagaaaaaacactcggatcagttcactattataactctaacaaaactcaacatggaaaaaccgacttccaaaagttcttggtagcaaccttacacttctggcagccacagaagtgaagcattaaaattttcatctttcacgtggaaaatactattaatctccacaatctaagcatagtcaaagaactgtaaacatcagctcactgttaamcaatacattaataatctcsaagtttatgtaagcctcaagacatggaagccattaaaaccaacaccattttaatgccgtttgcacaaaatcttcagaatataaaagcctgagataaggttttactggctttttcccctctggctaacaatccctacagaagctctgcaaagcattccagccacgacaagcacttcgaaaggcagcattccaccttttgttctcttgtttgtctggggccttttgtctgraagtgctttgacaggaagaacaattgccagcattttggacattctagaaac

SEQ ID NO: 47344 - DNA, 599 bp, Chicken  19866894291423_2
  misc_feature (1)..(67): n is any nucleotide
nnnnnnnnnnnnnnnnnnnnnnnnnnnnnnnnnnnnnnnnnnnnnnnnnnnnnnnnnnnnnnnnnnnacttaagaaaaaacactcggatcagttcactattataactctaacaaaactcaacatggaaaaaccgacttccaaaagttcttggtagcaaccttacacttctggcagccacagaagtgaagcattaaaattttcatctttcacgtggaaaatactattaatctccacaatctaagcatagtcaaagaactgtaaacatcagctcactgttaamcaatacattaataatctcsaagtttatgtaagcctcaagacatggaagccattaaaaccaacaccattttaatgccgtttgcacaaaatcttcagaatataaaagcctgagataaggttttactggctttttcccctctggctaacaatccctacagaagctctgcaaagcattccagccacgacaagcacttcgaaaggcagcattccaccttttgttctcttgtttgtctggggccttttgtctgraagtgctttgacaggaagaacaattgccagcattttggacattctagaaacttactggcatctcttcttt

SEQ ID NO: 47345 - DNA, 600 bp, Chicken  19866894291423_3
ctccacaatctaagcatagtcaaagaactgtaaacatcagctcactgttaamcaatacattaataatctcsaagtttatgtaagcctcaagacatggaagccattaaaaccaacaccattttaatgccgtttgcacaaaatcttcagaatataaaagcctgagataaggttttactggctttttcccctctggctaacaatccctacagaagctctgcaaagcattccagccacgacaagcacttcgaaaggcagcattccaccttttgttctcttgtttgtctggggccttttgtctgraagtgctttgacaggaagaacaattgccagcattttggacattctagaaacttactggcatctcttctttttcagtacaaagagtcaatatgaaataggtttaggaagaaaaccagacaaactagaaagcaaatgcatcactgacattttgatgtgggagcataatgccttggatagacactgagattttgtccttctggatttcyctgagaaagcaccaaaaagcatttactctacyaccagcagcaaacgggtttggggtaaataaaccagaatgatttatgcttaataaaagcatat

SEQ ID NO: 47346 - DNA, 600 bp, Chicken  19866894291423_4
cagaagctctgcaaagcattccagccacgacaagcacttcgaaaggcagcattccaccttttgttctcttgtttgtctggggccttttgtctgraagtgctttgacaggaagaacaattgccagcattttggacattctagaaacttactggcatctcttctttttcagtacaaagagtcaatatgaaataggtttaggaagaaaaccagacaaactagaaagcaaatgcatcactgacattttgatgtgggagcataatgccttggatagacactgagattttgtccttctggatttcyctgagaaagcaccaaaaagcatttactctacyaccagcagcaaacgggtttggggtaaataaaccagaatgatttatgcttaataaaagcatatttgcttgaatgtaatcccatttggtccaacgactatgttaacttcatgtcagctgagctttcatctgagcttcaaaagaacactgatgaaacatttagacaaaacttaatatactatggccagtctcatatgctttccactgtcttgcataacacaagcaatggctgcagtactcctcactttttctgtaagggtaccgttagttt

SEQ ID NO: 47347 - DNA, 575 bp, Chicken  19866894291423_5
agcacttcgaaaggcagcattccaccttttgttctcttgtttgtctggggccttttgtctgraagtgctttgacaggaagaacaattgccagcattttggacattctagaaacttactggcatctcttctttttcagtacaaagagtcaatatgaaataggtttaggaagaaaaccagacaaactagaaagcaaatgcatcactgacattttgatgtgggagcataatgccttggatagacactgagattttgtccttctggatttcyctgagaaagcaccaaaaagcatttactctacyaccagcagcaaacgggtttggggtaaataaaccagaatgatttatgcttaataaaagcatatttgcttgaatgtaatcccatttggtccaacgactatgttaacttcatgtcagctgagctttcatctgagcttcaaaagaacactgatgaaacatttagacaaaacttaatatactatggccagtctcatatgctttccactgtcttgcataacacaagcaatggctgcagtactcctcactttttctgtaagggtaccgttagtttcatgacc

SEQ ID NO: 47348 - DNA, 599 bp, Chicken  19866894291424_1
  misc_feature (1)..(48): n is any nucleotide
nnnnnnnnnnnnnnnnnnnnnnnnnnnnnnnnnnnnnnnnnnnnnnnntgtggtgttaggcttaaaaactgctgatcgggcaagcacaaatgtctacatttgtcttttttgtgtgcgtgacaaaaacaatagctgagcaatccttttctcattaggaaaggtaattcctcttggacaaaccaagttcatgatgctgaggagaaatggattaaaaacttacaagactgcatgcatgtaggagtgtagatttaagaactgcgcagttataaataaagaaagcagggtctgtaagaagctctrtagctggaaaagctgttttgtgtttgccacttgggcctggtgtcaattttatcatctgtgtgatttgctttgcttttctgtttcagggattttggagttcatcagcctggcagtggggctggttagtatccgtggggtggattcaggactctacctcggcatgaacgagagaggcgagctgtatgggtcggtaagtttaagatcttgtgatgattgcaactctatgtaagagatgcagcaatatgggctttgaggcttcattggtgtcacaagctgtgcctgtcacaggcctctgatga

SEQ ID NO: 47349 - DNA, 600 bp, Chicken  19866894291430_1
gtcctgtccctcagatcatctccgtaaaagtgagttatacatatagcgatggtaagagattactctggttcataaagaacagctttgaatgagccaagaacttctgaagatgtgattcatttaatgggcttctatctaaatcttgataacacattaagcagcaagaagttgtctgacttttgtccttcattgtttaaaactaaatagattaaagatgtgttcactggaaatccaatggtatgtttattttttcccttaatcggttgctgatgatatctgatatttttaaagatatacctytaggagattaacctaaccttgagacaggttccctaacattgtgcttccctctcttttatgtaaaaatatcgggtataaagccattacatgccattttaacaaactcttcttcgtattattaagttcctaaaatgtatgttggcatagctttwccagtcagtattcttgatttaatttttgttcttagtaatgttacttacttttttttcttgtgaaatagtaactggaaaatatcaatctgttgctggaaagattatgaaggcttattttaaattattggtttgtttgggggtttttgtt

SEQ ID NO: 47350 - DNA, 600 bp, Chicken  19866894291430_2
attaagcagcaagaagttgtctgacttttgtccttcattgtttaaaactaaatagattaaagatgtgttcactggaaatccaatggtatgtttattttttcccttaatcggttgctgatgatatctgatatttttaaagatatacctytaggagattaacctaaccttgagacaggttccctaacattgtgcttccctctcttttatgtaaaaatatcgggtataaagccattacatgccattttaacaaactcttcttcgtattattaagttcctaaaatgtatgttggcatagctttwccagtcagtattcttgatttaatttttgttcttagtaatgttacttacttttttttcttgtgaaatagtaactggaaaatatcaatctgttgctggaaagattatgaaggcttattttaaattattggtttgtttgggggtttttgtttgtttgtttgtttgttttttgttctttgggtttttttgtaactttgggatgggtgggtgtttggtttcttgtttttttgttttttttttttaagaattagttgagtgcagtagtaatgaaatatcgagatccttgtgctatcaaatataatt

SEQ ID NO: 47351 - DNA, 600 bp, Chicken  19866894291431_1
gggattcaaccccaacgtggaatggctcagagtaaacagtcctgatgggcactgagtgcagttggagtggatacctctgccacaaggcagtgggattacagggacatcagtctgatgtggcgttggagcttctgagaaggacctgagtgacatttgtggcagacggaatgcgggtttgcttctcgatagggggaagaaatgggctgcattgaaggagctctgctttctaaaagacccaagttctttccaaacagtgtggtctacagattgcaactcctctattccctgccctggctttgytgtggtgtttatgtgcagcagctccttcctctcgtcctctccgtcgctgctgagtgaccttcactgcctgtcctgctgctcagggtggtctggttgtgacaccaaacttctgctttagtttggagagtggcctgcttggccagctggggatttaaggcgagaaaatggaggtggtgcttcaatcttctctgctttgcagtttgctgaagccctccttagaggggaaggatttattsgtgcaaacataactgagtggargctgctggctgcgcgttgctggcagtggctgcgatgtccrta

SEQ ID NO: 47352 - DNA, 600 bp, Chicken  19866894291431_2
caagttctttccaaacagtgtggtctacagattgcaactcctctattccctgccctggctttgytgtggtgtttatgtgcagcagctccttcctctcgtcctctccgtcgctgctgagtgaccttcactgcctgtcctgctgctcagggtggtctggttgtgacaccaaacttctgctttagtttggagagtggcctgcttggccagctggggatttaaggcgagaaaatggaggtggtgcttcaatcttctctgctttgcagtttgctgaagccctccttagaggggaaggatttattsgtgcaaacataactgagtggargctgctggctgcgcgttgctggcagtggctgcgatgtccrtaccgaaatgcagccttgtgagtagcactgaagtcctcagcagaactgcatgaggtggaaacggaccaggggtgccctccaaccatggagggggagccccatccccctgtgtggaggggcacagccccccgctgtcagcagggctgcctcatcccctgctggaggagcacacagaaggtcaggtctcaaagctgcagcagcaagcaggcagtgtcatccagaaaaacacactgtagat

SEQ ID NO: 47353 - DNA, 600 bp, Chicken  19866894291431_3
gtctacagattgcaactcctctattccctgccctggctttgytgtggtgtttatgtgcagcagctccttcctctcgtcctctccgtcgctgctgagtgaccttcactgcctgtcctgctgctcagggtggtctggttgtgacaccaaacttctgctttagtttggagagtggcctgcttggccagctggggatttaaggcgagaaaatggaggtggtgcttcaatcttctctgctttgcagtttgctgaagccctccttagaggggaaggatttattsgtgcaaacataactgagtggargctgctggctgcgcgttgctggcagtggctgcgatgtccrtaccgaaatgcagccttgtgagtagcactgaagtcctcagcagaactgcatgaggtggaaacggaccaggggtgccctccaaccatggagggggagccccatccccctgtgtggaggggcacagccccccgctgtcagcagggctgcctcatcccctgctggaggagcacacagaaggtcaggtctcaaagctgcagcagcaagcaggcagtgtcatccagaaaaacacactgtagatcgatttaattgtccttgactgg

SEQ ID NO: 47354 - DNA, 600 bp, Chicken  19866894291431_4
gytgtggtgtttatgtgcagcagctccttcctctcgtcctctccgtcgctgctgagtgaccttcactgcctgtcctgctgctcagggtggtctggttgtgacaccaaacttctgctttagtttggagagtggcctgcttggccagctggggatttaaggcgagaaaatggaggtggtgcttcaatcttctctgctttgcagtttgctgaagccctccttagaggggaaggatttattsgtgcaaacataactgagtggargctgctggctgcgcgttgctggcagtggctgcgatgtccrtaccgaaatgcagccttgtgagtagcactgaagtcctcagcagaactgcatgaggtggaaacggaccaggggtgccctccaaccatggagggggagccccatccccctgtgtggaggggcacagccccccgctgtcagcagggctgcctcatcccctgctggaggagcacacagaaggtcaggtctcaaagctgcagcagcaagcaggcagtgtcatccagaaaaacacactgtagatcgatttaattgtccttgactggtaatgaactggggggggcggcggaagagtagggaaaatgt

SEQ ID NO: 47355 - DNA, 600 bp, Chicken  19866894291432_1
ggtgacttcttcatgtcaatgcactttaagaagaggttgcacgtacctgttagggattggacctgggagctctgactgtccagacttatggagctgagcttgctctactccatgctctgctttgcagcctgggaatgagctgccgtgttttacctcggaagagtgaagctgtccttatgctgggtttgtgtctctgttgaaagcagcagagggttgatattgctgtgagtgagaatatctttttttcagccacaataaaaagtggggtgttgctttagaaactgaaaggcagtaggtttkggactgtggcaggagtgtgagagatgagagggggagatgctaatcccaaatctccgcccgtgcaatgctgatctacatgcccaggatgtatgtaatcaggagctgaagaataaagcattgtctcatcacgacatgttaactggctgcattttatgcacatatttaagtatttaatctgcagtgctgtctgaggttctttcaaaaacttgcacgtgcatgcacgtgtgcacatgtacagtgataagtacatgagaaccgactgaggcatcggtgcagtgctttgaatctctgatgttgact

SEQ ID NO: 47356 - DNA, 600 bp, Chicken  19866894291434_1
tccaggaggaatctgacaaaatggtgtctgatatagaagtgcatataaagcagaaaaacttgcagtcattaacattcagtgttgcttgctgaccatttatggagaccaaagagtggatgtgagtacagtaaggtgttggctggcttgtttcagcagtggcaacagcgagtgtgtcacctttactggtgcagattttgaggagcctggcacgtaggcttttgttcattgctggtaaaaattcattactaatggtagtgattatgttgaaaataatgtttcatagctgagaatttcgtctaycaaatagtgttactatgctctttgtacctgttgtaaaaaataaatgggaagcattgctttcagagttacctatgtacatcaaatatacaatctgtataaccaaaaccagagattcatctgtgtagacatggttttgcggaaggctgatcatcttccctcatggagaatttaaatcattcacatgccttatactggcttattgtggaagcctttttccacaatttcctcctgaaataagtgtctgctttagaactaatttattttgactgaaattaacaaagtctatttgtaaacctacac

SEQ ID NO: 47357 - DNA, 600 bp, Chicken  19866894291443_1
tgccatttcaaatatgcagaataaagatcttttttctgaagaacagaatgaagattttttctgatcccacttctcctagtgatgtgatcagtgcatcctgatttgtggaactctagactagattagaacactagagactaaatccgttcctttttcaatcattagctggtcatttatggagagatgccattacgcacatttgattcagcataagctcatgatactgttgcattttccacaaagtatagcatggagctgacactgaacctagccaaagattgctcacttaaagggtgtagygttgtcatcactgtgtcacacagaccaaggtgtgacagtccttcctgcaaaccagaggaacaagctccccctcctcacaaaacagcttccatgtcaaatgaagcacaccctctgatctccccttcttttagcatcctaaygatcatgttcagaagtttttttgccaagtagccagtgctactcagataacaggaatggcacctatccacattagccttctgtaaaacagctgctgccaaattaacaagctcctatctacgtctttgctctgctcttagtactggtttttgttgttcttgt

SEQ ID NO: 47358 - DNA, 600 bp, Chicken  19866894291443_2
aatccgttcctttttcaatcattagctggtcatttatggagagatgccattacgcacatttgattcagcataagctcatgatactgttgcattttccacaaagtatagcatggagctgacactgaacctagccaaagattgctcacttaaagggtgtagygttgtcatcactgtgtcacacagaccaaggtgtgacagtccttcctgcaaaccagaggaacaagctccccctcctcacaaaacagcttccatgtcaaatgaagcacaccctctgatctccccttcttttagcatcctaaygatcatgttcagaagtttttttgccaagtagccagtgctactcagataacaggaatggcacctatccacattagccttctgtaaaacagctgctgccaaattaacaagctcctatctacgtctttgctctgctcttagtactggtttttgttgttcttgtgtccttctctttctccagactaactaaaggatatggaatccactctgtcctttcataatcactcccaatacttttagggagctcacactgcctggatagatgttgctttacaggctgttatacwgctgttacagactgta

SEQ ID NO: 47359 - DNA, 600 bp, Chicken  19866894291443_3
aatcattagctggtcatttatggagagatgccattacgcacatttgattcagcataagctcatgatactgttgcattttccacaaagtatagcatggagctgacactgaacctagccaaagattgctcacttaaagggtgtagygttgtcatcactgtgtcacacagaccaaggtgtgacagtccttcctgcaaaccagaggaacaagctccccctcctcacaaaacagcttccatgtcaaatgaagcacaccctctgatctccccttcttttagcatcctaaygatcatgttcagaagyttttttgccaagtagccagtgctactcagataacaggaatggcacctatccacattagccttctgtaaaacagctgctgccaaattaacaagctcctatctacgtctttgctctgctcttagtactggtttttgttgttcttgtgtccttctctttctccagactaactaaaggatatggaatccactctgtcctttcataatcactcccaatacttttagggagctcacactgcctggatagatgttgctttacaggctgttatacwgctgttacagactgtaaacagctcactatgct

SEQ ID NO: 47360 - DNA, 600 bp, Chicken  19866894291443_4
cttttagcatcctaaygatcatgttcagaagtttttttgccaagtagccagtgctactcagataacaggaatggcacctatccacattagccttctgtaaaacagctgctgccaaattaacaagctcctatctacgtctttgctctgctcttagtactggtttttgttgttcttgtgtccttctctttctccagactaactaaaggatatggaatccactctgtcctttcataatcactcccaatacttttagggagctcacactgcctggatagatgttgctttacaggctgttatacwgctgttacagactgtaaacagctcactatgctaaggtgcagaaatgtctataaagaggagtaacaaacaatacaacagaacaatctcagtaacactgccattaagaacagcatgtacttcaaaggaccaattaactacatcttctctttcaactccaattttcaagcacaaaaacatgtacttttgagtttttcaatgacttgaactgttaaaaagcttaaatttagcaacagaacaattatatgagacacacttctcaagcgtgtgttggaatataagcatacagaaaccccacagtta

SEQ ID NO: 47361 - DNA, 600 bp, Chicken  19866894291447_1
tattctaaattttcacactgaggattgcactgacatttagcgatccaattgagtcccacaaatattaagcgcaaacagagaacactgactcctaaagaaaagcaacaaagatggaggtgactaaagtgggtagggggagcaataaggtgggaaggactaggtgtggttcagagtagctgtagttttcttttaaatataaaagcttaatctgagaactaagtatctggatcctccagaaacttggtcagttccaacccagaatgagttgaattgccactggagatgcccatcttttaccaytaactatgaaaacaawcctaggcttggtatgaaagagttaaaaatactttaagcatttaaatattaacaaattaatcccaccctagcgatgccaatcagaataacaatatccagatttttgcagaccaagaagctctttctagaggaggtcggtattgttagtccttttcaagccgagggagatgcagcacagcaaagtaactggcccaacattactcagtcagtgatggaagtgacaggaatagaatccagatctccttcattccaacccagtgaacttcacgcagatcactaaacatc

SEQ ID NO: 47362 - DNA, 600 bp, Chicken  19866894291447_2
actgaggattgcactgacatttagcgatccaattgagtcccacaaatattaagcgcaaacagagaacactgactcctaaagaaaagcaacaaagatggaggtgactaaagtgggtagggggagcaataaggtgggaaggactaggtgtggttcagagtagctgtagttttcttttaaatataaaagcttaatctgagaactaagtatctggatcctccagaaacttggtcagttccaacccagaatgagttgaattgccactggagatgcccatcttttaccaytaactatgaaaacaawcctaggcttggtatgaaagagttaaaaatactttaagcatttaaatattaacaaattaatcccaccctagcgatgccaatcagaataacaatatccagatttttgcagaccaagaagctctttctagaggaggtcggtattgttagtccttttcaagccgagggagatgcagcacagcaaagtaactggcccaacattactcagtcagtgatggaagtgacaggaatagaatccagatctccttcattccaacccagtgaacttcacgcagatcactaaacatcactatcttcatttctg

SEQ ID NO: 47363 - DNA, 600 bp, Chicken  19866894291447_3
ccatcagtgccccagctcagagtctctgaggattcttccattcttcacattgttatttctctgcatttctgcattgtctgttctgtcatttatgggggaaaaaaaactcaaaccaattgattttctctgttgaattccaaccagaacattatgctgagctgagcatttctgaattgaagcaaatccaactgcagtggccttgccataggcacaccctaattaacagcaaaaaattccatatgttcctctttccgtgcaggcatgactgttctgtgacctaaatgctctggtttgtctcaygttggagagttttcacactgggggcaaatttgtcttgtgccaccacttacatctgcttacctttcaggtttttatatgctttttccctcatcactttgtggctagttttcaaaggcatttgtttgyttcacgaggtatttttagttcctcagtctgttttctctttcttcatcccatagtaaagttataatgctgaatttatgacatggcaattattttcatggcaacagactgtggcatcataaaacaygattatgatgacttcactgcaggatcaagcagaagaaacagccagattct

SEQ ID NO: 47364 - DNA, 575 bp, Chicken  19866894291447_4
ctgttgaattccaaccagaacattatgctgagctgagcatttctgaattgaagcaaatccaactgcagtggccttgccataggcacaccctaattaacagcaaaaaattccatatgttcctctttccgtgcaggcatgactgttctgtgacctaaatgctctggtttgtctcaygttggagagttttcacactgggggcaaatttgtcttgtgccaccacttacatctgcttacctttcaggtttttatatgctttttccctcatcactttgtggctagttttcaaaggcatttgtttgyttcacgaggtatttttagttcctcagtctgttttctctttcttcatcccatagtaaagttataatgctgaatttatgacatggcaattattttcatggcaacagactgtggcatcataaaacaygattatgatgacttcactgcaggatcaagcagaagaaacagccagattctggatagtgaaattcaccagtcctcgcaagtcttttagggctgatatgctgcttattcagagatatcttttgctgctataactattaacattctactatgta

SEQ ID NO: 47365 - DNA, 451 bp, Chicken  19866894291447_5
tccgtgcaggcatgactgttctgtgacctaaatgctctggtttgtctcaygttggagagttttcacactgggggcaaatttgtcttgtgccaccacttacatctgcttacctttcaggtttttatatgctttttccctcatcactttgtggctagttttcaaaggcatttgtttgyttcacgaggtatttttagttcctcagtctgttttctctttcttcatcccatagtaaagttataatgctgaatttatgacatggcaattattttcatggcaacagactgtggcatcataaaacaygattatgatgacttcactgcaggatcaagcagaagaaacagccagattctggatagtgaaattcaccagtcctcgcaagtcttttagggctgatatgctgcttattcagagatatcttttgctgctataactattaacattctactatgta

SEQ ID NO: 47366 - DNA, 581 bp, Chicken  19866894291449_1
tattaaaagatcatggatttggatgtgcattttagtatgaccttttaaagccacattacattttcaccaaaagttttcttctttccagtgcttgctccagattctgaattaacccagtctaagcctaagattcaacaatatccaacttctctatttcttagttgctaaatgtctccttgcaggggtgtctgatcaaaatatgtgaatacaaggcaaaggaaaaattttgtcacaaactactttgtctggcaaaagctcaagaaccccagttctagtagaccaatgcagaaaacagcatgrttcttttttgtgtaaagtggagatgttctgtccaagctggaaatgcacacagtttgtttctctgaaatgctgtaataaatagctttcaatttacctgactctttggaacaatgtattccaatttcaaagatttaaaacttcgtacatgaaaacaatgtgttttcagaagcacaccatgtagtgcactttgttttcaacaaatcagttttgtcatgtgagtatggcattgtactagtactaaattttttccctctgagtattttcctccaataagaactcaa

SEQ ID NO: 47367 - DNA, 600 bp, Chicken  19866894291450_1
aaggcaaggcaagtccaggcaatgccaaaacaggcatggccaggcatggccaggcaagtccaagaaaaacatagcaagtccaggtaaggccaggcaaggccaggaataaaaaggcaagtccaggaaaggccaggcaagtccaggcaaggcaaggcaagtcctggccaggcagggcaaggccaggcccggccagggaaggaaacgctagacaaggcaaggccagtcaaggcaaggcaaggaaagactaggcaagtcaagtccaggccgggcaagacaaatccaggccaggcagggcaagaraagcaaggcaaggcaaggccaggcagggcaatgctaggcaatgcatggcaagtccaggcaaggcctggcaagaccaggcaaggcaggtcaaggcaaggcaaggccagacaggcagggaaaggcaagtccaggcaagtccagaccaggcagggcaagacaaggcaaggcaaggctttgcaagtgcaggacaggtcagtccaggcagggcaaggcaaggccaagcaaggaaaggcatgtccaggcaaggcagggcaaggcaaggcaaggcaagacaatgcaaggccaggccactccaggcca

SEQ ID NO: 47368 - DNA, 600 bp, Chicken  19866894291450_2
aggcaaggcaagtccaggcaatgccaaaacaggcatggccaggcatggccaggcaagtccaagaaaaacatagcaagtccaggtaaggccaggcaaggccaggaataaaaaggcaagtccaggaaaggccaggcaagtccaggcaaggcaaggcaagtcctggccaggcagggcaaggccaggcccggccagggaaggaaacgctagacaaggcaaggccagtcaaggcaaggcaaggaaagactaggcaagtcaagtccaggccgggcaagacaaatccaggccaggcagggcaagacragcaaggcaaggcaaggccaggcagggcaatgctaggcaatgcatggcaagtccaggcaaggcctggcaagaccaggcaaggcaggtcaaggcaaggcaaggccagacaggcagggaaaggcaagtccaggcaagtccagaccaggcagggcaagacaaggcaaggcaaggctttgcaagtgcaggacaggtcagtccaggcagggcaaggcaaggccaagcaaggaaaggcatgtccaggcaaggcagggcaaggcaaggcaaggcaagacaatgcaaggccaggccactccaggccag

SEQ ID NO: 47369 - DNA, 600 bp, Chicken  19866894291450_3
ggcaaggcaagtccaggcaatgccaaaacaggcatggccaggcatggccaggcaagtccaagaaaaacatagcaagtccaggtaaggccaggcaaggccaggaataaaaaggcaagtccaggaaaggccaggcaagtccaggcaaggcaaggcaagtcctggccaggcagggcaaggccaggcccggccagggaaggaaacgctagacaaggcaaggccagtcaaggcaaggcaaggaaagactaggcaagtcaagtccaggccgggcaagacaaatccaggccaggcagggcaagacargcaaggcaaggcaaggccaggcagggcaatgctaggcaatgcatggcaagtccaggcaaggcctggcaagaccaggcaaggcaggtcaaggcaaggcaaggccagacaggcagggaaaggcaagtccaggcaagtccagaccaggcagggcaagacaaggcaaggcaaggctttgcaagtgcaggacaggtcagtccaggcagggcaaggcaaggccaagcaaggaaaggcatgtccaggcaaggcagggcaaggcaaggcaaggcaagacaatgcaaggccaggccactccaggccagg

SEQ ID NO: 47370 - DNA, 600 bp, Chicken  19866894291450_4
gcaaggcaagtccaggcaatgccaaaacaggcatggccaggcatggccaggcaagtccaagaaaaacatagcaagtccaggtaaggccaggcaaggccaggaataaaaaggcaagtccaggaaaggccaggcaagtccaggcaaggcaaggcaagtcctggccaggcagggcaaggccaggcccggccagggaaggaaacgctagacaaggcaaggccagtcaaggcaaggcaaggaaagactaggcaagtcaagtccaggccgggcaagacaaatccaggccaggcagggcaagacaarcaaggcaaggcaaggccaggcagggcaatgctaggcaatgcatggcaagtccaggcaaggcctggcaagaccaggcaaggcaggtcaaggcaaggcaaggccagacaggcagggaaaggcaagtccaggcaagtccagaccaggcagggcaagacaaggcaaggcaaggctttgcaagtgcaggacaggtcagtccaggcagggcaaggcaaggccaagcaaggaaaggcatgtccaggcaaggcagggcaaggcaaggcaaggcaagacaatgcaaggccaggccactccaggccaggc

SEQ ID NO: 47371 - DNA, 600 bp, Chicken  19866894291450_5; identical to SEQ ID NO: 47370

SEQ ID NO: 47372 - DNA, 600 bp, Chicken  19866894291464_1
tctgagttgttctgctgcagaaggaagaaatgaggtgctgaaacaacttgtacaacctacagtatgtaacatactagcaagttgactataactaccttttgatgtagtaaaaacaaaatcacgagcatggaaaactattcaggacactagccagtcagatccacagtcatgaaagaacatctgcatagggataaccagacaggaatcttcaagatctcataaatattgtataaaaaaaaaaactcctttatattcaaaattttatatattgtttaagtcacaaaaaagcccttaaggaastcaatagttttacataccagggtcatatgatggaggaggcggtggagggagttttccaccatctttaagattaagtcctttggctgctcgtatagttgctatgaattcttcatgctttcgtctccaattggatggctttttggggggttctggctaagaagtcaaaaagaaaagcccacaactttttatgtttgaagctcttacttcatgttgaatacatttattataaatttattccagatcctagttgatctaaatatcacaaattgccagcagaaataaactttattacaatgtatg

SEQ ID NO: 47373 - DNA, 600 bp, Chicken  19866894291470_1
ttatatgtttctttctttcttgcttgcttgcttgcttgcttgcacaaatccctgcagtgttcatgggaagcgctggtgcacaggcagattggaagtggcatgggtgctctgttgctcatcctgcacccagtttggatgggagctctgcaacctgtgcctgagacaccgtcacctctcccccagctaccgcacatggatgtgaagcagtgaatacccacaagcccatgttaactcctcaccccatatggggaacactgcccacagatactgacaggagggtaccaatagcccaacctgtcytggtgggcaggctgatggactttgtggcatacaaggtagctatttagggcaagctgcaccatttctgtttgcctcgaaccatccggcaagcacagtggcccaagcacagcagcctctccattttcctkctgtgcccccttccttcttcccctgcccagctgctgtccctgtgctactcagctcacttcttgctgtctgcatttataacagctgagcattgggtcctgctctaaaggagcctgtggaagctttttaagtattatttttggcatttcattagctgatacattaatggagaga

SEQ ID NO: 47374 - DNA, 600 bp, Chicken  19866894291470_2
agtttggatgggagctctgcaacctgtgcctgagacaccgtcacctctcccccagctaccgcacatggatgtgaagcagtgaatacccacaagcccatgttaactcctcaccccatatggggaacactgcccacagatactgacaggagggtaccaatagcccaacctgtcytggtgggcaggctgatggactttgtggcatacaaggtagctatttagggcaagctgcaccatttctgtttgcctcgaaccatccggcaagcacagtggcccaagcacagcagcctctccattttcctkctgtgcccccttccttcttcccctgcccagctgctgtccctgtgctactcagctcacttcttgctgtctgcatttataacagctgagcattgggtcctgctctaaaggagcctgtggaagctttttaagtattatttttggcatttcattagctgatacattaatggagagaaaaatcagatggatgtaagggaggcagaagatcctctgtgatgcataaggactctttccttacaatcaggttactgagctttagctggtgctttgctttgctgcccaccctgatggcagtctgcctgt

SEQ ID NO: 47375 - DNA, 600 bp, Chicken  19866894291478_1
tgtcaagaggatgctatttagatggaagaatccatgttctttatcaagtacagaagttgtggctgtgcttgcttgaacaatatatcaggttaatactcttttcacctgtatatatatcccctaaaaaacatacataaagaccaaaggcaatctggcaaacttttaaagtgatcctcaaaaacaagaataatttgtatgagaagttcctatacttccattcttgcagcagtagcatcacttctctatatttgtccacgggggtatttgatctggaatctggtctccaagcaatgaaattgwcagagggaaaaatgatggggaatttgcacacacaaaaagggaaggattgtatctgagcagttgttttggaatcataggtgctgagttacaggctactgtcagtgaggcctgtgacatgggattgctctgggcaaagaccatgaaatgatttataatttagttaaacttgcattattaaaaagggactctgtctcttttgaaagatatttgcgcctgtcagtcattctcttgattttacaaggcactggcctagttggagaccaagttattaaaaaataatcttttttgttgttgtagtta

SEQ ID NO: 47376 - DNA, 600 bp, Chicken  19866894291479_1
caaatgtctgctgaaaatgttaatagtctgctccctcctggacttctcatatgcttaagccaggatcttgactcactgtttattttttttaaaggccagttgcctgctgttgtacagtgctgagtcctctctgcttgaggcttggctcatggatgtatggctgcaagatgaaggatggtcctgcctgttttggatgcatgatgctgatcagtgacaggaatgctgtgaaaaggtagacttatcatggcagaaaaatgagcttcttgcattggtagggagatggcctgctctcaggaactrcagtatattggacacaaatggtttcacagctgcatttgattatcagccagtaattaatgggagctgttcacctgagcttgagctgctgtgcactgccagctcctggtgcaagctgttggttgggcactagctctgatgtctgtgtgctggattgctgtctgtgggactgctttttgtttcctgtggtggtgatgttttttttwaactactgctcagatgtagcagttaccaaaagatgatacttttcacatttccgtttcagaagggtgaagagaagggctctgyttgctttttgctaat

SEQ ID NO: 47377 - DNA, 510 bp, Chicken  19866894291479_2
ctgatcagtgacaggaatgctgtgaaaaggtagacttatcatggcagaaaaatgagcttcttgcattggtagggagatggcctgctctcaggaactrcagtatattggacacaaatggtttcacagctgcatttgattatcagccagtaattaatgggagctgttcacctgagcttgagctgctgtgcactgccagctcctggtgcaagctgttggttgggcactagctctgatgtctgtgtgctggattgctgtctgtgggactgctttttgtttcctgtggtggtgatgttttttttwaactactgctcagatgtagcagttaccaaaagatgatacttttcacatttccgtttcagaagggtgaagagaagggctctgyttgctttttgctaatttctctgctgcagaccgctgccctgcagtcgtcgtttcctggtagcagtttgggtttgtaaacaaagtcgtggggtttgtgcagttggtcgaagaaatccacatgggccctgt

SEQ ID NO: 47378 - DNA, 428 bp, Chicken  19866894291479_3
tgctctcaggaactrcagtatattggacacaaatggtttcacagctgcatttgattatcagccagtaattaatgggagctgttcacctgagcttgagctgctgtgcactgccagctcctggtgcaagctgttggttgggcactagctctgatgtctgtgtgctggattgctgtctgtgggactgctttttgtttcctgtggtggtgatgttttttttwaactactgctcagatgtagcagttaccaaaagatgatacttttcacatttccgtttcagaagggtgaagagaagggctctgyttgctttttgctaatttctctgctgcagaccgctgccctgcagtcgtcgtttcctggtagcagtttgggtttgtaaacaaagtcgtggggtttgtgcagttggtcgaagaaatccacatgggccctgt

SEQ ID NO: 47379 - DNA, 599 bp, Chicken  19866894291483_1
  misc_feature (1)..(18): n is any nucleotide
nnnnnnnnnnnnnnnnnnaaaaggctcctacagatcagaccatctgctgctcagtagcactccccacccacaggaaagctcctgctgtcagtcagagcctttggaaggaatgagcatcgatctgcaaacctcctgagcgcctgctgtaaatgcgctgagcacagagcggatctggtgacaaagtgtgacagggcatggcaaaacctgctccacctctcagctcagagccctgtcatttgtcatttttatatattagcatgcgggcatctccctgcacatgaaattagtcctctataaacrtgcctggtgagaatyattatcaggggattatcagctcatcctcgagactatgaagagttaaatttgatcttggtcaaatcagggtaattttgataawttcagcatcttaatktcagattaagagygatgcctatccatgtgaatgctctccattygaactggacacaagagtgtgcctatggagcaatctctgtgattggcaccaaaacatgaccggacctgaggtaatgggcaccaatgggctgccaacacccagaagtggtattccccagtttgggacaggaaggacattgaatcta

SEQ ID NO: 47380 - DNA, 599 bp, Chicken  19866894291483_2
  misc_feature (1)..(3): n is any nucleotide
nnnaaaaggctcctacagatcagaccatctgctgctcagtagcactccccacccacaggaaagctcctgctgtcagtcagagcctttggaaggaatgagcatcgatctgcaaacctcctgagcgcctgctgtaaatgcgctgagcacagagcggatctggtgacaaagtgtgacagggcatggcaaaacctgctccacctctcagctcagagccctgtcatttgtcatttttatatattagcatgcgggcatctccctgcacatgaaattagtcctctataaacrtgcctggtgagaatyattatcaggggattatcagctcatcctcgagactatgaagagttaaatttgatcttggtcaaatcagggtaattttgataawttcagcatcttaatktcagattaagagygatgcctatccatgtgaatgctctccattygaactggacacaagagtgtgcctatggagcaatctctgtgattggcaccaaaacatgaccggacctgaggtaatgggcaccaatgggctgccaacacccagaagtggtattccccagtttgggacaggaaggacattgaatctagttcaaattccaggg

SEQ ID NO: 47381 - DNA, 600 bp, Chicken  19866894291483_3
cctttggaaggaatgagcatcgatctgcaaacctcctgagcgcctgctgtaaatgcgctgagcacagagcggatctggtgacaaagtgtgacagggcatggcaaaacctgctccacctctcagctcagagccctgtcatttgtcatttttatatattagcatgcgggcatctccctgcacatgaaattagtcctctataaacrtgcctggtgagaatyattatcaggggattatcagctcatcctcgagactatgaagagttaaatttgatcttggtcaaatcagggtaattttgataawttcagcatcttaatktcagattaagagygatgcctatccatgtgaatgctctccattygaactggacacaagagtgtgcctatggagcaatctctgtgattggcaccaaaacatgaccggacctgaggtaatgggcaccaatgggctgccaacacccagaagtggtattccccagtttgggacaggaaggacattgaatctagttcaaattccagggagattaaggtcagcggagcgtagttcaccccaatggcatttgctttgtcctcactctccttgcactgaaggcagctcgtgctt

SEQ ID NO: 47382 - DNA, 600 bp, Chicken  19866894291483_4
agcatcgatctgcaaacctcctgagcgcctgctgtaaatgcgctgagcacagagcggatctggtgacaaagtgtgacagggcatggcaaaacctgctccacctctcagctcagagccctgtcatttgtcatttttatatattagcatgcgggcatctccctgcacatgaaattagtcctctataaacrtgcctggtgagaatyattatcaggggattatcagctcatcctcgagactatgaagagttaaatttgatcttggtcaaatcagggtaattttgataawttcagcatcttaatktcagattaagagygatgcctatccatgtgaatgctctccattygaactggacacaagagtgtgcctatggagcaatctctgtgattggcaccaaaacatgaccggacctgaggtaatgggcaccaatgggctgccaacacccagaagtggtattccccagtttgggacaggaaggacattgaatctagttcaaattccagggagattaaggtcagcggagcgtagttcaccccaatggcatttgctttgtcctcactctccttgcactgaaggcagctcgtgcttgctgggagctctgtg

SEQ ID NO: 47383 - DNA, 600 bp, Chicken  19866894291483_5
aaacctcctgagcgcctgctgtaaatgcgctgagcacagagcggatctggtgacaaagtgtgacagggcatggcaaaacctgctccacctctcagctcagagccctgtcatttgtcatttttatatattagcatgcgggcatctccctgcacatgaaattagtcctctataaacrtgcctggtgagaatyattatcaggggattatcagctcatcctcgagactatgaagagttaaatttgatcttggtcaaatcagggtaattttgataawttcagcatcttaatktcagattaagagygatgcctatccatgtgaatgctctccattygaactggacacaagagtgtgcctatggagcaatctctgtgattggcaccaaaacatgaccggacctgaggtaatgggcaccaatgggctgccaacacccagaagtggtattccccagtttgggacaggaaggacattgaatctagttcaaattccagggagattaaggtcagcggagcgtagttcaccccaatggcatttgctttgtcctcactctccttgcactgaaggcagctcgtgcttgctgggagctctgtgctggacagtgggc

SEQ ID NO: 47384 - DNA, 600 bp, Chicken  19866894291483_6
tgagcacagagcggatctggtgacaaagtgtgacagggcatggcaaaacctgctccacctctcagctcagagccctgtcatttgtcatttttatatattagcatgcgggcatctccctgcacatgaaattagtcctctataaacrtgcctggtgagaatyattatcaggggattatcagctcatcctcgagactatgaagagttaaatttgatcttggtcaaatcagggtaattttgataawttcagcatcttaatktcagattaagagygatgcctatccatgtgaatgctctccattygaactggacacaagagtgtgcctatggagcaatctctgtgattggcaccaaaacatgaccggacctgaggtaatgggcaccaatgggctgccaacacccagaagtggtattccccagtttgggacaggaaggacattgaatctagttcaaattccagggagattaaggtcagcggagcgtagttcaccccaatggcatttgctttgtcctcactctccttgcactgaaggcagctcgtgcttgctgggagctctgtgctggacagtgggcctgtgccttcacctgacatcacagagctca

SEQ ID NO: 47385 - DNA, 600 bp, Chicken  19866894291497_1
ggcgaacaaagctctctaacgagctcttccccgcgaggtgagctgcccgcttcccactcctgggatctttgcttctgcttcaaaggcagcggggagccgcagagccgcccccgcgctcacctcccgctgccgcccgcacccagcgccggcgcggcctctccatccctccttaacgctctgagctctgccagatgaaagagcgcggcaccgaaagcgcagccttccccccctcagccccccggaacgcggcaccccgcaaagcatgcacgtgcacacgtgtgcgcccaggcgcgtgagcgytggtgctgccacgaacacacgcgtgtgcgctcagcgctgggtcggctttgcggcacagccccccctgcccccgctgccgcccctctccccgctcacccccccttcgccccctcccccgcagcgccgtgcctcccggctcgctgccaccgccgttcctgaagcacgcaggctggcagcggcgcggagccgtaattaacggggccgctttgccaatcagtggccgcgccgcgctaccactggcaagcacaggcctttttatttattctacttaactgctgttggtgaaactccactccagaa

SEQ ID NO: 47386 - DNA, 600 bp, Chicken  19866894291506_1
gcccacagtgggtctggggacaaaacgcaggtggaaataactgcagtttttaaccccaaacagctttgatactttgggcaattctccctgaatataatctttttcttttttcgttttggaagagggtgtaatcatttttcggagttagggcagatgggcagctaaactcagggcattgactggaagagagattggaagtggatgcaagcgtcttgggtattttgattccagtttttgtttgtttgtttaatctagtgagtaatttggggatagcagaattcatcagcatacaagtttgcygcgttcaataggatgggagtaaacttggcgcgtttagactgctgacagcacagcaaaatgtgtaagagcagggatttatgcttacttttgagatttagcaaaaccctgtgggaataaaaagaagtacgtttaatgaacctaaacttcactttaaaatcccgtatgctataagtttaatgaaccaggccataaactcctttacacctcctggtgagggtttctctggcttaccgcatgaggttgattatgcagcatcctgatttgctacctgtgcctgtatctgcaggttgggaggcagct

SEQ ID NO: 47387 - DNA, 600 bp, Chicken  19866894291509_1
gggtttgtgtgcacacaccctgggggacaccacccccccagccctgcccccaggctgtgccatccgggcagcctgccgtgtgtcctgcactcagatcccgctcctccccccgccctcacagccgctgtgcccaccgtgcccagcacaaaccaacattttttttttgctttttgcttttaccttaggaattcttgtcattttttttctttgcttcctataccttaacagcttatcacgttcctgaaagagccagatacagagctgttaatgaagttaaccacagcagtgttcatagtcacraggcaaccaaagagyggtgatggcagtgcaggacgggttttaattttgttccaatgtcttctgagtttgcagcaaacagctgtcaaatgcttttcatggtcatgaaaacccaaatagccaaacaaaagcaggacagcacagacaccgctctgcaccctgctccatcctgcagctccatgcagtgaggttctgccttgggacaaaaacagagcccagccctctggctgctctgtgccgtgcatgcatgtcattgcccaaaccacacagaattctgaggctgtttgcaataagcacatcaaa

SEQ ID NO: 47388 - DNA, 600 bp, Chicken  19866894291509_2
caccctgggggacaccacccccccagccctgcccccaggctgtgccatccgggcagcctgccgtgtgtcctgcactcagatcccgctcctccccccgccctcacagccgctgtgcccaccgtgcccagcacaaaccaacattttttttttgctttttgcttttaccttaggaattcttgtcattttttttctttgcttcctataccttaacagcttatcacgttcctgaaagagccagatacagagctgttaatgaagttaaccacagcagtgttcatagtcacraggcaaccaaagagyggtgatggcagtgcaggacgggttttaattttgttccaatgtcttctgagtttgcagcaaacagctgtcaaatgcttttcatggtcatgaaaacccaaatagccaaacaaaagcaggacagcacagacaccgctctgcaccctgctccatcctgcagctccatgcagtgaggttctgccttgggacaaaaacagagcccagccctctggctgctctgtgccgtgcatgcatgtcattgcccaaaccacacagaattctgaggctgtttgcaataagcacatcaaaaagccaacaacatta

SEQ ID NO: 47389 - DNA, 531 bp, Chicken  19866894291509_3
attcaaagtatgcaaaaagacgagggtaaagttggtgccacacgtaccatgacactcttcacgtagccagcagtttccagggtctaacagaaaaaagaatgaaataacttcaggaagagtgtataaaaagaacagcccacaagtaaaacaaacacacttttcttgaggaatggtctgatcacagtatgcgaaacactttcatctgctcttctcaaagactgagcacaagttaacaaagaagagaaaaccaaagcacggtgctgcagaatgtcccctgcttatacagcagctgctctcagkcctggtgctgctctggctgaaggagcccgggcagtttgctttgctggtgcaggatttggccactggtgcatgcgctgggagcactgcagcggttgtgctgtgcaagcaccacatgggatggaaggattctgcccagatgccgaaccacagataaccccaatgcaggtcagtgactgctcatctcacagacaccagcagtgctcccattgctgctgtgcccgctcaaagaca

SEQ ID NO: 47390 - DNA, 599 bp, Chicken  19866894291515_1
  misc_feature (1)..(131): n is any nucleotide
nnnnnnnnnnnnnnnnnnnnnnnnnnnnnnnnnnnnnnnnnnnnnnnnnnnnnnnnnnnnnnnnnnnnnnnnnnnnnnnnnnnnnnnnnnnnnnnnnnnnnnnnnnnnnnnnnnnnnnnnnnnnnnnnnnncataaaaagtcagtgccacccgatttgatgaaatgctagatttgatgtgctaacctcatttattattctgtgcttcactccttgctggtactgacctctgttcagcaaatcgtagtataaaacaccttcattcttgctttttcattcactgtcttctttgctgtgaggrtgttggagcactgaaagaggctgcccagagaggctgtggagtcttcttccctggaggtattcaaaagccacctggatgctttcctgtgtaatctaccgtagggaacctgctttagcagggaggctgtacttgatgacctccagaagtcccttccaacccctgcaattctgtgattctgtatttggtttaaggttttagggaaggatggaaagggtcatacaagaatttgagaaaacatcgtgcaaaaattaatactaactcttattttaaacataccaggaccaagaatgytgcaagac

SEQ ID NO: 47391 - DNA, 600 bp, Chicken  19866894291515_2
ctgtgaggrtgttggagcactgaaagaggctgcccagagaggctgtggagtcttcttccctggaggtattcaaaagccacctggatgctttcctgtgtaatctaccgtagggaacctgctttagcagggaggctgtacttgatgacctccagaagtcccttccaacccctgcaattctgtgattctgtatttggtttaaggttttagggaaggatggaaagggtcatacaagaatttgagaaaacatcgtgcaaaaattaatactaactcttattttaaacataccaggaccaagaatgytgcaagactgtagaataatgatcaaataaaaataataataaaaaaaakactgctaraaaagataagactgtcaaaaacaagctaattacttgtgtacaagaagcaaaaaggttggaataaagtaagaatgttggtaactttgttcatgaggatatcatcaaaaggtcctttgaaactaaagtgactaagaaagtgttttggaggcaaagtttaaagcaaacagtagtaagcttctggcagcgttcacccaggagttctaaaatatttgaattgctaactagcacgtgtaacacatagcaa

SEQ ID NO: 47392 - DNA, 600 bp, Chicken  19866894291515_3
agtcttcttccctggaggtattcaaaagccacctggatgctttcctgtgtaatctaccgtagggaacctgctttagcagggaggctgtacttgatgacctccagaagtcccttccaacccctgcaattctgtgattctgtatttggtttaaggttttagggaaggatggaaagggtcatacaagaatttgagaaaacatcgtgcaaaaattaatactaactcttattttaaacataccaggaccaagaatgytgcaagactgtagaataatgatcaaataaaaataataataaaaaaaakactgctaraaaagataagactgtcaaaaacaagctaattacttgtgtacaagaagcaaaaaggttggaataaagtaagaatgttggtaactttgttcatgaggatatcatcaaaaggtcctttgaaactaaagtgactaagaaagtgttttggaggcaaagtttaaagcaaacagtagtaagcttctggcagcgttcacccaggagttctaaaatatttgaattgctaactagcacgtgtaacacatagcaagatgccatgctatgtgaggactgaacagtgacaagtgagaagccaatg

SEQ ID NO: 47393 - DNA, 600 bp, Chicken  19866894291515_4
tccctggaggtattcaaaagccacctggatgctttcctgtgtaatctaccgtagggaacctgctttagcagggaggctgtacttgatgacctccagaagtcccttccaacccctgcaattctgtgattctgtatttggtttaaggttttagggaaggatggaaagggtcatacaagaatttgagaaaacatcgtgcaaaaattaatactaactcttattttaaacataccaggaccaagaatgytgcaagactgtagaataatgatcaaataaaaataataataaaaaaaakactgctaraaaagataagactgtcaaaaacaagctaattacttgtgtacaagaagcaaaaaggttggaataaagtaagaatgttggtaactttgttcatgaggatatcatcaaaaggtcctttgaaactaaagtgactaagaaagtgttttggaggcaaagtttaaagcaaacagtagtaagcttctggcagcgttcacccaggagttctaaaatatttgaattgctaactagcacgtgtaacacatagcaagatgccatgctatgtgaggactgaacagtgacaagtgagaagccaatgaagttcta

SEQ ID NO: 47394 - DNA, 600 bp, Chicken  19866894291515_5
attacttgtgtacaagaagcaaaaaggttggaataaagtaagaatgttggtaactttgttcatgaggatatcatcaaaaggtcctttgaaactaaagtgactaagaaagtgttttggaggcaaagtttaaagcaaacagtagtaagcttctggcagcgttcacccaggagttctaaaatatttgaattgctaactagcacgtgtaacacatagcaagatgccatgctatgtgaggactgaacagtgacaagtgagaagccaatgaagttctacagggaatctaggaaactgggaaagcayatagatgctatgagaaaaaaagatgaattagtggatgcctgagtaaatgtaatctgcttaagaagagtaactttggtctttggaaagaagaaccatgccttagaaaatacattaaaaaaatctttcatggaatttacatctacctgaggaaatggtcacaagttgtaccagaggacgtttagattagacataaggaaaaactttttctctcagagagtgatcaggcactggaacggctgcccaggraggtggtggagtcaccgtccctggcagtgttcaaaaggtgtctggatgaggagc

SEQ ID NO: 47395 - DNA, 600 bp, Chicken  19866894291515_6
acaagtgagaagccaatgaagttctacagggaatctaggaaactgggaaagcayatagatgctatgagaaaaaaagatgaattagtggatgcctgagtaaatgtaatctgcttaagaagagtaactttggtctttggaaagaagaaccatgccttagaaaatacattaaaaaaatctttcatggaatttacatctacctgaggaaatggtcacaagttgtaccagaggacgtttagattagacataaggaaaaactttttctctcagagagtgatcaggcactggaacggctgcccaggraggtggtggagtcaccgtccctggcagtgttcaaaaggtgtctggatgaggagctatgagatatggtttagtagcttgtggtagcaagggtaatgggaggatggttggactagatgatcttgtagctcctttccaaccttctgattctatgatctgtatgcataaaaatattttctctgctctagtcacttgaatttctaaaagtaacaaaagtccttctctgaagggcaacaactcatgcattgataagcttgaaaggacgatcgttgcatggtgagctaatggcaataatgaataggc

SEQ ID NO: 47396 - DNA, 600 bp, Chicken  19866894291519_1
aattgaaatcctacctcttaggctatcctgcagttttatgcagatgctgtaatacatgtgttctgggatgtttttccttttacaagaatgtgaattatgatttctggagaataaaggagaaacaagttgttttcaatatgaatttttccacttggacatgaacatttgataactggctggttttctacctttggagtactttggagtacttctttggctgaaggaaagtcttgttttacttgaatattgatttgctaaaggaaatggttacaacccagagttacaggatttggggaaatrgagaatattgtttactgaatatttatgttttaagtgagaatgttttaaaacaatatgtgaaaatgacaacactacttccactgaactaataatttcatttttcttctttttgcttcattgcaaagctaagggagttgtttgttctttcaaattctcttccctttgcagtactgttggttttctcctccttatttttggtgttgtctcttgcgtgcaattttcaaaaaggatcaaatatttttgtggtaagaatttgtgttacagcaatttttgtagtgtaatacaataatgcaaatgctg

SEQ ID NO: 47397 - DNA, 600 bp, Chicken  19866894291520_1
taattaaataaatagtccagctgcctgagttgccatatttaatgttcgaggaggcacaatcacagaatttaaaaggcatgaacaaaatgccatttaatgttaaaaaaaaaaaaaaaaacagagaggctagaacttaaatctttcttgttaatccaggtttcatttgtacagagcaaaaccttctcagctctatgccttattccaaaccagaactattcccccattacacttggtatttacaaagttgcaaagtacacttttatatgataacaacattacagagcttaatgtcaggctccytcttaaaaagatattaactgaataaacaaaataaaagacttttacccagacattaacactctgtcgcactggactttgcaggtggctctgcccaggggttttcaatacatctgtgactattactgacccatttttggatgcatgttgaaaatatgatcttaaacattaccaagcagcaaactattatgctaagaaggaaacacccatgatcagaacttgattttaaaaagaaatctgcaaatagatctatcgttaacatctacgcaacatagtaaagtgtgttaaactacagcagacatt

SEQ ID NO: 47398 - DNA, 588 bp, Chicken  19866894291532_1
gaagtttagattagacataaggaaaaactttctctcagagagtggtcaaacactggaatggcctgcccaggcaggtggtggattcgccatccctggcagtgctcaagaggcgtctggatgaggagctatgattctatgatttagtgccttgtggtagtaatggcaatgggaatggcaatggcaatgacagttggactacatgatcttgtaggtcctttccaaccttgtgattgtgtgactgatcctcctgagacctccaaattaattttaatgcacctaaggaatttgactaagctcacsttaagctcttcacatttgaaactgctgttcagggcaaacctgtggggtttcattcatcaccgtcttcttggcttgatttgaactgtatcctggcaatgcggggaaacacttcaagcagaagggaggaaatgctctaaacaattaacacaaggggtgaggagaattcagtcctaattctcatgcagtatataaacttgcagaatcacttgaatgatgacagaggggctaacaacatgctcagtataaaaagatcagacacagatctgcaacaacaggtgcgcacacaga

SEQ ID NO: 47399 - DNA, 599 bp, Chicken  19866894291533_1
  misc_feature (1)..(185): n is any nucleotide
nnnnnnnnnnnnnnnnnnnnnnnnnnnnnnnnnnnnnnnnnnnnnnnnnnnnnnnnnnnnnnnnnnnnnnnnnnnnnnnnnnnnnnnnnnnnnnnnnnnnnnnnnnnnnnnnnnnnnnnnnnnnnnnnnnnnnnnnnnnnnnnnnnnnnnnnnnnnnnnnnnnnnnnnnnnnnnnnnnnnnnnnnatggggagactccaaattcatgccaccagacccctcgctgcatggcggctgcagagagagggtgggagagaggccttgagggaagcagcagccagtgggggggtgatggcttccrccagtgctggctttccacccagctaaggttcttgtgtggtcttacatcatcatgcagctcaggacatctacacccaatgggcagtcacaagaagtcagggatcacaggcagtgcacagagcagtgacaggacagatgtcctagctccagcccactgcagagtgtccctctttgctaggctgaagtgttattccttctgcagcactttaggcagacatttatacatcctcttctggtccctgtatcagaacattgcaaagtgggatacatttacgttcactctcttcctctgtgtgagaa

SEQ ID NO: 47400 - DNA, 599 bp, Chicken  19866894291534_1
  misc_feature (1)..(191): n is any nucleotide
nnnnnnnnnnnnnnnnnnnnnnnnnnnnnnnnnnnnnnnnnnnnnnnnnnnnnnnnnnnnnnnnnnnnnnnnnnnnnnnnnnnnnnnnnnnnnnnnnnnnnnnnnnnnnnnnnnnnnnnnnnnnnnnnnnnnnnnnnnnnnnnnnnnnnnnnnnnnnnnnnnnnnnnnnnnnnnnnnnnnnnnnnnnnnnncaaaagcagttagttcaaacattcacatctttctttttttcagaccaaggatttctcctttaccaaataccctttcaagggatagatgtaatccacaggaaaataattyatygtatacagaaagttggggtttatattcaacaggatttaagagagatcacactgatgacacaacctgaccaatttggcacatcattatgtatttgttcttggcctgccaccttcaaaaatatgtggtaaaagataaataataaaatacaaayggaaaacacccttaatttctctctctmtatatatatacatatctaaagtgagcttaactagatcaaacatttccatgtaggtattgcctctcttttaaaggcaagtgaaaagagtaccaaagtatgataatgatgagaaaaaaac

SEQ ID NO: 47401 - DNA, 599 bp, Chicken  19866894291534_2
  misc_feature (1)..(188): n is any nucleotide
nnnnnnnnnnnnnnnnnnnnnnnnnnnnnnnnnnnnnnnnnnnnnnnnnnnnnnnnnnnnnnnnnnnnnnnnnnnnnnnnnnnnnnnnnnnnnnnnnnnnnnnnnnnnnnnnnnnnnnnnnnnnnnnnnnnnnnnnnnnnnnnnnnnnnnnnnnnnnnnnnnnnnnnnnnnnnnnnnnnnnnnnnnnncaaaagcagttagttcaaacattcacatctttctttttttcagaccaaggatttctcctttaccaaataccctttcaagggatagatgtaatccacaggaaaataattyatygtatacagaaagttggggtttatattcaacaggatttaagagagatcacactgatgacacaacctgaccaatttggcacatcattatgtatttgttcttggcctgccaccttcaaaaatatgtggtaaaagataaataataaaatacaaayggaaaacacccttaatttctctctctmtatatatatacatatctaaagtgagcttaactagatcaaacatttccatgtaggtattgcctctcttttaaaggcaagtgaaaagagtaccaaagtatgataatgatgagaaaaaaacatt

SEQ ID NO: 47402 - DNA, 599 bp, Chicken  19866894291534_3
  misc_feature (1)..(37): n is any nucleotide
nnnnnnnnnnnnnnnnnnnnnnnnnnnnnnnnnnnnncaaaagcagttagttcaaacattcacatctttctttttttcagaccaaggatttctcctttaccaaataccctttcaagggatagatgtaatccacaggaaaataattyatygtatacagaaagttggggtttatattcaacaggatttaagagagatcacactgatgacacaacctgaccaatttggcacatcattatgtatttgttcttggcctgccaccttcaaaaatatgtggtaaaagataaataataaaatacaaayggaaaacacccttaatttctctctctmtatatatatacatatctaaagtgagcttaactagatcaaacatttccatgtaggtattgcctctcttttaaaggcaagtgaaaagagtaccaaagtatgataatgatgagaaaaaaacatttctttaacaaggtgtcataacatttgatgttttctttactgatgtactcatttttcctcatagaaataattttcctcaatatgctaaagtggtacaacaaacttgaaacagcttctaatgactaacagactgataatctggatactacaca

SEQ ID NO: 47403 - DNA, 599 bp, Chicken  19866894291534_4
  misc_feature (1)..(10): n is any nucleotide
nnnnnnnnnncaaaagcagttagttcaaacattcacatctttctttttttcagaccaaggatttctcctttaccaaataccctttcaagggatagatgtaatccacaggaaaataattyatygtatacagaaagttggggtttatattcaacaggatttaagagagatcacactgatgacacaacctgaccaatttggcacatcattatgtatttgttcttggcctgccaccttcaaaaatatgtggtaaaagataaataataaaatacaaayggaaaacacccttaatttctctctctmtatatatatacatatctaaagtgagcttaactagatcaaacatttccatgtaggtattgcctctcttttaaaggcaagtgaaaagagtaccaaagtatgataatgatgagaaaaaaacatttctttaacaaggtgtcataacatttgatgttttctttactgatgtactcatttttcctcatagaaataattttcctcaatatgctaaagtggtacaacaaacttgaaacagcttctaatgactaacagactgataatctggatactacacagcagttagaaaagagtccaataatgct

SEQ ID NO: 47404 - DNA, 600 bp, Chicken  19866894291538_1
aaatttttaacttgacagtagcatatcttgaatcagcagtgaaatgctgggatgtaataagcctatcttacccaaaaggacattggaataatgaaaattctttggcttcttgaaaagaagcccagttgaaacagcctttggaatggacaatacacatgagactccagtgtgtgagcacacaggagtttctagcctgagtatccctggcaataagttgaaccagctggcagagctgtcaacatgaccttagacacacagcctttatttgcaggtgaaattcattcaatttgaaaacagcaygtatgttatgctaattatgccaacacaagtcatctgtgagatttcagatcaccccaggaactgtaccaacaagacacatttgcggtagattttcttttgagatgctaggttgtagacataaatttaaatgtagacagagatgcagatgtcaatgttgatgtagacatagatgtagagctctgcccttatagtatagaattcatttgtataaaagtaaaatgaagctagcatcaactttcagtttggaaactttagatcagacctagaaagggctgtgatggatttgttaggatcaaagcc

SEQ ID NO: 47405 - DNA, 546 bp, Chicken  19866894291538_2
gtcatctgtgagatttcagatcaccccaggaactgtaccaacaagacacatttgcggtagattttcttttgagatgctaggttgtagacataaatttaaatgtagacagagatgcagatgtcaatgttgatgtagacatagatgtagagctctgcccttatagtatagaattcatttgtataaaagtaaaatgaagctagcatcaactttcagtttggaaactttagatcagacctagaaagggctgtgatggatttgttaggatcaaagcctggtagttctgaagttcaaaacagacaytgaggaagcagaggatactgcaatgaagcatggggatataaaacagtcattkgagttggaactgatgggattgtatgtgcggctctgatcccttmtagtggggaggcaaaaggaagtagaggaggctctgaaatgagacttcatgaaagacaaggctcttcctggtagagtctctgtttgttggctggagagacctccattggggcgtcacaccaagtttgctatgactctggaccatttctaaaa

SEQ ID NO: 47406 - DNA, 494 bp, Chicken  19866894291538_3
tgcggtagattttcttttgagatgctaggttgtagacataaatttaaatgtagacagagatgcagatgtcaatgttgatgtagacatagatgtagagctctgcccttatagtatagaattcatttgtataaaagtaaaatgaagctagcatcaactttcagtttggaaactttagatcagacctagaaagggctgtgatggatttgttaggatcaaagcctggtagttctgaagttcaaaacagacaytgaggaagcagaggatactgcaatgaagcatggggatataaaacagtcattkgagttggaactgatgggattgtatgtgcggctctgatcccttmtagtggggaggcaaaaggaagtagaggaggctctgaaatgagacttcatgaaagacaaggctcttcctggtagagtctctgtttgttggctggagagacctccattggggcgtcacaccaagtttgctatgactctggaccatttctaaaa

SEQ ID NO: 47407 - DNA, 451 bp, Chicken  19866894291538_4
ttaaatgtagacagagatgcagatgtcaatgttgatgtagacatagatgtagagctctgcccttatagtatagaattcatttgtataaaagtaaaatgaagctagcatcaactttcagtttggaaactttagatcagacctagaaagggctgtgatggatttgttaggatcaaagcctggtagttctgaagttcaaaacagacaytgaggaagcagaggatactgcaatgaagcatggggatataaaacagtcattkgagttggaactgatgggattgtatgtgcggctctgatcccttmtagtggggaggcaaaaggaagtagaggaggctctgaaatgagacttcatgaaagacaaggctcttcctggtagagtctctgtttgttggctggagagacctccattggggcgtcacaccaagtttgctatgactctggaccatttctaaaa

SEQ ID NO: 47408 - DNA, 600 bp, Chicken  19866894291539_1
actcattccagaaacctttgaccttagtgaaatgcatttcacttttttcctgtgtctgtaaagcatcatcccctgtacatgtgtgtgtttgtgatgtggcaagtgcagctgagcgcctctgaacagcccagttccagaagctgaactctgaaaaagctacaactggctggaaacagggctttatgatgaaatgtgtagacaactttaatagcacttggagccatcagcctcacctgcaatcactgatcagatttggagaaagctattaaaaaacaacaacaacaacaacaaaatgctgtrgtgaagcctacaggcctttgttttattctccccattggaagcrtggcagatacagccagacagccctgtaatctgggaaccagatattttggagagaaattacagccacatcagcacccagctttcatctggatgtttgtttgtttgttttctgtctctgatctctttagctggctaattacgaagcctgaatcagcagcttgcccaacgagggcaactactccatctstacctgcgacccttagaaagatctcccagtgtactcaagttagtaagtagcgagcccctcacaagcctctc

SEQ ID NO: 47409 - DNA, 600 bp, Chicken  19866894291539_2
tttttcctgtgtctgtaaagcatcatcccctgtacatgtgtgtgtttgtgatgtggcaagtgcagctgagcgcctctgaacagcccagttccagaagctgaactctgaaaaagctacaactggctggaaacagggctttatgatgaaatgtgtagacaactttaatagcacttggagccatcagcctcacctgcaatcactgatcagatttggagaaagctattaaaaaacaacaacaacaacaacaaaatgctgtrgtgaagcctacaggcctttgttttattctccccattggaagcrtggcagatacagccagacagccctgtaatctgggaaccagatattttggagagaaattacagccacatcagcacccagctttcatctggatgtttgtttgtttgttttctgtctctgatctctttagctggctaattacgaagcctgaatcagcagcttgcccaacgagggcaactactccatctstacctgcgacccttagaaagatctcccagtgtactcaagttagtaagtagcgagcccctcacaagcctctcagcctagtttatttagctgaccttataaacgtgtgctgtgttc

SEQ ID NO: 47410 - DNA, 600 bp, Chicken  19866894291539_3
tcacctgcaatcactgatcagatttggagaaagctattaaaaaacaacaacaacaacaacaaaatgctgtrgtgaagcctacaggcctttgttttattctccccattggaagcrtggcagatacagccagacagccctgtaatctgggaaccagatattttggagagaaattacagccacatcagcacccagctttcatctggatgtttgtttgtttgttttctgtctctgatctctttagctggctaattacgaagcctgaatcagcagcttgcccaacgagggcaactactccatctstacctgcgacccttagaaagatctcccagtgtactcaagttagtaagtagcgagcccctcacaagcctctcagcctagtttatttagctgaccttataaacgtgtgctgtgttctactatactgctctttctgcgtttcctattttaagatgaattaagggggaaaaaaatccataaaccttgacatcacattttgcaaaggaagcaaatgcactcctccctagactcaaaatgaatggccttttaaggtgactgctgaattaaattcctgaatgatgaaatcaacatgtatgaaaaagt

SEQ ID NO: 47411 - DNA, 600 bp, Chicken  19866894291539_4
gcaaaggaagcaaatgcactcctccctagactcaaaatgaatggccttttaaggtgactgctgaattaaattcctgaatgatgaaatcaacatgtatgaaaaagttcttatttccgaaacagaaaaaagctgcaggaaaaaagaagggggggggaggaggaaagctcagtagtgtgattgcagggttgagagctgaataggagctgtttacagtgactcaataaagatactttacttagctttggtagtaatgcaacttcacaggctgaagggaaatggggatatccatattctgagccygctaagcttctctaatgtaagacatgtgcatttagttgaagtcctgaaatacctcactaagaagaaggatgatgggaaaccccaagcacatctttctgtttatcatacgttacatacttctgacatactttacacagtactgtatgcagctgacatcagtctttagatatataacatgcctgtaaggtatgcagctaaactccgattctgtgaagacctaaaatacccttaagacagtaaaaataatctcattagaggtacggagcatgtctggacattctcaggacagaggtgctgcta

SEQ ID NO: 47412 - DNA, 600 bp, Chicken  19866894291540_1
tagcctgaaaattagattttgagccacttagaggagtgagattttggagcagtgtctcaaagggagaaatagaaaccaaaggagcctgaaaagcctgcaggagcaaagaaggcagagagtaaattaaatctctgacacagtctcattctgttttatgcgtgccagtgctatagatggcccaatcccgaagtctgggcaagagagcaagttgcagcagtcagcagccgaaatggagaaccaacggccaagttacaagtcagctgcaggacaaggggagtttcaaggtagctgagctatgcrratagccagctttggctgtatcccagtgtttgagtacagagacttcaccagactggctaagggtagggccttctgacagcatcttgcagaagcaaaacctgcagagtgggatgcaattgtgaactttctatctccattccccagctgctgccattttctgttcccttctggtacagatctgtgttgtggccgtagtagggtagctttgtctctcatcattccttatatgctatatctctgtgtatttcttttcattaaagattaaaatatgttctgggacatattttgggaatgcctgca

SEQ ID NO: 47413 - DNA, 600 bp, Chicken  19866894291540_2
agcctgaaaattagattttgagccacttagaggagtgagattttggagcagtgtctcaaagggagaaatagaaaccaaaggagcctgaaaagcctgcaggagcaaagaaggcagagagtaaattaaatctctgacacagtctcattctgttttatgcgtgccagtgctatagatggcccaatcccgaagtctgggcaagagagcaagttgcagcagtcagcagccgaaatggagaaccaacggccaagttacaagtcagctgcaggacaaggggagtttcaaggtagctgagctatgcrratagccagctttggctgtatcccagtgtttgagtacagagacttcaccagactggctaagggtagggccttctgacagcatcttgcagaagcaaaacctgcagagtgggatgcaattgtgaactttctatctccattccccagctgctgccattttctgttcccttctggtacagatctgtgttgtggccgtagtagggtagctttgtctctcatcattccttatatgctatatctctgtgtatttcttttcattaaagattaaaatatgttctgggacatattttgggaatgcctgcaa

SEQ ID NO: 47414 - DNA, 600 bp, Chicken  19866894291542_1
ggctgatgaaaatataaaggctgaagaaaatataaagatgaaaatataaggcatggacacgctgtgttatactctcagtcagtattccagttcaggggatctaacctcatttcacttggaaggtaacgtaagcagttcttactggtacaagtactaaaataggaaactaataattcctagaatctgggttggcctattatgaatgtcagacattaaagagaacatttctgtgcaaaactttcattctaggattcaaacagacttttttttagcctctcttccattcattttaatatgaayggccacrtaagtgctctcggtaatagtgctatcccaatttttgtgtgacattctgtcaacgatgtacattaaaaagacattattaactggaagatgcttttaggtccccatatttttgccacctgaggcaggatcattaggttaagataagaaaataacagtgatctgtagctattacagattatttaatgcagcaaggtagatgatacccttttagaaagaagcctgacagtcagaggtggaacagttactgtaatttatttggcaggaaaaaaacagtatcaagctttgcaatgtctg

SEQ ID NO: 47415 - DNA, 600 bp, Chicken  19866894291542_2
gaaaatataaaggctgaagaaaatataaagatgaaaatataaggcatggacacgctgtgttatactctcagtcagtattccagttcaggggatctaacctcatttcacttggaaggtaacgtaagcagttcttactggtacaagtactaaaataggaaactaataattcctagaatctgggttggcctattatgaatgtcagacattaaagagaacatttctgtgcaaaactttcattctaggattcaaacagacttttttttagcctctcttccattcattttaatatgaayggccacrtaagtgctctcggtaatagtgctatcccaatttttgtgtgacattctgtcaacgatgtacattaaaaagacattattaactggaagatgcttttaggtccccatatttttgccacctgaggcaggatcattaggttaagataagaaaataacagtgatctgtagctattacagattatttaatgcagcaaggtagatgatacccttttagaaagaagcctgacagtcagaggtggaacagttactgtaatttatttggcaggaaaaaaacagtatcaagctttgcaatgtctgtgattaa

SEQ ID NO: 47416 - DNA, 598 bp, Chicken  19866894291542_3
gatgtacattaaaaagacattattaactggaagatgcttttaggtccccatatttttgccacctgaggcaggatcattaggttaagataagaaaataacagtgatctgtagctattacagattatttaatgcagcaaggtagatgatacccttttagaaagaagcctgacagtcagaggtggaacagttactgtaatttatttggcaggaaaaaaacagtatcaagctttgcaatgtctgtgattaaaaataaaaaaatcacttgagtgaaattcacttctgagagttgcctccaggaayggagaatgctggaatgttaaatcaagaaatgtgctacagatcgttcatgtgccaccgggttcagaagcagggtttgagagagcggtttgtgatcctgaaggcagccaaaaggggtagaatacattcagcttttagcactcagtctactatactattaattggagacatcacagttgagccaactgctccagggtcagtgtgtctgacaatcctaaaaaagcagctactacaataagttatttctaaacactccagtatttagtacgtaggcatattaccttttctaattaaattaatg

SEQ ID NO: 47417 - DNA, 600 bp, Chicken  19866894291551_1
tttcaagcttttaaagattttatgaaacataaccttacatgctgaatgaaggctcaagaaacaagatcgtgatcacctttacaaactggtttggctttattttttttaattctttacattcatctgaaaatctaaatctggcatagttaactctttctctagcccctccctacattacaagtctattgttttctgttcctacttgtaatcatgtatttctctttcttcagtgattctagtatggcacatttggtcctttcttctttctgcttgccctattacagattaagcttcattaaygtgtttgatttctacaaattcctaccaccttttttcaaaccaaatctctgtgcttctttaagcttaacatactgcatttaattaaaggataattattgtggaccatcttgaaattgctgccttttcagagtctattaaaaacccttaatttatactagcgttaatatcttcagatacttgattaaatagtaaagaaagaaatgtctgttctcatatagtgaaatggtagactgcagataagtaaaagcaaagaatgccaagtttcatcttcattataccatggtgtttaggactgtgcat

SEQ ID NO: 47418 - DNA, 600 bp, Chicken  19866894291551_10
attctgattcagccttgtatatgctgtacattatagatactaggaagtcactttttcctctgggatctgttgtcactaaatcttccttaggtctcagacatgacagagcaggtaagaccaagtttaatgtaagatacttacttacaaagggaagtggtgttgaaccacccacctgccctcaacaaaccctgtgctgtgtcagtgggtgcaaacccrttgcaaaactacatttacttcagaatatcgtgtagccaaaagcatggctatatatactggtgtgattacaaatatatctctaamaaaaggagtctgggctcaaggatcagggctgttctcacttgcagctggtctaagaataatacaaaggcataatggagttccttccaactgaactattctactccattctaatcaccagcagatagaaaactggctattgcttgatcatctaaatgagtaatgatcaccaagcatgcaggcctgtggagatgtacatgtgagcgttatgaagaaatgtcgtgcactaggaaaggccagcatctgacagctttttctgcttttgatttttatttatttatttttacaccagtaagagaggtt

SEQ ID NO: 47419 - DNA, 600 bp, Chicken  19866894291551_2
actaccacaatttttgaattttgcagaaaagtaaacatcctaaaggacagaaacagcctctgagaaatgactaaataaatatataacagtacataaactatatgaactataacagattaatgagcaaaatctcaataacaaaccaagaaaaaaaatcaaactggtggaaaaaggatttttaactgttcttagtagaagaaaaattattaagcacacatgtaagtctttttttcttccctttattttttcacatgaagaacctagtgctcttcccccagtctctaacagtctaaaatgatrtctaggtaatttggctatgtgtcagaatatgggcaacagtacaatgcaagtggatttgctttccttccaccctgtgcagaatcaccacttctctacttatctatctcagaaaacaagtttctgttttttgatagtcaaattttcaaattccatgacagcaaaaatattggatcgttgctagaaatcccactttgatgatggaarttgagtcattatataacacaaaaggccataacctcattagtcctatgatcaaaaatttcctaagtgaagcacattacaggtgtcagccaattaatc

SEQ ID NO: 47420 - DNA, 600 bp, Chicken  19866894291551_3
tattaagcacacatgtaagtctttttttcttccctttattttttcacatgaagaacctagtgctcttcccccagtctctaacagtctaaaatgatrtctaggtaatttggctatgtgtcagaatatgggcaacagtacaatgcaagtggatttgctttccttccaccctgtgcagaatcaccacttctctacttatctatctcagaaaacaagtttctgttttttgatagtcaaattttcaaattccatgacagcaaaaatattggatcgttgctagaaatcccactttgatgatggaarttgagtcattatataacacaaaaggccataacctcattagtcctatgatcaaaaatttcctaagtgaagcacattacaggtgtcagccaattaatcatcacgggggtttggccttcagaattgctgaagaacaaagcagtgagacctccggtgaacattacagaactcgatagtttcatctttattgtgcatgtatttggcaaatgcaaaccattctatcattgcaaaacaaaacaaaacaaaaaacgacaacaacaacaataaactattgcccatgccttgaaatgtcctgactattct

SEQ ID NO: 47421 - DNA, 600 bp, Chicken  19866894291551_4
ttctcaaatattttagaccaaatgcttagatttcttatcacgtacagttatgtcaataggtatccaataaaaatacacatatttttcaatttttattttattttgtaaagtaaaacagatcattttacttcaaactaaatgaaatttgtatttgatagaaaaacattttttctgagttctgaacattttaatgttccttccctgccctgaaagacaatgttcaagaaacccccaacagtgaaattctgaagcggtactatttcacgatttcacaacttgagaagcactcaaaatatatgrcactgggagctgtgtgagtactgaggcactatacagagacagacatcagcaaccactatatcccaaagtgattacaggaatggaaactactcttcaaggtaacagtaatggaaactactcttcaaggtaactgtaaacacacactcacaaagcaacttttactttggagattattttaatayacacatttgaacagtggaataagataccttatcctgttctgaaacyacatattttttcagacattttttgaggtaaatgaccaccaaaacagtataaaaaccctctgatttctcagaa

SEQ ID NO: 47422 - DNA, 600 bp, Chicken  19866894291551_5
acattttaatgttccttccctgccctgaaagacaatgttcaagaaacccccaacagtgaaattctgaagcggtactatttcacgatttcacaacttgagaagcactcaaaatatatgrcactgggagctgtgtgagtactgaggcactatacagagacagacatcagcaaccactatatcccaaagtgattacaggaatggaaactactcttcaaggtaacagtaatggaaactactcttcaaggtaactgtaaacacacactcacaaagcaacttttactttggagattattttaatayacacatttgaacagtggaataagataccttatcctgttctgaaacyacatattttttcagacattttttgaggtaaatgaccaccaaaacagtataaaaaccctctgatttctcagaaagaaaaagaaatacattttaaaatatctacactttgatcaatattcattctcctgtttgaatttaaccatctaaataattaagtacttagatatactacatactgtatcaaaacctagctactctgtaaaattatcagaatatatacctaatgatgatgaattattaactacggatttgatt

SEQ ID NO: 47423 - DNA, 600 bp, Chicken  19866894291551_6
cccccaacagtgaaattctgaagcggtactatttcacgatttcacaacttgagaagcactcaaaatatatgrcactgggagctgtgtgagtactgaggcactatacagagacagacatcagcaaccactatatcccaaagtgattacaggaatggaaactactcttcaaggtaacagtaatggaaactactcttcaaggtaactgtaaacacacactcacaaagcaacttttactttggagattattttaatayacacatttgaacagtggaataagataccttatcctgttctgaaacyacatattttttcagacattttttgaggtaaatgaccaccaaaacagtataaaaaccctctgatttctcagaaagaaaaagaaatacattttaaaatatctacactttgatcaatattcattctcctgtttgaatttaaccatctaaataattaagtacttagatatactacatactgtatcaaaacctagctactctgtaaaattatcagaatatatacctaatgatgatgaattattaactacggatttgattgtataaaagtttaacgcttttactgaccaacagtgtcatcattttt

SEQ ID NO: 47424 - DNA, 600 bp, Chicken  19866894291551_7
tcttcaaacactgatcaaaacacacagtttacaggcagctgcttacagtcccacttgtgtgatccaaaaccatgatataggtgcacattcctcactagtacagcatttttttctcagttcttaaagcaatcactcagtttcattctcttcacaggtaaagtgggtttacttttatggtaaaatatagcatcctgcttttaatggttactttttatgaggaagactgaccttattataaaaaaaaccccaatactgaggaccctaagcctgctgaaatgaaatagaagtagtttcttttawacaatggcaaaatttatgtactgagtttctgacatttctgttttgaaaccarctccacatgcctggcagagatatcaggttttaagaaatcaaggaacagcaaggagaaacaaacaaacaaaaacaaaaaatacaaacaaaatagtttgaagacaggaaattgcagaggaagctaattctgattcagccttgtatatgctgtacattatagatactaggaagtcactttttcctctgggatctgttgtcactaaatcttccttaggtctcagacatgacagagcaggtaagaccaagttt

SEQ ID NO: 47425 - DNA, 600 bp, Chicken  19866894291551_8
acttgtgtgatccaaaaccatgatataggtgcacattcctcactagtacagcatttttttctcagttcttaaagcaatcactcagtttcattctcttcacaggtaaagtgggtttacttttatggtaaaatatagcatcctgcttttaatggttactttttatgaggaagactgaccttattataaaaaaaaccccaatactgaggaccctaagcctgctgaaatgaaatagaagtagtttcttttawacaatggcaaaatttatgtactgagtttctgacatttctgttttgaaaccarctccacatgcctggcagagatatcaggttttaagaaatcaaggaacagcaaggagaaacaaacaaacaaaaacaaaaaatacaaacaaaatagtttgaagacaggaaattgcagaggaagctaattctgattcagccttgtatatgctgtacattatagatactaggaagtcactttttcctctgggatctgttgtcactaaatcttccttaggtctcagacatgacagagcaggtaagaccaagtttaatgtaagatacttacttacaaagggaagtggtgttgaaccacccacctgcc

SEQ ID NO: 47426 - DNA, 600 bp, Chicken  19866894291551_9
aaggaacagcaaggagaaacaaacaaacaaaaacaaaaaatacaaacaaaatagtttgaagacaggaaattgcagaggaagctaattctgattcagccttgtatatgctgtacattatagatactaggaagtcactttttcctctgggatctgttgtcactaaatcttccttaggtctcagacatgacagagcaggtaagaccaagtttaatgtaagatacttacttacaaagggaagtggtgttgaaccacccacctgccctcaacaaaccctgtgctgtgtcagtgggtgcaaacccrttgcaaaactacatttacttcagaatatcgtgtagccaaaagcatggctatatatactggtgtgattacaaatatatctctaamaaaaggagtctgggctcaaggatcagggctgttctcacttgcagctggtctaagaataatacaaaggcataatggagttccttccaactgaactattctactccattctaatcaccagcagatagaaaactggctattgcttgatcatctaaatgagtaatgatcaccaagcatgcaggcctgtggagatgtacatgtgagcgttatgaagaaatg

SEQ ID NO: 47427 - DNA, 599 bp, Chicken  19866894291554_1
  misc_feature (1)..(13): n is any nucleotide
nnnnnnnnnnnnntactaaaattagcatgcagcataattaaggctctgtttgcttacttaattcgcctcttttacgtctcctttacctgttacattgttttttaatccatcccatactattttctctacgagactcggggaagaagatgctctgttgataggcttcccagtgagatcccaatggtcaccatggagtccctcacaccctttaatttgtaatagtcgtactgtgctgcagtaacacattttcctacgtgctttactgtaaaatttagggctactgtgttggagtatttcacwaatactctcacatctacattttcagcaaccggagtcaaaagggattcatactgccccctgtgatgtggaaaggagaggtacagatgaactaagctcagagcaggcactaactcggggcgctccatcctgtgtacacagtgcttgaaatttccaaagatcatttgtcacacacacagactgtcagaagcacagctttgcttgagctgcrattggacgcaagcactgggagttcagagtttgagcctcagcatgagcactctgaataagagaaccgtacaattagcggtccctctcccaag

SEQ ID NO: 47428 - DNA, 600 bp, Chicken  19866894291554_2
ttaatttgtaatagtcgtactgtgctgcagtaacacattttcctacgtgctttactgtaaaatttagggctactgtgttggagtatttcacwaatactctcacatctacattttcagcaaccggagtcaaaagggattcatactgccccctgtgatgtggaaaggagaggtacagatgaactaagctcagagcaggcactaactcggggcgctccatcctgtgtacacagtgcttgaaatttccaaagatcatttgtcacacacacagactgtcagaagcacagctttgcttgagctgcrattggacgcaagcactgggagttcagagtttgagcctcagcatgagcactctgaataagagaaccgtacaattagcggtccctctcccaaggcatgctttaaatgacttatactttggcacatagaaaacccatggcggagtgcagaacccagctcttctagccagtgctgcatggcttttctttccctaatcactgcctcatttatcaaaaactttccagctttcaaaagaaaaggtcaccgtatgatgattattattaccagattctttgttggtttagtgaatttgctctagatgaa

SEQ ID NO: 47429 - DNA, 599 bp, Chicken  19866894291555_1
  misc_feature (1)..(125): n is any nucleotide
nnnnnnnnnnnnnnnnnnnnnnnnnnnnnnnnnnnnnnnnnnnnnnnnnnnnnnnnnnnnnnnnnnnnnnnnnnnnnnnnnnnnnnnnnnnnnnnnnnnnnnnnnnnnnnnnnnnnnnnnnnnnntacatgcagacttgagatctggccttgggcttctgaaactcaaagcagtctcagcaaaaatagaccaggtcccacccccagttatttccagtaccgctattgctgttacgtagctcaagtaggataaagaggggtctcggttcagaggccgtaggaagaaaaatgtcaagtggaraatgttctgtgtgagccccacagagaatcattgstacccaaatagagaaactgcgcacagaaagcatcatgaagcaagagctgggagggacctaaaaaggggagaaggtatcgctgcacattgctcctacttccctatcctttcctatctgggtaataccccttttttgggactcaggggacacagggagcagggttcttcaatatttatgtgagaatttgcatcagcatcagtggttcctaagtaactgcaaccactgagatggggcaccaaggcactctaatctccaacaccatcca

SEQ ID NO: 47430 - DNA, 599 bp, Chicken  19866894291555_2
  misc_feature (1)..(91): n is any nucleotide
nnnnnnnnnnnnnnnnnnnnnnnnnnnnnnnnnnnnnnnnnnnnnnnnnnnnnnnnnnnnnnnnnnnnnnnnnnnnnnnnnnnnnnnnnnntacatgcagacttgagatctggccttgggcttctgaaactcaaagcagtctcagcaaaaatagaccaggtcccacccccagttatttccagtaccgctattgctgttacgtagctcaagtaggataaagaggggtctcggttcagaggccgtaggaagaaaaatgtcaagtggaraatgttctgtgtgagccccacagagaatcattgstacccaaatagagaaactgcgcacagaaagcatcatgaagcaagagctgggagggacctaaaaaggggagaaggtatcgctgcacattgctcctacttccctatcctttcctatctgggtaataccccttttttgggactcaggggacacagggagcagggttcttcaatatttatgtgagaatttgcatcagcatcagtggttcctaagtaactgcaaccactgagatggggcaccaaggcactctaatctccaacaccatccagcctccattggcactgaatgcctatccagccctc

SEQ ID NO: 47431 - DNA, 479 bp, Chicken  19866894291555_3
ccaaatagagaaactgcgcacagaaagcatcatgaagcaagagctgggagggacctaaaaaggggagaaggtatcgctgcacattgctcctacttccctatcctttcctatctgggtaataccccttttttgggactcaggggacacagggagcagggttcttcaatatttatgtgagaatttgcatcagcatcagtggttcctaagtaactgcaaccactgagatggggcaccaaggcactctaatctccaacaccatccagcctccattggcactgaatgcctatccagccctcaggktagggagaaaggcaaattaccccttcctaacacttgtacctctcactcagaagctggggcctggcaatacatgagcggtagtatcaaggagtggaggaatttggcactaagggtgtgcctgaatccagacaacagatcagagatcagccctggtcccctcaccccagccagactcagct

SEQ ID NO: 47432 - DNA, 600 bp, Chicken  19866894291560_1
tagagagctttgcttcccatccccaagggccatgtctcctctgctgggctggtgaagtttctgggccaagtgaaggaagaagacagtgtcatcgtccaggttctgaagagccagggggcaatcccctttgtgaaaaccaacatcccacagacaatgataaagtaatcttgtgttctccttcatgaaaacactatgtcacgcaagtcttgtgagctgagagaaagcgggcccatgtgcacaagctctcaccctcatccaaacaaatcatgcacgctgaattcattgcctccccatttcaayctaccattccttggtctttctgtagaatgctacagagaaagtatttctttctggtgcctctttcttcctaaactaaccaacggtatctacttcacagtgattctacccctggcattaattcctcattaatccctgcacagatgctctgtaccttgtctttatgatttgtggaggcagaagtacctcactcacctgctgttcttctctccagctatgactgcagcaatctcatttttggccagacgctgaaccccctcaaccaccagaagacccccggaggctcctcaggaggggaaggag

SEQ ID NO: 47433 - DNA, 600 bp, Chicken  19866894291568_1
gaaaagggcttagtaatgggttgaagttgcgagtcctatcttcagcgtgacaattgtaatttgagttggcagcagtgtcacttacagatgtagcaacactcagctaagaatgcaacgcaggaatagctcaagaaggtagagcagctttaattgaggaaaaacataactacctctgtgaggaggtcaggttgacattcagaagtgatgcaaaatacatatgcagtgatgaggtagttaacagggcaacgaagcacgaagtgacaggtattcatgtcaccacacatctgtgatctgtctacrtcttgcaaaccaagtgtggttcttggtgcccatctctaaaagaaatgtgcagaaacaaagggggttcaagatgggattcacaggtgatgagaggcagggagcagctaaaggagtaaactctttgaaagggcagataacagcaggacaaggggraacggttttaagttgaaagagggaagatttaggttggatgtcaggggggaagttctttaccaggagagtggtgaggtgctggaacaagctgcccagagaggttgtagatgccccgtccctggaggtgttcaaggccaggtaggatgg

SEQ ID NO: 47434 - DNA, 600 bp, Chicken  19866894291568_2
aggaaaaacataactacctctgtgaggaggtcaggttgacattcagaagtgatgcaaaatacatatgcagtgatgaggtagttaacagggcaacgaagcacgaagtgacaggtattcatgtcaccacacatctgtgatctgtctacrtcttgcaaaccaagtgtggttcttggtgcccatctctaaaagaaatgtgcagaaacaaagggggttcaagatgggattcacaggtgatgagaggcagggagcagctaaaggagtaaactctttgaaagggcagataacagcaggacaaggggraacggttttaagttgaaagagggaagatttaggttggatgtcaggggggaagttctttaccaggagagtggtgaggtgctggaacaagctgcccagagaggttgtagatgccccgtccctggaggtgttcaaggccaggtaggatggggctctgggcagcctggtctagtaaatggggaggctggtggccctgcctggcaggggggttggagattcatgatccttgaggtcccttccaacccaggccattctgtgattctaacaaagaaaagacactcagtcactgctggctgttgtggg

SEQ ID NO: 47435 - DNA, 599 bp, Chicken  19866894291570_1
  misc_feature (1)..(38): n is any nucleotide
nnnnnnnnnnnnnnnnnnnnnnnnnnnnnnnnnnnnnnacccatgaagagaaagtaaaaaattcagctagtaatgtcatgttgctgttccctaaggaagcaaactccatgggtaaaagcagagcttctctactgtaaacatgcctacacttaaggctcatgctgcctatgctgctcagtgagctgcaagttccatcttgtagccttcagtacaggcagatgtatctggaagaagcctgtcacgcacagccaacctgtaataattagctctatctattgtgtcgatctgcttaaaataggrtatgctgttttggattgattcagaagcttctgaatcaaacaccaccacagtaatctaaactaggtattgactgatttatttcaacattcttttaccttgaaacatattatggcaggttttatccatttatttttcctgattaggaggttaagtttgtatgtgtctatattactattgtatttcagctacataccctacagtaaataatcttaatgatcaaatgacaggcttcatctctctctgagcagagttcatctgatttattaaagtgacaccagacatttactcaaggagtaaac

SEQ ID NO: 47436 - DNA, 600 bp, Chicken  19866894291578_1
atgtggggaaaagatactccaaaattattccaaataaggtaaatctgaagtacaatttattacagtaataaatccccatgtaaatgtcagcggccagtagatcctggacttcagtgatggcagctctcctagtaggaaagaggctgtgtttagtttgaggctgtaaaaatcctcatctgtggcctctggacagccagaacgaagagctggcctcccacatgtagaaactctcagatctgtaagatccctatcaggatttagcaccacggtaacaaccatcaacagtgcaagcaacggcaytttcatccaggaaaccaaaggcaagtttgctatgggaattgcgagccacatcgtcaagataaaccagctctgggctcagaagccagttgccctaactgtgaaggatgcttgtcaccccatcactcacagggtctttgggttgcagaagacctgggaggtaaccagcctctgaggtgggaggacatcattggctttgaagttggttttaaagccaggaggctttttctgtcctcgaaccaactctttatgagctttccactttgccaggccaacattttccagccatgctccctccagccc

SEQ ID NO: 47437 - DNA, 600 bp, Chicken  19866894291579_1
cacaaaaaacaccagctcatccttccatatttgctaaatgcccaatgcagtcagtgccacagacataccgtatatattccccaccaccaactgcaccttaaggactacacccttttcaatcatgatgtcatgaaatactgctggtgactccccccactaccaccaccacctcctccttggtactacaggctgtgaacctttcatttcaatataatttgattaaaaagaaaagacttctaagtagggcagagaagaaattgatgtgaaaatccaccataagcatcatctattttttcctcygcatgcactctttccgtcaccagaacaacacccattagaaggagtaatgaacataaagcatcattttttctgagaggaaaraataacatgaatattaaaaataaagcaaaaaaatcctttatgaattttatcttcattaaatcagcaaacgggaaaacctgctccctcatataccccatccccaacacctcactggctgctacagcaccttcccattggcgcgggtgctgctgcaaaggaaccaacctgtctgtccttttcctagggttttctccaaacgatagggtccaacatattgtg

SEQ ID NO: 47438 - DNA, 540 bp, Chicken  19866894291579_2
caccaccaactgcaccttaaggactacacccttttcaatcatgatgtcatgaaatactgctggtgactccccccactaccaccaccacctcctccttggtactacaggctgtgaacctttcatttcaatataatttgattaaaaagaaaagacttctaagtagggcagagaagaaattgatgtgaaaatccaccataagcatcatctattttttcctcygcatgcactctttccgtcaccagaacaacacccattagaaggagtaatgaacataaagcatcattttttctgagaggaaaraataacatgaatattaaaaataaagcaaaaaaatcctttatgaattttatcttcattaaatcagcaaacgggaaaacctgctccctcatataccccatccccaacacctcactggctgctacagcaccttcccattggcgcgggtgctgctgcaaaggaaccaacctgtctgtccttttcctagggttttctccaaacgatagggtccaacatattgtgcatgttgagctccgctgcctt

SEQ ID NO: 47439 - DNA, 600 bp, Chicken  19866894291580_1
ctttctttttgctttagtccacttggttgcagatttttctcttcctcctctttcttttctctctctttcacgtgcctgttgtctcgctgggtctgtctgggacgctgatgtgcgaaggagttattttaatgttcaaagagggggatctacgatccaagcccaaggagcatgatgctggtgatctgggctccgcacgccttgttctctctaggagctgttcaagggagagccagagctagagcagcggaagagccgggccctgcagctctgattgacattgcaagcagccaatcctctcgwctcccacctccttctcccctcctccttccagtaccttttctttttcatcagcactagcagttactgcctctgcctgctacagagcatcataatcaatagcaacggcgaacacccaagtttatcagtctattgataaggcaccattaaatataattaaggagtgtgttattttaaatctcaagcacacacatttctttcttatgaattatactccactatgcagctgtacctccatggtactgaataaaggatgtgactgtggcaggaaataggaagggaaaaagaaatccacttcagaaa

SEQ ID NO: 47440 - DNA, 600 bp, Chicken  19866894291582_1
ggccaaagccaacacttctttaaaataccaaaggctcagagaaagctggagcagaaccagagcagagcctccagaaatgtttcattatttgaaggaggcaccactggttcctctcgtggggataccactgacagaggtaggtagagaacagagatggactgctacaggtcagaagacaaagaaaacttccctgctgtggaatgactggaaagctatgttaaaaatatgcatataaaactccctgccactgactgcatatccattaatcgctggccaaaaacatttccagccagagcctgmtaaatraaaatgtggtgtggaacttgtgttcgtagcacattacagaaaaagtctgtatgtgtgtgcatagaaaaataagaaaatcttgaaaagacaaagtccttgatgccaatgcagtgcaaaaggaaaaaaaaaaaaagtccaggatagtcccacatgcaacacatctccttcttacacaggcagtcacacaaaatctgcaaggagctcctggaacagggaccagaactaagagcatcactcagatttgcccctctgggcactgaactgggagatttgaacttcataatctgcagctac

SEQ ID NO: 47441 - DNA, 600 bp, Chicken  19866894291582_2
agccaacacttctttaaaataccaaaggctcagagaaagctggagcagaaccagagcagagcctccagaaatgtttcattatttgaaggaggcaccactggttcctctcgtggggataccactgacagaggtaggtagagaacagagatggactgctacaggtcagaagacaaagaaaacttccctgctgtggaatgactggaaagctatgttaaaaatatgcatataaaactccctgccactgactgcatatccattaatcgctggccaaaaacatttccagccagagcctgmtaaatraaaatgtggtgtggaacttgtgttcgtagcacattacagaaaaagtctgtatgtgtgtgcatagaaaaataagaaaatcttgaaaagacaaagtccttgatgccaatgcagtgcaaaaggaaaaaaaaaaaaagtccaggatagtcccacatgcaacacatctccttcttacacaggcagtcacacaaaatctgcaaggagctcctggaacagggaccagaactaagagcatcactcagatttgcccctctgggcactgaactgggagatttgaacttcataatctgcagctacacgtta

SEQ ID NO: 47442 - DNA, 600 bp, Chicken  19866894291585_1
actcttggcaagcggcgattgataactagttttctcttccctctcccagcatctgcagaaaggacatgtgacaggaataaaaaatctaattattttagcaggccacaatagaaactgtggattaaagatgcaatgggcacctcagtaggcagaaaccgactgttctgaggacgcctaaaataccctcattgttttcaagaaattcctgaattgtttgagtccctccatgtatccctttggaacaacactttgggtaaatcagcataaaaggtgtcagactgagaaacctcattactcctwcagcttcaggacagccagagcctgctgctgagggaagctcaggctttggggagagtctgggtctaaatctgactggaattctctctgctctgggtctctgagccagagctttacactgctgctgtaagaagagagctagaagaggggaattcaggctgccacacataataggttagctgttctgttgtgtgctgcaggactaatcaatttgaatgcctttggcttcggacgggagcgaggtgggtgagaacagtaggcgtttgtgttttggacaggcaggtgtctgaaaaccagtgtgag

SEQ ID NO: 47443 - DNA, 600 bp, Chicken  19866894291592_1
gatcacagcacaatgctccacaaccttagtagcgggatattagtttaatacaaataataattattatagttcagcattccatcaaattaaaatatactagctctctgtgtctaaaatcatactgaggtcaaacttacagctcagtgaaaatttgagttgctaaatttgaaaaatcttctgtcctccatcatctgatttgagttattgaagcattttgtgattttctaccatatgtgttaagtttatttccagagggattggattgggattggatactgaaacaaagaatcaataagtcartcagttccagtaacagtcattagtacactttttaacctccataaacagtacgttcagttttgataacttccttggtgtctaattacttttctaagacaagattagtgtgaccatcactgtattgtcactgagttaacaatgctcttttacagcagaaattctaatttctaaatctaaagggtgcttttgtctatctacatttggttaatgcataatctcctttgaggttattacgtttggtgacctgatggttacctacttgagatatacattaaaagatagcagtgtataattttcaca

SEQ ID NO: 47444 - DNA, 600 bp, Chicken  19866894291595_1
ttatgagtagaaaaagatgccttttagatacttctttgttttgcttgcatcaaagacatctcacaagatacttgtttggccccatccaagacagggcctctgatatttcagctttaatatcattttcaactccttcaagacatagcaaagcaagctcatgagcctttttcaaaaaatgatctgtatcttctgcccacttacagtcatgctttcattattttagtacttagatttgtatctgagaacaacttcagtatcatcgtagtcatgcactggaacagtaagaaggctcagagaccktcagctgttctttgtctaatattccttactacagtgtctgttccaaaagtaatgcctcttattttattactttggcccacctcactcagaggtgagtgctgggggtatggctggagaggctgaactttcccaccaatattccattacattttgttgccattcaacagayggcagcagagggaaagtctgacaaaatagcgtagtgtgttatgaagcaaaggggtgcaattgaattcctccatgtggaaaaactgcacccattgacatgcaatgaagctcactggatatttatggagacca

SEQ ID NO: 47445 - DNA, 600 bp, Chicken  19866894291595_2
caaaaaatgatctgtatcttctgcccacttacagtcatgctttcattattttagtacttagatttgtatctgagaacaacttcagtatcatcgtagtcatgcactggaacagtaagaaggctcagagaccktcagctgttctttgtctaatattccttactacagtgtctgttccaaaagtaatgcctcttattttattactttggcccacctcactcagaggtgagtgctgggggtatggctggagaggctgaactttcccaccaatattccattacattttgttgccattcaacagayggcagcagagggaaagtctgacaaaatagcgtagtgtgttatgaagcaaaggggtgcaattgaattcctccatgtggaaaaactgcacccattgacatgcaatgaagctcactggatatttatggagaccaaacagtggaagtgagcacagtaaggcaattggtggtgtgtttcagcagtggcaacaacaacagtgagtcaccttcactgctacagatttttattagcatggtattgaggttcttgttcattgttgatgaaaatgcatacctaattgtagtgactatgttgaaaaataat

SEQ ID NO: 47446 - DNA, 600 bp, Chicken  19866894291597_1
gtgagacagatctatgcagggtaatggccagactgtattcccagagacagctcagggagaggcggcccaacgttcagaggcaatgatacaagttgcagcttgctaagtcccttaatggataaccttgtagtttgtttgttaatgggaagggtctgtgtctttgtaccaaataggtaagggaggttccaaaagcctttgtactgcattgaatagataaggaaggtttcagaagtctttgtatggaatacgtacttacctctgggaaggcctctgaatgaatataaactgaagaccttttcwttcaagacatgcatgataagagtatccccacacacccagtgctgatactaaagacagcctgctttctaacattctgacttcagtcttagagtttcctactgatggctttatggtaacagcaggaagttctgcgcatggaatactgtggatatgtgtgctaaccctctcttctgggctcatccagtttgtaggatctgaagggatcccaggacaatttcccacaaaataagtattttcagtggcacttctggttaatttttcttcctctacgtttcctttttcctaaatcattctgtatca

SEQ ID NO: 47447 - DNA, 600 bp, Chicken  19866894291608_1
attaagtatcacttttatttggaagctgaagtcagagttaatggagtcttgaagaatacgtgcacagattctgtttccttttataccagcaaacatcagcagtggtgcaactgacttaaaaagtgttacttcgggtgtaaagagatgcaactgaggtcagattctggcctgtcctccctgctaatggtgctgcagaaacagacagaagcataggattaagaagtcataggtggccaaattctgctgtcagcccaaagaaaagatggagacacacgtttaatatattttattttagaaggygattcratamaatgtgtccgccgtcacaaatccctcgctggatggctgttggcatgcagaagccctcgtgcttggtgcttagggataaaacacctgtttcaaaagcacagctgctgcctctttgccagagaagaaatatccttacctgttagcagcacgatgcttaggacayaaacttatttcattagaaggctgctttcttaaggcattggtcacccgctgcgtacatgataagtcttaagtactgtgtgtcagtcgtgagttttaccagaagagggcagacacagacacacgtgtgca

SEQ ID NO: 47448 - DNA, 600 bp, Chicken  19866894291608_10
atgaggtattgcattgctrttggggacaggcccaatcccaatctcactcctctggggtgccgagcactgcatagttgctctcagcggcctcaggcagtgagtgcctgctttgtcttctgcccccagcactgcctttctgggggctgccagggcagaagtggctcagccactgtttgttatgcaaatctgcccttggttctgctttgctttgtgaagctgtgacagcctccacctgctagcgrgtgccccggcttctccacaaaaaccttgaaaagatttaccctgawtttctctgccacwattcgtgccctcccccttgcacaaggcagaatagatttagatgaggagagcaggcagggctgggaggacaccatgggggaggtgggactgcaagggaagagttaacccttttctggcctcctcgctactcttagggctgggctggcattttctttgtctcaccagcaagtctgcatcgtcacctagcacacagcacagcaggcactggcacggcactgcttcccagcacccagggaggggtgcctgggaggaacatcccagtgtctccagcagtatctcccagatacctcttgtccagcc

SEQ ID NO: 47449 - DNA, 600 bp, Chicken  19866894291608_2
tatcacttttatttggaagctgaagtcagagttaatggagtcttgaagaatacgtgcacagattctgtttccttttataccagcaaacatcagcagtggtgcaactgacttaaaaagtgttacttcgggtgtaaagagatgcaactgaggtcagattctggcctgtcctccctgctaatggtgctgcagaaacagacagaagcataggattaagaagtcataggtggccaaattctgctgtcagcccaaagaaaagatggagacacacgtttaatatattttattttagaaggygattcratamaatgtgtccgccgtcacaaatccctcgctggatggctgttggcatgcagaagccctcgtgcttggtgcttagggataaaacacctgtttcaaaagcacagctgctgcctctttgccagagaagaaatatccttacctgttagcagcacgatgcttaggacayaaacttatttcattagaaggctgctttcttaaggcattggtcacccgctgcgtacatgataagtcttaagtactgtgtgtcagtcgtgagttttaccagaagagggcagacacagacacacgtgtgcacatgta

SEQ ID NO: 47450 - DNA, 600 bp, Chicken  19866894291608_3
acttttatttggaagctgaagtcagagttaatggagtcttgaagaatacgtgcacagattctgtttccttttataccagcaaacatcagcagtggtgcaactgacttaaaaagtgttacttcgggtgtaaagagatgcaactgaggtcagattctggcctgtcctccctgctaatggtgctgcagaaacagacagaagcataggattaagaagtcataggtggccaaattctgctgtcagcccaaagaaaagatggagacacacgtttaatatattttattttagaaggygattcratamaatgtgtccgccgtcacaaatccctcgctggatggctgttggcatgcagaagccctcgtgcttggtgcttagggataaaacacctgtttcaaaagcacagctgctgcctctttgccagagaagaaatatccttacctgttagcagcacgatgcttaggacayaaacttatttcattagaaggctgctttcttaaggcattggtcacccgctgcgtacatgataagtcttaagtactgtgtgtcagtcgtgagttttaccagaagagggcagacacagacacacgtgtgcacatgtacaca

SEQ ID NO: 47451 - DNA, 600 bp, Chicken  19866894291608_4
cctccctgctaatggtgctgcagaaacagacagaagcataggattaagaagtcataggtggccaaattctgctgtcagcccaaagaaaagatggagacacacgtttaatatattttattttagaaggygattcratamaatgtgtccgccgtcacaaatccctcgctggatggctgttggcatgcagaagccctcgtgcttggtgcttagggataaaacacctgtttcaaaagcacagctgctgcctctttgccagagaagaaatatccttacctgttagcagcacgatgcttaggacayaaacttatttcattagaaggctgctttcttaaggcattggtcacccgctgcgtacatgataagtcttaagtactgtgtgtcagtcgtgagttttaccagaagagggcagacacagacacacgtgtgcacatgtacacacatacacacacacccaaagacccactggaatgctactcattgatacggaaggaaaacacatatacacatcagatctttacagtgctacccttaaagactgaaagttaaacatgtaacctgcagagccagcctgtaacccaaagatgagcacagactgtaccc

SEQ ID NO: 47452 - DNA, 600 bp, Chicken  19866894291608_5
gctaataacctggctcggaaagaataaaatcaatgaagacaggactgaggtagatttggctgtatctgatgcaatgtcaccgtataggtaggaagataaatgggatatccaactaacaggcaggtcactgcaagataaatcctcctgcagaaggacatcccactgcactcttggcactacaggtgatagaaaaagtcactctgtagcagaagcaccacgacactaatggccctaaactcttgcccagtggaactgtacatcaaggtcagagggtgggtgactggctgaggcccagcgagygcttgagytctcgttaaaatgatcaggaaaacaaaaatgatagggctctggtgtgatctttccagtgtggacagctgcctgttgctagtctgagaacatcagagcttttatgtgctggccaacaaacagccagcagccttcttctaggctgtgataacagacacagatatgctcttatcctctgtcttggctaatggagagagggtaacctcgtgcatgcacacaaagcattctgtgtgctacaaagctaccagagagtctaaatgcctgaactctgacctttgtgatgatctctggcta

SEQ ID NO: 47453 - DNA, 600 bp, Chicken  19866894291608_6
cctggctcggaaagaataaaatcaatgaagacaggactgaggtagatttggctgtatctgatgcaatgtcaccgtataggtaggaagataaatgggatatccaactaacaggcaggtcactgcaagataaatcctcctgcagaaggacatcccactgcactcttggcactacaggtgatagaaaaagtcactctgtagcagaagcaccacgacactaatggccctaaactcttgcccagtggaactgtacatcaaggtcagagggtgggtgactggctgaggcccagcgagygcttgagytctcgttaaaatgatcaggaaaacaaaaatgatagggctctggtgtgatctttccagtgtggacagctgcctgttgctagtctgagaacatcagagcttttatgtgctggccaacaaacagccagcagccttcttctaggctgtgataacagacacagatatgctcttatcctctgtcttggctaatggagagagggtaacctcgtgcatgcacacaaagcattctgtgtgctacaaagctaccagagagtctaaatgcctgaactctgacctttgtgatgatctctggctattacagtc

SEQ ID NO: 47454 - DNA, 600 bp, Chicken  19866894291608_7
gtttgattgctcttgctctctgggcacagccctctgccttatcagaaagtgccagtgtcagtaatgtcaagaatccccacctgcatcatttgatttgtaagatgaacaaccttcccctcccttcctgtcttttctgaaattcttagcaacacagctctcatggaatcaagccagtgattgatgatttaccttctctcctttgctggcaactctgctcccggggcctaattactattctaataatatccatctccatcctacacggcctctcgcccactgagatgaggtattgcattgctrttggggacaggcccaatcccaatctcactcctctggggtgccgagcactgcatagttgctctcagcggcctcaggcagtgagtgcctgctttgtcttctgcccccagcactgcctttctgggggctgccagggcagaagtggctcagccactgtttgttatgcaaatctgcccttggttctgctttgctttgtgaagctgtgacagcctccacctgctagcgrgtgccccggcttctccacaaaaaccttgaaaagatttaccctgawtttctctgccacwattcgtgccctcccccttg

SEQ ID NO: 47455 - DNA, 600 bp, Chicken  19866894291608_8
cctaattactattctaataatatccatctccatcctacacggcctctcgcccactgagatgaggtattgcattgctrttggggacaggcccaatcccaatctcactcctctggggtgccgagcactgcatagttgctctcagcggcctcaggcagtgagtgcctgctttgtcttctgcccccagcactgcctttctgggggctgccagggcagaagtggctcagccactgtttgttatgcaaatctgcccttggttctgctttgctttgtgaagctgtgacagcctccacctgctagcgrgtgccccggcttctccacaaaaaccttgaaaagatttaccctgawtttctctgccacwattcgtgccctcccccttgcacaaggcagaatagatttagatgaggagagcaggcagggctgggaggacaccatgggggaggtgggactgcaagggaagagttaacccttttctggcctcctcgctactcttagggctgggctggcattttctttgtctcaccagcaagtctgcatcgtcacctagcacacagcacagcaggcactggcacggcactgcttcccagcacccagggaggggtg

SEQ ID NO: 47456 - DNA, 600 bp, Chicken  19866894291608_9
ctcgcccactgagatgaggtattgcattgctrttggggacaggcccaatcccaatctcactcctctggggtgccgagcactgcatagttgctctcagcggcctcaggcagtgagtgcctgctttgtcttctgcccccagcactgcctttctgggggctgccagggcagaagtggctcagccactgtttgttatgcaaatctgcccttggttctgctttgctttgtgaagctgtgacagcctccacctgctagcgrgtgccccggcttctccacaaaaaccttgaaaagatttaccctgawtttctctgccacwattcgtgccctcccccttgcacaaggcagaatagatttagatgaggagagcaggcagggctgggaggacaccatgggggaggtgggactgcaagggaagagttaacccttttctggcctcctcgctactcttagggctgggctggcattttctttgtctcaccagcaagtctgcatcgtcacctagcacacagcacagcaggcactggcacggcactgcttcccagcacccagggaggggtgcctgggaggaacatcccagtgtctccagcagtatctcccagatac

SEQ ID NO: 47457 - DNA, 599 bp, Chicken  19866894291612_1
  misc_feature (1)..(72): n is any nucleotide
nnnnnnnnnnnnnnnnnnnnnnnnnnnnnnnnnnnnnnnnnnnnnnnnnnnnnnnnnnnnnnnnnnnnnnnnacatatttgggtgacattaactgggtacgcaaaaaaaaccaacacccacttgatgtgtatttgtaccatcacagaatcaaagaattgtaggggttggaagtgacctctggagaccactaatatcagaatagtttcaaatatggacacacatttacaactaaattacaaagctgttgatgagatccatatcctaacaggaaaaattccatttgtgcttctgttccttcrctgcacaatagtcttcatgttctactggagggtggattggtggcagacagatgttcctatttaaagttcagatagasgcttttgcttcctctaacctccaagaattttagcatcccgcaggcactgactgggagcccaggcaaaaaagaccaaagctacgcatcccaggtgccagtaggtccctctgcacagaatgattgacatgggagataagtcccctgtgcccagtttcatgccattctctatcaccttattaattccrgcccttagcctgtgagttaccagtacagcaacatgca

SEQ ID NO: 47458 - DNA, 600 bp, Chicken  19866894291612_2
tttgggtgacattaactgggtacgcaaaaaaaaccaacacccacttgatgtgtatttgtaccatcacagaatcaaagaattgtaggggttggaagtgacctctggagaccactaatatcagaatagtttcaaatatggacacacatttacaactaaattacaaagctgttgatgagatccatatcctaacaggaaaaattccatttgtgcttctgttccttcrctgcacaatagtcttcatgttctactggagggtggattggtggcagacagatgttcctatttaaagttcagatagasgcttttgcttcctctaacctccaagaattttagcatcccgcaggcactgactgggagcccaggcaaaaaagaccaaagctacgcatcccaggtgccagtaggtccctctgcacagaatgattgacatgggagataagtcccctgtgcccagtttcatgccattctctatcaccttattaattccrgcccttagcctgtgagttaccagtacagcaacatgcattaaaatcttccagatagcatcagcgctgtttaatttaagcctccctcmtttggtcccatggttttaaaaataaacaa

SEQ ID NO: 47459 - DNA, 600 bp, Chicken  19866894291612_3
ctaacaggaaaaattccatttgtgcttctgttccttcrctgcacaatagtcttcatgttctactggagggtggattggtggcagacagatgttcctatttaaagttcagatagasgcttttgcttcctctaacctccaagaattttagcatcccgcaggcactgactgggagcccaggcaaaaaagaccaaagctacgcatcccaggtgccagtaggtccctctgcacagaatgattgacatgggagataagtcccctgtgcccagtttcatgccattctctatcaccttattaattccrgcccttagcctgtgagttaccagtacagcaacatgcattaaaatcttccagatagcatcagcgctgtttaatttaagcctccctcmtttggtcccatggttttaaaaataaacaagaattttaacaaaacaaggctaagacactgtgcttgtaaaacctccttctcagtgctgcctccacagataaggcacggggactgggcactgcagaaagctcctatccaaggggccacctgacaaaaacaaaaagacttactgactaaaggagcaagtgggtgcagtggattcactactcaaagca

SEQ ID NO: 47460 - DNA, 600 bp, Chicken  19866894291612_4
agatgttcctatttaaagttcagatagasgcttttgcttcctctaacctccaagaattttagcatcccgcaggcactgactgggagcccaggcaaaaaagaccaaagctacgcatcccaggtgccagtaggtccctctgcacagaatgattgacatgggagataagtcccctgtgcccagtttcatgccattctctatcaccttattaattccrgcccttagcctgtgagttaccagtacagcaacatgcattaaaatcttccagatagcatcagcgctgtttaatttaagcctccctcmtttggtcccatggttttaaaaataaacaagaattttaacaaaacaaggctaagacactgtgcttgtaaaacctccttctcagtgctgcctccacagataaggcacggggactgggcactgcagaaagctcctatccaaggggccacctgacaaaaacaaaaagacttactgactaaaggagcaagtgggtgcagtggattcactactcaaagcaaaaggactctcactgttttccttactaccacctgaagaacagcacagacctccttgttccaggaatggagtttttcagtgagatcc

SEQ ID NO: 47461 - DNA, 600 bp, Chicken  19866894291614_1
gttgatgatattggagaggattttgttacagtgatttggcatgagctgtaagcaaaatatagatttgatgggaaaatttgtaggatggcaaccattagtgtgaatttatgctgattcatactcactcaaccttttgctctcaattaccactttattctaagagaaatttcaaatcagaaactatatcgtcaaagacttttccattgcttagactggactgagtgggcactatgacttcttccatctcacatttgaaaagccatgatctttattggaattttcatgactgccttcatcagkccagtmgtgcttttacaggcttgaaggggttgtgcctctccaatggccagatatgaaaaatccagctactgccgaacaacttgtaaaacagaggaaatagtggaataaaacagctgtgagacttcttttgtctgtgctgttcctggaggtgaaggaaaagacagagtggtatggttctgtttctttagaacagaagactaaaggtagctctgaaaatccagtagtagctcctcrtctagaagaaagggacatattttttgtttccttcataaattctaatgttttccatatttttccatc

SEQ ID NO: 47462 - DNA, 600 bp, Chicken  19866894291614_2
gatattggagaggattttgttacagtgatttggcatgagctgtaagcaaaatatagatttgatgggaaaatttgtaggatggcaaccattagtgtgaatttatgctgattcatactcactcaaccttttgctctcaattaccactttattctaagagaaatttcaaatcagaaactatatcgtcaaagacttttccattgcttagactggactgagtgggcactatgacttcttccatctcacatttgaaaagccatgatctttattggaattttcatgactgccttcatcagkccagtmgtgcttttacaggcttgaaggggttgtgcctctccaatggccagatatgaaaaatccagctactgccgaacaacttgtaaaacagaggaaatagtggaataaaacagctgtgagacttcttttgtctgtgctgttcctggaggtgaaggaaaagacagagtggtatggttctgtttctttagaacagaagactaaaggtagctctgaaaatccagtagtagctcctcrtctagaagaaagggacatattttttgtttccttcataaattctaatgttttccatatttttccatcagttgt

SEQ ID NO: 47463 - DNA, 600 bp, Chicken  19866894291614_3
cttcttccatctcacatttgaaaagccatgatctttattggaattttcatgactgccttcatcagkccagtmgtgcttttacaggcttgaaggggttgtgcctctccaatggccagatatgaaaaatccagctactgccgaacaacttgtaaaacagaggaaatagtggaataaaacagctgtgagacttcttttgtctgtgctgttcctggaggtgaaggaaaagacagagtggtatggttctgtttctttagaacagaagactaaaggtagctctgaaaatccagtagtagctcctcrtctagaagaaagggacatattttttgtttccttcataaattctaatgttttccatatttttccatcagttgtctccttccttctcaagtgaatactctgctgtactgcatgtagtgtggttcttgtgttcatttaacatttattctctgctttgggaaacamgcaatgcaaamaacacctatagtcttttcttcatacaggaatagaactgttcaaactagtatgcaaagataataaaatgtgagtaaagaccttcagctacctaataatgaaagaatgagaraagttttgtaagaccag

SEQ ID NO: 47464 - DNA, 600 bp, Chicken  19866894291614_4
atagtggaataaaacagctgtgagacttcttttgtctgtgctgttcctggaggtgaaggaaaagacagagtggtatggttctgtttctttagaacagaagactaaaggtagctctgaaaatccagtagtagctcctcrtctagaagaaagggacatattttttgtttccttcataaattctaatgttttccatatttttccatcagttgtctccttccttctcaagtgaatactctgctgtactgcatgtagtgtggttcttgtgttcatttaacatttattctctgctttgggaaacamgcaatgcaaamaacacctatagtcttttcttcatacaggaatagaactgttcaaactagtatgcaaagataataaaatgtgagtaaagaccttcagctacctaataatgaaagaatgagaraagttttgtaagaccagagggaagcataaacattttttaaagaaaacattaaaaaccttaatgactgaatccaaaataatttttcaggaagagcagtaacacagagagtactgaaatcaaatgttcttttgcatttcttagtctattttagtacaagagttactctaatttgytgcctc

SEQ ID NO: 47465 - DNA, 600 bp, Chicken  19866894291614_5
aaacagctgtgagacttcttttgtctgtgctgttcctggaggtgaaggaaaagacagagtggtatggttctgtttctttagaacagaagactaaaggtagctctgaaaatccagtagtagctcctcrtctagaagaaagggacatattttttgtttccttcataaattctaatgttttccatatttttccatcagttgtctccttccttctcaagtgaatactctgctgtactgcatgtagtgtggttcttgtgttcatttaacatttattctctgctttgggaaacamgcaatgcaaamaacacctatagtcttttcttcatacaggaatagaactgttcaaactagtatgcaaagataataaaatgtgagtaaagaccttcagctacctaataatgaaagaatgagaraagttttgtaagaccagagggaagcataaacattttttaaagaaaacattaaaaaccttaatgactgaatccaaaataatttttcaggaagagcagtaacacagagagtactgaaatcaaatgttcttttgcatttcttagtctattttagtacaagagttactctaatttgytgcctcagctcccatgt

SEQ ID NO: 47466 - DNA, 600 bp, Chicken  19866894291614_6
ccagtagtagctcctcrtctagaagaaagggacatattttttgtttccttcataaattctaatgttttccatatttttccatcagttgtctccttccttctcaagtgaatactctgctgtactgcatgtagtgtggttcttgtgttcatttaacatttattctctgctttgggaaacamgcaatgcaaamaacacctatagtcttttcttcatacaggaatagaactgttcaaactagtatgcaaagataataaaatgtgagtaaagaccttcagctacctaataatgaaagaatgagaraagttttgtaagaccagagggaagcataaacattttttaaagaaaacattaaaaaccttaatgactgaatccaaaataatttttcaggaagagcagtaacacagagagtactgaaatcaaatgttcttttgcatttcttagtctattttagtacaagagttactctaatttgytgcctcagctcccatgtagtatcagcggatcagattttttagactcagcaggtcaggaatctgacagtagcaatgatcattaacagctttgttttctctaaattgcatttctggaactgttttcccc

SEQ ID NO: 47467 - DNA, 600 bp, Chicken  19866894291614_7
aaacamgcaatgcaaamaacacctatagtcttttcttcatacaggaatagaactgttcaaactagtatgcaaagataataaaatgtgagtaaagaccttcagctacctaataatgaaagaatgagaraagttttgtaagaccagagggaagcataaacattttttaaagaaaacattaaaaaccttaatgactgaatccaaaataatttttcaggaagagcagtaacacagagagtactgaaatcaaatgttcttttgcatttcttagtctattttagtacaagagttactctaatttgytgcctcagctcccatgtagtatcagcggatcagattttttagactcagcaggtcaggaatctgacagtagcaatgatcattaacagctttgttttctctaaattgcatttctggaactgttttcccctatggagcaggagttctgagctactgtatttatttcctgtcctcctgtgatgtagggaataaaatgcttctttgaatgtttgttctttgttgagtgcagcatggaggcgtttgagaatcaacagtcccttgtgtttacagaagcagtcacttccccactgcatgctgtccagg

SEQ ID NO: 47468 - DNA, 599 bp, Chicken  19866894291618_1
  misc_feature (1)..(77): n is any nucleotide
nnnnnnnnnnnnnnnnnnnnnnnnnnnnnnnnnnnnnnnnnnnnnnnnnnnnnnnnnnnnnnnnnnnnnnnnnnnnntgtttcttttttattctcctcccatttgtcaggtctccataactgatgttgttgttgtttctttgcagatctttaaaagctgtgagtactgaggcagctgcttagggcagtgtactagttatataaaaagacagctgtaaaaacatgtgcagtgacaattaagcaagaactgttagagacatgaagtcgttaattctaattgcagcaatgctcgtcttaaaarttctttttaatatctgaaatggtgaaaaagstcctggaaacaggagatttacttcctccatttctgtgctgctgcaaataagggggctgtgtttgccttattactgrctgtattgaggaactgttatctttagacatccctctttgatcttctgatctctcaggcaccttagcaggctccgcttcagatgcagcagaagcaaaaggctaagtttccagccaaaggattgtttctcaccaaagcaacttccactttcttcattgattattatgaagaccatactgtgtatgccttcaata

SEQ ID NO: 47469 - DNA, 599 bp, Chicken  19866894291618_2
  misc_feature (1)..(46): n is any nucleotide
nnnnnnnnnnnnnnnnnnnnnnnnnnnnnnnnnnnnnnnnnnnnnntgtttcttttttattctcctcccatttgtcaggtctccataactgatgttgttgttgtttctttgcagatctttaaaagctgtgagtactgaggcagctgcttagggcagtgtactagttatataaaaagacagctgtaaaaacatgtgcagtgacaattaagcaagaactgttagagacatgaagtcgttaattctaattgcagcaatgctcgtcttaaaarttctttttaatatctgaaatggtgaaaaagstcctggaaacaggagatttacttcctccatttctgtgctgctgcaaataagggggctgtgtttgccttattactgrctgtattgaggaactgttatctttagacatccctctttgatcttctgatctctcaggcaccttagcaggctccgcttcagatgcagcagaagcaaaaggctaagtttccagccaaaggattgtttctcaccaaagcaacttccactttcttcattgattattatgaagaccatactgtgtatgccttcaataagcttttcaggaaaccagcatactggggcag

SEQ ID NO: 47470 - DNA, 600 bp, Chicken  19866894291618_3
aggtctccataactgatgttgttgttgtttctttgcagatctttaaaagctgtgagtactgaggcagctgcttagggcagtgtactagttatataaaaagacagctgtaaaaacatgtgcagtgacaattaagcaagaactgttagagacatgaagtcgttaattctaattgcagcaatgctcgtcttaaaarttctttttaatatctgaaatggtgaaaaagstcctggaaacaggagatttacttcctccatttctgtgctgctgcaaataagggggctgtgtttgccttattactgrctgtattgaggaactgttatctttagacatccctctttgatcttctgatctctcaggcaccttagcaggctccgcttcagatgcagcagaagcaaaaggctaagtttccagccaaaggattgtttctcaccaaagcaacttccactttcttcattgattattatgaagaccatactgtgtatgccttcaataagcttttcaggaaaccagcatactggggcagttagcagcatcttcaagcgtttttcagtacctcacaaactacgcactgattattcagtcatcttaatttcattaaaa

SEQ ID NO: 47471 - DNA, 600 bp, Chicken  19866894291618_4
tttccagccaaaggattgtttctcaccaaagcaacttccactttcttcattgattattatgaagaccatactgtgtatgccttcaataagcttttcaggaaaccagcatactggggcagttagcagcatcttcaagcgtttttcagtacctcacaaactacgcactgattattcagtcatcttaatttcattaaaatccagagtagttttccaacaagcaaccactctttaactagctgatacagagctgaatgacaaagatatgcttaagcaaaccagatgaaaacacacaaggaatcytgctcttttcagttgcaggatgaaagctgatatattacatgtctgcatgcaataaaactttttgttttaatgttcctagggaagcttgaaactaaatccttgcaaaacatctggttgaaaacttcagcattttcatattaaatgcttcctgaaatctgtttgtgtaactgtaccatgcagatttgcttcacagctttrtaataaattgtttctaactcattttgttatccttgcactgactttgatatctcctgctgctaacataacaccagtaatagtgctactccaagttcaatagtt

SEQ ID NO: 47472 - DNA, 600 bp, Chicken  19866894291618_5
cagagtagttttccaacaagcaaccactctttaactagctgatacagagctgaatgacaaagatatgcttaagcaaaccagatgaaaacacacaaggaatcytgctcttttcagttgcaggatgaaagctgatatattacatgtctgcatgcaataaaactttttgttttaatgttcctagggaagcttgaaactaaatccttgcaaaacatctggttgaaaacttcagcattttcatattaaatgcttcctgaaatctgtttgtgtaactgtaccatgcagatttgcttcacagctttrtaataaattgtttctaactcattttgttatccttgcactgactttgatatctcctgctgctaacataacaccagtaatagtgctactccaagttcaatagttaactgatatcccacgcacaaattctaaagacaaccatataatttctaggtttcagcttcgtactgtcttacattcagtcctaaagctttcattctctgttccttaaaagtatttaaatcctgttaccccataggtttgtctctccaaatgtggtgttcagtatcatgtttcaactttgttggcacaatagatcccttc

SEQ ID NO: 47473 - DNA, 600 bp, Chicken  19866894291621_1
aagagcaaggagacaaacacagacaacaagggtctattggcattacaatgtctgtcatgttaaatgaacgtaattcttcagactctgcagaaatgttacttattcccttttcctgcatgtactatactgttcaggttgcatttcaccttttgctgtgcagtaccttctaaaaatgtgaaggtatccactatcgatattaaaatggtatcgatgtcaatgacattcctagcagagacagttcatttaaggatatttaattacaggatctgcctgccttagaagcttccacaagtcttgtaytctgaatgtctagaatctgtgatagagaatgctcttgcaatactcaagacgtaaatctccaggcttatttttaggctcttatttcttaaaaatgttaagtaaaaagcattccaagtagatatactcawttctcattaaattattgcttttatttatttatttatttaagcttatgactgcacagggtaaggaagttgtccttaaaactgagaagacttctacataaacattagtaagcatgggcaaaatgatggtgagcagtgtgttcagtggactcagtccagttcccaaaggactaca

SEQ ID NO: 47474 - DNA, 600 bp, Chicken  19866894291621_2
gttcaggttgcatttcaccttttgctgtgcagtaccttctaaaaatgtgaaggtatccactatcgatattaaaatggtatcgatgtcaatgacattcctagcagagacagttcatttaaggatatttaattacaggatctgcctgccttagaagcttccacaagtcttgtaytctgaatgtctagaatctgtgatagagaatgctcttgcaatactcaagacgtaaatctccaggcttatttttaggctcttatttcttaaaaatgttaagtaaaaagcattccaagtagatatactcawttctcattaaattattgcttttatttatttatttatttaagcttatgactgcacagggtaaggaagttgtccttaaaactgagaagacttctacataaacattagtaagcatgggcaaaatgatggtgagcagtgtgttcagtggactcagtccagttcccaaaggactacagcaccgcattaggcaaaatatttccacaactgcagaacactaagcagaaatagaaaaagmatgaacatcctttgatcttttctctgagcaaagatactcataagagtatgggaaatttcaccttcttc

SEQ ID NO: 47475 - DNA, 600 bp, Chicken  19866894291621_3
aggcttatttttaggctcttatttcttaaaaatgttaagtaaaaagcattccaagtagatatactcawttctcattaaattattgcttttatttatttatttatttaagcttatgactgcacagggtaaggaagttgtccttaaaactgagaagacttctacataaacattagtaagcatgggcaaaatgatggtgagcagtgtgttcagtggactcagtccagttcccaaaggactacagcaccgcattaggcaaaatatttccacaactgcagaacactaagcagaaatagaaaaagmatgaacatcctttgatcttttctctgagcaaagatactcataagagtatgggaaatttcaccttcttcttgccaacaccttgtaagtctggtgttcatctttcttgccgggccttctcctgtacatttcctgaacacttacttgtatcagatttactcgaaatgtgtttttgtgttattatttttcttaaaattaatctaacaggaaacagatggcatctaagtaattcctcctctaaagtaagcaaaacaaatagcgaaacagaatgacgactcaaacatttgcttaggtcaagttatt

SEQ ID NO: 47476 - DNA, 600 bp, Chicken  19866894291624_1
tgtaaacatctcttacagaaagcctgagcgccgctccttccgtgcctatgctgctgtgctgtacattgatcccagaatgagaatctttataaatggacacaaggtacaaaccaagagactttcctgctgcttgtacaagccaaggtaagcattagagccaaagtctgcttgcatgtgcaggacctttcttacaaaaaaaggtttagcattttgctatgtagttgtaggatgtatcctacgtaactccacattgaagccacagaaacagatcataagagacagggttgtcacacaggacartgtcagatgctttgtatgggtccagacagatgatgttagttgctcttcctatatttaccaaggctgtaactccatcagaaggccaccaaatttggcaggcacattttgcccttagtgaagctgtgttggctgtcaccaatcacctctttattttccatgggcttcagcatagtttccaagaggatgtgctctgatgtgttgccaggcacagaggtgagctgaccrccctccagttcccttggtcttccatttttttcatagaacagggaaatacctgtggtacatcctagagttattaca

SEQ ID NO: 47477 - DNA, 600 bp, Chicken  19866894291624_2
aggatgtatcctacgtaactccacattgaagccacagaaacagatcataagagacagggttgtcacacaggacartgtcagatgctttgtatgggtccagacagatgatgttagttgctcttcctatatttaccaaggctgtaactccatcagaaggccaccaaatttggcaggcacattttgcccttagtgaagctgtgttggctgtcaccaatcacctctttattttccatgggcttcagcatagtttccaagaggatgtgctctgatgtgttgccaggcacagaggtgagctgaccrccctccagttcccttggtcttccatttttttcatagaacagggaaatacctgtggtacatcctagagttattacagaaggaaaccacatggagcactttgaaatggttattttgaaaattagcttttatcagtggttcaccaaggtttgaatagaggttaggaaaggctgttccctgtcttccttttaaattcccttaaacatggcacatctgaaagtgagatgaggtgtgctgtcagctgtctttaaagagaatataaaaggttctaaggatgagaggggaataaagggaacgtgtatt

SEQ ID NO: 47478 - DNA, 600 bp, Chicken  19866894291624_3
aggtttgaatagaggttaggaaaggctgttccctgtcttccttttaaattcccttaaacatggcacatctgaaagtgagatgaggtgtgctgtcagctgtctttaaagagaatataaaaggttctaaggatgagaggggaataaagggaacgtgtatttaggtctgcctgacatgatagcattcttctgtccgtggcagcacgcacacaggctgcattctgaggtagtcctatgccttaataacacactgctgttttgtactgcagtagagtttaaacactgtgggcccaccatcagctycctgggtacttttcctagttgctgttagttgtcaagctgctgattagtgccctttgaacctggccaattttcagcttacataagtctgcctgtcaagctcatacttactcagcttctttaattagaatttggaaagtggtgtcagaaacttgagaaaagtcaagcragattgcatccactgctctccccttctcaactttttcactgtcaaaggcagtcagaatgacttgctgctgtaaatcctggtttgtttggttgatagtatcttacactcagaatttctgtgttttggctatgtgt

SEQ ID NO: 47479 - DNA, 600 bp, Chicken  19866894291624_4
cctgacatgatagcattcttctgtccgtggcagcacgcacacaggctgcattctgaggtagtcctatgccttaataacacactgctgttttgtactgcagtagagtttaaacactgtgggcccaccatcagctycctgggtacttttcctagttgctgttagttgtcaagctgctgattagtgccctttgaacctggccaattttcagcttacataagtctgcctgtcaagctcatacttactcagcttctttaattagaatttggaaagtggtgtcagaaacttgagaaaagtcaagcragattgcatccactgctctccccttctcaactttttcactgtcaaaggcagtcagaatgacttgctgctgtaaatcctggtttgtttggttgatagtatcttacactcagaatttctgtgttttggctatgtgtgattgccatgtgctgcttcaccctgtgccacagcccagaagggtactatagaaggaaagcaaaagaggagagtctttctttagagtgtccagactgtatccttctgctcttgtactcctaatgccagccatggatggctgcatggctgctgaaacttcctcgtaga

SEQ ID NO: 47480 - DNA, 486 bp, Chicken  19866894291627_1
actgtcacaagttcatgggaccagataggctccaccctagggtgctgacggagctggtgggggtgattgccaagccgctttctgccatctaccagcattcctggttatctggagaggtcccaggggactggaggcttgcttatgtgactctcatctacaagaagggccagaaggaggatccagggaactacaggcctgtcagcctgaccttgttaccagggaaagttatggagcaaatcatctcagatgagatcacacagcacgtgcgtggtgtccaggggatcaggcccagccagcacrggttcatgaaaggcaggttgtgcttgaccaacctcacctccttcaatgactgggcgaccagactggtagatgagggaaaagctgttgatgttgtctacctagacttcagcaaagcctttgacatggtctctcacagtattctcctggggaaactgcctgtggcctgggcaggtatacccttctttg

SEQ ID NO: 47481 - DNA, 600 bp, Chicken  19866894291633_1
caaaacctgagtgcagtgaaatagcagcaacacaattttcagaactgaaataacctttgatttctacaaagacacatatagaccaagaaatggtaaaagcaatgcaataaagtgctctaggcatattcttatgccatgagtaacttatcgtttatccctaaaattattatcagtttgtgcagcgatcagattaaggatgtgaaagtgtccatccctaaagagttgtgatgtagattagatgataacatggataaaacaggcctggcttctaaaaaaaataaatctgcttcccatatttaytcccattgcaaaatatgaaatgatatcactgctttacagrgattatttccatagatgtttctttctgaaaatctcaaattccttcattccatatcactatccaaatgatrtaactatcatcatcataccgttttacacaggagaaaactgtggtacacggcttttggaaatcatttggagaacttatcagtaaatattttgtttgtttgttttggggtgagcagaatcagaaatagatgggaagaggttgtaaatcccacatcttgagctgatacaaattaggttagctactctgaagtc

SEQ ID NO: 47482 - DNA, 600 bp, Chicken  19866894291633_2
agaactgaaataacctttgatttctacaaagacacatatagaccaagaaatggtaaaagcaatgcaataaagtgctctaggcatattcttatgccatgagtaacttatcgtttatccctaaaattattatcagtttgtgcagcgatcagattaaggatgtgaaagtgtccatccctaaagagttgtgatgtagattagatgataacatggataaaacaggcctggcttctaaaaaaaataaatctgcttcccatatttaytcccattgcaaaatatgaaatgatatcactgctttacagrgattatttccatagatgtttctttctgaaaatctcaaattccttcattccatatcactatccaaatgatrtaactatcatcatcataccgttttacacaggagaaaactgtggtacacggcttttggaaatcatttggagaacttatcagtaaatattttgtttgtttgttttggggtgagcagaatcagaaatagatgggaagaggttgtaaatcccacatcttgagctgatacaaattaggttagctactctgaagtcatcaacagctaagttaaattcagacaagtctgttcccaaa

SEQ ID NO: 47483 - DNA, 600 bp, Chicken  19866894291633_3
agtgctctaggcatattcttatgccatgagtaacttatcgtttatccctaaaattattatcagtttgtgcagcgatcagattaaggatgtgaaagtgtccatccctaaagagttgtgatgtagattagatgataacatggataaaacaggcctggcttctaaaaaaaataaatctgcttcccatatttaytcccattgcaaaatatgaaatgatatcactgctttacagrgattatttccatagatgtttctttctgaaaatctcaaattccttcattccatatcactatccaaatgatrtaactatcatcatcataccgttttacacaggagaaaactgtggtacacggcttttggaaatcatttggagaacttatcagtaaatattttgtttgtttgttttggggtgagcagaatcagaaatagatgggaagaggttgtaaatcccacatcttgagctgatacaaattaggttagctactctgaagtcatcaacagctaagttaaattcagacaagtctgttcccaaatcttctgacttatggtcattcaattatttcaaattcaggaggtagatattgctgctaaatatgatactgt

SEQ ID NO: 47484 - DNA, 600 bp, Chicken  19866894291636_1
ggaatcacccacgtccaaattcacattcaaggcagaaattagaacaaaggcaggagtactgaggaagcttcagtggctgtgccttgctaagcttgagtaaaagtattttcaaagcaaatgaataaagtaaaatgtgttattctctatcacaaaaggagaagtttgaatcagagttattccacaagcactgtatgttacaaagaaatatcctcctcaaagaggcctgtgctaagggagaagaacgagacctatagagtaagcaaatacaaaatttccacaccagtctactacatttatatrgcatctcttatcccttagaatttcaaaaacacatatcatgctctacagcattaagaccattcagttgccagyctacacaagcttctctgtggctccccatcagcagctctccctgcccatggcttacaggacagggtgggagcagtacatcccaggccaccacctcatctgtaagctaacaaagaggctgcacaacctgctgtacctgaatagacaccaagaagtgctttagagctgaagtgacctgctgagcacaggcagccctttgagtcctgtgtttaaaatttctgtttaaggttt

SEQ ID NO: 47485 - DNA, 600 bp, Chicken  19866894291636_2
gtggctgtgccttgctaagcttgagtaaaagtattttcaaagcaaatgaataaagtaaaatgtgttattctctatcacaaaaggagaagtttgaatcagagttattccacaagcactgtatgttacaaagaaatatcctcctcaaagaggcctgtgctaagggagaagaacgagacctatagagtaagcaaatacaaaatttccacaccagtctactacatttatatrgcatctcttatcccttagaatttcaaaaacacatatcatgctctacagcattaagaccattcagttgccagyctacacaagcttctctgtggctccccatcagcagctctccctgcccatggcttacaggacagggtgggagcagtacatcccaggccaccacctcatctgtaagctaacaaagaggctgcacaacctgctgtacctgaatagacaccaagaagtgctttagagctgaagtgacctgctgagcacaggcagccctttgagtcctgtgtttaaaatttctgtttaaggtttgttgtttttctcacataatatgcaacaagttgagtggtgaatgacacttgtagagggaacagagagttcaaa

SEQ ID NO: 47486 - DNA, 599 bp, Chicken  19866894291642_1
  misc_feature (1)..(92): n is any nucleotide
nnnnnnnnnnnnnnnnnnnnnnnnnnnnnnnnnnnnnnnnnnnnnnnnnnnnnnnnnnnnnnnnnnnnnnnnnnnnnnnnnnnnnnnnnnnnctatggttctatgaagaagataccgttagatttaggtgaagaaatcttgccagtgtaaagacaacaacaacaaaaaaaccacatatatattatagcacagtatttttcatctcaaacgtttctgtattatctctttaaggactcagctcagcagtagggcatgcaaacacggcacgtgagaacaaggcaggctgcaggaaactcaacrtacccttccagccgtgttccacaatacacaatgcatacttcccaaactccgatgctacacctggactgaacctttttctatatagaagggaacaagtcagtgagggcagtgaaggctcctactgcctcaccccctggacactcacaggcaygtccctcactccatcaggaacctttacttataggaaggaatgacacaatggaaaagttcctagaggtaattcctacagcccagggaagcctgtagaaatctcttcatcagcttcagggagcacaccaataatgaagcatattttcaaa

SEQ ID NO: 47487 - DNA, 600 bp, Chicken  19866894291642_2
gacaacaacaacaaaaaaaccacatatatattatagcacagtatttttcatctcaaacgtttctgtattatctctttaaggactcagctcagcagtagggcatgcaaacacggcacgtgagaacaaggcaggctgcaggaaactcaacrtacccttccagccgtgttccacaatacacaatgcatacttcccaaactccgatgctacacctggactgaacctttttctatatagaagggaacaagtcagtgagggcagtgaaggctcctactgcctcaccccctggacactcacaggcaygtccctcactccatcaggaacctttacttataggaaggaatgacacaatggaaaagttcctagaggtaattcctacagcccagggaagcctgtagaaatctcttcatcagcttcagggagcacaccaataatgaagcatattttcaaaaccaggaaagaagagtgccttgagcaccatgttctacgaatatgaaagctggttttttaaactcgttgacttatgtaaatcagctgcagaaaaatgcagcggggtacggttaacatttcagctgtttgccatttgatttctctttcacccac

SEQ ID NO: 47488 - DNA, 600 bp, Chicken  19866894291655_1
gtactagggagtggtctgaaggatatcaggaaatgccttccagctatagatctctgagcctcattaatgctgtcaaatttctggaaaaactgtatctactttacacagacaaagtgacagatatgtgacctttcccagctcttttttgtttcctttatccctagatcttgcattccttgactgcctctggatgtgcaaatgctggtggaggctggaacccccctgtgcctgactagcagccagcgagtacctgccttggtcaaggaccttgctgcatctctctgtgcgtttctcacttcyattctgtatcrctgcactyctcatcagaacaaaggtaatccatgctaacagaaaaggagggagtgcctgtgctctgcattgtgtcatacatagagcgcatttaatctctacttacatacagattgtgctgactttgtctttgtaggaatatacctactttagttgtgctggagtgaccacgcacctcagggttcatacaattagctttgttactatcagaagtgtgagcatgtactttgaacttaaatgcaaactgcaggatccatctaagatgctgagtatgggagctagatccacggt

SEQ ID NO: 47489 - DNA, 600 bp, Chicken  19866894291655_2
tggtctgaaggatatcaggaaatgccttccagctatagatctctgagcctcattaatgctgtcaaatttctggaaaaactgtatctactttacacagacaaagtgacagatatgtgacctttcccagctcttttttgtttcctttatccctagatcttgcattccttgactgcctctggatgtgcaaatgctggtggaggctggaacccccctgtgcctgactagcagccagcgagtacctgccttggtcaaggaccttgctgcatctctctgtgcgtttctcacttcyattctgtatcrctgcactyctcatcagaacaaaggtaatccatgctaacagaaaaggagggagtgcctgtgctctgcattgtgtcatacatagagcgcatttaatctctacttacatacagattgtgctgactttgtctttgtaggaatatacctactttagttgtgctggagtgaccacgcacctcagggttcatacaattagctttgttactatcagaagtgtgagcatgtactttgaacttaaatgcaaactgcaggatccatctaagatgctgagtatgggagctagatccacggtgctacaactac

SEQ ID NO: 47490 - DNA, 600 bp, Chicken  19866894291655_3
aggatatcaggaaatgccttccagctatagatctctgagcctcattaatgctgtcaaatttctggaaaaactgtatctactttacacagacaaagtgacagatatgtgacctttcccagctcttttttgtttcctttatccctagatcttgcattccttgactgcctctggatgtgcaaatgctggtggaggctggaacccccctgtgcctgactagcagccagcgagtacctgccttggtcaaggaccttgctgcatctctctgtgcgtttctcacttcyattctgtatcrctgcactyctcatcagaacaaaggtaatccatgctaacagaaaaggagggagtgcctgtgctctgcattgtgtcatacatagagcgcatttaatctctacttacatacagattgtgctgactttgtctttgtaggaatatacctactttagttgtgctggagtgaccacgcacctcagggttcatacaattagctttgttactatcagaagtgtgagcatgtactttgaacttaaatgcaaactgcaggatccatctaagatgctgagtatgggagctagatccacggtgctacaactacactctaat

SEQ ID NO: 47491 - DNA, 600 bp, Chicken  19866894291656_1
gcagcaagatctagtattacatgacacaggcagctgtgtgcagggacacatccccagatgatctccactcacacagacaggctgacctcagctccacttggagtcatgcatacacttcccacctccttacctatgacaaccaggatgaagagggctgttgcaacgcctgctgtcatgaagaacatgatgcttatgtggtaagccagcttctccatgtcttccacattgggaacaagcactggagggatcagaaagccaagagcaatgccgagctgaacaggagagagaggggacacagargtgacatggaaccacaacactgccactggctcagagctcatgagaaatgcaatcctccctcacctgktaagagctcatcggggcctattctagcttcatctccaaagtgaaagtctcctttaccacckaataactgaaagctaaaccagatgcccacagcaactaggccatgagaggtcgcccccccagattcacaactatkacgatgttcaaggcaaggttttataatacaattgaacagacttaatacttgcctccaacaaagtggagttcttgctctacccatgctcctccacacac

SEQ ID NO: 47492 - DNA, 600 bp, Chicken  19866894291656_2
ctcacacagacaggctgacctcagctccacttggagtcatgcatacacttcccacctccttacctatgacaaccaggatgaagagggctgttgcaacgcctgctgtcatgaagaacatgatgcttatgtggtaagccagcttctccatgtcttccacattgggaacaagcactggagggatcagaaagccaagagcaatgccgagctgaacaggagagagaggggacacagargtgacatggaaccacaacactgccactggctcagagctcatgagaaatgcaatcctccctcacctgktaagagctcatcggggcctattctagcttcatctccaaagtgaaagtctcctttaccacckaataactgaaagctaaaccagatgcccacagcaactaggccatgagaggtcgcccccccagattcacaactatkacgatgttcaaggcaaggttttataatacaattgaacagacttaatacttgcctccaacaaagtggagttcttgctctacccatgctcctccacacacgctcctgtccacacacacattccactcattatcctgcacctattctggtgctagcctagtcactcag

SEQ ID NO: 47493 - DNA, 600 bp, Chicken  19866894291656_3
acctatgacaaccaggatgaagagggctgttgcaacgcctgctgtcatgaagaacatgatgcttatgtggtaagccagcttctccatgtcttccacattgggaacaagcactggagggatcagaaagccaagagcaatgccgagctgaacaggagagagaggggacacagargtgacatggaaccacaacactgccactggctcagagctcatgagaaatgcaatcctccctcacctgktaagagctcatcggggcctattctagcttcatctccaaagtgaaagtctcctttaccacckaataactgaaagctaaaccagatgcccacagcaactaggccatgagaggtcgcccccccagattcacaactatkacgatgttcaaggcaaggttttataatacaattgaacagacttaatacttgcctccaacaaagtggagttcttgctctacccatgctcctccacacacgctcctgtccacacacacattccactcattatcctgcacctattctggtgctagcctagtcactcagtaatctaacttggctcattaaaactggtagaaaatgacacttccaaaaaacaccccagttc

SEQ ID NO: 47494 - DNA, 600 bp, Chicken  19866894291656_4
ccagcttctccatgtcttccacattgggaacaagcactggagggatcagaaagccaagagcaatgccgagctgaacaggagagagaggggacacagargtgacatggaaccacaacactgccactggctcagagctcatgagaaatgcaatcctccctcacctgktaagagctcatcggggcctattctagcttcatctccaaagtgaaagtctcctttaccacckaataactgaaagctaaaccagatgcccacagcaactaggccatgagaggtcgcccccccagattcacaactatkacgatgttcaaggcaaggttttataatacaattgaacagacttaatacttgcctccaacaaagtggagttcttgctctacccatgctcctccacacacgctcctgtccacacacacattccactcattatcctgcacctattctggtgctagcctagtcactcagtaatctaacttggctcattaaaactggtagaaaatgacacttccaaaaaacaccccagttctttgcagggtcaatgagttgaacctatttttcctcatgcctgacaaagagccagggctgatgtaacgtcaaatc

SEQ ID NO: 47495 - DNA, 600 bp, Chicken  19866894291658_1
ctgggacacaggacaccccaggaacagttattttttcactacaaaagaaatacatcagtgaaccaatactactatctgagctttgaaatagaacagcttagtcctctccaggacatacagccaaatgcattacctgaaggtggtgactttttccttgctaacatgtgcgttttttaagcttcccaatgctccccatgaagacaggcagaggtgagcctgctccatgcatcctgctggcatgagctgtgctgatggagctgccagtgcggggaaccaatgtcagagcacagctcccaaccsagacaccacgtcaacagccactgtaaccttttttcttttcctttttmtttttccttctctttctcctaycttttmtttttaaagcaaagcttacctttcagacatccagccccacttggcaaagattcagatacaagctcctgctctcagtcactggcctgtttgctgggcagcattctagaggwcaaaacctgtgtgcaagctgtgctatgcaaacaagaggactcaaccccttgactcctggaaggcatgccaagggtacagcaatgataaaacactgcaagcaaaggttaaacagca

SEQ ID NO: 47496 - DNA, 439 bp, Chicken  19866894291658_10
aggwcaaaacctgtgtgcaagctgtgctatgcaaacaagaggactcaaccccttgactcctggaaggcatgccaagggtacagcaatgataaaacactgcaagcaaaggttaaacagcacaaatccatattaccgtgyrctaagcaccaatttatgacacacagcaccattttcacctacagtgctcttgaactgctcaataacagataaagctwtcctgacatcactagtacaacagtaggtatcaatgaactttaaggcattcacaccagttgttttaagtcagcagcggaacccacrgtactgccaccgcatggcaacaaatgcacccttcagagagctcatcagtcgggcctgcggttggaacaatcttaaaagcagaagccaactcccatacataccttcagacaaatgcaaaaagcacatggaagctgttcct

SEQ ID NO: 47497 - DNA, 600 bp, Chicken  19866894291658_2
aaatacatcagtgaaccaatactactatctgagctttgaaatagaacagcttagtcctctccaggacatacagccaaatgcattacctgaaggtggtgactttttccttgctaacatgtgcgttttttaagcttcccaatgctccccatgaagacaggcagaggtgagcctgctccatgcatcctgctggcatgagctgtgctgatggagctgccagtgcggggaaccaatgtcagagcacagctcccaaccsagacaccacgtcaacagccactgtaaccttttttcttttcctttttmtttttccttctctttctcctaycttttmtttttaaagcaaagcttacctttcagacatccagccccacttggcaaagattcagatacaagctcctgctctcagtcactggcctgtttgctgggcagcattctagaggwcaaaacctgtgtgcaagctgtgctatgcaaacaagaggactcaaccccttgactcctggaaggcatgccaagggtacagcaatgataaaacactgcaagcaaaggttaaacagcacaaatccatattaccgtgyrctaagcaccaatttatgacacacagca

SEQ ID NO: 47498 - DNA, 600 bp, Chicken  19866894291658_3
tactatctgagctttgaaatagaacagcttagtcctctccaggacatacagccaaatgcattacctgaaggtggtgactttttccttgctaacatgtgcgttttttaagcttcccaatgctccccatgaagacaggcagaggtgagcctgctccatgcatcctgctggcatgagctgtgctgatggagctgccagtgcggggaaccaatgtcagagcacagctcccaaccsagacaccacgtcaacagccactgtaaccttttttcttttcctttttmtttttccttctctttctcctaycttttmtttttaaagcaaagcttacctttcagacatccagccccacttggcaaagattcagatacaagctcctgctctcagtcactggcctgtttgctgggcagcattctagaggwcaaaacctgtgtgcaagctgtgctatgcaaacaagaggactcaaccccttgactcctggaaggcatgccaagggtacagcaatgataaaacactgcaagcaaaggttaaacagcacaaatccatattaccgtgyrctaagcaccaatttatgacacacagcaccattttcacctacagtgctct

SEQ ID NO: 47499 - DNA, 600 bp, Chicken  19866894291658_4
ctgagctttgaaatagaacagcttagtcctctccaggacatacagccaaatgcattacctgaaggtggtgactttttccttgctaacatgtgcgttttttaagcttcccaatgctccccatgaagacaggcagaggtgagcctgctccatgcatcctgctggcatgagctgtgctgatggagctgccagtgcggggaaccaatgtcagagcacagctcccaaccsagacaccacgtcaacagccactgtaaccttttttcttttcctttttmtttttccttctctttctcctaycttttmtttttaaagcaaagcttacctttcagacatccagccccacttggcaaagattcagatacaagctcctgctctcagtcactggcctgtttgctgggcagcattctagaggwcaaaacctgtgtgcaagctgtgctatgcaaacaagaggactcaaccccttgactcctggaaggcatgccaagggtacagcaatgataaaacactgcaagcaaaggttaaacagcacaaatccatattaccgtgyrctaagcaccaatttatgacacacagcaccattttcacctacagtgctcttgaact

SEQ ID NO: 47500 - DNA, 600 bp, Chicken  19866894291658_5
tgagctttgaaatagaacagcttagtcctctccaggacatacagccaaatgcattacctgaaggtggtgactttttccttgctaacatgtgcgttttttaagcttcccaatgctccccatgaagacaggcagaggtgagcctgctccatgcatcctgctggcatgagctgtgctgatggagctgccagtgcggggaaccaatgtcagagcacagctcccaaccsagacaccacgtcaacagccactgtaaccttttttcttttcctttttmtttttccttctctttctcctaycttttmmttttaaagcaaagcttacctttcagacatccagccccacttggcaaagattcagatacaagctcctgctctcagtcactggcctgtttgctgggcagcattctagaggwcaaaacctgtgtgcaagctgtgctatgcaaacaagaggactcaaccccttgactcctggaaggcatgccaagggtacagcaatgataaaacactgcaagcaaaggttaaacagcacaaatccatattaccgtgyrctaagcaccaatttatgacacacagcaccattttcacctacagtgctcttgaactg

SEQ ID NO: 47501 - DNA, 600 bp, Chicken  19866894291658_6
atgctccccatgaagacaggcagaggtgagcctgctccatgcatcctgctggcatgagctgtgctgatggagctgccagtgcggggaaccaatgtcagagcacagctcccaaccsagacaccacgtcaacagccactgtaaccttttttcttttcctttttmtttttccttctctttctcctaycttttmtttttaaagcaaagcttacctttcagacatccagccccacttggcaaagattcagatacaagctcctgctctcagtcactggcctgtttgctgggcagcattctagaggwcaaaacctgtgtgcaagctgtgctatgcaaacaagaggactcaaccccttgactcctggaaggcatgccaagggtacagcaatgataaaacactgcaagcaaaggttaaacagcacaaatccatattaccgtgyrctaagcaccaatttatgacacacagcaccattttcacctacagtgctcttgaactgctcaataacagataaagctwtcctgacatcactagtacaacagtaggtatcaatgaactttaaggcattcacaccagttgttttaagtcagcagcggaacccacrgtac

SEQ ID NO: 47502 - DNA, 600 bp, Chicken  19866894291658_7
actgtaaccttttttcttttcctttttmtttttccttctctttctcctaycttttmtttttaaagcaaagcttacctttcagacatccagccccacttggcaaagattcagatacaagctcctgctctcagtcactggcctgtttgctgggcagcattctagaggwcaaaacctgtgtgcaagctgtgctatgcaaacaagaggactcaaccccttgactcctggaaggcatgccaagggtacagcaatgataaaacactgcaagcaaaggttaaacagcacaaatccatattaccgtgyrctaagcaccaatttatgacacacagcaccattttcacctacagtgctcttgaactgctcaataacagataaagctwtcctgacatcactagtacaacagtaggtatcaatgaactttaaggcattcacaccagttgttttaagtcagcagcggaacccacrgtactgccaccgcatggcaacaaatgcacccttcagagagctcatcagtcgggcctgcggttggaacaatcttaaaagcagaagccaactcccatacataccttcagacaaatgcaaaaagcacatggaagctgttcc

SEQ ID NO: 47503 - DNA, 600 bp, Chicken  19866894291658_8
ctgtaaccttttttcttttcctttttmtttttccttctctttctcctaycttttmtttttaaagcaaagcttacctttcagacatccagccccacttggcaaagattcagatacaagctcctgctctcagtcactggcctgtttgctgggcagcattctagaggwcaaaacctgtgtgcaagctgtgctatgcaaacaagaggactcaaccccttgactcctggaaggcatgccaagggtacagcaatgataaaacactgcaagcaaaggttaaacagcacaaatccatattaccgtgyrctaagcaccaatttatgacacacagcaccattttcacctacagtgctcttgaactgctcaataacagataaagctwtcctgacatcactagtacaacagtaggtatcaatgaactttaaggcattcacaccagttgttttaagtcagcagcggaacccacrgtactgccaccgcatggcaacaaatgcacccttcagagagctcatcagtcgggcctgcggttggaacaatcttaaaagcagaagccaactcccatacataccttcagacaaatgcaaaaagcacatggaagctgttcct

SEQ ID NO: 47504 - DNA, 524 bp, Chicken  19866894291658_9
ttcagacatccagccccacttggcaaagattcagatacaagctcctgctctcagtcactggcctgtttgctgggcagcattctagaggwcaaaacctgtgtgcaagctgtgctatgcaaacaagaggactcaaccccttgactcctggaaggcatgccaagggtacagcaatgataaaacactgcaagcaaaggttaaacagcacaaatccatattaccgtgyrctaagcaccaatttatgacacacagcaccattttcacctacagtgctcttgaactgctcaataacagataaagctwtcctgacatcactagtacaacagtaggtatcaatgaactttaaggcattcacaccagttgttttaagtcagcagcggaacccacrgtactgccaccgcatggcaacaaatgcacccttcagagagctcatcagtcgggcctgcggttggaacaatcttaaaagcagaagccaactcccatacataccttcagacaaatgcaaaaagcacatggaagctgttcct

SEQ ID NO: 47505 - DNA, 600 bp, Chicken  19866894291664_1
ataatttgttagaagagattattagaaaaattgaagcgttttttgagttattcttcattacactgcctttatagagttagagcataccgagcatgcagagttcctcaactgacagtcaaaatgaaagctctgattcaagagcagagatagctgaacttaatagcaaggttactgactctgagctgtctgtgacagtcatttggagcccttaatatcacactgttaaatgaggatctggcatgttgaatttttcaattagttgtgatttttaatgctcacgtagctatggatacagctgtwaaaaaaaagattcattgcagaastggttttgtcttgagcttgatttcttgaaataaaaaatgcttaggtttcttactgtaagttttatgcatttcattttgttgtatgtgttatggaaatttcagttgtaattattgttaaattgtagtaaatcggcaaatactatcttttgagatagattgtgaagcctcatgtagtgtagaacctgaatgcacttgggggtgagatgttgcccgctgtgcagaccaggagggagcttcttgtggcagcagttgaaacatagggaaggaaactcccaaa

SEQ ID NO: 47506 - DNA, 600 bp, Chicken  19866894291664_2
agaaaaattgaagcgttttttgagttattcttcattacactgcctttatagagttagagcataccgagcatgcagagttcctcaactgacagtcaaaatgaaagctctgattcaagagcagagatagctgaacttaatagcaaggttactgactctgagctgtctgtgacagtcatttggagcccttaatatcacactgttaaatgaggatctggcatgttgaatttttcaattagttgtgatttttaatgctcacgtagctatggatacagctgtaaaaaaaaagattcattgcagaastggttttgtcttgagcttgatttcttgaaataaaaaatgcttaggtttcttactgtaagttttatgcatttcattttgttgtatgtgttatggaaatttcagttgtaattattgttaaattgtagtaaatcggcaaatactatcttttgagatagattgtgaagcctcatgtagtgtagaacctgaatgcacttgggggtgagatgttgcccgctgtgcagaccaggagggagcttcttgtggcagcagttgaaacatagggaaggaaactcccaaattctgtcacatccctaacagagg

SEQ ID NO: 47507 - DNA, 600 bp, Chicken  19866894291664_3
acctttcattgttgtttttctgtaggtttacaaaaacttactgaaaaccttattaaaaggaaggaaggaagactattgcagattgtgttgaggcttttttcctgtgtgaacttttctctcttttttttttttttttaattttatgttatccagcaaactacaggtgccaggggtcctattcctgctggaggtgtggctcccagcgtacccttctctgcttctttgctggggacgttgcccgttagcacaggatttgttcctccaccctctctttcagaaatcttttcacagcctttggcktcttcactggaaaatttctgttcaccattaagcaccttttcaatcagtgacccaaaaagaggtaaaaaaggagtcttaatatttaaccttatggtgtgggagagagttatgagtcagccaaatggattccttgtttaacagatttttcccactactcagtaatgcttagcatatgcagaaaacttggtctgtgctcacattttaactgtactgataatcagtgttgggtgtacacagaattttatagagaaagctgtttacttcgggtttgcataagtatctttaagttcctctcttaat

SEQ ID NO: 47508 - DNA, 596 bp, Chicken  19866894291667_1
gtggccgtctgcagctctcgcctatcgctgccgagcggtgacacacacacacacacacacacacacacacacacacacacacacacacgtgcacgtgcaaagggcaggggggaaaagcgacgcgagcccaaggagttaacggccacgccgccctgctgggccgccccagcactctatcacaagcactgtcaggggcccatgctgggtggctaattaaaacaattacaaagacaaagcaggtatcaatagcattccaagcagcaaagaaagagatgaagtagtgaagatttaaatcatcakcagctgagctctgcggccccacggcacggcggggtccgcctccgagccgccgaaagctccccgtgcggacccggggtggttttgtgttcggctgtacgaggtttcgtggtttgaggggccgtggcatttgctcgttttatacacatacacacttaatgtttagtgccagcaattgcagagataaaatagaaacgcttcggttttcattctggcttttcacagacaaggtggataaacggatgtcatggggggcgccaacggagcgcaaaggagcggctgtgacagcgagggcagtc

SEQ ID NO: 47509 - DNA, 600 bp, Chicken  19866894291671_1
ctttcaaggatgtgaaagagagagaacgaagccaggagaagtggatactatcacttaatactcaaagacattttcagtagttaccttaatggtctctaattaagtgtgggaatacgcaacacatcccaagggatggttatatcttttcctgttgcactcaaacatgttttgccaccatggtcaaatatttttaaatgtacaaagatttatcacctatagggcacagatgaaaacactttagcttcctcgccagtcacagctaccagccaacctcctaaaatgcagggaaccccagccccmattcatttaccacctagagctatcagcaggaacctgcgacagccagggcaggagcttggacctggataacactaactgggatgctggatctcccagttcttcattcactgtgcagaacctctccaggtcactggttgccatctgggraaatgacatctcaggtctttctctgatttgtactctgatgtttttttgcaactgtgaaatctttgaaggaatgccttacagaccgcccagagaggctgtggatgctccatccctggaggtgttcaagactaggttggatggagccctgggcaa

SEQ ID NO: 47510 - DNA, 600 bp, Chicken  19866894291671_2
cctgttgcactcaaacatgttttgccaccatggtcaaatatttttaaatgtacaaagatttatcacctatagggcacagatgaaaacactttagcttcctcgccagtcacagctaccagccaacctcctaaaatgcagggaaccccagccccmattcatttaccacctagagctatcagcaggaacctgcgacagccagggcaggagcttggacctggataacactaactgggatgctggatctcccagttcttcattcactgtgcagaacctctccaggtcactggttgccatctgggraaatgacatctcaggtctttctctgatttgtactctgatgtttttttgcaactgtgaaatctttgaaggaatgccttacagaccgcccagagaggctgtggatgctccatccctggaggtgttcaagactaggttggatggagccctgggcaacctggtctagtaccaaacctagaggttggtggccctgcctgtggcaggagggctggaacttgatggtcctttgaggtcccttccaacccaagccattctatgataaagggtaggcatgattacatatagaccatcaccttgaaagca

SEQ ID NO: 47511 - DNA, 600 bp, Chicken  19866894291672_1
tatgtttatatgcacccctctatcccagcttggtgtctacattaaataaatactttgttccaataattactaataggtagcaaagtaggatattgcttatgttggtacaatctcaatgcctttgtacaagtggtctctactgtatcagactgatgatgtatgtagcctaagtgactgtctctgttggactctgcgtaatgcaagacagtcagttgcaggctctttttgctggtgtgtgtggcagtgacaaatggcagaagggatttttatctagaaactgtcagtattcatgtttgtgtyttaaagtttgacgtgacccctgcatttccaaatgtggaccttgcaaagcatatccttgcaagaaaccccaccaaacagttgctgttgcaaactgtagaaataaactgttgtcattccgtgtactcagaattatgctgcatttcttcagagcaagaccaacatacctcatctctttggacatcagtttcaactttgcagtaaagtgaggtggactgaattttctgctgcatgggttcaaactgaaggaattggtcatcctttctgtcttatggaaacattaagaaatagagaatgaaggga

SEQ ID NO: 47512 - DNA, 510 bp, Chicken  19866894291678_1
aatagcatccctttctaaaaataaaaagaaatgaaaacagaaaattaaaaaaaaaaaccttcacattagccatgcatcacaagtatgacacaaacaacaaccagcactgactggtagaccggatgcaagcaaacgacccatttatgaacatctatacatgaagtaaataaggactgatctagtgcatctcacacactcctaaatctgtgttatggatgtcaccttttgactctgtggctgcagccttgcaatcaagctgctctcagagcagtgtctctcagtgcagtgtctctcagtggyggagatttgctcaccaatgaatcagcaagccctgggaaggaggaagctgcacagagaaaggcacattccttgccactgcaaggtttgtaggcattatctcgtagcagcttcacgatacaactggccttggggagaagaaataagtgagatagataaaaaagaggaagcttaagaaaatctttggcctggggtttgatctactccgtgaaa

SEQ ID NO: 47513 - DNA, 600 bp, Chicken  19866894291682_1
cggaaagcgaaggttggaaggcaaaaggtgatgctgggagctgcttggctgcctgcaggcgggctgatgccgcgtgtcagttgtgtttcacacacacgctgcaaggcttcagctgtcccgaggtactgacagctgtggggacctgtgctgtctttgagcaaagaggcagcaaagaaggacagccaggaacccgtgctcctggcaccacctccagaagggatgctggtttttgttctcctgcccggggctgcacgcacagcctcgctcagcgcccgcttcctccccgtaccaaagggacgytccagccaagggacaggaaacccacacctgaaggcagcagaccctcctgccctcccctcagtgagcactgcctcctcccagctgggctaggcacggctcagggaggcaccggcgctccgcttggagacacagcgtgcatcgcctgcatggacgccgggccccttctgcaggacgtgagggtgtgcgtccccccggctgctccccagcccccatccctcagtcctggccgcatccgcgctcccctcaccggctttctccaggctcatggtgcgggctgcctgccctggcacagcgggctca

SEQ ID NO: 47514 - DNA, 600 bp, Chicken  19866894291684_1
attaggcagctttagaagtcattcccaaacaaaactgctttcctctggttatcaaccatggcagcctgactccagaaatacacgaatatgtaaaaaaaaaaaagacaaggacatgtatcagcactgtataaatgcatatggaaaaatgtcaccatttattttacacaaaggtaggagcattgcttggaccacacactgatgctctgaaaagtgctcaagctctgtttttttctgctctatgacaggagatgctgaaggccaactggacgggcagtgctggggaaaagctggtctggcctyccctcctcatgttggcagcagaaggaaatatcactgattgaaaggggcaccataaatacaacaaatcatagaatcacagaatcatagaatggcttaagttggaggggaccttaaagatcatctagttccaaccccctgacatgggcaggttgctacccaccagatgaagctgcccagggccccatccaacctgtccttgaatgcctccagggattagatgttaaactggtaaagaaccaatttctaacacagtaatagcagtcctcagcacccaaaagcatgtatcaggcaatgaaaact

SEQ ID NO: 47515 - DNA, 600 bp, Chicken  19866894291693_1
tttatctaatataaacaaaaaagctccagaagttttggacatgaagcacataacattcttgtttctgcaaatacagctgggtacctttagaaactctgaggtttggaagaatgatccactgatatttaactacttcaccatcaaatggcccctttcatattgatctacaatgtactttcaaaaccagctcgatcaaaacccagtagggactccatactgaaaagtagacagctaatactcagaccaaacagtctatgcccaaacaagatatctgtccttttaacaacagttgctatagarttttcctcccctttcatagcttgccacacacagcaggcatttttcactccaagctacattcgcagtttaagaaagctatttatgcagacctcaacagaatgggaaagtagcaatccaaaactgtgcaagggttttaaaaggaaaggtagtggtgtagattagaaggcatgtttaacaagaagtactagcatttctactgtttcaggaaacatatatttctagcgcaagatgactcttacactgttttaattattgccataattgtaaagtttcacatggcaacacttgcttaatacaaaa

SEQ ID NO: 47516 - DNA, 600 bp, Chicken  19866894291693_2
tatatttctagcgcaagatgactcttacactgttttaattattgccataattgtaaagtttcacatggcaacacttgcttaatacaaaatgagtatataagataggtaaaaattcctcagtgttgtatcatttttcaagaaaagtccaattttaaacatcattcttacttttatatgaaaacccctttgtttaaaaatcaaagtagtaaaaacacaaaatttcagctgttggcctgacagtgaaagacaagcatccaggaaataactgagtatgacttaactacgtgttctactcacaamggtgccatttaaaattacaaacaaattactgcaaggtttgcccgttttttgccatccacctaatcaaagattcagatgagctgatatttctttgcagttaaaattaggccctcctagcactgctattaacatctatattcaataaagaaccattacagttcttaatataaatgtaacagtatggcttttagcatgaaaaaagggttcttagagaagtgacaataaagagacataacaggtataacagggtggttctgtatttaagcacaagctaccttctggcattttactactgtttct

SEQ ID NO: 47517 - DNA, 600 bp, Chicken  19866894291694_1
aaaagaactaattaccttctaggtgttttggaagaacaatgttctttaaaccatttaatgttctttaaatccccccccccccccttctgtggcagcctttcctatattcagcatttgaagatcaccaagttcttatctatggtcagaatgatccactctttcttcccctccctgttctcctctccaaccctctctccacagcggaaactctagtagctcacttacagttggcacatgcactctttctagacctagcctcagtcggttcatacaggagtgcctacagaggtgaatgtgggycctcaaagtcccttactaagaaagcttcaggcaatgcatcaggtgagartttctgcttaaggagaaactgacatcagaggactgctgaagctttgagtattcctacctggttttctttgctcattcccagccatggaggacagcatattgctaacatctacttgtacttattctggaggaacggaatgaaaacagaactaggaagaaaaccctccagttctcaaagctcattccattctatatattctgcatacatatcctggcaaagcatttcagtactacagcactacaggaaaaatg

SEQ ID NO: 47518 - DNA, 600 bp, Chicken  19866894291694_2
accatttaatgttctttaaatccccccccccccccttctgtggcagcctttcctatattcagcatttgaagatcaccaagttcttatctatggtcagaatgatccactctttcttcccctccctgttctcctctccaaccctctctccacagcggaaactctagtagctcacttacagttggcacatgcactctttctagacctagcctcagtcggttcatacaggagtgcctacagaggtgaatgtgggycctcaaagtcccttactaagaaagcttcaggcaatgcatcaggtgagartttctgcttaaggagaaactgacatcagaggactgctgaagctttgagtattcctacctggttttctttgctcattcccagccatggaggacagcatattgctaacatctacttgtacttattctggaggaacggaatgaaaacagaactaggaagaaaaccctccagttctcaaagctcattccattctatatattctgcatacatatcctggcaaagcatttcagtactacagcactacaggaaaaatgtttatagcaaaatcagtttcttacctgaggtataattgaaattttcttc

SEQ ID NO: 47519 - DNA, 600 bp, Chicken  19866894291697_1
aggcacgggctctcagacatgcatcttatcttacagctccgtgtttcgctgccacctcagctctcttctttcttctgtgcccttaaaggatcggtccgacagctcgaaggacttcaacacagctatgatgcctttggggggttctctgctgtcatgggagatctgcccctttgccacccccttcaaacgctgaatcaaccccatccaacagctgtgtcacagctttcatttcttcagaaaggaagcagtcccagcacagagctcagcctcatcaccacctcctgcttcaagtgttctaamgcatttccctttgctcgccggtggttgcttcccccagctttgcaccaattcaacttccaccacttttcgcttctactttttccgatttaaaaccttaaaggccacaaagggagctgaaaacaacccccccggccgtttcacactcacaattcctcttttcaaggcgaggtgtttgctgccagctgcacctcttaagattggagacccagccgcgctctgtgagagtgtttgccaactgcctgcaaacaaagtcactcccatccttcagtctctgcaaggagacagtcataagacaaagct

SEQ ID NO: 47520 - DNA, 600 bp, Chicken  19866894291698_1
ttgtgttcatctggaagaactaatgaggactcatgtctgtcttttctctgctccttctgtgttacctagaccttaaatccattatttctgacacttaggtcagtcagcatcagtgtcttaagtttgtagaagagtaagtttaagagttaagcattctgtttaatgttgtgtttacctataagttttaatagtgatttgtgatgcttccaggacactactgctgtcacagggtgacctcctttatttagctttaagttgttgtaaagccctttgagaaccattaattaaacctcttggaarcgttayctgtgcttctatgtttctacacataaccacaactacattttcttctcaatgaaaaaaaaaaaatgcataatagctcaagaactcctcaggtttcaatctaagtttcagcctgaaacttgacattaagcatttatcacactatttaaagcagatacaacctggatacatgatacttgtccctctcktttctgctagagattcagagactgaacaacatagtaaaagcccccacaaaatccatagaggaaacacagctttgaaattgcaactgaataagacaagactttcatccct

SEQ ID NO: 47521 - DNA, 600 bp, Chicken  19866894291698_2
tcatctggaagaactaatgaggactcatgtctgtcttttctctgctccttctgtgttacctagaccttaaatccattatttctgacacttaggtcagtcagcatcagtgtcttaagtttgtagaagagtaagtttaagagttaagcattctgtttaatgttgtgtttacctataagttttaatagtgatttgtgatgcttccaggacactactgctgtcacagggtgacctcctttatttagctttaagttgttgtaaagccctttgagaaccattaattaaacctcttggaarcgttayctgtgcttctatgtttctacacataaccacaactacattttcttctcaatgaaaaaaaaaaaatgcataatagctcaagaactcctcaggtttcaatctaagtttcagcctgaaacttgacattaagcatttatcacactatttaaagcagatacaacctggatacatgatacttgtccctctcktttctgctagagattcagagactgaacaacatagtaaaagcccccacaaaatccatagaggaaacacagctttgaaattgcaactgaataagacaagactttcatccctagyacg

SEQ ID NO: 47522 - DNA, 600 bp, Chicken  19866894291698_3
tgatttgtgatgcttccaggacactactgctgtcacagggtgacctcctttatttagctttaagttgttgtaaagccctttgagaaccattaattaaacctcttggaarcgttayctgtgcttctatgtttctacacataaccacaactacattttcttctcaatgaaaaaaaaaaaatgcataatagctcaagaactcctcaggtttcaatctaagtttcagcctgaaacttgacattaagcatttatcacactatttaaagcagatacaacctggatacatgatacttgtccctctcktttctgctagagattcagagactgaacaacatagtaaaagcccccacaaaatccatagaggaaacacagctttgaaattgcaactgaataagacaagactttcatccctagyacgtgctagtaaaagtgtcaaagttgtgttycctgtgcccacgtacagcaccaccacacaagcagaatagttctacaggcacaccagcagactgactttcctagatcttacctgagtaaaggccaaaaaagacaaacatctgaagtctagtaaaaaaggactgaaggtacaatgcattctcaggaaga

SEQ ID NO: 47523 - DNA, 600 bp, Chicken  19866894291698_4
tayctgtgcttctatgtttctacacataaccacaactacattttcttctcaatgaaaaaaaaaaaatgcataatagctcaagaactcctcaggtttcaatctaagtttcagcctgaaacttgacattaagcatttatcacactatttaaagcagatacaacctggatacatgatacttgtccctctcktttctgctagagattcagagactgaacaacatagtaaaagcccccacaaaatccatagaggaaacacagctttgaaattgcaactgaataagacaagactttcatccctagyacgtgctagtaaaagtgtcaaagttgtgttycctgtgcccacgtacagcaccaccacacaagcagaatagttctacaggcacaccagcagactgactttcctagatcttacctgagtaaaggccaaaaaagacaaacatctgaagtctagtaaaaaaggactgaaggtacaatgcattctcaggaagaaccacaggaaaaacataatctgcaggaagaaaaaaacaaacaaacaaamaaaataggtagaatcaaatttaaattctaaaagtcacctgaatctctctgcactttattttgt

SEQ ID NO: 47524 - DNA, 600 bp, Chicken  19866894291698_5
acaactacattttcttctcaatgaaaaaaaaaaaatgcataatagctcaagaactcctcaggtttcaatctaagtttcagcctgaaacttgacattaagcatttatcacactatttaaagcagatacaacctggatacatgatacttgtccctctcktttctgctagagattcagagactgaacaacatagtaaaagcccccacaaaatccatagaggaaacacagctttgaaattgcaactgaataagacaagactttcatccctagyacgtgctagtaaaagtgtcaaagttgtgttycctgtgcccacgtacagcaccaccacacaagcagaatagttctacaggcacaccagcagactgactttcctagatcttacctgagtaaaggccaaaaaagacaaacatctgaagtctagtaaaaaaggactgaaggtacaatgcattctcaggaagaaccacaggaaaaacataatctgcaggaagaaaaaaacaaacaaacaaamaaaataggtagaatcaaatttaaattctaaaagtcacctgaatctctctgcactttattttgtcagtagcttttgtaatgcaaaatgtttgcag

SEQ ID NO: 47525 - DNA, 600 bp, Chicken  19866894291698_6
aatccatagaggaaacacagctttgaaattgcaactgaataagacaagactttcatccctagyacgtgctagtaaaagtgtcaaagttgtgttycctgtgcccacgtacagcaccaccacacaagcagaatagttctacaggcacaccagcagactgactttcctagatcttacctgagtaaaggccaaaaaagacaaacatctgaagtctagtaaaaaaggactgaaggtacaatgcattctcaggaagaaccacaggaaaaacataatctgcaggaagaaaaaaacaaacaaacaaamaaaataggtagaatcaaatttaaattctaaaagtcacctgaatctctctgcactttattttgtcagtagcttttgtaatgcaaaatgtttgcaggtggacatctgcttaaatctgaccagtcagataggagtaatgttaatgagatcatcagcaataccaggtgatatggctgagtttgccaagtcaggaaactgataaacttcaagatgtgcctaaatgcattcctgagtgtttaaaacatcttttcatgccagctgtatagaaagctctgaaatgtcagcactggttagtttaccatc

SEQ ID NO: 47526 - DNA, 600 bp, Chicken  19866894291708_1
atacaactatacacagagaagtgataaagtagtgagcagtggtcaatctgtctgttgtaattgcagacctgcaaggtggccagtgtatatgttagttctcagcatagcttctcgactgcttatgcctaatatacagcccttaatcctttctggcatgtcatcccttgaagcaaatgatagagacacagattaggagatagcaacaagcaggagattttgtccgttgattacatgtgcaagtagctaatcttcaatgcacccgtgcaatgttctttcacctcagaacagctatggattccygagaatctgttcttactgaaacttcccagccaaatcggattttctgttcttcatagggaaaaagtgctgcaggtttactttggttatgtgtgcttttattggcagaagacaagtttccataagcacacgtgtgtaaatgaaaagtgaatgtagataagcaaagttgaaaggcagtaaaataagtactgtcagctgagggcagacgcaaaagcagctctatctgccctcctcagcagacttcagcagacttcagcagactacagcctaaagcaggataaatgagccatttgccgtgctcca

SEQ ID NO: 47527 - DNA, 600 bp, Chicken  19866894291711_1
gagtttgtggggacagtcactgggactggctgtagccagaacttgggggatgaccccagtgtggcacagccactacttttgctttagcattgaaggctggtgaggcctctttgccttcttcatccctcatatccttaggcctcctgccctgttgaccttctgcctggcaacaccttcctgtggcggggccatagggtgtccactgtggagtctgagaggtgcccactctgcagcacagcacccagttgcagaccagcagccattttgtctgtagacagaggctaaacataggtgtgtggygggtaggcctgggtctgacacccagcctgtcccaaatcccagtggtcatgctcaagagagtcagtgcttaactggtaagaggtctgtctgcagccagactccaaacccagggacgcactgatagagaaaacagttatttatagttagaatagagtgctgcatggcctctacttgtctctttctcccccatcatccaacccaatcttccatcttgtttagttcccacctgccatgctggactaatttcccatgaaccaaaactaattatctgatattctacccttttaggtgtattgatac

SEQ ID NO: 47528 - DNA, 600 bp, Chicken  19866894291711_2
cagcctgtcccaaatcccagtggtcatgctcaagagagtcagtgcttaactggtaagaggtctgtctgcagccagactccaaacccagggacgcactgatagagaaaacagttatttatagttagaatagagtgctgcatggcctctacttgtctctttctcccccatcatccaacccaatcttccatcttgtttagttcccacctgccatgctggactaatttcccatgaaccaaaactaattatctgatattctacccttttaggtgtattgatactaatgtttactttctttttccrgmagaaaaaaatatgccacaagggttctacatctctcccagctctgctagggactcttgtggagtctaagagctgaaatgcttttttcaggatgttcaggtagggggtgatggagggtgactgtgttgatattcgtatctccagtgggaaagaccattgtgttttatcaggaattcaggcagtcttagcctgtgaagcaggtatttgttatgctgttatattgtttgctgccgtatgcaggtacaggctgctcagtggaaactagagaagactaatagcctgaaggtctggattcatgtt

SEQ ID NO: 47529 - DNA, 600 bp, Chicken  19866894291711_3
gcctgtcccaaatcccagtggtcatgctcaagagagtcagtgcttaactggtaagaggtctgtctgcagccagactccaaacccagggacgcactgatagagaaaacagttatttatagttagaatagagtgctgcatggcctctacttgtctctttctcccccatcatccaacccaatcttccatcttgtttagttcccacctgccatgctggactaatttcccatgaaccaaaactaattatctgatattctacccttttaggtgtattgatactaatgtttactttctttttccrgmagaaaaaaatatgccacaagggttctacatctctcccagctctgctagggactcttgtggagtctaagagctgaaatgcttttttcaggatgttcaggtagggggtgatggagggtgactgtgttgatattcgtatctccagtgggaaagaccattgtgttttatcaggaattcaggcagtcttagcctgtgaagcaggtatttgttatgctgttatattgtttgctgccgtatgcaggtacaggctgctcagtggaaactagagaagactaatagcctgaaggtctggattcatgttct

SEQ ID NO: 47530 - DNA, 600 bp, Chicken  19866894291712_1
atgaaggaattcctacatgaatatgcagttccatgcacaatcagggatcagaaatctgatagcgagcaaaccgaactgttagtacaaggtaggaagagtaagacgctccaagttactctacagcagtcatttaaagtatactgagtgagtgataacaagtaagaaggaaagtcctccgctgcctgctgtataagagtagcttccactacaagcacctttaaatatattttgaactactggattactgcacagatagcaaaacaaggtttgtttataataacgtgtactcaatgtacacaygacagctcaggtagctgatatgagaatagtacagttatgaagtctgttataatttaaacacaacaaaactaatttaaaagtaatcttcaagaagctacgaaacgtctgctgtattattctaaaaatgcaagtcagacaagctgctcacatttcagcttgaaaagtttgctcttcatgccatctctggatggtgtctttcccttccctagtttgtccagtcacttgacaacactaagtcaaacatattttggtgtttgatagaactatgataactggctagtttctgcggcgaaaggaaag

SEQ ID NO: 47531 - DNA, 600 bp, Chicken  19866894291718_1
tggtcaaggataggcctacacttccctgtgggtttcagagttgcctctgggcataatgaatctggacaccaagttcaatacagcagtgagggagtgatatgcttcatggctctctgaggttggtgcttcagcagccagctaatgattgcattgttaaagactgaggtgcgattgccactgagtcaaacaaattatctgcaaagatgccatgaaacatcagtgaattttgaatatctcagattttttccaggggttggaacttgactaagtaccattgctgatttggcaaaatgggaacasttttccctgaattttaaaaatttgtttcaaaaatgagggtacaaaatctttcatggaacagcatttaagtatgagttgagaaaattagatgtgagatggacccattccaatctcagaaattcagaaacagccttcacaactatttttgcctaaaatttcctaaaaagtattgtgacagcctcagaaccagaaacttttagcttggagcatggccaagggaaaaacttaaaagctaataagatgagaatcaggcagccttaatatagagatgtcatctgcattgcttgtaacattcctatt

SEQ ID NO: 47532 - DNA, 599 bp, Chicken  19866894291722_1
  misc_feature (1)..(9): n is any nucleotide
nnnnnnnnnggaagagagaagtccgtctgcaaccaatgccatacaagctaggaactggaggctgtcagaggaacagagaccttccaagcttgtatgctgctgggcagaccatagttgatctggcagtctagaaaagctctgctattgcattcactctgcagaaactgagctttttgatcaactacattagttctttcctgacatgattggagacttgttaatcaaaatccctctattattctcaaggtgttgttagcatcctgggatgattaaaccatacattccatcgtacctgtgatrgaaatcctcctcccaaacttactttttcacactgtgatctcagatgtactttgcgatctgcgccacagccttgcatcaattctaaaaggaggagctcaatctgagttccagggactggtgggctctttcctcatggraagtacaagtgcagcttatttagcatcactgctatttaggactacttagttagcatcactattgctgaccagaggcactcagtttggaatattttgttccaaactatttgttcaaaaaagcttacaggtgtttgtgtagcaacttgctccaagcttgattct

SEQ ID NO: 47533 - DNA, 599 bp, Chicken  19866894291722_2
  misc_feature (1)..(4): n is any nucleotide
nnnnggaagagagaagtccgtctgcaaccaatgccatacaagctaggaactggaggctgtcagaggaacagagaccttccaagcttgtatgctgctgggcagaccatagttgatctggcagtctagaaaagctctgctattgcattcactctgcagaaactgagctttttgatcaactacattagttctttcctgacatgattggagacttgttaatcaaaatccctctattattctcaaggtgttgttagcatcctgggatgattaaaccatacattccatcgtacctgtgatrgaaarcctcctcccaaacttactttttcacactgtgatctcagatgtactttgcgatctgcgccacagccttgcatcaattctaaaaggaggagctcaatctgagttccagggactggtgggctctttcctcatggraagtacaagtgcagcttatttagcatcactgctatttaggactacttagttagcatcactattgctgaccagaggcactcagtttggaatattttgttccaaactatttgttcaaaaaagcttacaggtgtttgtgtagcaacttgctccaagcttgattctcattt

SEQ ID NO: 47534 - DNA, 599 bp, Chicken  19866894291722_3
  misc_feature (1)..(3): n is any nucleotide
nnnggaagagagaagtccgtctgcaaccaatgccatacaagctaggaactggaggctgtcagaggaacagagaccttccaagcttgtatgctgctgggcagaccatagttgatctggcagtctagaaaagctctgctattgcattcactctgcagaaactgagctttttgatcaactacattagttctttcctgacatgattggagacttgttaatcaaaatccctctattattctcaaggtgttgttagcatcctgggatgattaaaccatacattccatcgtacctgtgatrgaaatrctcctcccaaacttactttttcacactgtgatctcagatgtactttgcgatctgcgccacagccttgcatcaattctaaaaggaggagctcaatctgagttccagggactggtgggctctttcctcatggraagtacaagtgcagcttatttagcatcactgctatttaggactacttagttagcatcactattgctgaccagaggcactcagtttggaatattttgttccaaactatttgttcaaaaaagcttacaggtgtttgtgtagcaacttgctccaagcttgattctcatttc

SEQ ID NO: 47535 - DNA, 599 bp, Chicken  19866894291722_4
  misc_feature (1)..(2): n is any nucleotide
nnggaagagagaagtccgtctgcaaccaatgccatacaagctaggaactggaggctgtcagaggaacagagaccttccaagcttgtatgctgctgggcagaccatagttgatctggcagtctagaaaagctctgctattgcattcactctgcagaaactgagctttttgatcaactacattagttctttcctgacatgattggagacttgttaatcaaaatccctctattattctcaaggtgttgttagcatcctgggatgattaaaccatacattccatcgtacctgtgatrgaaatcrtcctcccaaacttactttttcacactgtgatctcagatgtactttgcgatctgcgccacagccttgcatcaattctaaaaggaggagctcaatctgagttccagggactggtgggctctttcctcatggraagtacaagtgcagcttatttagcatcactgctatttaggactacttagttagcatcactattgctgaccagaggcactcagtttggaatattttgttccaaactatttgttcaaaaaagcttacaggtgtttgtgtagcaacttgctccaagcttgattctcatttca

SEQ ID NO: 47536 - DNA, 600 bp, Chicken  19866894291722_5
tctgctattgcattcactctgcagaaactgagctttttgatcaactacattagttctttcctgacatgattggagacttgttaatcaaaatccctctattattctcaaggtgttgttagcatcctgggatgattaaaccatacattccatcgtacctgtgatrgaaatcctcctcccaaacttactttttcacactgtgatctcagatgtactttgcgatctgcgccacagccttgcatcaattctaaaaggaggagctcaatctgagttccagggactggtgggctctttcctcatggraagtacaagtgcagcttatttagcatcactgctatttaggactacttagttagcatcactattgctgaccagaggcactcagtttggaatattttgttccaaactatttgttcaaaaaagcttacaggtgtttgtgtagcaacttgctccaagcttgattctcatttcatgacaatttcagctatctttgcactgttctgtggttcagcttcattttgactgcccctaggataagagcgggttcrtcttcctcccaagacagctggggaggcagcaagagggtctacacggggcgtgggc

SEQ ID NO: 47537 - DNA, 600 bp, Chicken  19866894291722_6
taaaaggaggagctcaatctgagttccagggactggtgggctctttcctcatggraagtacaagtgcagcttatttagcatcactgctatttaggactacttagttagcatcactattgctgaccagaggcactcagtttggaatattttgttccaaactatttgttcaaaaaagcttacaggtgtttgtgtagcaacttgctccaagcttgattctcatttcatgacaatttcagctatctttgcactgttctgtggttcagcttcattttgactgcccctaggataagagcgggttcrtcttcctcccaagacagctggggaggcagcaagagggtctacacggggcgtgggcagattgctggggcaagaaaggtttcagagcaaagtggaaagaggaattaactgcaaatcaaaagggaaaaaagtatttgctcactgcatcagcataggaaacagccaacacacttaccatttagattaatccttccgtttctgggtcccaccttaaaccagagcagagtccagtgattaggcaagtttaggagtgacttttgcaaagaattccagaaaactgctgactaaggaagcaggagaaat

SEQ ID NO: 47538 - DNA, 600 bp, Chicken  19866894291728_1
tgctaaactggactccatagctggagtgtccatttctctctctgaactacacaaggtgcctcagctgtggacatttacaagatagacttctaaaagtatgtcagatgaaattcacagaacaagttttgcagacaaggcatgtgacaatcatcacttttagaagagagcactgggagaaaatagtagaacaaccataaagactatttgtcataaagcaaatctcaacaagatcaggcaatcaaaatgtaagataatgaagggaagaatttttaaagggaaaactaagtctagtgggtatarcaatgtctaaaacatgacattagaggcacattggcctcacatggaggaaagacaagccacaaaaagggacaaagtgcagaagcactaacaattctgtgactacctgaaaaccaagaaaggactcatgcaagaatggaaatatgaagacttccaacagggaagaaaaggtaagggacaaaaccaaaaagcccacaggcaaactgagatacaactattcagggacccgaaacaaaaataaatgtctcatatactacagataaaagagaaaaatctaagtctatgactcagtgtgggaagaaa

SEQ ID NO: 47539 - DNA, 587 bp, Chicken  19866894291730_1
catttgatgtttttcatctcaaaaacttggtgttttctgcttttcttttgttaagagttttgaatggcatacttaacctctaatgcagccactgcagccaggaatccaagctgctcttatggtaatcaaggaaggaaggaggtgtctaatataactgctctttgaagactacctgaagtgaaacatacacctccttttggtgttcagaactgaaatcttcttttatgtagctgcctttcaggagactagaaagtagtctggaacttggagatgcagcactgtttttcatttcatttaaasatcttatgcaatagcagctgagatgctgagaggtggactgaaacaagcagattttcttaataagtgcttagagaaagaaaaacatggcaatttagtggagcaattcagggaagagccttagttcaaatagttaatttgaaaaaaaaaaaaatactgtgttttcacatatccagtacatttggtcagtttttccataaacagtgaatgtgttccatttgaagtgctatgccaggaagctttaatttctacatctaattctttcaatatccgaagccaatttttcaaat

SEQ ID NO: 47540 - DNA, 600 bp, Chicken  19866894291737_1
gttaattggagatttttttcctttgctcttttgaaatgtcttgtttttaagcaaaataaacaaatctaatcattgaatgttttaagatactatttactaccttcttcactgtgcctaaactgtctttcctctgcacagtggaagactgatgacaaagttcccataaaatctgggtttggtctgtcttcttcagatgaacattgcttacagatacctcagcagaactaagaaagttggtgaataaatccgtgtttaatctattcaagtgctgttaaatataaagtgtcaagcaaggaggayggataatgaaaacaagagcctctacttccaagcttcagatcaacagtgtgagcactaccaactctcactgagattgtctggtatctgcactggcttcagaaacacaagtcaatcgcactgaatagcattattactgtttttgaaaggcctaagggagacaagagccaacatcattgyatgctcccgagtttgtgctgctccagtgctcctaatgtcttttggcacttccagttacagcagcaaatagtaggctcccctaggtagaaccatccagacctgaactacaagagcttacaaccc

SEQ ID NO: 47541 - DNA, 592 bp, Chicken  19866894291737_2
ggtctgtcttcttcagatgaacattgcttacagatacctcagcagaactaagaaagttggtgaataaatccgtgtttaatctattcaagtgctgttaaatataaagtgtcaagcaaggaggayggataatgaaaacaagagcctctacttccaagcttcagatcaacagtgtgagcactaccaactctcactgagattgtctggtatctgcactggcttcagaaacacaagtcaatcgcactgaatagcattattactgtttttgaaaggcctaagggagacaagagccaacatcattgyatgctcccgagtttgtgctgctccagtgctcctaatgtcttttggcacttccagttacagcagcaaatagtaggctcccctaggtagaaccatccagacctgaactacaagagcttacaaccccatcttctacaatcctgatgctttgctctttgttactcctgcagttactaaggcaaaggaaaattctgctgagccctctcctagtcaaaagctttttacaactccaagagatagagcacagattaatgtatcactaaggtgacagcagaaagttgacttaattcaatgt

SEQ ID NO: 47542 - DNA, 600 bp, Chicken  19866894291738_1
atgcttgcagaacatttatggataccaaacagtggatgtgagtacagtgaaacggctggcagtgtatttcagctgtggtggcagtgagtcacctccactggtgcagatttttacaagcacagcatgtaggcttctgttcatcaaccagcaaaaaatgcacagctaatggtggcgcctatgttgaaaaatagtgctttatagttgagaaatattattataatgctctttgtatctgttgcagttttcatggaaataaataggaggctttactagatagatttggatatagatatagattgyatatatatggattatatcaatagaggtttttttggtgatcacattaagttgtctttcttgttgctctttagcatactataaatttcatatctttttctgatctctttatattctgttatttctagaactctgaaaacatatcatatatcattctaaaatacaaagctgactcgcctaggctgtaattttgtttctctaattaaaagttggtataactacataaagaaaaataaaaaaaaagacttcagatactgttgctagaaatagaatctgtacagtaggatattaaaaactgaaagt

SEQ ID NO: 47543 - DNA, 600 bp, Chicken  19866894291740_1
ttgtattcctctagaagagaagttatctctggtactgacagacagatggctctcccttgggttccagaggattacaaggcaaaatctttgtttcctgcaaagccacaggatcaaataggtgctttatgatcttaagtgctcctctgccccttaatttttcatgcatatttcagagttcagagttaaacaaacaattaaataatgaaagggggatatgggaagcaagaacaccagctgaagaatcatagaatcattgaatggcttaggtaggaagggacatcaatggtcacctagttccartctcccagccgtgggctagaccaggttgcccagggctccatccaacctggaaaaataaaacgtactcatgtctgtgattgcccagatcaaggtgctgcaccttgcacttggtgttgttgaatctcaagcttgatcagattaaggcttcacatgtagcactgctggagcatttgcctactgttaggtaggcaaagcgttattacaagttttggttgctgctgatgttagagtttcatttcagaagtgatggaacacacatgcagctctttgaatataagtgcaataaagtctgagggaaaa

SEQ ID NO: 47544 - DNA, 600 bp, Chicken  19866894291742_1
catgcatagaacaacacaattttgaacatctagacctaacatgaccctgacaggaactggggctttattaattgtgaatggtgtaaatgacaccttgccttatgtgtgcagtggtgaggctttgttcattcaaatcatttagctcagagaccaaatgctgtgcatacagagtcagagagaaaccaggatttggatctgggcttccagtcagagccaaatttcactctctgagtgaagtaggttgtacagcaaagtaacttatccatagggttggtgatgtgtgcattgctggatgaagcrctccctctattagagaggtgcatgcaggccaaacccatttcaaaacatgtaagaatggcagcatgatcagtcaaatgtgtgccttttctcaatgaaaaagatttcacactttgggtttgaatgttaattgaactattactcattaagccttatttattatgtcctgacgtatacataaggaatatgccatcctctggaaacgtggagggaattctagaaagctgtgttgtatttaccctgtgtcacactctacaaaggttgcaatcaaaggactgtgatgtcccagtaggacaaattacc

SEQ ID NO: 47545 - DNA, 599 bp, Chicken  19866894291747_1
  misc_feature (1)..(64): n is any nucleotide
nnnnnnnnnnnnnnnnnnnnnnnnnnnnnnnnnnnnnnnnnnnnnnnnnnnnnnnnnnnnnnnntgtaatagttctccatggactccagctcattttgatgctctcttctttgctcagcacgcatctcttgagcatatgctctcaggtcctttagtctttgcttctgaatttctaagccttcttcaaataagtttttaaatatctgccaacaattaaaaaagcaaacaaaaaatttcctagaaacttaaaaaagctttgttgttttggggagtactaaacctttatgaatataaggcttrgatcaaccaatttaatttgaatacgttgctttgtaagtatatgctaacgtatttcagctgctttatctcctgatgaaaggataatcacaaaaaagggtcactgcccttgaaaaagtacagttacacatctagtccgagtgctacaggcatggctgagctatgtttgtaatattcatttagctggaattcttataaaaagtacacttttcatatttgttcagtcaggatgaataagagtggctagaacagcaagtatatactgattaaggcttatttttcctatatgaactaaactctga

SEQ ID NO: 47546 - DNA, 600 bp, Chicken  19866894291747_2
atcaaccaatttaatttgaatacgttgctttgtaagtatatgctaacgtatttcagctgctttatctcctgatgaaaggataatcacaaaaaagggtcactgcccttgaaaaagtacagttacacatctagtccgagtgctacaggcatggctgagctatgtttgtaatattcatttagctggaattcttataaaaagtacacttttcatatttgttcagtcaggatgaataagagtggctagaacagcaagtatatactgattaaggcttatttttcctatatgaactaaactctgaaygyrtggagccacagcccaccctgcactctgttgtctaattaaggatgttcacccagatttccaataacaggaaattcagcctgcactcacacttgccattcatacaaaagaacactgctgcacagattcagagacaagcagtgctcaggtcaataacagtggatttaatgcacaatacttcctagactttaaaaggtgagaactgtacagctacttttgtaaaataaaataactgtgctggcttaacttagctgtgatgtgcagccctaaacagagttcatctgtcaggaagtccacttt

SEQ ID NO: 47547 - DNA, 600 bp, Chicken  19866894291747_3
caaccaatttaatttgaatacgttgctttgtaagtatatgctaacgtatttcagctgctttatctcctgatgaaaggataatcacaaaaaagggtcactgcccttgaaaaagtacagttacacatctagtccgagtgctacaggcatggctgagctatgtttgtaatattcatttagctggaattcttataaaaagtacacttttcatatttgttcagtcaggatgaataagagtggctagaacagcaagtatatactgattaaggcttatttttcctatatgaactaaactctgaaygyrtggagccacagcccaccctgcactctgttgtctaattaaggatgttcacccagatttccaataacaggaaattcagcctgcactcacacttgccattcatacaaaagaacactgctgcacagattcagagacaagcagtgctcaggtcaataacagtggatttaatgcacaatacttcctagactttaaaaggtgagaactgtacagctacttttgtaaaataaaataactgtgctggcttaacttagctgtgatgtgcagccctaaacagagttcatctgtcaggaagtccactttat

SEQ ID NO: 47548 - DNA, 600 bp, Chicken  19866894291747_4
aaccaatttaatttgaatacgttgctttgtaagtatatgctaacgtatttcagctgctttatctcctgatgaaaggataatcacaaaaaagggtcactgcccttgaaaaagtacagttacacatctagtccgagtgctacaggcatggctgagctatgtttgtaatattcatttagctggaattcttataaaaagtacacttttcatatttgttcagtcaggatgaataagagtggctagaacagcaagtatatactgattaaggcttatttttcctatatgaactaaactctgaaygyrtggagccacagcccaccctgcactctgttgtctaattaaggatgttcacccagatttccaataacaggaaattcagcctgcactcacacttgccattcatacaaaagaacactgctgcacagattcagagacaagcagtgctcaggtcaataacagtggatttaatgcacaatacttcctagactttaaaaggtgagaactgtacagctacttttgtaaaataaaataactgtgctggcttaacttagctgtgatgtgcagccctaaacagagttcatctgtcaggaagtccactttatt

SEQ ID NO: 47549 - DNA, 600 bp, Chicken  19866894291748_1
cagtggtaatgccaatgtcagtcctgttgcatctgttgagttgagttgcatctgttcagataagctgtattctcccagcatagatgtgaggctttgctgctgtctgtttgtgcactttgacatgtcttcacgtctcgtgtcagctctctttttgttccctgggatctgctggtggaaggcttggcttctctgcagcccttggaagtgctgctgaagctgagatgtgagccttgaagctctctgcaaagaaagcaaagcaactggaagagggaatcgtgtaacctctgctgagagccccartgcaagcgtttcatttactgtgctttgcaaagccagcttagatttcaccgtcaaaactccaaaaaacacaacaaacaaaaaaaagcagcgagtgctgatttrcttctgtttgatacaaagtcttccacatgtccacagaggttacgggttcgtgaagttcacagatgaactggagcagaagagggctctgacggagtgccagggggccgtggggctgggctccaaaccggtgcgcctgagtgtggctataccgaaagcgtgagtatgagagcacccagctggctgtgggagagcagccct

SEQ ID NO: 47550 - DNA, 600 bp, Chicken  19866894291748_2
tctgtttgtgcactttgacatgtcttcacgtctcgtgtcagctctctttttgttccctgggatctgctggtggaaggcttggcttctctgcagcccttggaagtgctgctgaagctgagatgtgagccttgaagctctctgcaaagaaagcaaagcaactggaagagggaatcgtgtaacctctgctgagagccccartgcaagcgtttcatttactgtgctttgcaaagccagcttagatttcaccgtcaaaactccaaaaaacacaacaaacaaaaaaaagcagcgagtgctgatttrcttctgtttgatacaaagtcttccacatgtccacagaggttacgggttcgtgaagttcacagatgaactggagcagaagagggctctgacggagtgccagggggccgtggggctgggctccaaaccggtgcgcctgagtgtggctataccgaaagcgtgagtatgagagcacccagctggctgtgggagagcagcccttgtgaagtcacacgtgtctttgggtgttcgatagtgctgtgggtgcatatcctgggtgtctccatcacgcagtagaggaatacacacgaatgtagtgaagcg

SEQ ID NO: 47551 - DNA, 600 bp, Chicken  19866894291754_1
tctagctcatttggagaagggtcactgtaccatgtggagaatttttgatgttttgtcagtccttttggccaataagcaggttttacaagttaagtattctgaaatacactatactgatcaatcttctaatggtacctattgcctatggagaaataagacagttggaattgagtgtaaggcagattatttctctccacgttaggatttggagaaggagatactataaaaaggaatgtgatggagtaacaatagtagcaggaaataggaggattttaagggcaggtgaaccaaacctcaagscctggaggctgctgaaatgttcacgagaagtttagaagtacttgaaatctgaacactttttcattttatttcattgaaattcaaattgcgttgaatctccattttaaaatgaatgtgcaggtgctcagtattcttagtttctttcacaactaaattacctcctgatgaaattctgtgagcaactttgtcacggtcacagatttcgagataactattcttattaaagaataaaatggaattacacaacaattcaattggccatatccagttctttagaatcccaatggaaaataattacag

SEQ ID NO: 47552 - DNA, 600 bp, Chicken  19866894291759_1
ttgtttaatggtgtgatgtgcttgaactggtacttaagccatgggttggttttgaaggatcttggtggaaatgcgtcgtcttagctatgcaatgcagctgatttcaaagatcttaaaagctgaagttctgctagggctgtgttgagtccttttagttttctacgaaggtgtgcagtgtattgtcagacacccaagtcaaggagcatgcttgactggtggggtaacgttatttaagtattcataattttttttccccctcataatttcaaagagggtatataccatggaagacaaataatrtctaacagtacatgttttagaagttttcaaaccttttgttagtagtttattaatacagaatcctttattacttaaagtcaccgtgctctgtgaaggagtagcaaaagactgaacatcagatgctccagaaatgccttgattccataccgactgttttctaagatgctacaagcattattttcttctagtaattaacagaaaatatcaactgttcaacttttcttagaaaagctttttcctaggtaaatttgaagttagtgtacttgacataaagcatgtgtgccattctaatttctgatt

SEQ ID NO: 47553 - DNA, 569 bp, Chicken  19866894291766_1
cgaacaacaacacagcgggaagcacagctacaaaacccctaaagggcatcagaaggaaacacctcctgggacgggagagcgtggtggcagatagggcagcgtccacccgcaccgctgaccgcagacagccctgcaggtagagcagacgaagccacgggctttccagctggaggaagagctgtttaacggcagaacaaaaggggccatcaaccaaaaggcggcggcatcacctcccaccacgggcaggacggtgagcgcacccacagcgggcggggttgcgagaggggcagcttcctcagrgggctcctctccaccaaggaaacacaaatcggcccttcagagacccctcagcgcaagaggagcgttggcaaagggaacacaggggctcagagcccgcccggagcccacccggcccggcaccacctgcagcccccgccccgcccgggccgtacctgagcgtggggccgatgcaggccgtgtcggtgctctcgatctcccgcaggatcctctcgtgctccgccgccgtctccaagctctccagctccgccatcttcacacggagggggggg

SEQ ID NO: 47554 - DNA, 600 bp, Chicken  19866894291773_1
acattgtatgctgcattagaatttaaatgccaaatgaaatttaagtggctcttaccaaatacaacgggtggacactttcactaaagatatggaagggtttttttgttttgttttgttttctttacaaaacttacatcacagtgtattgaaatagatttatatagtctgatcatttgggataaattgctaatttacctggactatgaacaggaagtgttagagagatccctaagtaaccaggatatatttcttaattttggaaatacaatatatcttaccaattttattccttagaccatraagaataactgcacaaaaatgtcctacactgcctctctgtcctcttttaaagtgactctactctttaaaatcatgcttcaagcataagcctttctgtggctataaactaatatctccactatgcagaaatctgatattttcctgcgctatctgatgtwagatcaatactgcaagaaggcctgggcaaaaaggatatgtaccttaagtgtttctctgataactgtctgaagaagaagcaaatatgctgcagccctggggctgcagccccatactagcaaataaactgtacaatgtaaggca

SEQ ID NO: 47555 - DNA, 473 bp, Chicken  19866894291773_2
atatagtctgatcatttgggataaattgctaatttacctggactatgaacaggaagtgttagagagatccctaagtaaccaggatatatttcttaattttggaaatacaatatatcttaccaattttattccttagaccatraagaataactgcacaaaaatgtcctacactgcctctctgtcctcttttaaagtgactctactctttaaaatcatgcttcaagcataagcctttctgtggctataaactaatatctccactatgcagaaatctgatattttcctgcgctatctgatgtwagatcaatactgcaagaaggcctgggcaaaaaggatatgtaccttaagtgtttctctgataactgtctgaagaagaagcaaatatgctgcagccctggggctgcagccccatactagcaaataaactgtacaatgtaaggcatatctcacgtgcccaagcagcccaagtaaga

SEQ ID NO: 47556 - DNA, 600 bp, Chicken  19866894291778_1
aagaaagcaaaacgaaaggtcatagagctgcttttcacttcaccttacccaaagattttgttagattcagtgctgcaccatttctggctccagtgactgcacaaacaagctgtttctctcacttcttaggcaatttcagccgttccgggagttcttaatgtcttaattgcaattaactgtagttacactttcgaagcatcattttgatccaagtttaagaggatacctcagtgaagaactcaggccacagcaaagaacattctgttgtataatcaaaaagtgaaggagcaagtgcacacrttaaaagtggccgaataggttggtgccacttcatcttcagtgactataatgtgttactagacttagggcatggatagttgttgtcacttagaagctctaacagaaaggcaaaygctacagaacatccacacaaagctcatgaggaaacctgcagaccckattagtagtaataatatttttctgaagtagtatagcaaggctacaaagtggtgaggtgctggaacaggctgttggtcttctgcagggccaagygctgacccagaacattcccatgctaacaaatagccttgcctgtcwgtt

SEQ ID NO: 47557 - DNA, 600 bp, Chicken  19866894291778_2
ttctctcacttcttaggcaatttcagccgttccgggagttcttaatgtcttaattgcaattaactgtagttacactttcgaagcatcattttgatccaagtttaagaggatacctcagtgaagaactcaggccacagcaaagaacattctgttgtataatcaaaaagtgaaggagcaagtgcacacrttaaaagtggccgaataggttggtgccacttcatcttcagtgactataatgtgttactagacttagggcatggatagttgttgtcacttagaagctctaacagaaaggcaaaygctacagaacatccacacaaagctcatgaggaaacctgcagaccckattagtagtaataatatttttctgaagtagtatagcaaggctacaaagtggtgaggtgctggaacaggctgttggtcttctgcagggccaagygctgacccagaacattcccatgctaacaaatagccttgcctgtcwgttcccattgatgacccggagcttctgtacagactgarctaaaacacacgcattgcttccagcaggatcaaagcctgtgattgctagtcccttaggacrgggacagggtcctaagt

SEQ ID NO: 47558 - DNA, 600 bp, Chicken  19866894291778_3
gtcttaattgcaattaactgtagttacactttcgaagcatcattttgatccaagtttaagaggatacctcagtgaagaactcaggccacagcaaagaacattctgttgtataatcaaaaagtgaaggagcaagtgcacacrttaaaagtggccgaataggttggtgccacttcatcttcagtgactataatgtgttactagacttagggcatggatagttgttgtcacttagaagctctaacagaaaggcaaaygctacagaacatccacacaaagctcatgaggaaacctgcagaccckattagtagtaataatatttttctgaagtagtatagcaaggctacaaagtggtgaggtgctggaacaggctgttggtcttctgcagggccaagygctgacccagaacattcccatgctaacaaatagccttgcctgtcwgttcccattgatgacccggagcttctgtacagactgarctaaaacacacgcattgcttccagcaggatcaaagcctgtgattgctagtcccttaggacrgggacagggtcctaagtgactgggggctgtacgtcaggcacacgataacagcacagtgcaaat

SEQ ID NO: 47559 - DNA, 600 bp, Chicken  19866894291778_4
aagaacattctgttgtataatcaaaaagtgaaggagcaagtgcacacrttaaaagtggccgaataggttggtgccacttcatcttcagtgactataatgtgttactagacttagggcatggatagttgttgtcacttagaagctctaacagaaaggcaaaygctacagaacatccacacaaagctcatgaggaaacctgcagaccckattagtagtaataatatttttctgaagtagtatagcaaggctacaaagtggtgaggtgctggaacaggctgttggtcttctgcagggccaagygctgacccagaacattcccatgctaacaaatagccttgcctgtcwgttcccattgatgacccggagcttctgtacagactgarctaaaacacacgcattgcttccagcaggatcaaagcctgtgattgctagtcccttaggacrgggacagggtcctaagtgactgggggctgtacgtcaggcacacgataacagcacagtgcaaatatggtttagaaggtaaaataaacattatcttccacccaaattagcatcagcttttagcaataaagaacttacttgcaccaagcttggctcccc

SEQ ID NO: 47560 - DNA, 600 bp, Chicken  19866894291778_5
acrttaaaagtggccgaataggttggtgccacttcatcttcagtgactataatgtgttactagacttagggcatggatagttgttgtcacttagaagctctaacagaaaggcaaaygctacagaacatccacacaaagctcatgaggaaacctgcagaccckattagtagtaataatatttttctgaagtagtatagcaaggctacaaagtggtgaggtgctggaacaggctgttggtcttctgcagggccaagygctgacccagaacattcccatgctaacaaatagccttgcctgtcwgttcccattgatgacccggagcttctgtacagactgarctaaaacacacgcattgcttccagcaggatcaaagcctgtgattgctagtcccttaggacrgggacagggtcctaagtgactgggggctgtacgtcaggcacacgataacagcacagtgcaaatatggtttagaaggtaaaataaacattatcttccacccaaattagcatcagcttttagcaataaagaacttacttgcaccaagcttggctccccctaggaaatgatcacggtagccaaaagttgactggtcccagacag

SEQ ID NO: 47561 - DNA, 600 bp, Chicken  19866894291778_6
ttcagtgactataatgtgttactagacttagggcatggatagttgttgtcacttagaagctctaacagaaaggcaaaygctacagaacatccacacaaagctcatgaggaaacctgcagaccckattagtagtaataatatttttctgaagtagtatagcaaggctacaaagtggtgaggtgctggaacaggctgttggtcttctgcagggccaagygctgacccagaacattcccatgctaacaaatagccttgcctgtcwgttcccattgatgacccggagcttctgtacagactgarctaaaacacacgcattgcttccagcaggatcaaagcctgtgattgctagtcccttaggacrgggacagggtcctaagtgactgggggctgtacgtcaggcacacgataacagcacagtgcaaatatggtttagaaggtaaaataaacattatcttccacccaaattagcatcagcttttagcaataaagaacttacttgcaccaagcttggctccccctaggaaatgatcacggtagccaaaagttgactggtcccagacagtcaaatgtagacatgactgctgtagctgagctggggta

SEQ ID NO: 47562 - DNA, 600 bp, Chicken  19866894291778_7
ctaacagaaaggcaaaygctacagaacatccacacaaagctcatgaggaaacctgcagaccckattagtagtaataatatttttctgaagtagtatagcaaggctacaaagtggtgaggtgctggaacaggctgttggtcttctgcagggccaagygctgacccagaacattcccatgctaacaaatagccttgcctgtcwgttcccattgatgacccggagcttctgtacagactgarctaaaacacacgcattgcttccagcaggatcaaagcctgtgattgctagtcccttaggacrgggacagggtcctaagtgactgggggctgtacgtcaggcacacgataacagcacagtgcaaatatggtttagaaggtaaaataaacattatcttccacccaaattagcatcagcttttagcaataaagaacttacttgcaccaagcttggctccccctaggaaatgatcacggtagccaaaagttgactggtcccagacagtcaaatgtagacatgactgctgtagctgagctggggtaacatcaaagacaaacaagtgtttccactgaggacagtcttctttcttcaccacaggtgact

SEQ ID NO: 47563 - DNA, 599 bp, Chicken  19866894291780_1
  misc_feature (1)..(117): n is any nucleotide
nnnnnnnnnnnnnnnnnnnnnnnnnnnnnnnnnnnnnnnnnnnnnnnnnnnnnnnnnnnnnnnnnnnnnnnnnnnnnnnnnnnnnnnnnnnnnnnnnnnnnnnnnnnnnnnnnnnnntgtgagaccaatagcaacaaagaagtatacacgtatataaataaacctgttttcagaataataaaaaaaacacacacaaaataaaataaatctcaaatacatatgtgtgtgcgtgtatatatatgaataaatcctggcatttaacactagaagccttatctttccctagaggaaaaatactcrtgaacagtccaggaactccccgccctgttgctgaatggcatttttcctctgcattccatggggaatgcrcagaccctcaccacttcaacccctctcatacagcacaacccagagatttgcagggaaatcctggagatctgagagcgaacatttaaaggccagggagcttctgctaggagaccctgtgcttccacgctatctcctgaggtctacctatcataatgacagcgctacctctttgtgcagctccagggagagctgtgcaaatattggattatctggttcaacggccaaacaaa

SEQ ID NO: 47564 - DNA, 599 bp, Chicken  19866894291780_2
  misc_feature (1)..(48): n is any nucleotide
nnnnnnnnnnnnnnnnnnnnnnnnnnnnnnnnnnnnnnnnnnnnnnnntgtgagaccaatagcaacaaagaagtatacacgtatataaataaacctgttttcagaataataaaaaaaacacacacaaaataaaataaatctcaaatacatatgtgtgtgcgtgtatatatatgaataaatcctggcatttaacactagaagccttatctttccctagaggaaaaatactcrtgaacagtccaggaactccccgccctgttgctgaatggcatttttcctctgcattccatggggaatgcrcagaccctcaccacttcaacccctctcatacagcacaacccagagatttgcagggaaatcctggagatctgagagcgaacatttaaaggccagggagcttctgctaggagaccctgtgcttccacgctatctcctgaggtctacctatcataatgacagcgctacctctttgtgcagctccagggagagctgtgcaaatattggattatctggttcaacggccaaacaaaaaacaatcatgggtagaaaaaatttcagttgaatctacttagaataaaagctaagggggtggggagtat

SEQ ID NO: 47565 - DNA, 600 bp, Chicken  19866894291780_3
ttcaacccctctcatacagcacaacccagagatttgcagggaaatcctggagatctgagagcgaacatttaaaggccagggagcttctgctaggagaccctgtgcttccacgctatctcctgaggtctacctatcataatgacagcgctacctctttgtgcagctccagggagagctgtgcaaatattggattatctggttcaacggccaaacaaaaaacaatcatgggtagaaaaaatttcagttgaatctacttagaataaaagctaagggggtggggagtatggctaaggaaaaagraaaaaaagcaaggaggaacaaaggaggaaatatttgcttttaatgtattaaatcctctcctctatatttttgacatgaaaggaaaaaaaaaggccacacaaatttaaatcaccgtttaaacccttcctttttctcggtgtgatttgtatttgtttgtttgttttccttgcaataagccttcgctaaatttcatgtcacaccaaaacagatccagtctccctgaaaaatttgtgtccttcagcaaatctactgcttagtgtcactttgccttcatccagctctaggaagaattgtacagtc

SEQ ID NO: 47566 - DNA, 600 bp, Chicken  19866894291784_1
ccgtcgactatttggcacacagttcccttctggcattggatggcgctgcaggagggagcgaggtggacgcagtggggccacccatctctcatctggcacgtggtcctcttggggcagtgcactctgcaagaaggctgcgctggggccgtcttgcttggcacacagcgaggcgaaccgccctccatcctgcacgccgtcccgctctcgcaggggacgttgtcgcaagagagagccggcgatggaggcacttccctgcggaggagcaacttgtgcacacacttgggccacccctccaccatytggcaacgggtccccttctggcagcgratatcccggcagctcggcgagacgtgcacgcagcgaggccagtcgtccaccatcttgcaccgtgtgccctcctcgcagctgaggtgacggcaggaaggtttggggatgcagcgtggtttcccggccaccatctggcaccgcgtcccttccttgcaggggaacacccgacacgatgggacggggacgcactgaggccacccacccagcatcctgcatcgcgttccggccttgcagtggaagttgttgcaggaaggcaacgggacgcatttgggg

SEQ ID NO: 47567 - DNA, 600 bp, Chicken  19866894291784_2
ttctggcattggatggcgctgcaggagggagcgaggtggacgcagtggggccacccatctctcatctggcacgtggtcctcttggggcagtgcactctgcaagaaggctgcgctggggccgtcttgcttggcacacagcgaggcgaaccgccctccatcctgcacgccgtcccgctctcgcaggggacgttgtcgcaagagagagccggcgatggaggcacttccctgcggaggagcaacttgtgcacacacttgggccacccctccaccatytggcaacgggtccccttctggcagcgratatcccggcagctcggcgagacgtgcacgcagcgaggccagtcgtccaccatcttgcaccgtgtgccctcctcgcagctgaggtgacggcaggaaggtttggggatgcagcgtggtttcccggccaccatctggcaccgcgtcccttccttgcaggggaacacccgacacgatgggacggggacgcactgaggccacccacccagcatcctgcatcgcgttccggccttgcagtggaagttgttgcaggaaggcaacgggacgcatttggggaccccgtccaccaccttgcaccgagtt

SEQ ID NO: 47568 - DNA, 600 bp, Chicken  19866894291793_1
acatgctttactggtttctttttttttccccgcttaccttttgtttttaaaaagtttgtcagaacgaagagtgcacatttttgtatttctgtatttacttgtggtaaacataatggctgcaaaattagctgaaactatttctaagtaaagagttctatcattaaatagttccccatagtttcttatttttcagcttagtcctatgaaatgctgcctatttactctaagctctgagtgaggagagaatgagaaattatactatgcagaagcattaacctcattcatattatgttaagtacwctggtaagcacgccattgcaatttcattgatggacattgaatatatgatgaattcgatcaagttatagtggtttaatgaatggccagcccttttacaaagtaatgtttttcagtctgacttctctgtaggcagtaatgtagatttgcattgcctctggcaaaaaagagttcaagctcagtttctyttggatgaatgtaacttaatctctagtctataatataataaaggaggcctctgttttcttaagagaaaatggaagccatgattgctttttgcaagaaacccaattccatcagttt

SEQ ID NO: 47569 - DNA, 600 bp, Chicken  19866894291793_2
tttttcagcttagtcctatgaaatgctgcctatttactctaagctctgagtgaggagagaatgagaaattatactatgcagaagcattaacctcattcatattatgttaagtacwctggtaagcacgccattgcaatttcattgatggacattgaatatatgatgaattcgatcaagttatagtggtttaatgaatggccagcccttttacaaagtaatgtttttcagtctgacttctctgtaggcagtaatgtagatttgcattgcctctggcaaaaaagagttcaagctcagtttctyttggatgaatgtaacttaatctctagtctataatataataaaggaggcctctgttttcttaagagaaaatggaagccatgattgctttttgcaagaaacccaattccatcagtttgtgttatgcatactcttgagaacttatgggttaatcgtccatatatgtactacttagtccagtatgtattttgtatgacagtactggtatacatgagtagaattatctaatctgtacatccaaatagcagctaagtatatctctgggtaaaatcttgagatctggactctatctgggaacaggca

SEQ ID NO: 47570 - DNA, 600 bp, Chicken  19866894291794_1
agtattcatgtggtggggctcctgctgtccttgtcaagactgagtgggcaggctaaggaaatttgcccttcaaaaaatgagaatcatttgagtcagggaagctcttccctcgtgcgtgtggtttccttgccagcccaggggatgacgaatggttcaccgtgatccctgtgcagcaacaagggactgctgggctgagatttggtgggtggtgctgggtgcaagacggagcacaggcagtgctggcagtgtgggtgggagctgggctgcggggaatttgggatagatgaatgtgtgctggcmtggggtgcaacattccatgggtgctggaggatgctcataaggaagaggtgactgtggcttggtttctggatggtgactgggttcagcagggcctggtcctcagctgatgcccatgttgttgtgagcctgtgtccttctgtgggtgaggctttctcttccctgcttccataagacaacagagctgcaggctcttcctgctctcatctctggccagtatacagtaaggatccgctaagacgtatttgcttacgtaagaaaagtagagtgggtttacttgtgttcatatctgcgggtgtattt

SEQ ID NO: 47571 - DNA, 600 bp, Chicken  19866894291800_1
aagaatttctttgtaattgcaattgaaaaaacacctgccctatgaatacatttataaatatggttaattactaaacaattgtaattccgtatttgggaatcattgaatcataggaatctctgaaggacctcagaaggttatctagtacagcctcccctgcttaaagcagttttgagtagaggggaaagatcaccttcctctgcttggtggcaacactccttaatgcagaccaggatgtggctggccttgccacaaggcttattatcataacatgctggctcatgttcaacttgattcctyatgttcttttcagcaaaactgcattgcaacctggtccacagcctgtactcctgcatgggtttcttcatcccaaggtacaggacttttattttcagctgttgaatttcacaagattcctgttagccaacttctccagtctattcagatccccctgaatggcaacacaagccaaacacaaatctatcactcctcccaattcagcaccacctacaaacctgctgagggtgcattctatcccatcatccagatcactgatgatgttagttggtactggacccagaactggcctgtagggtatat

SEQ ID NO: 47572 - DNA, 567 bp, Chicken  19866894291814_1
tggccttgttttgccttgccttgccttgtgtgcctggcctggacttgcctggacttgccttgttttgacaggccttgccttgcctatccttgccttgccaggttgggcttgacctttcctttccttgcctggcccagcgtttccttgcctttttctggccatgacttgccttgctttgccttgccttgccttgcctggccttgcctggaattgccttgcattgccttgccttgtctggccttgccttgccttgcctggactttcttggctttccctgggtttgccttgctttgccttgcwttgcctggctttgccttgcctagcctggccttgcctggccttgccttgcattgccttgccttgcctggctttgccttgccttgccttgacttgccgtgcctggcctggattgtttgggcttgcctggctttgccttgccttgcctggccttgacatgccttgccgtgactggcctggacttgcattgccttgcctggacctgcctcgtcttgactggtcttgcctggcctttcctggccttgcctttccttccctggccttgcctgg

SEQ ID NO: 47573 - DNA, 600 bp, Chicken  19866894291816_1
tactggcctttcacctttctagtaattactggaaatgagtataggtcagagtttctttgaacacctttggatgttctttctgctgctctcattttctctagccttatgctcactcacccaagtattgatgttatccttttttttctcttgaatgacatcttaatgagtacataatgacacacttaatgagttttatgcaacaggaagagaacaaggtacacttgactcttgtgtacagctcaccatagtgggtagaatggccagacttcaaatgaatctctaaattggagcttatgtttsagacttctggcccttcaagagacmgtagtaatccatagctcatcttcatcttagcaaaatcaaagacatttttataygtacttcagtgttgaaaatgtattgtattctactccacaagggattgaatakgtaagccagaagtatattgtatcacacaaactccatattgatcattcagctcatgaagctcaaataaggaatctgtggtctgtaatrcaaaatagacccatgactatgtaacggtcacaatatctgctttttgtgaaggcaaaaatcagacctgtcagatgaaatctagtt

SEQ ID NO: 47574 - DNA, 600 bp, Chicken  19866894291816_2
attactggaaatgagtataggtcagagtttctttgaacacctttggatgttctttctgctgctctcattttctctagccttatgctcactcacccaagtattgatgttatccttttttttctcttgaatgacatcttaatgagtacataatgacacacttaatgagttttatgcaacaggaagagaacaaggtacacttgactcttgtgtacagctcaccatagtgggtagaatggccagacttcaaatgaatctctaaattggagcttatgtttsagacttctggcccttcaagagacmgtagtaatccatagctcatcttcatcttagcaaaatcaaagacatttttataygtacttcagtgttgaaaatgtattgtattctactccacaagggattgaatakgtaagccagaagtatattgtatcacacaaactccatattgatcattcagctcatgaagctcaaataaggaatctgtggtctgtaatrcaaaatagacccatgactatgtaacggtcacaatatctgctttttgtgaaggcaaaaatcagacctgtcagatgaaatctagttgggtgatagcatgttatgacaggt

SEQ ID NO: 47575 - DNA, 600 bp, Chicken  19866894291816_3
ttctgctgctctcattttctctagccttatgctcactcacccaagtattgatgttatccttttttttctcttgaatgacatcttaatgagtacataatgacacacttaatgagttttatgcaacaggaagagaacaaggtacacttgactcttgtgtacagctcaccatagtgggtagaatggccagacttcaaatgaatctctaaattggagcttatgtttsagacttctggcccttcaagagacmgtagtaatccatagctcatcttcatcttagcaaaatcaaagacatttttataygtacttcagtgttgaaaatgtattgtattctactccacaagggattgaatakgtaagccagaagtatattgtatcacacaaactccatattgatcattcagctcatgaagctcaaataaggaatctgtggtctgtaatrcaaaatagacccatgactatgtaacggtcacaatatctgctttttgtgaaggcaaaaatcagacctgtcagatgaaatctagttgggtgatagcatgttatgacaggttagatttgagtgttgactataaaatcctgttgagagtttcctgggcagcaagg

SEQ ID NO: 47576 - DNA, 600 bp, Chicken  19866894291816_4
gttatccttttttttctcttgaatgacatcttaatgagtacataatgacacacttaatgagttttatgcaacaggaagagaacaaggtacacttgactcttgtgtacagctcaccatagtgggtagaatggccagacttcaaatgaatctctaaattggagcttatgtttsagacttctggcccttcaagagacmgtagtaatccatagctcatcttcatcttagcaaaatcaaagacatttttataygtacttcagtgttgaaaatgtattgtattctactccacaagggattgaatakgtaagccagaagtatattgtatcacacaaactccatattgatcattcagctcatgaagctcaaataaggaatctgtggtctgtaatrcaaaatagacccatgactatgtaacggtcacaatatctgctttttgtgaaggcaaaaatcagacctgtcagatgaaatctagttgggtgatagcatgttatgacaggttagatttgagtgttgactataaaatcctgttgagagtttcctgggcagcaaggcaggatagacttctgctgtcctggggctgagttaagtctttttgttaagcac

SEQ ID NO: 47577 - DNA, 600 bp, Chicken  19866894291816_5
tacacttgactcttgtgtacagctcaccatagtgggtagaatggccagacttcaaatgaatctctaaattggagcttatgtttsagacttctggcccttcaagagacmgtagtaatccatagctcatcttcatcttagcaaaatcaaagacatttttataygtacttcagtgttgaaaatgtattgtattctactccacaagggattgaatakgtaagccagaagtatattgtatcacacaaactccatattgatcattcagctcatgaagctcaaataaggaatctgtggtctgtaatrcaaaatagacccatgactatgtaacggtcacaatatctgctttttgtgaaggcaaaaatcagacctgtcagatgaaatctagttgggtgatagcatgttatgacaggttagatttgagtgttgactataaaatcctgttgagagtttcctgggcagcaaggcaggatagacttctgctgtcctggggctgagttaagtctttttgttaagcactactactgcgtcccctgagcatttttggctctgtgggaatataagacagcagcagtttcctgtgcaaagtaactcgctgcagctgtt

SEQ ID NO: 47578 - DNA, 600 bp, Chicken  19866894291824_1
aatgacaatcctgactaatggcataggagaaaccacaaggtgggctttttagaagaacatgggttgcagatctacaaaagctccctgtggcaaggacttagagcagcctgaaatgttcacaggtccagaggcagcctggtaaaactccgtacctgggggcaagaaccttatcaggccaggctggatggggctatgagcaacctggtctagtgggaggtgcccctgcctgtaacaggggggttggaactagataatcttaaaggtcccttccaacccaaacaattctatgatctgaaggcycaacactgaggagcagattagaaacagcaaattcttggttttctgtggagtttactgtgacctgagagttctgctctgcacaatcctggataaggaaagactctaacagtacagtcccatctgaagcctcattcctttttttgatgttctttctgaaagctctaaatggtggcagttttcagatggccaaccagttcctcatgtcaagccttacgttctgaggttccctcagttctctggggctccactacagtctacgttcccaatagtggctccatagaaaactcttccagagcatgc

SEQ ID NO: 47579 - DNA, 445 bp, Chicken  19866894291826_1
aagaatagaactgcattacctacagctaacttcacatcccgagtgttcttctccacaaagggctctcagccttattctagatgttggaaaaaagcccacatagaagcaagttctcctgacgggaactgcaggccaggagggcccacagcaaagcaggggaagcaaaaactggaatttgttatgaagattatttacagtatttaaaagcactgatgaccgtaaagtgaaccaaagtgacagaaaaataacatcgctgtgttcaagtgccatgctcctatgagaatatggaacagcttcatstgctgcaatgaaacgttcgagctgatcatttcttgtccttggcacggtgctgacacactttttaaagctttaattaaaaaaagaatcaagacaacactacaaattgcatagactcgtgccctacagtctcttctgaccactaatt

SEQ ID NO: 47580 - DNA, 600 bp, Chicken  19866894291830_1
gtcaaagtacattaattcctccctttcttctctgtttttatactctctaaatgttcataagagcaacttacacaagtctctttcaacttgctcccatgccaaagtcctagtgcaactaagggagctgcttacagtaaatcccagttgtgtatagttgcaagagcatgtaccaatagcatgtatgtcagttcatgcactactaaatattattagctgcttactaagactagaagtgcacccagatactgacctcgattttctagtctctgaaattcagaggaatactgggataatgttaayatttcagccagtgtagaagataaaaataaacttgcagctagattcacctttgtagtccagccctatggacatcaggcattttttactggggtcataatttcttgcaagggattgtaccagtgggtgtacagaacacatgaagatgctgaagaggacagagttcagcaagcagcatccaatgcgtatctgaatggaagtcatccagggtccaacaaagaagactcttcactgacaggagatgaagatctggatccacttcaaaatacccaccaggaatcaggtaaagattttaatggggga

SEQ ID NO: 47581 - DNA, 600 bp, Chicken  19866894291835_1
atggaaaaattgagtcacattgaaaaggtaattaagctttttatttgttttatgtttttaaacagtgttctgcgtattttctgtagcatagctctgttctgctctttctttgctggttggtcagtgagtagggccagagatctgccttcattagcagccccaatgctttgtgagatatttctggaattaatgttcagcatggaagtaaagaatggggggttgcaaggaaaaagatcttgtgctttttcataaggtggaatcgtagtttccttaattacagaagagacaactgggatgcakaaggaggtgttgacttggtctgtgctcattagttggtcatcttctcataaaagaaagaaatatattaggcaggaattttcttagtctaggattttagtcttctgtagctgtttaaactttraagtacctctcattatgaagatcttgagcacgctgctgtttgctgttgattttgttaggtaggttaagtctacaactttcttaaaaaaaaaacaaaaaacttttggaactcagtgattttctccatgttgccttctgcatctgggatcagaggaagttctggttctatgtatcgcactg

SEQ ID NO: 47582 - DNA, 600 bp, Chicken  19866894291835_2
cagtgagtagggccagagatctgccttcattagcagccccaatgctttgtgagatatttctggaattaatgttcagcatggaagtaaagaatggggggttgcaaggaaaaagatcttgtgctttttcataaggtggaatcgtagtttccttaattacagaagagacaactgggatgcakaaggaggtgttgacttggtctgtgctcattagttggtcatcttctcataaaagaaagaaatatattaggcaggaattttcttagtctaggattttagtcttctgtagctgtttaaactttraagtacctctcattatgaagatcttgagcacgctgctgtttgctgttgattttgttaggtaggttaagtctacaactttcttaaaaaaaaaacaaaaaacttttggaactcagtgattttctccatgttgccttctgcatctgggatcagaggaagttctggttctatgtatcgcactgtcacagagccttgtggatgcaggatagatttatttcccagagaatttaattgacctcccactgacttcaaattaacatatagatgttcttggattccttttttgtttgtttatcaggaaaa

SEQ ID NO: 47583 - DNA, 600 bp, Chicken  19866894291836_1
atttttattaatttcttatgcaactttttctaatttagcagatcatgctaatctcatattcatgacagataagctgatcccaaagaaagccaacaaaacttgagatgcatttgattacatacacatacctagcatgcaatcttatgatgacactcttgaattacatcacagccaactgaatgaaattcagcagtctatgtatcatcacttacagcagctcggtatcccctgagcctgaggtttgtagaggatacaattattgcttcagtatttttcaatggcaaacacattgaatctgcwaatctgtgtattttatttctacagaattcactttaaagttacctcttctctattctckctctcagtttcacagaactgatttataagygtcttcctccatgatttaaggagaagtaacataagatgcctgcaytcctagggctctttacaagatatgcttcatagcatrgagattatttatctttcctgaaacaagcagctgtgtcttatggtaagayagacaaaaaccaacaacatgtaaaacaaaacaaaagagcatttttgaacaagaccaaacaagttttattataaattgccctc

SEQ ID NO: 47584 - DNA, 600 bp, Chicken  19866894291836_2
ttcatgacagataagctgatcccaaagaaagccaacaaaacttgagatgcatttgattacatacacatacctagcatgcaatcttatgatgacactcttgaattacatcacagccaactgaatgaaattcagcagtctatgtatcatcacttacagcagctcggtatcccctgagcctgaggtttgtagaggatacaattattgcttcagtatttttcaatggcaaacacattgaatctgcwaatctgtgtattttatttctacagaattcactttaaagttacctcttctctattctckctctcagtttcacagaactgatttataagygtcttcctccatgatttaaggagaagtaacataagatgcctgcaytcctagggctctttacaagatatgcttcatagcatrgagattatttatctttcctgaaacaagcagctgtgtcttatggtaagayagacaaaaaccaacaacatgtaaaacaaaacaaaagagcatttttgaacaagaccaaacaagttttattataaattgccctcattgctttagggcttaagaccactcaatgacagaggaccagttcagaaatcactactc

SEQ ID NO: 47585 - DNA, 600 bp, Chicken  19866894291836_3
gccaacaaaacttgagatgcatttgattacatacacatacctagcatgcaatcttatgatgacactcttgaattacatcacagccaactgaatgaaattcagcagtctatgtatcatcacttacagcagctcggtatcccctgagcctgaggtttgtagaggatacaattattgcttcagtatttttcaatggcaaacacattgaatctgcwaatctgtgtattttatttctacagaattcactttaaagttacctcttctctattctckctctcagtttcacagaactgatttataagygtcttcctccatgatttaaggagaagtaacataagatgcctgcaytcctagggctctttacaagatatgcttcatagcatrgagattatttatctttcctgaaacaagcagctgtgtcttatggtaagayagacaaaaaccaacaacatgtaaaacaaaacaaaagagcatttttgaacaagaccaaacaagttttattataaattgccctcattgctttagggcttaagaccactcaatgacagaggaccagttcagaaatcactactcacctatcgggattggaggcttggagcccat

SEQ ID NO: 47586 - DNA, 600 bp, Chicken  19866894291836_4
atgcaatcttatgatgacactcttgaattacatcacagccaactgaatgaaattcagcagtctatgtatcatcacttacagcagctcggtatcccctgagcctgaggtttgtagaggatacaattattgcttcagtatttttcaatggcaaacacattgaatctgcwaatctgtgtattttatttctacagaattcactttaaagttacctcttctctattctckctctcagtttcacagaactgatttataagygtcttcctccatgatttaaggagaagtaacataagatgcctgcaytcctagggctctttacaagatatgcttcatagcatrgagattatttatctttcctgaaacaagcagctgtgtcttatggtaagayagacaaaaaccaacaacatgtaaaacaaaacaaaagagcatttttgaacaagaccaaacaagttttattataaattgccctcattgctttagggcttaagaccactcaatgacagaggaccagttcagaaatcactactcacctatcgggattggaggcttggagcccattctcatttgttacgataactttgaaacaaggttcatttccaggat

SEQ ID NO: 47587 - DNA, 600 bp, Chicken  19866894291836_5
agccaactgaatgaaattcagcagtctatgtatcatcacttacagcagctcggtatcccctgagcctgaggtttgtagaggatacaattattgcttcagtatttttcaatggcaaacacattgaatctgcwaatctgtgtattttatttctacagaattcactttaaagttacctcttctctattctckctctcagtttcacagaactgatttataagygtcttcctccatgatttaaggagaagtaacataagatgcctgcaytcctagggctctttacaagatatgcttcatagcatrgagattatttatctttcctgaaacaagcagctgtgtcttatggtaagayagacaaaaaccaacaacatgtaaaacaaaacaaaagagcatttttgaacaagaccaaacaagttttattataaattgccctcattgctttagggcttaagaccactcaatgacagaggaccagttcagaaatcactactcacctatcgggattggaggcttggagcccattctcatttgttacgataactttgaaacaaggttcatttccaggatttggtttctttttcagttcatcttccattgcttcat

SEQ ID NO: 47588 - DNA, 600 bp, Chicken  19866894291836_6
tcggtatcccctgagcctgaggtttgtagaggatacaattattgcttcagtatttttcaatggcaaacacattgaatctgcwaatctgtgtattttatttctacagaattcactttaaagttacctcttctctattctckctctcagtttcacagaactgatttataagygtcttcctccatgatttaaggagaagtaacataagatgcctgcaytcctagggctctttacaagatatgcttcatagcatrgagattatttatctttcctgaaacaagcagctgtgtcttatggtaagayagacaaaaaccaacaacatgtaaaacaaaacaaaagagcatttttgaacaagaccaaacaagttttattataaattgccctcattgctttagggcttaagaccactcaatgacagaggaccagttcagaaatcactactcacctatcgggattggaggcttggagcccattctcatttgttacgataactttgaaacaaggttcatttccaggatttggtttctttttcagttcatcttccattgcttcatcaccttcctcttcctcatctacctcttctacttgcattatcccaaagta

SEQ ID NO: 47589 - DNA, 600 bp, Chicken  19866894291836_7
aaattgccctcattgctttagggcttaagaccactcaatgacagaggaccagttcagaaatcactactcacctatcgggattggaggcttggagcccattctcatttgttacgataactttgaaacaaggttcatttccaggatttggtttctttttcagttcatcttccattgcttcatcaccttcctcttcctcatctacctcttctacttgcattatcccaaagtagtcaccagcatcaaacacctgaaagtgcacagagtacaagcagttagttgaggcagtactcatatatgcayaatacaacgctgagaaggcacagacaactttggcctgcattctgacaaaactgctgtctagcattcattcttgcacatttcaatagagttatttgggaagtttctctgcttaacatcagcaggaagctttgatggtttccttggcatcaacagatctattgacgatcatccactacttcaactaatcacagaagaagctgagaacaatatttttgtttaactccaaaatcaacaattgagttaatcactgcaaaatacaatctcatattatggcatgcaacgctcaacaaaccaagatgt

SEQ ID NO: 47590 - DNA, 581 bp, Chicken  19866894291849_1
aatggagaataataaacaatacaaaagtatccctttatgtgaagtctcagcacttttgttttcatacattgagatgccaaaagctgacaggataatttctaacattccaaatcactcagatgcagtcctatcagtccagaaacacattcatcttcttaacgatactcaactgtggcctacccaacatataatgaatgacttttctatatttaaaattgaaatgagagcatatatcacaaattgctcacagaaataaaggagcaaaatatcacaaacatatcatgatacacagaagaagtmccattttttcacgctacataatagttgagccttaaaacaatgatgcttccttcaagtctataaacccttttgttcatcatacagaaaatgaaataaagacatcaaactcatgatcagtatgcactgtcagagttttgttgcagctcctacctatacatcctctttcttagactttctttttgttaccaggtatctcttccagtatttgtctacaatattcttgacatactgtcagtgcagcatgtgtaatctatttcaaagacacaaaagatttttttttt

SEQ ID NO: 47591 - DNA, 600 bp, Chicken  19866894291851_1
ctccatataacagaggggagactgatgaagaagaattcagaggtgtctccaagcatcagaatgtgcagtggcagagcaagagaaaccccacttctggcatttcctgggaagagagtgagtgtctggccaccctttcttcaggaacaatggtccctgtccctttgaaaacttactgaaaataactttattgttactattgttattattattactattagcatggcacaaaccatgtctgggtcctgtagccaaggcaaaactcttgccgaggcctacaaccatcccaaagattgtacaaasgagcagatagcaaagagccaataattaagaaactggtaaggcacaagggccaggaggcagccaccagcccctgcagaggccatgtaggcaccagtttctgaatgcatttgttctgctctgctcaacagttttgttcttttcaactctatttttaaatatatatatatatatatttaatatatatatatgtatatatatatatatattaaacagagtagttttcattaatgactactttacatcttgggactcctgcagagctgataatttgcaagaaaaatatccaagagcaaaagcact

SEQ ID NO: 47592 - DNA, 600 bp, Chicken  19866894291854_1
taactcaatatcctaaatatagatatttaccagtatctatgcaggttatttagaacatacataaaggggtggaagatctcaaagacttaagtggcaactgaacactggtaccaggcacaaggaatctcaaatgtactttaaccactccatgtaggaaagcaaattaaaatctctgttccatgggtagttcacacaactcatgatagcggtgagatcattacaattggaatgagaaatacaaaggaccagtatcacatcagggacttaaacacagattttctttgaagggacctgtgaagrgggctatcatagagaattcaagagcatggaaaataataccaaaatatatgattctcaaatttctagcagttcctacagtcacattgcagcatttatgccagaactggtaaggaaagtccttaaagtacaaggtttcttaaactaggctataatccatatatcccacatttttctttatcagggaatttgtcttttcagttagagaaaaaaaaatgacaactgaactcctgtgcatgacctctgtcaacagtcaagatatcttaaaattaagtgtcagaccagtatatgtagcagaaccag

SEQ ID NO: 47593 - DNA, 600 bp, Chicken  19866894291856_1
ggctgtgatcagtggcatggagtctagctgggtgcatgtagctggtgatgttctctggcggtcagtataggatctggtcatgttcagcattttcatcagtgacctggatggaagggatatatgcaccctcggcaagtttgctatgatacgaagctgggaggaggggctgacacactgaaggctgtgctgcctttcaacaggttctggacagactggagagttgtgcagagagaaccctgatgaggttcagcaagggcaagtgtcccaaagtcccacacctggggaggaacaactgcaagyatcagtgcagactgaggactgtgctgctggagaggagctcagaagagaaggaccctgggtgtcttagtggccaacagggtgaccatgaaccagcagtttgccctggtggccagaaaggccaatgggaccccagggtgcatcgcacagagcgtggccagcagggtgagggggaggttctcctcccttctgctctgccctggggaggccacatccggagcactgggcccagtgctgggctgcccagttcaaggcaggcagggaactgctggggagagcccggcagagggctatggaagagat

SEQ ID NO: 47594 - DNA, 600 bp, Chicken  19866894291858_1
acagaactactcgctttgtgttcccatgtgagaattcacagctccagagcagttcttgccttgagagaaatatacagtcttgtgcaaattgcttggtttaagtcctgctgtatgactctgttctcattcccaaacggggcagcgtttcggctgttggtgacacatggactgtttgctttccccacctgactgcagatgtttttgacttcaccttaaaatcaggatcagggtctgtgtctgtacagcctgggccacggagtgcttcccccagggagatttgctgccttcaatccccacacrctgccctgcccytgggagggctctctgggatggctgcccccggtgccggcagcatttggagaagtgcatccacctatgctgtatgtttgcccccaaagtgagaaytgttttcagcacacgtcaccactgtgtgtcttctgacccggtgcttttccagccaggtcttggcaagtgttctcttcaccagagtgtggagaagtgatttacccacatctgcaggcgtgataaatggcgcagagacaccaggtaacgcagttagtacccttagtgtgctctgtgtcctgtggctcgaggggagcc

SEQ ID NO: 47595 - DNA, 600 bp, Chicken  19866894291858_2
gctttgtgttcccatgtgagaattcacagctccagagcagttcttgccttgagagaaatatacagtcttgtgcaaattgcttggtttaagtcctgctgtatgactctgttctcattcccaaacggggcagcgtttcggctgttggtgacacatggactgtttgctttccccacctgactgcagatgtttttgacttcaccttaaaatcaggatcagggtctgtgtctgtacagcctgggccacggagtgcttcccccagggagatttgctgccttcaatccccacacrctgccctgcccytgggagggctctctgggatggctgcccccggtgccggcagcatttggagaagtgcatccacctatgctgtatgtttgcccccaaagtgagaaytgttttcagcacacgtcaccactgtgtgtcttctgacccggtgcttttccagccaggtcttggcaagtgttctcttcaccagagtgtggagaagtgatttacccacatctgcaggcgtgataaatggcgcagagacaccaggtaacgcagttagtacccttagtgtgctctgtgtcctgtggctcgaggggagccacactcagtaac

SEQ ID NO: 47596 - DNA, 600 bp, Chicken  19866894291858_3
tgctgtatgactctgttctcattcccaaacggggcagcgtttcggctgttggtgacacatggactgtttgctttccccacctgactgcagatgtttttgacttcaccttaaaatcaggatcagggtctgtgtctgtacagcctgggccacggagtgcttcccccagggagatttgctgccttcaatccccacacrctgccctgcccytgggagggctctctgggatggctgcccccggtgccggcagcatttggagaagtgcatccacctatgctgtatgtttgcccccaaagtgagaaytgttttcagcacacgtcaccactgtgtgtcttctgacccggtgcttttccagccaggtcttggcaagtgttctcttcaccagagtgtggagaagtgatttacccacatctgcaggcgtgataaatggcgcagagacaccaggtaacgcagttagtacccttagtgtgctctgtgtcctgtggctcgaggggagccacactcagtaacctcactttatttccttgcagtgcctttgtctacgtgaagctttctggactgacggacagacgctgccctgcagactgctcctgccattgagat

SEQ ID NO: 47597 - DNA, 600 bp, Chicken  19866894291861_1
ctcttctttccagatgctccaggaaactctgaaggattcaaggattctgccctaagtcaccctcagggaaagaaacacgataccttgccaagttggcaaggaagatacactcaaagtcatatagcccagagatacggaggtgagcggatcagtcattgtgtgacaaggtagcactggaaaaacatggggcttacccattcataatagcctgctttcaaaaaggaggcagggccttggagaagcagcagtgcatgctaatgcgttacctaggaatggggaactctagtcccttcaacccascacagctgtacagaaggctgctgacacatgttgcaatatacacatgaatcgtcactgcagaaatagctgaaagatacgtcttgtgctacaactcagcaatactccccaagttaacagctgggctgacattaattataaatccttttccctttttctcatctctaataggtcatctaatctatgccaaacgaattgcagggcttttcagcaaaacagattgtcaaaagctctttcatctaccggagaggtttaaataattggacatttctactggaaaactaatctctgatctaatagctg

SEQ ID NO: 47598 - DNA, 600 bp, Chicken  19866894291862_1
acgctcacagtttaattgtgttgaatattttacaccacatttaaggaaacatttctgataaaagtttgtgtacattgcaactcataaacatgatgggtttagacttcataggagatgtacacaactggacatctaatctaaacagatgtaatttttgcatacggaaacatgggtatctgcatatgtatgtagaagtatatcacattttcttcagccatgattcctcttagtataaaataatttcttaaaggcatatatatatgctctcagacaggccatgatttttaaccaatgtcatamgctactgtttattcttcaatagaagaaaactactgttggtagytgtccttaattcttgttaaatggacrcctagtgtcctaaaattcacaggtttttgttcctcctcctctgattacagggtaaactacgtaacatccatgtctgcaacttctcccccaggccgtatcaaatgtgtgctgaaatacatctctgacagaaatcctagaccttcaagactgaattattattagtcagctattgttacttttgtggaaggagaggcattttgctatttgacatctggcagtcatttaaagaac

SEQ ID NO: 47599 - DNA, 600 bp, Chicken  19866894291862_2
aggaaacatttctgataaaagtttgtgtacattgcaactcataaacatgatgggtttagacttcataggagatgtacacaactggacatctaatctaaacagatgtaatttttgcatacggaaacatgggtatctgcatatgtatgtagaagtatatcacattttcttcagccatgattcctcttagtataaaataatttcttaaaggcatatatatatgctctcagacaggccatgatttttaaccaatgtcatamgctactgtttattcttcaatagaagaaaactactgttggtagytgtccttaattcttgttaaatggacrcctagtgtcctaaaattcacaggtttttgttcctcctcctctgattacagggtaaactacgtaacatccatgtctgcaacttctcccccaggccgtatcaaatgtgtgctgaaatacatctctgacagaaatcctagaccttcaagactgaattattattagtcagctattgttacttttgtggaaggagaggcattttgctatttgacatctggcagtcatttaaagaaccagcaactcctcattcacaccactacacatatctgattatatt

SEQ ID NO: 47600 - DNA, 600 bp, Chicken  19866894291862_3
gtacattgcaactcataaacatgatgggtttagacttcataggagatgtacacaactggacatctaatctaaacagatgtaatttttgcatacggaaacatgggtatctgcatatgtatgtagaagtatatcacattttcttcagccatgattcctcttagtataaaataatttcttaaaggcatatatatatgctctcagacaggccatgatttttaaccaatgtcatamgctactgtttattcttcaatagaagaaaactactgttggtagytgtccttaattcttgttaaatggacrcctagtgtcctaaaattcacaggtttttgttcctcctcctctgattacagggtaaactacgtaacatccatgtctgcaacttctcccccaggccgtatcaaatgtgtgctgaaatacatctctgacagaaatcctagaccttcaagactgaattattattagtcagctattgttacttttgtggaaggagaggcattttgctatttgacatctggcagtcatttaaagaaccagcaactcctcattcacaccactacacatatctgattatatttgatttgcttgcagtattttcttggc

SEQ ID NO: 47601 - DNA, 600 bp, Chicken  19866894291864_1
tggctttctgggctgtaagtgcacattgctggctcatgtttaatcttttatcaactgacactcccaaatccttctcctcagggctgctctcaacccattctccaccaacctgtatctgtgcttgggattgcccagacccaggtgcaggaccttgcacttggccttgttgaacttcatgagtttcatgaagctggcatgggactacctctcaagcctgtctagatccctctggataacatccctccctctaccatgataactacgctactcagcttgttgtcgtgtacagacttgatgagrgtgtactcaatcccactgtccacrtcacctacaaagatgttaaatagcaccagtcccaacaccaatccctagggaatgccactcatcrctggtctccacttggacactgagccatcgactgtaactccttgagtgtgatcatccagacaattccttgtccggagggtgttccatccatcaaatccatttttcttcaatttggtgaccaggatgtcctgtgggacaggtcactttctcagtggccgtttgttatgctatgcatctttttctttttactttttgttccctataattgttgga

SEQ ID NO: 47602 - DNA, 600 bp, Chicken  19866894291864_2
attgctggctcatgtttaatcttttatcaactgacactcccaaatccttctcctcagggctgctctcaacccattctccaccaacctgtatctgtgcttgggattgcccagacccaggtgcaggaccttgcacttggccttgttgaacttcatgagtttcatgaagctggcatgggactacctctcaagcctgtctagatccctctggataacatccctccctctaccatgataactacgctactcagcttgttgtcgtgtacagacttgatgagrgtgtactcaatcccactgtccacrtcacctacaaagatgttaaatagcaccagtcccaacaccaatccctagggaatgccactcatcrctggtctccacttggacactgagccatcgactgtaactccttgagtgtgatcatccagacaattccttgtccggagggtgttccatccatcaaatccatttttcttcaatttggtgaccaggatgtcctgtgggacaggtcactttctcagtggccgtttgttatgctatgcatctttttctttttactttttgttccctataattgttggatattgattctagttattaattgca

SEQ ID NO: 47603 - DNA, 600 bp, Chicken  19866894291864_3
ctcaacccattctccaccaacctgtatctgtgcttgggattgcccagacccaggtgcaggaccttgcacttggccttgttgaacttcatgagtttcatgaagctggcatgggactacctctcaagcctgtctagatccctctggataacatccctccctctaccatgataactacgctactcagcttgttgtcgtgtacagacttgatgagrgtgtactcaatcccactgtccacrtcacctacaaagatgttaaatagcaccagtcccaacaccaatccctagggaatgccactcatcrctggtctccacttggacactgagccatcgactgtaactccttgagtgtgatcatccagacaattccttgtccggagggtgttccatccatcaaatccatttttcttcaatttggtgaccaggatgtcctgtgggacaggtcactttctcagtggccgtttgttatgctatgcatctttttctttttactttttgttccctataattgttggatattgattctagttattaattgcattcatctttttaacaactatggtcgtattcaacttcatcagcttacaccctgtgagcagttaaa

SEQ ID NO: 47604 - DNA, 600 bp, Chicken  19866894291866_1
cagtgttttattggcattacatacatttcatgggctttaaaagtagccagtgtttctctttgcagtactgcagtctggttccattttctcacgtgtgttcagtcatgcagagtgctgaaagaacgcagcgtttctgtattaaataagaaaattcattaagaaaattaataacaaatacaccacagggaaaatacataacatgctcttaactctgcctttcagtcatggcctgtatatgaagaagtctacaacaaaatggttgaacttgcagcgtttttagacctgcctcgttttccagayataacagacaactgctttctgcatccagatgtgttgtgcatgaagtacttgatggaagctaatttacccggtaaatattttcccaaacctgaaccgataatgtttttcttcagttcattaaaccccagcaaaaagacttaaattactactcttaaaagtgcctcctcttttcctcttgttttatacatgcttaagcttgaactgaaagataatttccatggaaagtgcctccatcaaacatccaagtaggttctgaaggcccagatgtgcagggctctctggtgctgactctgaggctgt

SEQ ID NO: 47605 - DNA, 599 bp, Chicken  19866894291868_1
  misc_feature (1)..(226): n is any nucleotide
nnnnnnnnnnnnnnnnnnnnnnnnnnnnnnnnnnnnnnnnnnnnnnnnnnnnnnnnnnnnnnnnnnnnnnnnnnnnnnnnnnnnnnnnnnnnnnnnnnnnnnnnnnnnnnnnnnnnnnnnnnnnnnnnnnnnnnnnnnnnnnnnnnnnnnnnnnnnnnnnnnnnnnnnnnnnnnnnnnnnnnnnnnnnnnnnnnnnnnnnnnnnnnnnnnnnnnnnnnnnnnnnnngggagccaatacttgaatgctttttgcattattgtttttctcttgcctttgtgtttgttgctgaatgtttgctyggttttttttgtttgtttgtttgttttgcttgcttgcttgtttgttttgacttattttttatagttacagaaacaactcttttctaactcaagctggagatttcaaggcagaatttctaggagaaataccagcacgtaggctgagaaatgaagtcagagaggtaatttatttcaaacaagtagctcagataccaaggttgcaacacagtttaaaatgaaaaacaaaacaaaatagatttttagaagttaaaggaaatatatctaagtaaagaatgctgtaatgcactgtgtagaagcaa

SEQ ID NO: 47606 - DNA, 600 bp, Chicken  19866894291868_2
ttgttttgcttgcttgcttgtttgttttgacttattttttatagttacagaaacaactcttttctaactcaagctggagatttcaaggcagaatttctaggagaaataccagcacgtaggctgagaaatgaagtcagagaggtaatttatttcaaacaagtagctcagataccaaggttgcaacacagtttaaaatgaaaaacaaaacaaaatagatttttagaagttaaaggaaatatatctaagtaaagaatgctgtaatgcactgtgtagaagcaagagtaccagacatagaagaartagtaacatgatagcaaatcttaagtttcagcatcatgatgactgtggatatacaaagctgaaattgcatcttcacaatttttttttccctctgctctgaatcatgatcagtctgctctgtttgatttcaaagtatcttttgacttggacaatgaattgctgctttgattytctctctctsctttttttgatcttcttttctatttgaaagacagacaaaatggagagaataagtttatttgctttttacactgtttattttggggaattgcactttgaaaactatttctgaaaatcaat

SEQ ID NO: 47607 - DNA, 600 bp, Chicken  19866894291868_3
ccaaggttgcaacacagtttaaaatgaaaaacaaaacaaaatagatttttagaagttaaaggaaatatatctaagtaaagaatgctgtaatgcactgtgtagaagcaagagtaccagacatagaagaartagtaacatgatagcaaatcttaagtttcagcatcatgatgactgtggatatacaaagctgaaattgcatcttcacaatttttttttccctctgctctgaatcatgatcagtctgctctgtttgatttcaaagtatcttttgacttggacaatgaattgctgctttgattytctctctctsctttttttgatcttcttttctatttgaaagacagacaaaatggagagaataagtttatttgctttttacactgtttattttggggaattgcactttgaaaactatttctgaaaatcaattgcaactgcttgtgtatctttctttttcatttcaaattcccctcctcttgatttccagagctgtaggctccttctcagctgtaaaataagtagtttagaagtctagtgattccaattacaaagtctctaatcagtagactttcccaacagagaacagaagataagctgcat

SEQ ID NO: 47608 - DNA, 600 bp, Chicken  19866894291868_4
aacacagtttaaaatgaaaaacaaaacaaaatagatttttagaagttaaaggaaatatatctaagtaaagaatgctgtaatgcactgtgtagaagcaagagtaccagacatagaagaartagtaacatgatagcaaatcttaagtttcagcatcatgatgactgtggatatacaaagctgaaattgcatcttcacaatttttttttccctctgctctgaatcatgatcagtctgctctgtttgatttcaaagtatcttttgacttggacaatgaattgctgctttgattytctctctctsctttttttgatcttcttttctatttgaaagacagacaaaatggagagaataagtttatttgctttttacactgtttattttggggaattgcactttgaaaactatttctgaaaatcaattgcaactgcttgtgtatctttctttttcatttcaaattcccctcctcttgatttccagagctgtaggctccttctcagctgtaaaataagtagtttagaagtctagtgattccaattacaaagtctctaatcagtagactttcccaacagagaacagaagataagctgcatgtctatgtct

SEQ ID NO: 47609 - DNA, 600 bp, Chicken  19866894291879_1
gctgtaagtggttgcaattaggttttgacattaacatcttaccctgcattaggctgaccgggggagtgagcaacttgctagatactgttctcttggtctctgccagcagactttgcgagacagtagggtatcgatttacagatgggaggctaactttgcaatcaggtgggttaggtactttttccctttttttaagctaactattaaaatcctcaggaatacagtgagctctgaatagaagtgaagaaatatctgagcttaggttattaactacagcccataaactatgaaaagctgtgsactgttcctgcagtagaaacaggtgaggcaacggtatcaccttgttcttttccattacayaktgtgtaacctaaaagacrtttcatgtctttggccgcaagcctttgtggactccaaagcacaaggtcggcacaggtctctccatgcctagttccaggccatcatttaatttctattacgtttccccttctccattcatgctgtgatgtccctgctgacagctaatatccataaaagaatcaataaagaatattattaataataattaaagcaygggtagctcattacactgagtgggct

SEQ ID NO: 47610 - DNA, 600 bp, Chicken  19866894291879_2
ggggagtgagcaacttgctagatactgttctcttggtctctgccagcagactttgcgagacagtagggtatcgatttacagatgggaggctaactttgcaatcaggtgggttaggtactttttccctttttttaagctaactattaaaatcctcaggaatacagtgagctctgaatagaagtgaagaaatatctgagcttaggttattaactacagcccataaactatgaaaagctgtgsactgttcctgcagtagaaacaggtgaggcaacggtatcaccttgttcttttccattacayaktgtgtaacctaaaagacrtttcatgtctttggccgcaagcctttgtggactccaaagcacaaggtcggcacaggtctctccatgcctagttccaggccatcatttaatttctattacgtttccccttctccattcatgctgtgatgtccctgctgacagctaatatccataaaagaatcaataaagaatattattaataataattaaagcaygggtagctcattacactgagtgggcttgtggagctggagaagcctggagtaacttcaatgatctctgggtgtaactgagagcagga

SEQ ID NO: 47611 - DNA, 600 bp, Chicken  19866894291879_3
ggagtgagcaacttgctagatactgttctcttggtctctgccagcagactttgcgagacagtagggtatcgatttacagatgggaggctaactttgcaatcaggtgggttaggtactttttccctttttttaagctaactattaaaatcctcaggaatacagtgagctctgaatagaagtgaagaaatatctgagcttaggttattaactacagcccataaactatgaaaagctgtgsactgttcctgcagtagaaacaggtgaggcaacggtatcaccttgttcttttccattacayaktgtgtaacctaaaagacrtttcatgtctttggccgcaagcctttgtggactccaaagcacaaggtcggcacaggtctctccatgcctagttccaggccatcatttaatttctattacgtttccccttctccattcatgctgtgatgtccctgctgacagctaatatccataaaagaatcaataaagaatattattaataataattaaagcaygggtagctcattacactgagtgggcttgtggagctggagaagcctggagtaacttcaatgatctctgggtgtaactgagagcaggatg

SEQ ID NO: 47612 - DNA, 600 bp, Chicken  19866894291879_4
gatactgttctcttggtctctgccagcagactttgcgagacagtagggtatcgatttacagatgggaggctaactttgcaatcaggtgggttaggtactttttccctttttttaagctaactattaaaatcctcaggaatacagtgagctctgaatagaagtgaagaaatatctgagcttaggttattaactacagcccataaactatgaaaagctgtgsactgttcctgcagtagaaacaggtgaggcaacggtatcaccttgttcttttccattacayaktgtgtaacctaaaagacrtttcatgtctttggccgcaagcctttgtggactccaaagcacaaggtcggcacaggtctctccatgcctagttccaggccatcatttaatttctattacgtttccccttctccattcatgctgtgatgtccctgctgacagctaatatccataaaagaatcaataaagaatattattaataataattaaagcaygggtagctcattacactgagtgggcttgtggagctggagaagcctggagtaacttcaatgatctctgggtgtaactgagagcaggatgcagcccctggctctagga

SEQ ID NO: 47613 - DNA, 600 bp, Chicken  19866894291879_5
agcccataaactatgaaaagctgtgsactgttcctgcagtagaaacaggtgaggcaacggtatcaccttgttcttttccattacayaktgtgtaacctaaaagacrtttcatgtctttggccgcaagcctttgtggactccaaagcacaaggtcggcacaggtctctccatgcctagttccaggccatcatttaatttctattacgtttccccttctccattcatgctgtgatgtccctgctgacagctaatatccataaaagaatcaataaagaatattattaataataattaaagcaygggtagctcattacactgagtgggcttgtggagctggagaagcctggagtaacttcaatgatctctgggtgtaactgagagcaggatgcagcccctggctctaggagttcctcttaaattactgttaaaagctggaaatcatgacttctgcttctacgtggttgaaatgccatgtaactcaggaaaattgggggggggggggaggggcggagtgaggaggactgaagtcagcccgtgagcaagcttttgtgcttggggaaaaacacaaatctgttttcaagcagtctttgtcataaataa

SEQ ID NO: 47614 - DNA, 586 bp, Chicken  19866894291883_1
acttacactgagagaaatctttcctacttcattaggaacagcacatctgtttgaaggtccatcaagaagaacatcggtaagtttcatgtaagcaaactccagttttctcaacaggagtaatgctacttttcaaagtaattggcagtgcaactgtaagtagcagcttgcagaggtttactccccatttccagtggattttctattcaggaggaagcgactggaccacataagtgctacaaacaagagatgttggaaacatgaagtagttcctcagtactgagtaacaggcagctgcagatmctcctggtgttagtgttggaatcaacgggctacgaagggcctactttacatttctgtacatggaataaaatgaaataacactacagagtaaaaaaaaaaacaaataataaaaagttgcagtggtttaagacctgtgtgactgaaatcagaatcagattctgccaggctattccccttctttagttttcgtgtcttgggtgccctcgcggagcctggccagaacagcctttttctgactttctaaaataaacaaaccaaagcagttaagcaaacaaactgaaatttt

SEQ ID NO: 47615 - DNA, 599 bp, Chicken  19866894291884_1
  misc_feature (1)..(196): n is any nucleotide
nnnnnnnnnnnnnnnnnnnnnnnnnnnnnnnnnnnnnnnnnnnnnnnnnnnnnnnnnnnnnnnnnnnnnnnnnnnnnnnnnnnnnnnnnnnnnnnnnnnnnnnnnnnnnnnnnnnnnnnnnnnnnnnnnnnnnnnnnnnnnnnnnnnnnnnnnnnnnnnnnnnnnnnnnnnnnnnnnnnnnnnnnnnnnnnnnnnnctccccccagagcctcctatttgactacgtcaagccatagtcattcctctgacacacctcccagcagcccactgtacagtacagcactggatctccttccctcrtgtwgcattccctttccacttggctgaggtctgcatgtggaattgcacagggttgtctgccaactttgaaatgagagatgtgtccaactactattggttgatctcagtttgtaagggctaaaacaacattatttgaagcttcagacaaataccagaaaggaaaaaaaaaatctttgctgttaatttaccggaacacattatcaccaagacctaaagggaagaaacttgaagaacaaattgcacagattgtgcaagctattaattttccaagctgatgaacaagctgaataatgcatacc

SEQ ID NO: 47616 - DNA, 599 bp, Chicken  19866894291884_2
  misc_feature (1)..(192): n is any nucleotide
nnnnnnnnnnnnnnnnnnnnnnnnnnnnnnnnnnnnnnnnnnnnnnnnnnnnnnnnnnnnnnnnnnnnnnnnnnnnnnnnnnnnnnnnnnnnnnnnnnnnnnnnnnnnnnnnnnnnnnnnnnnnnnnnnnnnnnnnnnnnnnnnnnnnnnnnnnnnnnnnnnnnnnnnnnnnnnnnnnnnnnnnnnnnnnnnctccccccagagcctcctatttgactacgtcaagccatagtcattcctctgacacacctcccagcagcccactgtacagtacagcactggatctccttccctcrtgtwgcattccctttccacttggctgaggtctgcatgtggaattgcacagggttgtctgccaactttgaaatgagagatgtgtccaactactattggttgatctcagtttgtaagggctaaaacaacattatttgaagcttcagacaaataccagaaaggaaaaaaaaaatctttgctgttaatttaccggaacacattatcaccaagacctaaagggaagaaacttgaagaacaaattgcacagattgtgcaagctattaattttccaagctgatgaacaagctgaataatgcataccctag

SEQ ID NO: 47617 - DNA, 600 bp, Chicken  19866894291885_1
atctacttctgatacagtgcactgcttgcaaatgtgggcatactttagtacctagcaggattgcactgattttgcattacacaaggctggccaagccctgtggaaaatttctatgaactgttctacttaactacatcaaaactagataagtctgggtagtgtctgagtttcagctgaagaataagccctgtaattgccctggagcatcatttctcatgttgtaatggaacagcagtctcttccaaggctgcagtagggtccttaatcagtttcaagaggcaatttttctgctccctgagmgtttcctttatttgattctccttccttctgttcaccacaaagcctaggccatgcttgaggcaaccagcatgtaaggcacttttgaaagttccttttcrtggatttaggagctcaagttctgctgacgtttatgtaccttaggcattttcaagagcttcatgttgtggtcagcaggtgaatatttgcactgctcatctacctctgacaaaattctctgttgcagactgtgctaaatttggcactttcacctaagcccagccctactagttcggagttctgtaactgtcctcggctttaata

SEQ ID NO: 47618 - DNA, 600 bp, Chicken  19866894291885_2
tgtggaaaatttctatgaactgttctacttaactacatcaaaactagataagtctgggtagtgtctgagtttcagctgaagaataagccctgtaattgccctggagcatcatttctcatgttgtaatggaacagcagtctcttccaaggctgcagtagggtccttaatcagtttcaagaggcaatttttctgctccctgagmgtttcctttatttgattctccttccttctgttcaccacaaagcctaggccatgcttgaggcaaccagcatgtaaggcacttttgaaagttccttttcrtggatttaggagctcaagttctgctgacgtttatgtaccttaggcattttcaagagcttcatgttgtggtcagcaggtgaatatttgcactgctcatctacctctgacaaaattctctgttgcagactgtgctaaatttggcactttcacctaagcccagccctactagttcggagttctgtaactgtcctcggctttaatattttcccatttttaaaccattagatgttaattctaagtctcacattcctttcttttcaggaactcattattttcggggttttaacaacaatagccagc

SEQ ID NO: 47619 - DNA, 395 bp, Chicken  19866894291900_1
ctcctcagaacagactttacagagatttctggcactttttcttccagcactggctgaaaatagagcagaaagagactccagcctcctcccagttattctgtcagatctggagaggggtgactaattcacaataaataatagtagtttcttcattttctgccttttattgttgttttttgtgggttttttttccctttctccttagtttttcaaaactatatgttaagcaatttctgcaagtaatttcaggtagtttggcagcattatattgcagcgatctgctatataagcaggcgtgaygggacacataggttacaatacagacttcagagtctttcatctgaatgaacatacatcatagaaacaagtttgcagttcagattgcacaactctca

SEQ ID NO: 47620 - DNA, 592 bp, Chicken  19866894291902_1
ccaggcagacagagcctttaagttgttatatataagcacttggaggaacatacaataaaagtgagctgtgatgccattagaaacctgacagagcttatctgcaaaatatacttctattatggaacatcaattaaaaaatgagaagctgcacttctacagtgcacaggtgtgactagctatacaggtacccagctttttttttcttcaatagcatctatgtgcacaactttgcatggcccacacataaactgacattatgcacagattgctatgattgcctttttcagaaaacaaaacatrcaggcatcactgaaaataaattaactacttattatttgtaatcttctgtcataattgayccatgtactaaacragatctgcatcacaacagcactgtaaaaataagtacaagtcctaatatcataacacacaggcaaaagcgtaacagaaagaattttgataaagaaatgtcaataatccaatatgagcagaagacatacactgacatcagtacttcttcatcagaaaaaaaggtggattcctgttggatatcttcatattgtcagacaacagcttatttcttcttccagca

SEQ ID NO: 47621 - DNA, 533 bp, Chicken  19866894291902_2
agtgagctgtgatgccattagaaacctgacagagcttatctgcaaaatatacttctattatggaacatcaattaaaaaatgagaagctgcacttctacagtgcacaggtgtgactagctatacaggtacccagctttttttttcttcaatagcatctatgtgcacaactttgcatggcccacacataaactgacattatgcacagattgctatgattgcctttttcagaaaacaaaacatrcaggcatcactgaaaataaattaactacttattatttgtaatcttctgtcataattgayccatgtactaaacragatctgcatcacaacagcactgtaaaaataagtacaagtcctaatatcataacacacaggcaaaagcgtaacagaaagaattttgataaagaaatgtcaataatccaatatgagcagaagacatacactgacatcagtacttcttcatcagaaaaaaaggtggattcctgttggatatcttcatattgtcagacaacagcttatttcttcttccagca

SEQ ID NO: 47622 - DNA, 519 bp, Chicken  19866894291902_3
ccattagaaacctgacagagcttatctgcaaaatatacttctattatggaacatcaattaaaaaatgagaagctgcacttctacagtgcacaggtgtgactagctatacaggtacccagctttttttttcttcaatagcatctatgtgcacaactttgcatggcccacacataaactgacattatgcacagattgctatgattgcctttttcagaaaacaaaacatrcaggcatcactgaaaataaattaactacttattatttgtaatcttctgtcataattgayccatgtactaaacragatctgcatcacaacagcactgtaaaaataagtacaagtcctaatatcataacacacaggcaaaagcgtaacagaaagaattttgataaagaaatgtcaataatccaatatgagcagaagacatacactgacatcagtacttcttcatcagaaaaaaaggtggattcctgttggatatcttcatattgtcagacaacagcttatttcttcttccagca

SEQ ID NO: 47623 - DNA, 600 bp, Chicken  19866894291911_1
agtttgagaataagtgaattaattttacaattatctgcaattctagtttttattcttgttcccgatgctttatctataagtttgccttaacatgtagtcaaatatcctactttatcaaataaaggggatttttctaagaaggatgcaacttctttctttcacaaccactggagaagtttggagagtctatttctcagaaaactgtagttctacaacctgttttgtacagaagtcatcttcacaacattatattttccttttactatcacatcagctgagattaactacatagggtttgasagagcgtttcaggttggaggtcagtgattatcactaaatacgtttttaaaactctgagacaaattagttccctcttacatacatagatctgcaccatttgtgaaaagtgggttgtgaaaagtgcgatcctgtaatgggaaaaagtaatacccacccgacagcccagtgcttacatatacttactctcatcacccttcctgttataytggcactctggaattctgatcatccacaggttgtttgaattgaattgtgagaaaacagaaagtgacccaaaatctgtaaggataaataagctcc

SEQ ID NO: 47624 - DNA, 534 bp, Chicken  19866894291911_2
gttctacaacctgttttgtacagaagtcatcttcacaacattatattttccttttactatcacatcagctgagattaactacatagggtttgasagagcgtttcaggttggaggtcagtgattatcactaaatacgtttttaaaactctgagacaaattagttccctcttacatacatagatctgcaccatttgtgaaaagtgggttgtgaaaagtgcgatcctgtaatgggaaaaagtaatacccacccgacagcccagtgcttacatatacttactctcatcacccttcctgttataytggcactctggaattctgatcatccacaggttgtttgaattgaattgtgagaaaacagaaagtgacccaaaatctgtaaggataaataagctccacatctgaagcttagccatctgattgcattactgtgattaatttaatggaaaactcttgtttttattggtaatatcaaagtctgtttgcagggtgtgtaaatgccatgttacttagcaaatgagattgcaaactaatagt

SEQ ID NO: 47625 - DNA, 600 bp, Chicken  19866894291916_1
tgaaagtgtagagatgaggcttctgccaaattcagcatcagatgttagcagcagtacaggaagatgtgttcaactgggatgtaggttttgcaagcagaagacttgccatgaatatccaaatgacctttgatggtaattgtaaatgtttaacctgatgggggagagtatcttaaggagtcctctaaatatatgatcatttgccatttttaggtgtccttaaggaaacttaagaaattcctttgagggaattctgaaaaataccaaagcgtgtagctatcctgtaagggtggagattgtgaytgattaactaatatggatcagaataacactccaggctcagtttgggcagaaaaggtgagggatgagggtccaaacggatrctttgtgagcatactgaataaagaaggatttgaacttagcatcagaattaggtagaaaagggcaggttaaaatctgttttgaagatcattcccccaaaatcaaaatttatatgcacttttagattttcattttttttttttttttttacattgtcatccgctgctgccttttctgtatggaaagcatagcctgtcccattctgggaagctggattaaact

SEQ ID NO: 47626 - DNA, 600 bp, Chicken  19866894291916_2
gtaggttttgcaagcagaagacttgccatgaatatccaaatgacctttgatggtaattgtaaatgtttaacctgatgggggagagtatcttaaggagtcctctaaatatatgatcatttgccatttttaggtgtccttaaggaaacttaagaaattcctttgagggaattctgaaaaataccaaagcgtgtagctatcctgtaagggtggagattgtgaytgattaactaatatggatcagaataacactccaggctcagtttgggcagaaaaggtgagggatgagggtccaaacggatrctttgtgagcatactgaataaagaaggatttgaacttagcatcagaattaggtagaaaagggcaggttaaaatctgttttgaagatcattcccccaaaatcaaaatttatatgcacttttagattttcattttttttttttttttttacattgtcatccgctgctgccttttctgtatggaaagcatagcctgtcccattctgggaagctggattaaacttcagacattcaggaatgagttccagtttggaaagagtctgcttcatagttttcgagagtcagtatatttaaaactaaaca

SEQ ID NO: 47627 - DNA, 600 bp, Chicken  19866894291916_3
ccatcacaattcaaacatatgttctcttggatgtaccatatttctctgcttataattgcactttcattgtgcacatcagtcagaagaaaaactcttcctcgttaatatctgtttgaacacacttgtaccagatggaggttaccgtggatttttcttccacctgggataaatcaatacagatacccgttgagcttttaaagacaatggctggattgtgtgagggtatttcgtacctggtaaggttgtgtatatccctggtgttattaattcctctgatctcattgattttctctaggcaartgtcyttcctgtcagtgttaatattttttgcagtaatgtgaaagaacttgcctttataacttcacagggccagtaaaaggtgcaaaccctgcgaatgtgcatgaaacctgcagttctgatctgagagatgcagtcctggaggtctgcagagatctgcaaaaagcaggtggaactgtattgtcagtattcaacactcctggagcgtgccactcttgctgtgaattgtttgccagtataatctcatgagacctcagtatacagagccttgaaatcttctgaatacgtgtccctcaactctaa

SEQ ID NO: 47628 - DNA, 600 bp, Chicken  19866894291916_4
acaattcaaacatatgttctcttggatgtaccatatttctctgcttataattgcactttcattgtgcacatcagtcagaagaaaaactcttcctcgttaatatctgtttgaacacacttgtaccagatggaggttaccgtggatttttcttccacctgggataaatcaatacagatacccgttgagcttttaaagacaatggctggattgtgtgagggtatttcgtacctggtaaggttgtgtatatccctggtgttattaattcctctgatctcattgattttctctaggcaartgtcyttcctgtcagtgttaatattttttgcagtaatgtgaaagaacttgcctttataacttcacagggccagtaaaaggtgcaaaccctgcgaatgtgcatgaaacctgcagttctgatctgagagatgcagtcctggaggtctgcagagatctgcaaaaagcaggtggaactgtattgtcagtattcaacactcctggagcgtgccactcttgctgtgaattgtttgccagtataatctcatgagacctcagtatacagagccttgaaatcttctgaatacgtgtccctcaactctaaacctg

SEQ ID NO: 47629 - DNA, 600 bp, Chicken  19866894291920_1
aaagccaggcatttgttttaaagagcatagagccaaatgggaaaataagaacgtatgaggaaagcgtgccctcaggtgaatgatgcaattttctaaatgcttttgaatcataatgacctatctgtgaaacgatgatgaagacatctttgtttattaactatagacagcagtgcaggaggaaaacactgtagaatctcagccagtgccaaacatagatcacttactcaccaacattggaagaacgggagtgtctcctggagacgtatcaggtaacagcctggacagtgctagtccataggmtagaataacctactctgttaactcactgtaactctttcactctattttcttttactaataaattgtttttctcttttcttaaagatcattaacacttcttagagatttgaattgttggtaatcatgcatgatatgttagaaaactttgtctaacaagaatataatcattaaaagatgaggtttgcacgttctattttatttattcacagtaactcatgcaatcatcaytgtaaggtgaagcagatacgctgctgtaaaggggtgtgttgtgatggcagaaagattgatctctagtggggt

SEQ ID NO: 47630 - DNA, 600 bp, Chicken  19866894291920_2
caacattggaagaacgggagtgtctcctggagacgtatcaggtaacagcctggacagtgctagtccataggmtagaataacctactctgttaactcactgtaactctttcactctattttcttttactaataaattgtttttctcttttcttaaagatcattaacacttcttagagatttgaattgttggtaatcatgcatgatatgttagaaaactttgtctaacaagaatataatcattaaaagatgaggtttgcacgttctattttatttattcacagtaactcatgcaatcatcaytgtaaggtgaagcagatacgctgctgtaaaggggtgtgttgtgatggcagaaagattgatctctagtggggttmtaatattgctcattaggaatgcgaaaaattatgttttcttgtcaagtgggggacactttacctatgttgyagtatgtctatactaaagctgatttccttctgtttatgaacgccatcctcttgtgtggctaaggacaagcaatgcaggctcttttttggtgacttttttcccccttcccttcactatattattgcactaacccagcatgttgtatcccacaaatgc

SEQ ID NO: 47631 - DNA, 600 bp, Chicken  19866894291920_3
gaataacctactctgttaactcactgtaactctttcactctattttcttttactaataaattgtttttctcttttcttaaagatcattaacacttcttagagatttgaattgttggtaatcatgcatgatatgttagaaaactttgtctaacaagaatataatcattaaaagatgaggtttgcacgttctattttatttattcacagtaactcatgcaatcatcaytgtaaggtgaagcagatacgctgctgtaaaggggtgtgttgtgatggcagaaagattgatctctagtggggttmtaatattgctcattaggaatgcgaaaaattatgttttcttgtcaagtgggggacactttacctatgttgyagtatgtctatactaaagctgatttccttctgtttatgaacgccatcctcttgtgtggctaaggacaagcaatgcaggctcttttttggtgacttttttcccccttcccttcactatattattgcactaacccagcatgttgtatcccacaaatgctctcccttcgtctctagcttttgtttcagttttccaagggttgctcagcacttactgaagcagtcactttatac

SEQ ID NO: 47632 - DNA, 600 bp, Chicken  19866894291920_4
cttttcttaaagatcattaacacttcttagagatttgaattgttggtaatcatgcatgatatgttagaaaactttgtctaacaagaatataatcattaaaagatgaggtttgcacgttctattttatttattcacagtaactcatgcaatcatcaytgtaaggtgaagcagatacgctgctgtaaaggggtgtgttgtgatggcagaaagattgatctctagtggggttmtaatattgctcattaggaatgcgaaaaattatgttttcttgtcaagtgggggacactttacctatgttgyagtatgtctatactaaagctgatttccttctgtttatgaacgccatcctcttgtgtggctaaggacaagcaatgcaggctcttttttggtgacttttttcccccttcccttcactatattattgcactaacccagcatgttgtatcccacaaatgctctcccttcgtctctagcttttgtttcagttttccaagggttgctcagcacttactgaagcagtcactttatactgatgttgtaacaggagaagtgggaggagtctatcacacggtgatgtcattagtggattctgtgatgtca

SEQ ID NO: 47633 - DNA, 600 bp, Chicken  19866894291923_1
ctcctgcacagtggcttaagactgaagccattattgaattcaagcgtttattcaaggtaacatcacaagtatctgctttatctgttatttcatttgatttagttaacccagcttgtcacacctgtgctgtacagatatgcctgagcagatgccacctacacagtgctataattagggcgctggtttgaggaaatagtagtattgaactctgcaccatttggaaagtgatactggcacacttgatctgttgtaaagcatggcctgtatcagtctcatgattcaaacttgcccttaaagggytctattgargaagttattgcattcaacttattttaacacgcaaaaaattgaaccattatctgtattttttgctcctacatgttgagctatttttcccyacaaggaaacgttaatctgaaatgccaagagaaaacctcagtgttattccattacagagactgctcagtcatttttcacagactaccaaaaaacactgtggtaaaaacaayttgtattcgcctcccatctgagctggtcttaaaaaagatgccagctcccattaaactctgccaaggtgttctgctccaatttggtgtctaa

SEQ ID NO: 47634 - DNA, 600 bp, Chicken  19866894291923_2
agtggcttaagactgaagccattattgaattcaagcgtttattcaaggtaacatcacaagtatctgctttatctgttatttcatttgatttagttaacccagcttgtcacacctgtgctgtacagatatgcctgagcagatgccacctacacagtgctataattagggcgctggtttgaggaaatagtagtattgaactctgcaccatttggaaagtgatactggcacacttgatctgttgtaaagcatggcctgtatcagtctcatgattcaaacttgcccttaaagggytctattgargaagttattgcattcaacttattttaacacgcaaaaaattgaaccattatctgtattttttgctcctacatgttgagctatttttcccyacaaggaaacgttaatctgaaatgccaagagaaaacctcagtgttattccattacagagactgctcagtcatttttcacagactaccaaaaaacactgtggtaaaaacaayttgtattcgcctcccatctgagctggtcttaaaaaagatgccagctcccattaaactctgccaaggtgttctgctccaatttggtgtctaaaactgctct

SEQ ID NO: 47635 - DNA, 600 bp, Chicken  19866894291923_3
ttagttaacccagcttgtcacacctgtgctgtacagatatgcctgagcagatgccacctacacagtgctataattagggcgctggtttgaggaaatagtagtattgaactctgcaccatttggaaagtgatactggcacacttgatctgttgtaaagcatggcctgtatcagtctcatgattcaaacttgcccttaaagggytctattgargaagttattgcattcaacttattttaacacgcaaaaaattgaaccattatctgtattttttgctcctacatgttgagctatttttcccyacaaggaaacgttaatctgaaatgccaagagaaaacctcagtgttattccattacagagactgctcagtcatttttcacagactaccaaaaaacactgtggtaaaaacaayttgtattcgcctcccatctgagctggtcttaaaaaagatgccagctcccattaaactctgccaaggtgttctgctccaatttggtgtctaaaactgctcttatttggagaagaagaagcaaatggccttgtgcatgcatgcacgggagaggaggagaaatgaaggaggaaagggatttttgtgtgtgac

SEQ ID NO: 47636 - DNA, 567 bp, Chicken  19866894291923_4
tgcaccatttggaaagtgatactggcacacttgatctgttgtaaagcatggcctgtatcagtctcatgattcaaacttgcccttaaagggytctattgargaagttattgcattcaacttattttaacacgcaaaaaattgaaccattatctgtattttttgctcctacatgttgagctatttttcccyacaaggaaacgttaatctgaaatgccaagagaaaacctcagtgttattccattacagagactgctcagtcatttttcacagactaccaaaaaacactgtggtaaaaacaayttgtattcgcctcccatctgagctggtcttaaaaaagatgccagctcccattaaactctgccaaggtgttctgctccaatttggtgtctaaaactgctcttatttggagaagaagaagcaaatggccttgtgcatgcatgcacgggagaggaggagaaatgaaggaggaaagggatttttgtgtgtgactgttggcactgtgattggaagcttcctctcagtgttcttggaagaacagaaggctcccatctccaaagtcaagagtga

SEQ ID NO: 47637 - DNA, 600 bp, Chicken  19866894291925_1
ccagcatgcaatgtttacccattagctctttgggtttttttttttgcttgacaattgtcttgctcttcactttgcattggagaaacttcccccaacacttcagttttaggaaaaatagaaaggcatgatcattgctccttattttcctatggggaatcttttgaacatcagcatacattttcatgtttgtgcacaatttgcttacagaatttttatgctatgtctttttttttttttttaagctcagccttaagaaggctgtgggatggtggaattactgccttcagcttcttggtagaraaacgacaggttgctgctggaggtacacagtgctaagactgcctcaaatgtcatgggacacaagttgcaacacagccatttctgattgtacataggaagaaaaattttcaccatgagagaggttgggagatgaaaagatctgcctgcaggggctgttgcatttctgtccttggaggtgctcagaaggcagctggatgtggtcctgtccatcctcatcaatctggaccttctttgagtggtggttttatgaccttcagatgtgcatttcaacctgaattattctgcagctccagggctcct

SEQ ID NO: 47638 - DNA, 600 bp, Chicken  19866894291930_1
cactggtgagcagacgagcagctcacctcccatgctgctgctgctcccatgtgcaatactgctcaattgctttctgcatgaaaaactgtaggcaaacttggactaagatcacatgataattctgtcccaaggggctcctttttgcttaggcttaattatagaagagacattaattatcccttacgctgtctggatgcaatgggaaaacaattataagtgtttcacttttaaatagctcgtagccacctggaagtattttaatttagtctgtaatgctgatgttatgttttcctttccccraaacaaaaaccaaacagatcttgcaactaactgcaagccatccagcaggaagatgttctccctcttattcatcctttgcctgctggaaaggaacacagcatcaggcccggtgagcagagcagagcctgcagcatccagggacttcaccaccgttttccagctggctcagggagacccttgggagaacgttaatctcaccagcatgtcctgcgaggatcggaagaacaggacatggatcaccctgcagctgaccaacagcagcctgacggctttccccatctgcctcccggaggtcctgca

SEQ ID NO: 47639 - DNA, 600 bp, Chicken  19866894291938_1
caagcttttctccagggccttttgccagacaaggcttagctgtgaaatgatttcaggatttctgtgaagaacacagcaaggccagcaatggaaatggggaaatggatactctagactgcaagatgcaattaaagcagcagtttctacaatgacttgtgtagcttacacaattctcagtcagcaagcttttcctcttcagctgaatttttatttacatgcactctgcactattgttattgaaaacaaaacgaaacaaaatgttcccactctaaggccaccagggcagtgcccactagagtyagtatgtatattcacatgccgtaagctaaaagcagcactgytgcattagccatctgcgcacctgagttaaaaagccctaatcagctgggtacttgcctgactaccctgtctctaaaatccagagtgaagataaatcctgactctgatctaccttctctttcttccacagtgaaaacaaattattttcccaaatttgctaacttttttttagggaaaaccagttgcaatatttactctgttcttacagaaaagttctgccaaatggattaaaaaacaaaacaaaacataaaaacatgagct

SEQ ID NO: 47640 - DNA, 600 bp, Chicken  19866894291938_2
gtgaaatgatttcaggatttctgtgaagaacacagcaaggccagcaatggaaatggggaaatggatactctagactgcaagatgcaattaaagcagcagtttctacaatgacttgtgtagcttacacaattctcagtcagcaagcttttcctcttcagctgaatttttatttacatgcactctgcactattgttattgaaaacaaaacgaaacaaaatgttcccactctaaggccaccagggcagtgcccactagagtyagtatgtatattcacatgccgtaagctaaaagcagcactgytgcattagccatctgcgcacctgagttaaaaagccctaatcagctgggtacttgcctgactaccctgtctctaaaatccagagtgaagataaatcctgactctgatctaccttctctttcttccacagtgaaaacaaattattttcccaaatttgctaacttttttttagggaaaaccagttgcaatatttactctgttcttacagaaaagttctgccaaatggattaaaaaacaaaacaaaacataaaaacatgagctcagctgataaaataaatatatgtgaaatactgacaaggaaa

SEQ ID NO: 47641 - DNA, 600 bp, Chicken  19866894291938_3
cctgtctctaaaatccagagtgaagataaatcctgactctgatctaccttctctttcttccacagtgaaaacaaattattttcccaaatttgctaacttttttttagggaaaaccagttgcaatatttactctgttcttacagaaaagttctgccaaatggattaaaaaacaaaacaaaacataaaaacatgagctcagctgataaaataaatatatgtgaaatactgacaaggaaaaagaagaacaaggcataggaaatctgataaatatttatattcctacaaaataacaacaacaamaaaaaccaaacctgaatcattgggatcaatacatttttaaagacacatacaagattgaacagctgctacagaagctgaaataaatctaaaactgcaaacagaaagacggtagtgaggaacaatgagccaaacataccggaaacagttacatgttctgcagaagtgaaaattaataggacagagaactgttcataagcaaccaaccaaacaaaaagtagacagaaattcaaagaagactgtattccagaattatgaaggatacaaaatataggaagaattcacagaaataaacatacattt

SEQ ID NO: 47642 - DNA, 600 bp, Chicken  19866894291946_1
ccatatacagcatccagcacttagtcttgacaagtttcatgattgacatcctatttatctagcctacccagatccctcttcagagccttcctatcctcaagcagataaaatatagaagaggactaagtgaaactgttaatctaaagctgaatcttcttgagaattacagttttcagaacactgaagagtcgaaagttttcatggctaactgagaatctgagaggaagatatcatacagaaaatactaactgaagatactaggaaaataagtttgctacagtttttcagataaaagttttscacttacccagtaacaaagtcctcagtctaactaaacatctcagtggcagcaagcacacagcaatggcctactgaaggaaggctgtagtcaagcaagtagcacatttgcactagtgactgaactacatgctgcgtgtattattatctccatgattttcacaacttccaaatattttctcctttgatcccgggacattttctaacaccactcctgccatattatatatatttaaacacatcttcatttccctttttactttccctgattccttttgccccccaagtaggttttcccagcct

SEQ ID NO: 47643 - DNA, 599 bp, Chicken  19866894291953_1
  misc_feature (1)..(162): n is any nucleotide
nnnnnnnnnnnnnnnnnnnnnnnnnnnnnnnnnnnnnnnnnnnnnnnnnnnnnnnnnnnnnnnnnnnnnnnnnnnnnnnnnnnnnnnnnnnnnnnnnnnnnnnnnnnnnnnnnnnnnnnnnnnnnnnnnnnnnnnnnnnnnnnnnnnnnnnnnnnnnnnnnntctgacagtggacctgcttgtgtaacaggaccagttggatgtagggggagggctaagcatgagccagaagtgtacccaggtggccaagaaggccaatgtcatcctggcttgtatcagaaatattgcagtcaggaggastggggagataattgtctatctgtacktggcactggtgaggctgcacctcaagtactgtgttcacttttgggtccctcagtacaagaaagtgaggccctggagcctcacttgttgacaggcaacaaagctgtgaagggtctggagcacaggtattacaggaagcagctgagggagctgggattgttcaatcaggagaaaaggaggctcagggtagatcttattgccctctacaactgcctgaaaggaggttgtggtgaggtgggggttggcctcttctcccaggtaacagtgacaggatg

SEQ ID NO: 47644 - DNA, 599 bp, Chicken  19866894291953_2
  misc_feature (1)..(136): n is any nucleotide
nnnnnnnnnnnnnnnnnnnnnnnnnnnnnnnnnnnnnnnnnnnnnnnnnnnnnnnnnnnnnnnnnnnnnnnnnnnnnnnnnnnnnnnnnnnnnnnnnnnnnnnnnnnnnnnnnnnnnnnnnnnnnnnnnnnnnnnntctgacagtggacctgcttgtgtaacaggaccagttggatgtagggggagggctaagcatgagccagaagtgtacccaggtggccaagaaggccaatgtcatcctggcttgtatcagaaatattgcagtcaggaggastggggagataattgtctatctgtacktggcactggtgaggctgcacctcaagtactgtgttcacttttgggtccctcagtacaagaaagtgaggccctggagcctcacttgttgacaggcaacaaagctgtgaagggtctggagcacaggtattacaggaagcagctgagggagctgggattgttcaatcaggagaaaaggaggctcagggtagatcttattgccctctacaactgcctgaaaggaggttgtggtgaggtgggggttggcctcttctcccaggtaacagtgacaggatgagagggaatggcctgaagtcgtgcca

SEQ ID NO: 47645 - DNA, 600 bp, Chicken  19866894291957_1
gcaagagccaaccgttcccagtgcactaccaggaggctgctggagccactaacctgtgccgatttttgttcttcctttttttgtggctgctgtggtggctcccagaagtggaggaagcggctttttggggtttcaccccctgcacggatccatccagctcctcagcatcctcctggctgggctcgttctcctgattgtggaagtctggagaagtgtcgctttccgtcccgctgcccggctcccctggaatgggatcagaagcaaaagaacccagaggttacatccccacagttcacatcscaggctgctcctgcaaagcaccggggagaaaaactacaaagaactacaaggaactacagaaaccgaagtttctggtgccaagagctggaaacgcagcgctgctgcccgatcagcacacggcgggcccaaagttacggtgacagcagaaggaaaggtcttaaagytgagcgcccacaacagactgcggcctccagaagcggagctctcatctcctcccatagcaactgatggagacacagacaccgaaatgcatcacttcagtcccggtttctccatccaaagcgggcagcagggagccca

SEQ ID NO: 47646 - DNA, 600 bp, Chicken  19866894291957_2
gcatcctcctggctgggctcgttctcctgattgtggaagtctggagaagtgtcgctttccgtcccgctgcccggctcccctggaatgggatcagaagcaaaagaacccagaggttacatccccacagttcacatcscaggctgctcctgcaaagcaccggggagaaaaactacaaagaactacaaggaactacagaaaccgaagtttctggtgccaagagctggaaacgcagcgctgctgcccgatcagcacacggcgggcccaaagttacggtgacagcagaaggaaaggtcttaaagytgagcgcccacaacagactgcggcctccagaagcggagctctcatctcctcccatagcaactgatggagacacagacaccgaaatgcatcacttcagtcccggtttctccatccaaagcgggcagcagggagcccaggggagcgaagatggggccgagctgtgaggagcagctgaatcctacccagttctgccaattcggggggagggggggaagcaaagaggcgacttactcttctcgatgagctgatcctggactccagctaacgcactgacggcctgcaaagccgaaacgggcgtta

SEQ ID NO: 47647 - DNA, 599 bp, Chicken  19866894291959_1
  misc_feature (1)..(98): n is any nucleotide
nnnnnnnnnnnnnnnnnnnnnnnnnnnnnnnnnnnnnnnnnnnnnnnnnnnnnnnnnnnnnnnnnnnnnnnnnnnnnnnnnnnnnnnnnnnnnnnnnnataaaaagccgagttgaagagttaccaatggtgttaggttgccatggctttggaattcaataagcgctgaagtgcccggagtgctgcgtggggaaggagggattttgaatgagcccagcatgtactctgcacctccctttttctatccaactaccactcaacattttataacctacctgaagtgttttctttagctggagaygtgttctggtgctttgttggagatagcatggaacagaaggcccgatgctctttgcagcctagcgagcttcatctccacacttcttgaaacctagaaacctgtttatggagtattgttctttttttttatcattactttaaggatgtttgttatatgttttcagataaaaataaacttcctaccgaaactattgttttatactcgttttagcagctaaactgaatgcttggtatgaaacaaaaggcagtcatttagattgcagtcttgcctcctagtaaagtttggtgtcggagtgctgc

SEQ ID NO: 47648 - DNA, 600 bp, Chicken  19866894291961_1
tgcacagtgctccctgtaatgaatttctactaatgtctgatgctttggctgatcagaagtcctatttcatttccttcacatctttcattcttccttaacagtcacgttttccctcagtcctggctacgacctttaaatctatgtttagattcttctataaagctattgagttgttaacaaagaattgatctaagatccagcagtctaaaaattgtataccacagtttggtatggctcagatgtctagaagatgcccagatggtaagtcagtgccagttcatggcagacataaaatggcaygcaggtgaccagagagtttgggctgtttgaaggagtacgctttaaatgaaatatgacagctagtataaaatgagtgattctgtctttggtgggtgttagaaaacagaccagtagcaaaagtgtgatgattggtcatggcaggcttgtgcgtctccacttaatgatgacctgcacagaagccatccagaacaaaatggaaatcccttaaatcattgtgctgaacatatatgaggaaagaggacttcttcctgacccaattagagatgagtcctaagccttcgtgaaatctaacatgtgtaa

SEQ ID NO: 47649 - DNA, 599 bp, Chicken  19866894291969_1
  misc_feature (1)..(14): n is any nucleotide
nnnnnnnnnnnnnnataaaatactctgtgatgcattttaagaagctaatctccagctagtagttctcttctgagaacaatgcaaacctagaagctgttactgaacacaaccactatggcatttttccagttactgtgtaattaaatcgtccatttaccaagtgcttccggagtccatcacatgtatggcaatacgtaggaccaaattttattcagtactattagagtagccttcaactggctacgtgggaagcatacgatttatatgcacatatttgaaatcacttctgacaaccttatrtatttcctataccttctgtgtgcacaaatgccccagtacactggtgtgtatctgcttcaagtctggctgggtttctgaagtttcattctagaagaactctggtgtataacacagacattgagcagccaggttgcrtctgaacagagctgcctgcygactgaagtgcacaatcaggaagtggaaattgtaaaagttgggcagatggtctttttccctcarggaagacaaaaacaaaccagaaaaccccaacaacttatgctcataaagaagtcgggtacattcccctttaactatccagt

SEQ ID NO: 47650 - DNA, 600 bp, Chicken  19866894291969_2
tgtaattaaatcgtccatttaccaagtgcttccggagtccatcacatgtatggcaatacgtaggaccaaattttattcagtactattagagtagccttcaactggctacgtgggaagcatacgatttatatgcacatatttgaaatcacttctgacaaccttatrtatttcctataccttctgtgtgcacaaatgccccagtacactggtgtgtatctgcttcaagtctggctgggtttctgaagtttcattctagaagaactctggtgtataacacagacattgagcagccaggttgcrtctgaacagagctgcctgcygactgaagtgcacaatcaggaagtggaaattgtaaaagttgggcagatggtctttttccctcarggaagacaaaaacaaaccagaaaaccccaacaacttatgctcataaagaagtcgggtacattcccctttaactatccagtggttcctgaagaaatttgaggagccaatctgattatcattattttctgcctgcctgttctacgttctgcaaatctttctctgaaacatttgtgttttgacaatggaagcatttgcatgcaaacagtatgtttgcaa

SEQ ID NO: 47651 - DNA, 600 bp, Chicken  19866894291969_3
accaagtgcttccggagtccatcacatgtatggcaatacgtaggaccaaattttattcagtactattagagtagccttcaactggctacgtgggaagcatacgatttatatgcacatatttgaaatcacttctgacaaccttatrtatttcctataccttctgtgtgcacaaatgccccagtacactggtgtgtatctgcttcaagtctggctgggtttctgaagtttcattctagaagaactctggtgtataacacagacattgagcagccaggttgcrtctgaacagagctgcctgcygactgaagtgcacaatcaggaagtggaaattgtaaaagttgggcagatggtctttttccctcarggaagacaaaaacaaaccagaaaaccccaacaacttatgctcataaagaagtcgggtacattcccctttaactatccagtggttcctgaagaaatttgaggagccaatctgattatcattattttctgcctgcctgttctacgttctgcaaatctttctctgaaacatttgtgttttgacaatggaagcatttgcatgcaaacagtatgtttgcaacttactaatttgtctgctcc

SEQ ID NO: 47652 - DNA, 600 bp, Chicken  19866894291969_4
attagagtagccttcaactggctacgtgggaagcatacgatttatatgcacatatttgaaatcacttctgacaaccttatrtatttcctataccttctgtgtgcacaaatgccccagtacactggtgtgtatctgcttcaagtctggctgggtttctgaagtttcattctagaagaactctggtgtataacacagacattgagcagccaggttgcrtctgaacagagctgcctgcygactgaagtgcacaatcaggaagtggaaattgtaaaagttgggcagatggtctttttccctcarggaagacaaaaacaaaccagaaaaccccaacaacttatgctcataaagaagtcgggtacattcccctttaactatccagtggttcctgaagaaatttgaggagccaatctgattatcattattttctgcctgcctgttctacgttctgcaaatctttctctgaaacatttgtgttttgacaatggaagcatttgcatgcaaacagtatgtttgcaacttactaatttgtctgctcctgctgttcattcctcacctgaagttataatgtgctctccttaacattataatcacctacacagc

SEQ ID NO: 47653 - DNA, 544 bp, Chicken  19866894291975_1
ttttccttgaatcattcatcaaaattagataccaacttggatagatattttctcctgggaaataaggatatgctaagaaataccctaaaacgtgagtttgaaattggtaataacaaaaatctaagcttcatttgccaaatttcataagttttttaaatgaaaatataattaatgagatctctgtttatttctgagtataaaacctttcatagaatcatagaattgctcaggttggaaaggacatcaaagatcatcaagtccaaccgtagcctaaccatagtaccctaactctaacaaccytctgctaaatcatctctctgagcaccacatccaaacggctcttaaacacatccagggacggtgactcaaccacctccctggggagcctattccagtgtttaactaccctttctgtaaagaagtgtttcctaacgtccaacctaaacttaacttggtgcaacttgaggccatttccccttgtcctgtcacctgtcaccggtgagaagagacctaccccactctcactgtaggcaactttcaggca

SEQ ID NO: 47654 - DNA, 600 bp, Chicken  19866894291990_1
aaagcattcccttgagatctacaggaccctttcccacagtccaatcctgaaaaataggggccctgtcaccaatactgcccttgttcagaaaaaaagatttgcttgagatcgttcaggagcagcaagctctgcctgggatgtgcctgtggagaagaatgctcttctctccatcagcagcactgaccttcctttgtaacacagctcaaatcaagaaaaagttaagcacttctggaattcagtgcagctcatggctgcagcagtgagggcactcttggtgcctgcaatggcagaagagggatkttagctctgccacatttaaatcaaaggtgaaacacaaaataacatctattggaaaaggcacgtaaggaagacctgtggaagctstgtactcacatggtcggacagcgagtctggtccctgagccaaatgtaaggccaacagtgctggatcctgtattcacacagcattgctttccttaacaaaaagtccagttagccacttgagaaccatcactggtacccaaggaatactctgaccacgccatgtcatggaggggcagcagaagtctgaggtgggactttctcatcccaaagcaagagc

SEQ ID NO: 47655 - DNA, 600 bp, Chicken  19866894291990_2
tcagaaaaaaagatttgcttgagatcgttcaggagcagcaagctctgcctgggatgtgcctgtggagaagaatgctcttctctccatcagcagcactgaccttcctttgtaacacagctcaaatcaagaaaaagttaagcacttctggaattcagtgcagctcatggctgcagcagtgagggcactcttggtgcctgcaatggcagaagagggatkttagctctgccacatttaaatcaaaggtgaaacacaaaataacatctattggaaaaggcacgtaaggaagacctgtggaagctstgtactcacatggtcggacagcgagtctggtccctgagccaaatgtaaggccaacagtgctggatcctgtattcacacagcattgctttccttaacaaaaagtccagttagccacttgagaaccatcactggtacccaaggaatactctgaccacgccatgtcatggaggggcagcagaagtctgaggtgggactttctcatcccaaagcaagagcggaagacatcatgctggttgtatggaatgaggcagaagttgtaactgagagggagtgccaaacgttcttttcctcctctcatta

SEQ ID NO: 47656 - DNA, 599 bp, Chicken  19866894291999_1
  misc_feature (1)..(69): n is any nucleotide
nnnnnnnnnnnnnnnnnnnnnnnnnnnnnnnnnnnnnnnnnnnnnnnnnnnnnnnnnnnnnnnnnnnnnagctccctgcatttctgcagtagtcccattttgtacagtcatctgggtgcaagctacctttctctatgggtgagagaaggagcctggacagccacaggcaggtagggtgaatgcattttgcacttaagatagatttgaccagacagaagtctcggtagatgtttctctcttaggcagccctcccagttactgctggggttctggcccatgcatgggaggcatcattgcctktttggagcttgtgagcaaagaatcatagaaccacagaatatcctgagttggaagggaaccacagggatctttgagtccaactcctggttccatatacgaccacccaaaaatcaaaggtgaggcctaagttctcctggggagttccatgttccaggaataacagcaggaatcattctggggataggcaaggaccacgtttccttacagaactctttatgrgccctttgaattgattggtactacagaggaagaaaattgagctcagccctcagagcccatatagtgttctacgcggaagc

SEQ ID NO: 47657 - DNA, 555 bp, Chicken  19866894291999_2
ctcggtagatgtttctctcttaggcagccctcccagttactgctggggttctggcccatgcatgggaggcatcattgcctktttggagcttgtgagcaaagaatcatagaaccacagaatatcctgagttggaagggaaccacagggatctttgagtccaactcctggttccatatacgaccacccaaaaatcaaaggtgaggcctaagttctcctggggagttccatgttccaggaataacagcaggaatcattctggggataggcaaggaccacgtttccttacagaactctttatgrgccctttgaattgattggtactacagaggaagaaaattgagctcagccctcagagcccatatagtgttctacgcggaagcttgaactgatctgatatccagagctgtcctccttgggggaggatcctgcctttgtgccatgggatcagtgcttccatgaatgctggcggtagtgcctgtggaagcatgctgcttagccccattcatctttactctccttcccttctgcatttgagcttttactgtgctcttctcc

SEQ ID NO: 47658 - DNA, 600 bp, Chicken  19866894292001_1
tgcccatggaaggcagtgacttagctattccagacactgaaagagagatgttatctttatacctttattgcacttttggagtgctctgattctgttgggccataatgctgagtgccagactaaagcagtttgcacaggagtttctaagactggaaatgaaccattcttaaaggcttgcagttgcttaattaacacaggctttctagctgatgtgatctggctgatggagcaaaatttgaagaaactgttaggaagtacccagtatgtctctgtctttgggtagcatcattacttacactygtaaaagtgatgggctgtgtgttagtgcttggttctgcaaggctgtaggttatgtgcttggctggtgtaggaagctgcctgtgcaccaaaagggacaactgaggtagctgtaggaaaagctgcacgctttagaatttaggataaacccatttgttagaagttctgtgacttgaatcttgcaatctcttccactgagacaaagtcaggactgttatttgtcttctttttaacaggtggtgtttcacaaaatgtctccaaatgagactctgttcttggaaagcaccaacaagatctacaagg

SEQ ID NO: 47659 - DNA, 600 bp, Chicken  19866894292007_1
tctattttcaaggtattcgattgatccctgctttatttatcagatactatttattctcaaggaggctgctgccctaaacaaacagcctgcaaaaacagcttcatcactgactcgtgcccactaaatgtaaaaaataatagcctttgatctattttttcatattccatgtctcaaacttggaaagagcttctactagatatctactaatttaatacaccgttatccctcaaattccttcttagaacacagtttttttctctgatgtctaccaaaagcaaattctggcagtggtaaataacmtgtgatatgatcatgcatatcaatttgtttctttgaattttctcatttctctttttctgtcattttatgtcttatgcgtgagttatctgtgatctttttccatcctgtacttttactgcatgtatcaagatcctggctcaaaatgaggtctcattaatatcacagtaattctgacaargacactgaatcatcagaacagtgtctcttctatcatgtttacaataaaataaatttgagataatagtacacaagttttttcttacctcagcagtcagatacctaatgatggagactacacaa

SEQ ID NO: 47660 - DNA, 600 bp, Chicken  19866894292007_2
ggaaagagcttctactagatatctactaatttaatacaccgttatccctcaaattccttcttagaacacagtttttttctctgatgtctaccaaaagcaaattctggcagtggtaaataacmtgtgatatgatcatgcatatcaatttgtttctttgaattttctcatttctctttttctgtcattttatgtcttatgcgtgagttatctgtgatctttttccatcctgtacttttactgcatgtatcaagatcctggctcaaaatgaggtctcattaatatcacagtaattctgacaargacactgaatcatcagaacagtgtctcttctatcatgtttacaataaaataaatttgagataatagtacacaagttttttcttacctcagcagtcagatacctaatgatggagactacacaataaccagtgatccttctttatcctggttcaactttcttcctttgttttcactcatatatatatacccatctcattactccatgttcccttctctcctcacctctacattacataagttccaggattcctaggctgaatcaccgtgaactatctttaatatatattctctgagagtgtt

SEQ ID NO: 47661 - DNA, 599 bp, Chicken  19866894292008_1
  misc_feature (1)..(133): n is any nucleotide
nnnnnnnnnnnnnnnnnnnnnnnnnnnnnnnnnnnnnnnnnnnnnnnnnnnnnnnnnnnnnnnnnnnnnnnnnnnnnnnnnnnnnnnnnnnnnnnnnnnnnnnnnnnnnnnnnnnnnnnnnnnnnnnnnnnnntggatgcagaaaatgaataaggctgtgagatacttcagttagggaagagagaaaaggtgtaattgaattgacatctttctgtaatgaccgtgtcaatcatgtagtggtaatttgcccatagttcaaccacaccacatgtttccagtctctaataataaattcttggyttctgactaaataacagtttcccacaggcttataggaataacaaagatttcaagcagttaacatacacattactgcttatatgcatgtgtatatgcagttagcaatagagaacttttttttatacctgtgaagttataaagctttttcctttacatactcaattaaaggaagcttgttccttgagtaggggtgttttaaaacaaggttgtaaagtgaaggtcatttggttctggtgattgcaaaacatggtcagggcaagttgcttgacctactttgacttgtgtaggctgcaaggagc

SEQ ID NO: 47662 - DNA, 600 bp, Chicken  19866894292008_2
agcttgttccttgagtaggggtgttttaaaacaaggttgtaaagtgaaggtcatttggttctggtgattgcaaaacatggtcagggcaagttgcttgacctactttgacttgtgtaggctgcaaggagctgttagaatatctctagcttatctcagtttctctgctggtaaaagcgtgaagcaaccaccatgcttcatgttagctcttggaggatgcttgtacaaggcaagatgtgcagaatccaacccttatttcatgccatgtaatgtggcaggcaatgtttttgtcatagcgcatayagtttgccaactgacatataaactttttcttacacagaaaygcctgctaatgtatgtgaggaatatatgtttacatgtctaactgatcaacttactgatccaagtctaaagcaaatgagaaacttgggagtgaaatcttcaacagtaattttcagagatgtagttttgctatgataactgtactagtatctaccataatatggtgacaaatcttctgcaggaagatgatgggtatatcaaattaattctggatctggatattttttccagcctacacacttcaattgtgcagcacacctt

SEQ ID NO: 47663 - DNA, 600 bp, Chicken  19866894292008_3
aagtgaaggtcatttggttctggtgattgcaaaacatggtcagggcaagttgcttgacctactttgacttgtgtaggctgcaaggagctgttagaatatctctagcttatctcagtttctctgctggtaaaagcgtgaagcaaccaccatgcttcatgttagctcttggaggatgcttgtacaaggcaagatgtgcagaatccaacccttatttcatgccatgtaatgtggcaggcaatgtttttgtcatagcgcatayagtttgccaactgacatataaactttttcttacacagaaaygcctgctaatgtatgtgaggaatatatgtttacatgtctaactgatcaacttactgatccaagtctaaagcaaatgagaaacttgggagtgaaatcttcaacagtaattttcagagatgtagttttgctatgataactgtactagtatctaccataatatggtgacaaatcttctgcaggaagatgatgggtatatcaaattaattctggatctggatattttttccagcctacacacttcaattgtgcagcacaccttactataagactacagaatttaaaattcatctactgcaaagt

SEQ ID NO: 47664 - DNA, 600 bp, Chicken  19866894292020_1
aatagctggcaggaaggtaacaagcaacaaacagacaccgcctcgtggctgttttcccagtgcccagatgtatggtgtgctccgggacgatggggacctccctctctgctgcagtagacacatctattattagctcagtggcagctttccatatgccaacactcgtgtctgcaggactgtttaattttcacttctccaaagtacttaatttgtcagctgttggcttctgttcattaaagaccaaacttcaaattcctctatttttttctgctggagctgaattacagatcctatctgaamagaccatcgtacctatgcagaattaggggcagratgatgtcttaaatccagaaagtcagcctaaggctactaccaggaaaaaaaaawcctgtctctggaaatggccgcccagtctccatttttctgttaatttccattcggagaaaggagaaatcagttctgccaaaagcactccctagctgtgcttcggtgccgggctggggatgtggcacacagctgccagtgcccctctgcaggcgctgccacttctctggtggctgaggatggtgctgccatgagttaatcacccaccaattcact

SEQ ID NO: 47665 - DNA, 600 bp, Chicken  19866894292020_2
gacaccgcctcgtggctgttttcccagtgcccagatgtatggtgtgctccgggacgatggggacctccctctctgctgcagtagacacatctattattagctcagtggcagctttccatatgccaacactcgtgtctgcaggactgtttaattttcacttctccaaagtacttaatttgtcagctgttggcttctgttcattaaagaccaaacttcaaattcctctatttttttctgctggagctgaattacagatcctatctgaamagaccatcgtacctatgcagaattaggggcagratgatgtcttaaatccagaaagtcagcctaaggctactaccaggaaaaaaaaawcctgtctctggaaatggccgcccagtctccatttttctgttaatttccattcggagaaaggagaaatcagttctgccaaaagcactccctagctgtgcttcggtgccgggctggggatgtggcacacagctgccagtgcccctctgcaggcgctgccacttctctggtggctgaggatggtgctgccatgagttaatcacccaccaattcactgctgggggcctctctttaattattgaatgtcac

SEQ ID NO: 47666 - DNA, 559 bp, Chicken  19866894292020_3
cgatggggacctccctctctgctgcagtagacacatctattattagctcagtggcagctttccatatgccaacactcgtgtctgcaggactgtttaattttcacttctccaaagtacttaatttgtcagctgttggcttctgttcattaaagaccaaacttcaaattcctctatttttttctgctggagctgaattacagatcctatctgaamagaccatcgtacctatgcagaattaggggcagratgatgtcttaaatccagaaagtcagcctaaggctactaccaggaaaaaaaaawcctgtctctggaaatggccgcccagtctccatttttctgttaatttccattcggagaaaggagaaatcagttctgccaaaagcactccctagctgtgcttcggtgccgggctggggatgtggcacacagctgccagtgcccctctgcaggcgctgccacttctctggtggctgaggatggtgctgccatgagttaatcacccaccaattcactgctgggggcctctctttaattattgaatgtcacaatagaggtatat

SEQ ID NO: 47667 - DNA, 599 bp, Chicken  19866894292027_1
  misc_feature (1)..(92): n is any nucleotide
nnnnnnnnnnnnnnnnnnnnnnnnnnnnnnnnnnnnnnnnnnnnnnnnnnnnnnnnnnnnnnnnnnnnnnnnnnnnnnnnnnnnnnnnnnnntgaaacgcatcacctgtgcttccagagaattcaaagaggtgcctctgcaccactgcaagccacactggcaatgcacgaccaagctggcttgcacccaaacacaagtacatgccaccaatacatcctcttctgcatgggtggaagctcagggcagaggacccatcgttggacactgttccaaaatcctggccccttctgtgctcccccyrcagcgccgagtctgggagagccacrctgcaytgggagctgagccctgggtgctgcctgtgtgcccaccctggcaccaaaccggacccctggggtgggaccggaggctccagatgccgcgcatacctgagtgatgaaacggccccacttgcctggggagcgaagcagggggaaggcgctggatgccttttacttctgcccttcccttatctctggtatttgagtttctcaccttcagttcccaggaaaggtctccccccacactcaaatgggttcttatgcagcgggtagccaggcagg

SEQ ID NO: 47668 - DNA, 599 bp, Chicken  19866894292027_2
  misc_feature (1)..(91): n is any nucleotide
nnnnnnnnnnnnnnnnnnnnnnnnnnnnnnnnnnnnnnnnnnnnnnnnnnnnnnnnnnnnnnnnnnnnnnnnnnnnnnnnnnnnnnnnnnntgaaacgcatcacctgtgcttccagagaattcaaagaggtgcctctgcaccactgcaagccacactggcaatgcacgaccaagctggcttgcacccaaacacaagtacatgccaccaatacatcctcttctgcatgggtggaagctcagggcagaggacccatcgttggacactgttccaaaatcctggccccttctgtgctcccccyrcagcgccgagtctgggagagccacrctgcaytgggagctgagccctgggtgctgcctgtgtgcccaccctggcaccaaaccggacccctggggtgggaccggaggctccagatgccgcgcatacctgagtgatgaaacggccccacttgcctggggagcgaagcagggggaaggcgctggatgccttttacttctgcccttcccttatctctggtatttgagtttctcaccttcagttcccaggaaaggtctccccccacactcaaatgggttcttatgcagcgggtagccaggcaggt

SEQ ID NO: 47669 - DNA, 599 bp, Chicken  19866894292027_3
  misc_feature (1)..(66): n is any nucleotide
nnnnnnnnnnnnnnnnnnnnnnnnnnnnnnnnnnnnnnnnnnnnnnnnnnnnnnnnnnnnnnnnnntgaaacgcatcacctgtgcttccagagaattcaaagaggtgcctctgcaccactgcaagccacactggcaatgcacgaccaagctggcttgcacccaaacacaagtacatgccaccaatacatcctcttctgcatgggtggaagctcagggcagaggacccatcgttggacactgttccaaaatcctggccccttctgtgctcccccyrcagcgccgagtctgggagagccacrctgcaytgggagctgagccctgggtgctgcctgtgtgcccaccctggcaccaaaccggacccctggggtgggaccggaggctccagatgccgcgcatacctgagtgatgaaacggccccacttgcctggggagcgaagcagggggaaggcgctggatgccttttacttctgcccttcccttatctctggtatttgagtttctcaccttcagttcccaggaaaggtctccccccacactcaaatgggttcttatgcagcgggtagccaggcaggtatattcagtggagaaagggctctaa

SEQ ID NO: 47670 - DNA, 599 bp, Chicken  19866894292027_4
  misc_feature (1)..(60): n is any nucleotide
nnnnnnnnnnnnnnnnnnnnnnnnnnnnnnnnnnnnnnnnnnnnnnnnnnnnnnnnnnnntgaaacgcatcacctgtgcttccagagaattcaaagaggtgcctctgcaccactgcaagccacactggcaatgcacgaccaagctggcttgcacccaaacacaagtacatgccaccaatacatcctcttctgcatgggtggaagctcagggcagaggacccatcgttggacactgttccaaaatcctggccccttctgtgctcccccyrcagcgccgagtctgggagagccacrctgcaytgggagctgagccctgggtgctgcctgtgtgcccaccctggcaccaaaccggacccctggggtgggaccggaggctccagatgccgcgcatacctgagtgatgaaacggccccacttgcctggggagcgaagcagggggaaggcgctggatgccttttacttctgcccttcccttatctctggtatttgagtttctcaccttcagttcccaggaaaggtctccccccacactcaaatgggttcttatgcagcgggtagccaggcaggtatattcagtggagaaagggctctaagtttgg

SEQ ID NO: 47671 - DNA, 451 bp, Chicken  19866894292027_5
gaggctccagatgccgcgcatacctgagtgatgaaacggccccacttgcctggggagcgaagcagggggaaggcgctggatgccttttacttctgcccttcccttatctctggtatttgagtttctcaccttcagttcccaggaaaggtctccccccacactcaaatgggttcttatgcagcgggtagccaggcaggtatattcagtggagaaagggctctaagtttggatcccaggctgcaccgtcactaagagaccatccatctgtccgcctgctgtcactgcctgcccctgcccagyrtctcccatccctctctcctcacctctacctgcagatcgaggtgcgcttggtcccactccatggagcctcataaatccacttctgatcctaggcagccccagggacctggggaaagggggtgctagggcacaacttctcagaagagcaaag

SEQ ID NO: 47672 - DNA, 450 bp, Chicken  19866894292027_6
aggctccagatgccgcgcatacctgagtgatgaaacggccccacttgcctggggagcgaagcagggggaaggcgctggatgccttttacttctgcccttcccttatctctggtatttgagtttctcaccttcagttcccaggaaaggtctccccccacactcaaatgggttcttatgcagcgggtagccaggcaggtatattcagtggagaaagggctctaagtttggatcccaggctgcaccgtcactaagagaccatccatctgtccgcctgctgtcactgcctgcccctgcccagyrtctcccatccctctctcctcacctctacctgcagatcgaggtgcgcttggtcccactccatggagcctcataaatccacttctgatcctaggcagccccagggacctggggaaagggggtgctagggcacaacttctcagaagagcaaag

SEQ ID NO: 47673 - DNA, 599 bp, Chicken  19866894292030_1
  misc_feature (1)..(37): n is any nucleotide
nnnnnnnnnnnnnnnnnnnnnnnnnnnnnnnnnnnnncttcctcctcctcttggttcctgtaggcaccttggtaacagctgggggtggtacagcagatgcctcttcctttggagggggtgctaactgtgcaccgggctcttctaactccttaaaaactgtactcttagactccagtgacacttcttcttctgcagcttctttctgcttttttgcatcttctgcttctctttcagcaataagtctgagtgaacaagatttaaatttacgtactgcagtgagggagactcatctatactggrcaagcagttgcaactatactcacagtatgaactgagaagcaggaagcccagctacttagttttgcaagtccaatttacagtatgcaaaaaaacatttgacttgactccccttatatagagcagggattaagtgccaggaaagacatttctgtaacctgaaagcagcctgtaatcattagtcctgacagccattaagtcacacaagttacattctgtgtgttacattctatattcagatgagctggttgtggtatgctgtactactttattaaagcaaattttggattttcagtaatttc

SEQ ID NO: 47674 - DNA, 600 bp, Chicken  19866894292033_1
ttctactcttgcttcttaatgagcagagagaggggctcttttagagtgtttttatggcactgatcacttacaaggaagcacattggcagggctaatgcaccatgcttctgttcttgtgctcttgcctgcattgctgtggtggtgtcattctctgcagtgttttttaggctttgaataggaatgtgtcaaggcagttatgtttggattctgtcttgtctgagtgttcatgcaaagtctcacttagctatgggagctgtagatgctgttcccttcccacctccattatttagggcttgctayagcagagctctcaagcctgtactttattctgagcctgcaggagatttcacygaaagcagagttkaggtctctttcacaatatttgctgtgattatttggatgattatcacagagacaaactaagacaggtagatagatctagaaccacaggcaggagcctagatttaagtgcttgcatctcagcagtggaggagtcaatggaaggatcctgtagtgatggaaacacaaagcagatgctccagatggactggttccaggtgtctgtgtgaaatgcatgccttagatctcactggcatctgg

SEQ ID NO: 47675 - DNA, 600 bp, Chicken  19866894292033_2
ttatggcactgatcacttacaaggaagcacattggcagggctaatgcaccatgcttctgttcttgtgctcttgcctgcattgctgtggtggtgtcattctctgcagtgttttttaggctttgaataggaatgtgtcaaggcagttatgtttggattctgtcttgtctgagtgttcatgcaaagtctcacttagctatgggagctgtagatgctgttcccttcccacctccattatttagggcttgctayagcagagctctcaagcctgtactttattctgagcctgcaggagatttcacygaaagcagagttkaggtctctttcacaatatttgctgtgattatttggatgattatcacagagacaaactaagacaggtagatagatctagaaccacaggcaggagcctagatttaagtgcttgcatctcagcagtggaggagtcaatggaaggatcctgtagtgatggaaacacaaagcagatgctccagatggactggttccaggtgtctgtgtgaaatgcatgccttagatctcactggcatctggagaggggctggtcccacagagggaagactctgctagtgacaggctcccaca

SEQ ID NO: 47676 - DNA, 600 bp, Chicken  19866894292033_3
cacttacaaggaagcacattggcagggctaatgcaccatgcttctgttcttgtgctcttgcctgcattgctgtggtggtgtcattctctgcagtgttttttaggctttgaataggaatgtgtcaaggcagttatgtttggattctgtcttgtctgagtgttcatgcaaagtctcacttagctatgggagctgtagatgctgttcccttcccacctccattatttagggcttgctayagcagagctctcaagcctgtactttattctgagcctgcaggagatttcacygaaagcagagttkaggtctctttcacaatatttgctgtgattatttggatgattatcacagagacaaactaagacaggtagatagatctagaaccacaggcaggagcctagatttaagtgcttgcatctcagcagtggaggagtcaatggaaggatcctgtagtgatggaaacacaaagcagatgctccagatggactggttccaggtgtctgtgtgaaatgcatgccttagatctcactggcatctggagaggggctggtcccacagagggaagactctgctagtgacaggctcccacatggccctgcccat

SEQ ID NO: 47677 - DNA, 600 bp, Chicken  19866894292033_4
aagactctgctagtgacaggctcccacatggccctgcccatgagcagctcttctgcctgtcatccagctcattctctaatgctaataaaggcagtggctttagcccaggcttgttgtgatgactaagctattagcaaatatgaggcagagaaacactgaggcattttctgctttgggaggaaatactgttgcacagttgatttgagagccaatttctggcaccaggtcacaggcagttgctttccctacttcccagttaaaggacttatttatggatggatgaggtgaagaagtaaagartcttgacttgyttttcctcctggaagggctgtcttgttgtccaagcgatcgtatctcttcgttctgattaggtcttyctttattgtaggagtgtgctcataccagcaatcgttgtggctgttttgatgctgcagagatgccatctatcaaaactgtgactttggtgactcattgtccttctgggctgttccgggatatgctatggagcaacctctgatgttctgaccttacagatgaggaattgcaccccggatagatgaagtaatttgtctaaggttacccaggcaatctgtgtcaggg

SEQ ID NO: 47678 - DNA, 600 bp, Chicken  19866894292033_5
agtgacaggctcccacatggccctgcccatgagcagctcttctgcctgtcatccagctcattctctaatgctaataaaggcagtggctttagcccaggcttgttgtgatgactaagctattagcaaatatgaggcagagaaacactgaggcattttctgctttgggaggaaatactgttgcacagttgatttgagagccaatttctggcaccaggtcacaggcagttgctttccctacttcccagttaaaggacttatttatggatggatgaggtgaagaagtaaagartcttgacttgyttttcctcctggaagggctgtcttgttgtccaagcgatcgtatctcttcgttctgattaggtcttyctttattgtaggagtgtgctcataccagcaatcgttgtggctgttttgatgctgcagagatgccatctatcaaaactgtgactttggtgactcattgtccttctgggctgttccgggatatgctatggagcaacctctgatgttctgaccttacagatgaggaattgcaccccggatagatgaagtaatttgtctaaggttacccaggcaatctgtgtcagggcaaggattcaa

SEQ ID NO: 47679 - DNA, 600 bp, Chicken  19866894292033_6
aatgctaataaaggcagtggctttagcccaggcttgttgtgatgactaagctattagcaaatatgaggcagagaaacactgaggcattttctgctttgggaggaaatactgttgcacagttgatttgagagccaatttctggcaccaggtcacaggcagttgctttccctacttcccagttaaaggacttatttatggatggatgaggtgaagaagtaaagartcttgacttgyttttcctcctggaagggctgtcttgttgtccaagcgatcgtatctcttcgttctgattaggtcttyctttattgtaggagtgtgctcataccagcaatcgttgtggctgttttgatgctgcagagatgccatctatcaaaactgtgactttggtgactcattgtccttctgggctgttccgggatatgctatggagcaacctctgatgttctgaccttacagatgaggaattgcaccccggatagatgaagtaatttgtctaaggttacccaggcaatctgtgtcagggcaaggattcaagcttgtctacaagtgcctgccttttggaacgttcttcctcccactggcagcacctcctatggctga

SEQ ID NO: 47680 - DNA, 597 bp, Chicken  19866894292033_7
atggaagaaccagcaggaacaggtggtaggtaggaacctttcctggtagcagacagtgcctagctttgagagttcagaaatgcacctgagtgcacaagccaagctgggggtctcacaagtgtattgcactaggatctaaggcttccagaaagtaggagaagagctggcagctgtatggggagctggatttgccatcctgcccttaggagagctgttgggtgaggggggaagacgtgattcatcgtggagctggccatccgctgccttgctgtaaatcctttggaatctgcagagctgccmgttggtgatgagggaggaacacatctttgctgcactcagcttgggacggtgccatcatcgtctcattctctttgaggctgaagttttacagcaaaaaataaaatcaaaatcaaaatccctgactgtctgggaagaggtcctgggggagggctgagctgtktctctatgcagatgtgcttttagcccttctgtgctcaccatcaccttactcttattcagataagataacactgccccatctcagttgaatattattagtctttgcatgcttgtacactgccaggcaaaggaattctg

SEQ ID NO: 47681 - DNA, 437 bp, Chicken  19866894292033_8
gagctggcagctgtatggggagctggatttgccatcctgcccttaggagagctgttgggtgaggggggaagacgtgattcatcgtggagctggccatccgctgccttgctgtaaatcctttggaatctgcagagctgccmgttggtgatgagggaggaacacatctttgctgcactcagcttgggacggtgccatcatcgtctcattctctttgaggctgaagttttacagcaaaaaataaaatcaaaatcaaaatccctgactgtctgggaagaggtcctgggggagggctgagctgtktctctatgcagatgtgcttttagcccttctgtgctcaccatcaccttactcttattcagataagataacactgccccatctcagttgaatattattagtctttgcatgcttgtacactgccaggcaaaggaattctg

SEQ ID NO: 47682 - DNA, 600 bp, Chicken  19866894292041_1
cagttataaaagggcaactacagctcaaaatatttccaaaactatagactgctaatgaggagaaatttcagagatcacatcagcagtatcagtcaggttggagaaaggggacacaagctgctcagcagcaagattgggttggctgtttgctcctgcccatcacacagcaagggtgtgggacatcctttatggatgaaaggagaaagaaaatctcactggcctctgaaatagatcccacaaagtcataaaacagaggatggttcactttctaggcttctaggctttggcttttagggatgygctmaaatcaccaccctgggcttttcccaggtccaaacctaattcgttcaaggtttgctcatttgggagagtcagtccctgttggccaaccatatttagccagcctactgttaagcaccttttgctcactctaggaagattttacaagaatacagattttgagagctcagaaaccaaaatgccaatcaagatgctatgtaagccggtcccacgtgggatgtcacgcaatgcagcagctccaaactttgccagccctctcccaacgaaacagctggctttgaaagaactcagatcagtgtt

SEQ ID NO: 47683 - DNA, 600 bp, Chicken  19866894292041_2
tataaaagggcaactacagctcaaaatatttccaaaactatagactgctaatgaggagaaatttcagagatcacatcagcagtatcagtcaggttggagaaaggggacacaagctgctcagcagcaagattgggttggctgtttgctcctgcccatcacacagcaagggtgtgggacatcctttatggatgaaaggagaaagaaaatctcactggcctctgaaatagatcccacaaagtcataaaacagaggatggttcactttctaggcttctaggctttggcttttagggatgygctmaaatcaccaccctgggcttttcccaggtccaaacctaattcgttcaaggtttgctcatttgggagagtcagtccctgttggccaaccatatttagccagcctactgttaagcaccttttgctcactctaggaagattttacaagaatacagattttgagagctcagaaaccaaaatgccaatcaagatgctatgtaagccggtcccacgtgggatgtcacgcaatgcagcagctccaaactttgccagccctctcccaacgaaacagctggctttgaaagaactcagatcagtgtttctc

SEQ ID NO: 47684 - DNA, 600 bp, Chicken  19866894292042_1
aatctttcctaatatccaacttgaacctcccatggcgcaaccattgcctcttgttctaacactgttacctgagagaagtaacatcctgaaactctgagatagattcagcagatgtgggcttgaaaaccacaagcttactaataattttggatttatatatcataggagtgtctgcattctgcctggaaaatgctcatatggcaggagagaagggcagagcacagcaagcctaagctgtggagacggatctttcagacctgcattgcccaacctaaaagaagcaattcctccaacccctcrtttggcctctcggccacctaaattgtgtcttgtgttttcagttttaaagccagctgtgtaggtttgtctgttggatgctggttttgagttgagagctgtctccagaatcaggctgagtgatgggagagcagcttggctgttgagtgggaagacaacctcctgttgtgggcataattgctgcattccttgactgggagaggagcagtgcaagtcygtctgygtaggacttacatggaaatggcatttttatgggaatatctgaaatgcctcttacaagcaccccattaaacattcctctga

SEQ ID NO: 47685 - DNA, 600 bp, Chicken  19866894292042_2
cagagcacagcaagcctaagctgtggagacggatctttcagacctgcattgcccaacctaaaagaagcaattcctccaacccctcrtttggcctctcggccacctaaattgtgtcttgtgttttcagttttaaagccagctgtgtaggtttgtctgttggatgctggttttgagttgagagctgtctccagaatcaggctgagtgatgggagagcagcttggctgttgagtgggaagacaacctcctgttgtgggcataattgctgcattccttgactgggagaggagcagtgcaagtcygtctgygtaggacttacatggaaatggcatttttatgggaatatctgaaatgcctcttacaagcaccccattaaacattcctctgagtctggccacaggccagtctggagtcctttgaacttcttgccctccaggtagaagctgatgttgagtttcaagaccccaggttattggtagccacagcgaagggagcagagctacctcaagcattgacaacagacttgtgtgagtctcattggccatgctaggggtttcacagagctttgtcttctgcagcttttgtggcacagtgtccactgg

SEQ ID NO: 47686 - DNA, 600 bp, Chicken  19866894292042_3
acagcaagcctaagctgtggagacggatctttcagacctgcattgcccaacctaaaagaagcaattcctccaacccctcrtttggcctctcggccacctaaattgtgtcttgtgttttcagttttaaagccagctgtgtaggtttgtctgttggatgctggttttgagttgagagctgtctccagaatcaggctgagtgatgggagagcagcttggctgttgagtgggaagacaacctcctgttgtgggcataattgctgcattccttgactgggagaggagcagtgcaagtcygtctgygtaggacttacatggaaatggcatttttatgggaatatctgaaatgcctcttacaagcaccccattaaacattcctctgagtctggccacaggccagtctggagtcctttgaacttcttgccctccaggtagaagctgatgttgagtttcaagaccccaggttattggtagccacagcgaagggagcagagctacctcaagcattgacaacagacttgtgtgagtctcattggccatgctaggggtttcacagagctttgtcttctgcagcttttgtggcacagtgtccactggcagacc

SEQ ID NO: 47687 - DNA, 600 bp, Chicken  19866894292044_1
ctccacctgtgagcacaggagcggagcagtgctgtgcagggcaggctgaggggaagggcacagcaccctgcacagggctcactgtgcacacggatggcacggagagcaagaaaacagcttccaaagattcctcagtagggagcaaaatggttgattgcatgaggcagtgggatttggaagagcagccagagaaacagacaaaccaaagcaggaaggggaagaattacagggagcaagagctgatcatactggaatggtcaggtagtgcggctgggctgagcacactgctgggcagcactrcacagcagcatgcatgcagctcagaaaccttccactttcggaggccttgcaaatcagtatttgctcccttccaacagcacggctgccaagattcagattatggcctcaacaacaacaacaaccactggctaatctgaaagtggttcctttgataaggattgtgctaattccagtacacgagacacagtgctcccactaacagcagcgtacctgtgctgctcgttccctgctctgcactcagcagggattcaggctggcagctctcacaaggaacgtgctcaaaaaacaaagtggtcaaat

SEQ ID NO: 47688 - DNA, 600 bp, Chicken  19866894292044_2
ctgttacaacacgaaggcagccagcagggatctgacgacctgccttaacaaatgagctgcaggagctgcttggaaggcacggctttcttccagccccagacaggcaacattttccagagacagcagcttcacagcgtcccaacaggtactgcagcgattgcttttaacaccgagtgctgctgtaagaaagggacagattaaaaacccacaaaataaacagcaagttgcgagagctgctcctttgctgctgaacaaagatagcacccctccatccagcacagagcaaagcccaaaaaagastgtttttatacaacgtctccagaagcaaacatccaaaggaccgttttccattttctctaacctaaaagcagttcattcctacaaagcaaataactgcagagcagcgaagttacacttaacccgcgaggatttcacaccaacgggaggaataatgaaaggaaaacatttttatacgatgaaatcttggggtaatttttttgttgtttgttcggggtttcttttgaacacaaaaatcccctccgactctccaggaaaccacgtctccacaaacagtgccacggctttattttataagctgtt

SEQ ID NO: 47689 - DNA, 600 bp, Chicken  19866894292047_1
tgagtaaaggcaacagaaatgtgttttagtgtgtgcagtacatagggggggttcatcgtggagcttttcacaacctcatttcaggcactttattgcttcttcaatttcattttctgtgtaatttgacaaaactacaagtttctttaaaaaaaaaatcttttctttgaaactgtaaatgcctaatttcaacctccagcttattaaagcaccttgaaacaaattgaagccatatttccagatctaaggtgttatgctaaaaataaatgaatgaatctagtggagtggtatgtatctgttctstatttgcttcaaacctactagcagagatgagtgccactcttctgctctaacaagggagccatgggtcactgcagcaaagctatggcacccactggaaggtgcttttcatgctgtggtgcaggggaggaagatgaatataataagaaatttggcaatgtgtgttgatataaataatctctaagacaaacccagtgtggggccactggtggtggatatgtcgtttgtaaccacaattaccattgctgatgctattaccattgttagaactgtgtctgtgttttaaatacaatgactccttat

SEQ ID NO: 47690 - DNA, 600 bp, Chicken  19866894292053_1
cctgaagaaatagaaaggaatttcattaaaagcaagaaaggactgccttggctttgagaaactccagcagaaacttacacagacttttgttatgtgtaggtttttgtgtgtgtgtgtgtgtgtattttttttttaaaggagcgtttgaagcccattagacagcgccatgacagaaaatgcctaaactttgaagaaagttgctttgattacattttgttgccaaggagctgtgtttggccctgaatgaaaatgggactattagaaaaaaaagagaaagaaaaaaaaagaaaaagaaaaagsaaaaaaaaaagagtaaaaggacaactttgtaagttatttccagcatcgctatcttaaggcacactgcatctggaggtggaagtctccttcaggaggtcacaaggatttggcacgagcagcttggacatcaaaacaaagtacaaacgatggtaatataatcattaagataaactgtagcccaaacggtaaaagcatgagtcacaaaatggaattaaatttttaagtatggttatttgctaagaggctgtttaaaacaggcaatattttaagttaatgagacccatatgttttatggtatgt

SEQ ID NO: 47691 - DNA, 600 bp, Chicken  19866894292056_1
gagtaggggtatttttgtgaatattttggctgtattttaacttggatgcttctattctgccttcttatatttctgctgctgattgataggaaatgttctagtttttaaactttttttttcccttttattcttttctttctattgtgttttgttgaaagtattttatattggcatggacacagctggctttggcacaaaaagctgaaaatcagttcacagtaacagcggtggatcgtatcgtcaggtttgtgtttgaggcaagcggtctaaggaaaataaagtgttcatcttcctatttawatctggagtttggaccttgaaataactactaactaatatctggctttctgacagatcctgctatgatttatatgagaattgctccaaaagtaatgcctcccatttttttggctcatggtgtcagaggcagatgctggtgatatgccagcagaggttgaagcttcccaccaatattctgttacattttgctgttgtgcgacagatggcagcagaggggcagtcagacagaatggtttctgacatggaagtgtgtataaagcagatgtgtgtcactgaactccttcatgcagaaaaaaattg

SEQ ID NO: 47692 - DNA, 599 bp, Chicken  19866894292062_1
  misc_feature (1)..(68): n is any nucleotide
nnnnnnnnnnnnnnnnnnnnnnnnnnnnnnnnnnnnnnnnnnnnnnnnnnnnnnnnnnnnnnnnnnnnacctgatacttacctgagatctagctgtacttctcttgcgtcacccaggctctgctattgaggctggttaacatatatatgaaagccatggctcactgctgtgctttctgcaacaaataatcttgtcaaaggctttcatcaccccaaaactttaagaagtcatgttcattatggaggagaaccggaaacagggctaacaagtggggaaatcagcaggcccctttgggtctgkggtgtggaggtgagccccttgctttcatcacagtgtgtgctctgccccctgggttggtggtgctgagaagggaacaccacattggrctcttcatgccaaacaactgacattcatctgcactcagtcccatggctgggaaatctacagcaaggtatatgctgtgctgagagtgcatcacctctcctctgagtgccacaaaactggaaagcatcatgtccttcaagggccagagagagtgagcgactcgacctactgggaaaacaaagtgatggcaacagtgaaagcacaggagttggagg

SEQ ID NO: 47693 - DNA, 600 bp, Chicken  19866894292062_2
atctagctgtacttctcttgcgtcacccaggctctgctattgaggctggttaacatatatatgaaagccatggctcactgctgtgctttctgcaacaaataatcttgtcaaaggctttcatcaccccaaaactttaagaagtcatgttcattatggaggagaaccggaaacagggctaacaagtggggaaatcagcaggcccctttgggtctgkggtgtggaggtgagccccttgctttcatcacagtgtgtgctctgccccctgggttggtggtgctgagaagggaacaccacattggrctcttcatgccaaacaactgacattcatctgcactcagtcccatggctgggaaatctacagcaaggtatatgctgtgctgagagtgcatcacctctcctctgagtgccacaaaactggaaagcatcatgtccttcaagggccagagagagtgagcgactcgacctactgggaaaacaaagtgatggcaacagtgaaagcacaggagttggaggcccatttgcaaaatgttgcttgtgttgtttgctggagcagttactataatccatttggctgtacatgctctttctatattgtgttaa

SEQ ID NO: 47694 - DNA, 600 bp, Chicken  19866894292066_1
tttcctttttcttcattgcagttggtcaatagctttgttctgatctgctggccaggttggataatgagaaaaagcatcgtgcaagggctgtctttccatgtgcaacatctcctgttagtgtgccaaccaagtggctccacactcatgacactaccgctggtctttcgcatgccaaagtgtttgagagccatggtcagtgatgtagcagggactagttatggtttcagaacctagcatgtttaagcacgggccttgttgctcaacaacagatcactgaaagcctaaacaaaaggcatttcrctggaaatgtcttattattcaagcatttgaataacgtttcttatggatgctcacaagctagttctctctttttgacaagctgtaggaaaataacagcctcccactttaaagatgtggaaacaaagtgaaataaaaaagagactgatgtcacgagggctttgtgtcagatgcgacaaggagtgagggcttgcttatctgggaaaaactctccagcatccacaggagcacttcagacacagctgaggaaacaatgcaaactctgaacatcccaggtctggcctcactctggattctgtcaga

SEQ ID NO: 47695 - DNA, 600 bp, Chicken  19866894292071_1
aagtggctctgctgttcagggcaatcagagaaaaatcagaacttgtctaattaatgtaattattcattatgataagccatgagacgcagtagtaaaggtaagtctccttgtactctgtatcagatcaaatgatacagatatctttccttgtgtgcttgaggtagaacaagcaaatcccattaagcaacataatatcagcattacaaaaacaatttcacataataaaattctcaagggccaaacatgtacatcactgaagtctgggagccccagaacatccagggcaatggttgttcctcytgtaacattcattactttaattacaagctttgagatgaaaaattgcattaacaagatcctccccacagcccatatctgcctgatttatagcactttttttttggccaaccttttgacttcccagcagagggatgaaagcagctgtgcagaaaccatgagtgggtgggtaaaagcacaccactgtgtccccccttggtgtccagccccacttgcagctgctgctgtgygcacagtgagtaaagcagtgcaggagagacccaaaggagcatccttcgtgctgatcccaggctgaagctcttg

SEQ ID NO: 47696 - DNA, 581 bp, Chicken  19866894292071_2
ttctcaagggccaaacatgtacatcactgaagtctgggagccccagaacatccagggcaatggttgttcctcytgtaacattcattactttaattacaagctttgagatgaaaaattgcattaacaagatcctccccacagcccatatctgcctgatttatagcactttttttttggccaaccttttgacttcccagcagagggatgaaagcagctgtgcagaaaccatgagtgggtgggtaaaagcacaccactgtgtccccccttggtgtccagccccacttgcagctgctgctgtgygcacagtgagtaaagcagtgcaggagagacccaaaggagcatccttcgtgctgatcccaggctgaagctcttgcttttctgctgggagaggtggctgatggttgttgtgtgaggacaaggaagaatgtggaggaatttgtgtaacaaagatctataaatcatctgcagtatccatcactccccaagagatgctgtcagcagattcaagagcaaggaaatgggaaatactctcttcatcaacggctgggaagtgcctttgggccaggcaaaggagctctgca

SEQ ID NO: 47697 - DNA, 600 bp, Chicken  19866894292074_1
tgcctggagtactgcagacatatgctatccggcctctccaaattgcaggcctccacagggcacgcccagcacacagcctcctgcatctgactgccaagagcagaagggaacatatgcagctggggaagatgcccctgcctcatcactatgagtggattacttgtctgatattttccagactctgtagacatacgctgtcctggcctaatgtcctggctatatcattttggattaatcagggctgagctttccaggtcaaaaacaggttcattaggggtaatattcaaaatggagagttcytcttgacaacagaaaaaacaagtgcttccccatactataacctgaaataacaaaacagcagttttccaataactktataaaaatctgtaaaactaactaggcaycaccagtcatgatgacaatcscagcacgtattttctttttcctgttttctgtgctatcaagagacccagagaggtttttccattcattatacaaatggggaaatgtgaggttaaaggctgaaaagaagagcttggctaggagcaactcttcttgcctgttataattatccattattgttgttattattgttctatc

SEQ ID NO: 47698 - DNA, 600 bp, Chicken  19866894292074_2
gcctcctgcatctgactgccaagagcagaagggaacatatgcagctggggaagatgcccctgcctcatcactatgagtggattacttgtctgatattttccagactctgtagacatacgctgtcctggcctaatgtcctggctatatcattttggattaatcagggctgagctttccaggtcaaaaacaggttcattaggggtaatattcaaaatggagagttcytcttgacaacagaaaaaacaagtgcttccccatactataacctgaaataacaaaacagcagttttccaataactktataaaaatctgtaaaactaactaggcaycaccagtcatgatgacaatcscagcacgtattttctttttcctgttttctgtgctatcaagagacccagagaggtttttccattcattatacaaatggggaaatgtgaggttaaaggctgaaaagaagagcttggctaggagcaactcttcttgcctgttataattatccattattgttgttattattgttctatcatcaaaagaaatagctctattgttctgcacagcagaagttgcaggccctgtgattcattgcatgcagttgtgtag

SEQ ID NO: 47699 - DNA, 600 bp, Chicken  19866894292074_3
agggaacatatgcagctggggaagatgcccctgcctcatcactatgagtggattacttgtctgatattttccagactctgtagacatacgctgtcctggcctaatgtcctggctatatcattttggattaatcagggctgagctttccaggtcaaaaacaggttcattaggggtaatattcaaaatggagagttcytcttgacaacagaaaaaacaagtgcttccccatactataacctgaaataacaaaacagcagttttccaataactktataaaaatctgtaaaactaactaggcaycaccagtcatgatgacaatcscagcacgtattttctttttcctgttttctgtgctatcaagagacccagagaggtttttccattcattatacaaatggggaaatgtgaggttaaaggctgaaaagaagagcttggctaggagcaactcttcttgcctgttataattatccattattgttgttattattgttctatcatcaaaagaaatagctctattgttctgcacagcagaagttgcaggccctgtgattcattgcatgcagttgtgtagcactctaggctaggcttaaaatatgtttc

SEQ ID NO: 47700 - DNA, 600 bp, Chicken  19866894292074_4
aagatgcccctgcctcatcactatgagtggattacttgtctgatattttccagactctgtagacatacgctgtcctggcctaatgtcctggctatatcattttggattaatcagggctgagctttccaggtcaaaaacaggttcattaggggtaatattcaaaatggagagttcytcttgacaacagaaaaaacaagtgcttccccatactataacctgaaataacaaaacagcagttttccaataactktataaaaatctgtaaaactaactaggcaycaccagtcatgatgacaatcscagcacgtattttctttttcctgttttctgtgctatcaagagacccagagaggtttttccattcattatacaaatggggaaatgtgaggttaaaggctgaaaagaagagcttggctaggagcaactcttcttgcctgttataattatccattattgttgttattattgttctatcatcaaaagaaatagctctattgttctgcacagcagaagttgcaggccctgtgattcattgcatgcagttgtgtagcactctaggctaggcttaaaatatgtttctctattaatcctaaaatgaca

SEQ ID NO: 47701 - DNA, 600 bp, Chicken  19866894292074_5
tctgtgctatcaagagacccagagaggtttttccattcattatacaaatggggaaatgtgaggttaaaggctgaaaagaagagcttggctaggagcaactcttcttgcctgttataattatccattattgttgttattattgttctatcatcaaaagaaatagctctattgttctgcacagcagaagttgcaggccctgtgattcattgcatgcagttgtgtagcactctaggctaggcttaaaatatgtttctctattaatcctaaaatgacacgtgaacctgcacatacagtttcctygggtggcctcaagcaaaccatctcagctgcagtgagatggatgaaaattgtgccattacagtcaaaccctgagctaacgtaaaggcgatgagagctatagaaattgccaggctacaggcatgaaaagaaagcctttctttcattccctggtgccagtaacaactggcataatgcgatgcttgttttgtcctcacatcctgcaacacaaatggacagtctctattaagacctccacttaaacagcaacagttaaaacaaatttctccatcctgatatcctattgcattgtcagtcacactt

SEQ ID NO: 47702 - DNA, 600 bp, Chicken  19866894292086_1
cttgcactgaacccactgctgattagatagataacatgctgacagcactcagtgacttttccttctcattttgttaccaatgacccatatatcctttctttcttggactcagtatatcagtggttaaaattcacttttcagagtcatttcaaaaggtcacaaacatccataattactgggcttgaggaataattcctgagttttcattaaccaagagggcaggagaaaaagtaaatatttatcaaagatactcaggaaattagatactgttcagaagaactgatattgtaagaaatgtaytggggcatttattatgattcaagaaatcaagactttctgtctttggatgcacatggatcccacttgagtgcaattcaataatgaagaatctattctaccattgagaaatgaggaatttatccatgaaagctctcattgcattaatgagagttagccttgaattgattggaaaatagatccacaaactgcagacggcagcayaagacacatatttgcacctctacatataatgaactaatgtagatatttgcaagggagtatgagaccctcacagaaaaaaaaataatatatctaaaaata

SEQ ID NO: 47703 - DNA, 600 bp, Chicken  19866894292086_2
tttcattaaccaagagggcaggagaaaaagtaaatatttatcaaagatactcaggaaattagatactgttcagaagaactgatattgtaagaaatgtaytggggcatttattatgattcaagaaatcaagactttctgtctttggatgcacatggatcccacttgagtgcaattcaataatgaagaatctattctaccattgagaaatgaggaatttatccatgaaagctctcattgcattaatgagagttagccttgaattgattggaaaatagatccacaaactgcagacggcagcayaagacacatatttgcacctctacatataatgaactaatgtagatatttgcaagggagtatgagaccctcacagaaaaaaaaataatatatctaaaaataagcaatggtgggagtctaacgtactcaaggtagaaaagtaagaagggagaaaatattagtttaattacagcataactaatttctttgtttctgctagtgtttttcatataaattatatgtggaaaagcatttctaattcaaaaataaaatggataatatacacacctttgtgctgctgaaaggctaaaaaattcagtttaa

SEQ ID NO: 47704 - DNA, 600 bp, Chicken  19866894292089_1
agctgggatactcattgccttcgcatctcaggttagatgagtaggagagtatctgtaaaccccaaaccagtacctactgaagcactttcagagcaccagtgaaagagaactgaaatcaactagttgtcatagacttagcagtgtcagagcagttaagagtgcatacaaaaacactaattttgactcagctgttatgtttatcttcctttcttcatatcctgtgactgaagatttgaaatgaaaaaaatgcttggggaaaagcttaagtgctcatagtgaagagaagtccagtgccctggsagatgctggtaggacacttatggagtttttttcctatgtatgcctttaggaaaggtaggattacctaagtgaatgtcctttctggtgcagtgcagtgatggctggactaggtgatcttggaggtcttttccagccttggtgattctatgattctagtagcagacctgtgatgctgcagggggttgtcatgctctcatcctgcagtctgtgccacatgcatgaaaggaatgactgtgacacactgtcctgtagtagatcctcctagggcaaaaatctgcaaggaagcagatattattgtgt

SEQ ID NO: 47705 - DNA, 600 bp, Chicken  19866894292092_1
aagcagaggaggaagggatttgccttgcagctctggaaatgatgctcacaaatctgtgctggcggaggctcctgtaagtgaagtctgaactcagcccttgtaattctgtaatttgaatatcattttcacagaccttacaagatgcagatgaatgagagattcctggctttgagtcaaatgcaacagtaattaaatgtttataaaacactttaagcttgtgaaatgctattatcatatacaggaaagcaataggcaatagaagactggagcagagtttgaagcacacagtgagcagagcayactcctgcagctttcttctacaggtgctaacagagcattgtgaagaacgttaccatgctcctttttttataaccagaacgtcaactagaattgctttcttccatacaaacatgtgtgattccaaagtttttccctctgcaataaatattcctgccgatgggcagcatgctgttatcatcttgggaaatgaggaagcgctgccacttctgatctctcccatcgtgccaaagacattccacctgttacaggtttctaacaccatctgctgtttaaaaataagacagcattggaaataccatc

SEQ ID NO: 47706 - DNA, 600 bp, Chicken  19866894292097_1
aggagggcttagatttcaatcaagtgcttcatgaatgttgtacttgtatttccacttgatttctataagaacagaagcctgaacaggttgacctgttcaaccgaatagtctgctcagcttaacaaggatgagattacttatggtctgtacgaccaacacagcatgactggattcttgcccttctgaggtttattttgtcagttggataaagctcctaatctgacagttcctatgctaaagaggggtctgtatgtacatcagcagcccatgtgttctctggagggaagagtaaggctgtcyaagagaactcacccaggcaggctctcagctcgctgcctgccctgcagctgctgccctctcatctgacacgtctttcacctgccctgtcctggcagagaacttgggcacatgcttgccacagcttgcagtttcacccagggaaccttcttagagggtttggaggatgggattctgagacactctacttcgtgtctgtccttcccgtttaaaccagctttgctttttttttgtttgtttttcagcagaagggagagccctttgttaaacaggtgttagtaagcatttaattacagaagcatt

SEQ ID NO: 47707 - DNA, 600 bp, Chicken  19866894292097_2
gcaggctctcagctcgctgcctgccctgcagctgctgccctctcatctgacacgtctttcacctgccctgtcctggcagagaacttgggcacatgcttgccacagcttgcagtttcacccagggaaccttcttagagggtttggaggatgggattctgagacactctacttcgtgtctgtccttcccgtttaaaccagctttgctttttttttgtttgtttttcagcagaagggagagccctttgttaaacaggtgttagtaagcatttaattacagaagcatttagtagagtctgcagyttccagtaaaaatagtcttttcttctctcttccatgcwtacagcatrctattacttactgcttctgcctgctttcctgaagtccagcagatattgttctgtatgtaacttggatttttttcacgtaaaagcaaaatggtcttttcttaaattgaaacccttcctattcaaatacagagttccctggggcaaagtatactttgtcatgatttaataaataaatatttgttcaaatatccagcaggatattgcaaaaagaactacaatgtgcctgcttgcactcaagcatgttaccaacgcc

SEQ ID NO: 47708 - DNA, 567 bp, Chicken  19866894292097_3
cctctcatctgacacgtctttcacctgccctgtcctggcagagaacttgggcacatgcttgccacagcttgcagtttcacccagggaaccttcttagagggtttggaggatgggattctgagacactctacttcgtgtctgtccttcccgtttaaaccagctttgctttttttttgtttgtttttcagcagaagggagagccctttgttaaacaggtgttagtaagcatttaattacagaagcatttagtagagtctgcagyttccagtaaaaatagtcttttcttctctcttccatgcwtacagcatrctattacttactgcttctgcctgctttcctgaagtccagcagatattgttctgtatgtaacttggatttttttcacgtaaaagcaaaatggtcttttcttaaattgaaacccttcctattcaaatacagagttccctggggcaaagtatactttgtcatgatttaataaataaatatttgttcaaatatccagcaggatattgcaaaaagaactacaatgtgcctgcttgcactcaagcatgttaccaacgccaccga

SEQ ID NO: 47709 - DNA, 558 bp, Chicken  19866894292097_4
tgacacgtctttcacctgccctgtcctggcagagaacttgggcacatgcttgccacagcttgcagtttcacccagggaaccttcttagagggtttggaggatgggattctgagacactctacttcgtgtctgtccttcccgtttaaaccagctttgctttttttttgtttgtttttcagcagaagggagagccctttgttaaacaggtgttagtaagcatttaattacagaagcatttagtagagtctgcagyttccagtaaaaatagtcttttcttctctcttccatgcwtacagcatrctattacttactgcttctgcctgctttcctgaagtccagcagatattgttctgtatgtaacttggatttttttcacgtaaaagcaaaatggtcttttcttaaattgaaacccttcctattcaaatacagagttccctggggcaaagtatactttgtcatgatttaataaataaatatttgttcaaatatccagcaggatattgcaaaaagaactacaatgtgcctgcttgcactcaagcatgttaccaacgccaccga

SEQ ID NO: 47710 - DNA, 533 bp, Chicken  19866894292100_1
tttcacaataaaagtgcctacaaccaaacacatgtacacccattgctcctgtccttctcacctctcctggggcagtgattcctctctacaatgcttttgtgtaatattataaaacagccatatagcaaataataacaataatagtaagtgaccaggttttacgagcagacgcgtccgacatgatgctccgtgggcccagtccaggacaccagtcagctctggaagtgaatcaggagctttcactgaacacttcccatttcctgaagaggaatggcactcggaagttgtgcatatttacarttactgtggaatggagaacaaaatatcctgaggtcccgttctgcatgtgtgtgctgacaaaacaaattatgacctaacaccctgggggctggggttttttggaccaagtatgctccctcccataattaaatgtagccagacaggcactgtggacatcagttccgtacagctccccagctatactcccctccttggagagctacaaaccaggctggtgtgcctattctaaaaca

SEQ ID NO: 47711 - DNA, 600 bp, Chicken  19866894292108_1
taatgaagtaaatcaaatgaattaatgataagctgcaaaggaggggctgaaatagattaaatgcactgttacacacgccaggcactcttgcaatagttactgattaattggacttcggcctctacattcataactactaattgagtatgttttgatttgaatgccttcatttttactcatttctgtgctggtaaggtgaaggcactgagcaaaaatggccaaagcattattctgtactgtagagaacctgctttagcagtggggttgggctctatgataacttgagttcccttacaattmtgtgcttctgtgatttttatttttttcctctatattaggaattgttaccaagtctctggccacttacccaggttttatgagattccttctttcttctaacaggtaaactgggatgaagagaaggagtgctttgaaaccctaagtaaagaactgtctatgttctactccattagaaaacaatatataatagatgaaaccaacctgacgcgctctcaggtaccataatatgttactacttatgtaacaagcattaacaagacaaactctatttttttttctcccccaaactacagacttcta

SEQ ID NO: 47712 - DNA, 600 bp, Chicken  19866894292108_2
aacttgagttcccttacaattmtgtgcttctgtgatttttatttttttcctctatattaggaattgttaccaagtctctggccacttacccaggttttatgagattccttctttcttctaacaggtaaactgggatgaagagaaggagtgctttgaaaccctaagtaaagaactgtctatgttctactccattagaaaacaatatataatagatgaaaccaacctgacgcgctctcaggtaccataatatgttactacttatgtaacaagcattaacaagacaaactctatttttttttmtcccccaaactacagacttctaatcccaaatctgctttcastgatgtgaatcaagtagtggtgcagcatgtttctgaaacaatgtggctcacttttcctaactgtactgaaccttttaacactgggcattgcagtatacttcatgtattcacttggtctcagttttgaaagtgttttttcctaacctgttgaactacagtaagcttctataggaggatgcatataaacctaaaatgtagtttgcttatgtgtaagtatctgtttaatcattcagttaaggtagccagttcaagtggcacc

SEQ ID NO: 47713 - DNA, 600 bp, Chicken  19866894292108_3
tttttttcctctatattaggaattgttaccaagtctctggccacttacccaggttttatgagattccttctttcttctaacaggtaaactgggatgaagagaaggagtgctttgaaaccctaagtaaagaactgtctatgttctactccattagaaaacaatatataatagatgaaaccaacctgacgcgctctcaggtaccataatatgttactacttatgtaacaagcattaacaagacaaactctatttttttttctcccccaaactacagacttctaatcccaaatctgctttcastgatgtgaatcaagtagtggtgcagcatgtttctgaaacaatgtggctcacttttcctaactgtactgaaccttttaacactgggcattgcagtatacttcatgtattcacttggtctcagttttgaaagtgttttttcctaacctgttgaactacagtaagcttctataggaggatgcatataaacctaaaatgtagtttgcttatgtgtaagtatctgtttaatcattcagttaaggtagccagttcaagtggcaccactcaaagggatttttcagagcttaaaattaccttggcagt

SEQ ID NO: 47714 - DNA, 600 bp, Chicken  19866894292110_1
gagctatacagctgaagttcaacccgacccatcaggttctgcctttactctgagaacaactcaagataacgcttcgacaccttaacacagccctaaaaataaacccagggctttggttttttttagcctattttatattgggcagcaactggttcatagtctttgccatgaactcccacactgtcattattacccatgactaactcatcagggagatgactgctttcaccagcaagctgaggagggatccgtgctatcctgcaacccccatcatctgactgcaaggctaacacagaagtmttaccaaaktcccaaccaccaaggtcctggggaacaaagagctgcctttaagcaaagcaaggtgtcttcctgactgaaatacattggratatatggtgatatcccacttaaccaacctattagttgagcagtgggaagggtgtcgtgttgtttcagagctcttgcatctgctcagtgcttgttgagctgtgcaggagtgtgctgaagtcaggaactgcwgctcacagaccttcagttccagcagttaatcattaagtgatgattaaccacaagatgtacaaagagagatggtayggggcg

SEQ ID NO: 47715 - DNA, 600 bp, Chicken  19866894292110_10
aaccactcctcctgcaagcccccaagctgctgcacgcaccccttcttttgtttgaagatcactgacatacagtgttgatgtagtgttatcatgactacgttctactacaaatcycaatcagcagcatcactcactctccccaagtggtaaatatttaaacaggcaaaggcttaaagaaagctctaatagaggggatctaaacaaatccccttatctcagggattcaaacgctatctgcctacggtgaataatttgatagtgatgtgttccacttgccacagattaamgaggcaacgtgargaggaagagacgtggagcacaaatcactttgccacctgacagctccttttgtggaactgagcatcagtgctgcggcacacggaaaccaccccgacgccccacgggagctccccacagaggggcagcagctgtgtgctgtactcaccaagccctggtatctgaaggaatcgtaaacgctcctgatgaagagccagaagggccacagatactcaaacctgaactccaggacaaagtctgctaacagtaccagtgcccacaccaccaggaacttcaggtacaggaaagtactgccaagagaaa

SEQ ID NO: 47716 - DNA, 600 bp, Chicken  19866894292110_2
agctgaagttcaacccgacccatcaggttctgcctttactctgagaacaactcaagataacgcttcgacaccttaacacagccctaaaaataaacccagggctttggttttttttagcctattttatattgggcagcaactggttcatagtctttgccatgaactcccacactgtcattattacccatgactaactcatcagggagatgactgctttcaccagcaagctgaggagggatccgtgctatcctgcaacccccatcatctgactgcaaggctaacacagaagtmttaccaaaktcccaaccaccaaggtcctggggaacaaagagctgcctttaagcaaagcaaggtgtcttcctgactgaaatacattggratatatggtgatatcccacttaaccaacctattagttgagcagtgggaagggtgtcgtgttgtttcagagctcttgcatctgctcagtgcttgttgagctgtgcaggagtgtgctgaagtcaggaactgcwgctcacagaccttcagttccagcagttaatcattaagtgatgattaaccacaagatgtacaaagagagatggtayggggcgcatgtaaag

SEQ ID NO: 47717 - DNA, 600 bp, Chicken  19866894292110_3
agccctaaaaataaacccagggctttggttttttttagcctattttatattgggcagcaactggttcatagtctttgccatgaactcccacactgtcattattacccatgactaactcatcagggagatgactgctttcaccagcaagctgaggagggatccgtgctatcctgcaacccccatcatctgactgcaaggctaacacagaagtmttaccaaaktcccaaccaccaaggtcctggggaacaaagagctgcctttaagcaaagcaaggtgtcttcctgactgaaatacattggratatatggtgatatcccacttaaccaacctattagttgagcagtgggaagggtgtcgtgttgtttcagagctcttgcatctgctcagtgcttgttgagctgtgcaggagtgtgctgaagtcaggaactgcwgctcacagaccttcagttccagcagttaatcattaagtgatgattaaccacaagatgtacaaagagagatggtayggggcgcatgtaaagataccaaggataacaaaaagaacacttcttacctgcataaaaagtacattaacgcaawtgtgacaaatagaagaggggt

SEQ ID NO: 47718 - DNA, 600 bp, Chicken  19866894292110_4
ctgctttcaccagcaagctgaggagggatccgtgctatcctgcaacccccatcatctgactgcaaggctaacacagaagtmttaccaaaktcccaaccaccaaggtcctggggaacaaagagctgcctttaagcaaagcaaggtgtcttcctgactgaaatacattggratatatggtgatatcccacttaaccaacctattagttgagcagtgggaagggtgtcgtgttgtttcagagctcttgcatctgctcagtgcttgttgagctgtgcaggagtgtgctgaagtcaggaactgcwgctcacagaccttcagttccagcagttaatcattaagtgatgattaaccacaagatgtacaaagagagatggtayggggcgcatgtaaagataccaaggataacaaaaagaacacttcttacctgcataaaaagtacattaacgcaawtgtgacaaatagaagaggggttctgcatgttatgaagamttaattaagatgtatatttgaatcagtatgttttagttaaggaacagtgacctacctgtgtgccacacatactgtacccacacatacgtgctggcagcaaagaacagccattg

SEQ ID NO: 47719 - DNA, 600 bp, Chicken  19866894292110_5
gaagtmttaccaaaktcccaaccaccaaggtcctggggaacaaagagctgcctttaagcaaagcaaggtgtcttcctgactgaaatacattggratatatggtgatatcccacttaaccaacctattagttgagcagtgggaagggtgtcgtgttgtttcagagctcttgcatctgctcagtgcttgttgagctgtgcaggagtgtgctgaagtcaggaactgcwgctcacagaccttcagttccagcagttaatcattaagtgatgattaaccacaagatgtacaaagagagatggtayggggcgcatgtaaagataccaaggataacaaaaagaacacttcttacctgcataaaaagtacattaacgcaawtgtgacaaatagaagaggggttctgcatgttatgaagamttaattaagatgtatatttgaatcagtatgttttagttaaggaacagtgacctacctgtgtgccacacatactgtacccacacatacgtgctggcagcaaagaacagccattgtattggtatgaagagcagacatattatatttgatgtgaatgctacacaaacaaaaaacactgaaaaagcctaaaa

SEQ ID NO: 47720 - DNA, 600 bp, Chicken  19866894292110_6
tcctgactgaaatacattggratatatggtgatatcccacttaaccaacctattagttgagcagtgggaagggtgtcgtgttgtttcagagctcttgcatctgctcagtgcttgttgagctgtgcaggagtgtgctgaagtcaggaactgcwgctcacagaccttcagttccagcagttaatcattaagtgatgattaaccacaagatgtacaaagagagatggtayggggcgcatgtaaagataccaaggataacaaaaagaacacttcttacctgcataaaaagtacattaacgcaawtgtgacaaatagaagaggggttctgcatgttatgaagamttaattaagatgtatatttgaatcagtatgttttagttaaggaacagtgacctacctgtgtgccacacatactgtacccacacatacgtgctggcagcaaagaacagccattgtattggtatgaagagcagacatattatatttgatgtgaatgctacacaaacaaaaaacactgaaaaagcctaaaaagaaagaagagagttcagtttattccagcaaacatcaccagtgagtccagcatagaaacacgagcattactta

SEQ ID NO: 47721 - DNA, 600 bp, Chicken  19866894292110_7
cttaaccaacctattagttgagcagtgggaagggtgtcgtgttgtttcagagctcttgcatctgctcagtgcttgttgagctgtgcaggagtgtgctgaagtcaggaactgcwgctcacagaccttcagttccagcagttaatcattaagtgatgattaaccacaagatgtacaaagagagatggtayggggcgcatgtaaagataccaaggataacaaaaagaacacttcttacctgcataaaaagtacattaacgcaawtgtgacaaatagaagaggggttctgcatgttatgaagamttaattaagatgtatatttgaatcagtatgttttagttaaggaacagtgacctacctgtgtgccacacatactgtacccacacatacgtgctggcagcaaagaacagccattgtattggtatgaagagcagacatattatatttgatgtgaatgctacacaaacaaaaaacactgaaaaagcctaaaaagaaagaagagagttcagtttattccagcaaacatcaccagtgagtccagcatagaaacacgagcattacttatactcagggtaaagaaatcactgcaccattagggttggg

SEQ ID NO: 47722 - DNA, 600 bp, Chicken  19866894292110_8
caccagtgagtccagcatagaaacacgagcattacttatactcagggtaaagaaatcactgcaccattagggttgggagagatcactaaatcacccagcccaaccaaacagggcagcctggctgatggcaggacagatctgcccaatcatgagacaaaatgtacagcctgagaatatctgtgccccaaccactcctcctgcaagcccccaagctgctgcacgcaccccttcttttgtttgaagatcactgacatacagtgttgatgtagtgttatcatgactacgttctactacaaatcycaatcagcagcatcactcactctccccaagtggtaaatatttaaacaggcaaaggcttaaagaaagctctaatagaggggatctaaacaaatccccttatctcagggattcaaacgctatctgcctacggtgaataatttgatagtgatgtgttccacttgccacagattaamgaggcaacgtgargaggaagagacgtggagcacaaatcactttgccacctgacagctccttttgtggaactgagcatcagtgctgcggcacacggaaaccaccccgacgccccacgggagctcccca

SEQ ID NO: 47723 - DNA, 600 bp, Chicken  19866894292110_9
atatctgtgccccaaccactcctcctgcaagcccccaagctgctgcacgcaccccttcttttgtttgaagatcactgacatacagtgttgatgtagtgttatcatgactacgttctactacaaatcycaatcagcagcatcactcactctccccaagtggtaaatatttaaacaggcaaaggcttaaagaaagctctaatagaggggatctaaacaaatccccttatctcagggattcaaacgctatctgcctacggtgaataatttgatagtgatgtgttccacttgccacagattaamgaggcaacgtgargaggaagagacgtggagcacaaatcactttgccacctgacagctccttttgtggaactgagcatcagtgctgcggcacacggaaaccaccccgacgccccacgggagctccccacagaggggcagcagctgtgtgctgtactcaccaagccctggtatctgaaggaatcgtaaacgctcctgatgaagagccagaagggccacagatactcaaacctgaactccaggacaaagtctgctaacagtaccagtgcccacaccaccaggaacttcaggtacaggaaagta

SEQ ID NO: 47724 - DNA, 600 bp, Chicken  19866894292115_1
gctgctgaccaatgagagccagcaggggcgggatggaactgccgatcaccaattagaggccaccgggggtgggtcagagctgctgctgtccaatgagaggccagcaagggcgggatggagcctctgctgaccaatgagaggccggcacgggtgtgcgccgagctgggagcaaagcggacaccccgaaagcattggcagcgacaggaaggggctccaagaagcaaagaatggcggcgaggcgctgccgggagcaccaaaaaggcggtgaggctctccctgaagcaccacagcagtttgttygcccacagcacacacgcgtgtgtggcccatccctgcgtgcaaccacatgcatgcacacacatgcaaccccatcccgttgcacagsagtgcacgcgcaaagacgcgtgcagcctcatctgcagctccacaggcaggaggagacgggccgaggagagcgctccctcggatgaaaggcagtgggcagccatggcaaaggctgaggtgctcagtgagagctttgcctcrgtytttgcaggtggtcgggcttcccgtgcctgccgggaccctgaagccctcrgtgtgggtgagaggagcgcattc

SEQ ID NO: 47725 - DNA, 600 bp, Chicken  19866894292115_2
ctgtccaatgagaggccagcaagggcgggatggagcctctgctgaccaatgagaggccggcacgggtgtgcgccgagctgggagcaaagcggacaccccgaaagcattggcagcgacaggaaggggctccaagaagcaaagaatggcggcgaggcgctgccgggagcaccaaaaaggcggtgaggctctccctgaagcaccacagcagtttgttygcccacagcacacacgcgtgtgtggcccatccctgcgtgcaaccacatgcatgcacacacatgcaaccccatcccgttgcacagsagtgcacgcgcaaagacgcgtgcagcctcatctgcagctccacaggcaggaggagacgggccgaggagagcgctccctcggatgaaaggcagtgggcagccatggcaaaggctgaggtgctcagtgagagctttgcctcrgtytttgcaggtggtcgggcttcccgtgcctgccgggaccctgaagccctcrgtgtgggtgagaggagcgcattccgtcscactgtaacggcggaagaagtctgagtcctccgcggggaactgaatgtatgtaagtccgtggggccggatgatatccatc

SEQ ID NO: 47726 - DNA, 465 bp, Chicken  19866894292115_3
gaatggcggcgaggcgctgccgggagcaccaaaaaggcggtgaggctctccctgaagcaccacagcagtttgttygcccacagcacacacgcgtgtgtggcccatccctgcgtgcaaccacatgcatgcacacacatgcaaccccatcccgttgcacagsagtgcacgcgcaaagacgcgtgcagcctcatctgcagctccacaggcaggaggagacgggccgaggagagcgctccctcggatgaaaggcagtgggcagccatggcaaaggctgaggtgctcagtgagagctttgcctcrgtytttgcaggtggtcgggcttcccgtgcctgccgggaccctgaagccctcrgtgtgggtgagaggagcgcattccgtcscactgtaacggcggaagaagtctgagtcctccgcggggaactgaatgtatgtaagtccgtggggccggatgatatccatcccagg

SEQ ID NO: 47727 - DNA, 462 bp, Chicken  19866894292115_4
tggcggcgaggcgctgccgggagcaccaaaaaggcggtgaggctctccctgaagcaccacagcagtttgttygcccacagcacacacgcgtgtgtggcccatccctgcgtgcaaccacatgcatgcacacacatgcaaccccatcccgttgcacagsagtgcacgcgcaaagacgcgtgcagcctcatctgcagctccacaggcaggaggagacgggccgaggagagcgctccctcggatgaaaggcagtgggcagccatggcaaaggctgaggtgctcagtgagagctttgcctcrgtytttgcaggtggtcgggcttcccgtgcctgccgggaccctgaagccctcrgtgtgggtgagaggagcgcattccgtcscactgtaacggcggaagaagtctgagtcctccgcggggaactgaatgtatgtaagtccgtggggccggatgatatccatcccagg

SEQ ID NO: 47728 - DNA, 413 bp, Chicken  19866894292115_5
tgaagcaccacagcagtttgttygcccacagcacacacgcgtgtgtggcccatccctgcgtgcaaccacatgcatgcacacacatgcaaccccatcccgttgcacagsagtgcacgcgcaaagacgcgtgcagcctcatctgcagctccacaggcaggaggagacgggccgaggagagcgctccctcggatgaaaggcagtgggcagccatggcaaaggctgaggtgctcagtgagagctttgcctcrgtytttgcaggtggtcgggcttcccgtgcctgccgggaccctgaagccctcrgtgtgggtgagaggagcgcattccgtcscactgtaacggcggaagaagtctgagtcctccgcggggaactgaatgtatgtaagtccgtggggccggatgatatccatcccagg

SEQ ID NO: 47729 - DNA, 385 bp, Chicken  19866894292115_6
cagcacacacgcgtgtgtggcccatccctgcgtgcaaccacatgcatgcacacacatgcaaccccatcccgttgcacagsagtgcacgcgcaaagacgcgtgcagcctcatctgcagctccacaggcaggaggagacgggccgaggagagcgctccctcggatgaaaggcagtgggcagccatggcaaaggctgaggtgctcagtgagagctttgcctcrgtytttgcaggtggtcgggcttcccgtgcctgccgggaccctgaagccctcrgtgtgggtgagaggagcgcattccgtcscactgtaacggcggaagaagtctgagtcctccgcggggaactgaatgtatgtaagtccgtggggccggatgatatccatcccagg

SEQ ID NO: 47730 - DNA, 599 bp, Chicken  19866894292116_1
  misc_feature (1)..(11): n is any nucleotide
nnnnnnnnnnncacccacaccgaagggcttcagggtcccggcaggcacgggaagcccgaccacctgcaaaaactgaggcaaagctctcactgagcacctcagcctttgccatggctgcccactgcctttcatccgagggagcgctctcctcggcccgtctcctcctgcctgtggagctgcagatgaggctgcacgcgtctttgcgcgtgcactgcctgtgcaacgggatggggttgcatgtgtgtgcatgcatgtggttgcacgcagggatgggccacacacgcgtgtgtgctgtgggcraacaaactgctgtggtgcttcagggagagcctcaccgcctttttggtgctcccggcagcgcctcgccgccattctttgcttcttggagccccttcctgtcgctgccaatgctttcggggtgtccgctttgctcccagctcggcgcacacccgtgccggcctctcattggtcagcagaggctccatcccgcccttgctggcctctcattggacagcagcagctctgacccacccccggtggcctctaattggtgatcggcagttccatcccgcccctgctggctctcattggtcagcagc

SEQ ID NO: 47731 - DNA, 600 bp, Chicken  19866894292116_2
cccacccccggtggcctctaattggtgatcggcagttccatcccgcccctgctggctctcattggtcagcagcagctctgtcccacccccggtggcctctcattggtgatcggcatctccattccgcccctgctggcctctcattggtcaacggcatttttggcccgcccctggcctctgattggtgagcggcagtgctgccagctccaatcagctgaggggcagagcgcgcccttggcaaccggctcggaatcgcccagctgtcccctcagacggcagcccgtggccgtccccttcgcygtgggatgcggggatttggggcggctgaaggagtcggggcccccaccgctgtagcgctgctgcccccattagagcctggaaccccgagcctccagctctgctcgcggtgccccccaaggctgaggtggtctgtgggtgtagggacagtgggggagatgtggtggcgatgtgggagctgaggggctttgggggctattgggggatgtgggaggatatggggctgtagggtgctgtgtggggatctcgagggatatggggatatcggtgggttttgggaatagagggggatggagggatgtg

SEQ ID NO: 47732 - DNA, 600 bp, Chicken  19866894292121_1
agtggacaaggaataattgtattaattacatctattttcagcaataaaatacagtccctgcattagaagatagccctataatacattgatattaaatactactggaagttttctaatgcactttttattgtttgatataatcctagtcctgggcaaagttgaacagctcatctgctgtcagggtagagagtgtccttccacagccagtaggtctttgaagggttactgatgcaccatctgctaacttggcccttagaatgtgaataattcatggaaggatcccaaatgttgaataacagrttcaaatttgcattgaggataaacgtatttatatagctttaatgcaattacttatattatttcctaatatctgggcagctctttcagagatttttgtatgtaaagccttctattctggtaagttatgaagcacattacagggctttggcaaacaattccattttatacagtgctattacagaagagctgcccaagcaaatcaagttatcagtctgcacatcagagccttaatcatctgagttttgcttttgcatgcagcagcaaataggatagtcattcatattataataacctctaatt

SEQ ID NO: 47733 - DNA, 600 bp, Chicken  19866894292122_1
gttcttagaaaacatccagagtaatatatgaaagcatgatttaccagggacactggcaaaaaggctttaggcaaataagggtgaatagctcagaggccacgcacagcagctctgaaatttccagttctcctcactctggatactgaaatttcagatgattctagttggatagtcatcatcacctaggtattgctagtgagttctttaaagcctgatagtaaaattcaagcagaggtcgtgtcctggctcccaagcaagcagcatcagattcagggagccacttgcttcatttccacagcraaactgggacaggaaagaggcagacagcagtgatggcagaagccatccaccctgcagaaagcccagrcaagagtgaagctaaagggcatctggcaacaartacagcatgctgcagagaggctcctgctcaaagcctgtgcatgctatccagctctgccattgggatctgtggcttccctcctgttttctgatcctgaggaaaaatgtttgcctccttcaaccattttcctcttattctagctcagttatgagcaggaaccatttgttctatttaaagctcttctaggaaaaggtgtagtt

SEQ ID NO: 47734 - DNA, 600 bp, Chicken  19866894292122_2
taggcaaataagggtgaatagctcagaggccacgcacagcagctctgaaatttccagttctcctcactctggatactgaaatttcagatgattctagttggatagtcatcatcacctaggtattgctagtgagttctttaaagcctgatagtaaaattcaagcagaggtcgtgtcctggctcccaagcaagcagcatcagattcagggagccacttgcttcatttccacagcraaactgggacaggaaagaggcagacagcagtgatggcagaagccatccaccctgcagaaagcccagrcaagagtgaagctaaagggcatctggcaacaartacagcatgctgcagagaggctcctgctcaaagcctgtgcatgctatccagctctgccattgggatctgtggcttccctcctgttttctgatcctgaggaaaaatgtttgcctccttcaaccattttcctcttattctagctcagttatgagcaggaaccatttgttctatttaaagctcttctaggaaaaggtgtagttagatccaacttacacagctttccagtccactgatggatcggggaaccaaagtgtgttcctattttac

SEQ ID NO: 47735 - DNA, 600 bp, Chicken  19866894292122_3
gcacagcagctctgaaatttccagttctcctcactctggatactgaaatttcagatgattctagttggatagtcatcatcacctaggtattgctagtgagttctttaaagcctgatagtaaaattcaagcagaggtcgtgtcctggctcccaagcaagcagcatcagattcagggagccacttgcttcatttccacagcraaactgggacaggaaagaggcagacagcagtgatggcagaagccatccaccctgcagaaagcccagrcaagagtgaagctaaagggcatctggcaacaartacagcatgctgcagagaggctcctgctcaaagcctgtgcatgctatccagctctgccattgggatctgtggcttccctcctgttttctgatcctgaggaaaaatgtttgcctccttcaaccattttcctcttattctagctcagttatgagcaggaaccatttgttctatttaaagctcttctaggaaaaggtgtagttagatccaacttacacagctttccagtccactgatggatcggggaaccaaagtgtgttcctattttacaaaggaaaacactcatttcccctccattcaaag

SEQ ID NO: 47736 - DNA, 600 bp, Chicken  19866894292123_1
catagtagaatacatagtctaagatgaagatggtgctggaagcacctttcttactaagaaagagtgagggagttgggcttgttcagcctggagaagagaaggctccaatgagacctcaccacgtcccactggtacttgagaggagcttacaagccatagggggactgactttttacaccatctaacagtaataggacaaaggggaatagctttaaattcaaagaggggaaatataggttagatttataggaagaaactcttattcagagagcggtaaggcactggaacaggctgcccaargaagctgtggataccccccgttcctggagtccaaggccaggttggatggggccctgcgcagcctcatctgatgagtggcagctctgacaacagcaggggggttcgaactaaacaatctttaaggtcccttccaacccacgccattctatgattcaatccatctcatgctggctagaacaagctttcagctccagattctcccttttgcctacagggccacagcatcacttcagtcacaggagcaatctgaactccaaaaggaggtgcagggaacgaggctgccycttcaccaaagaagct

SEQ ID NO: 47737 - DNA, 600 bp, Chicken  19866894292123_2
gaacaggctgcccaargaagctgtggataccccccgttcctggagtccaaggccaggttggatggggccctgcgcagcctcatctgatgagtggcagctctgacaacagcaggggggttcgaactaaacaatctttaaggtcccttccaacccacgccattctatgattcaatccatctcatgctggctagaacaagctttcagctccagattctcccttttgcctacagggccacagcatcacttcagtcacaggagcaatctgaactccaaaaggaggtgcagggaacgaggctgccycttcaccaaagaagcttcagtggtctggttcacagcacagcctcacaaccctctgcatcaacacagcaaggagaaacaactgctcacaagggataaaacagatctgcgaggccaagaagaggagcatacagaaaaagcatttatcatattctaagcatattctacagccattgccacctgagaaggtgaatacaaactccaaaccgccccagctcagcagcaaytcccattcactctacagygcgcagcagacaggatgcagccaactcccatgcccagcatctccctgcctgcatcatt

SEQ ID NO: 47738 - DNA, 600 bp, Chicken  19866894292123_3
ctacagggccacagcatcacttcagtcacaggagcaatctgaactccaaaaggaggtgcagggaacgaggctgccycttcaccaaagaagcttcagtggtctggttcacagcacagcctcacaaccctctgcatcaacacagcaaggagaaacaactgctcacaagggataaaacagatctgcgaggccaagaagaggagcatacagaaaaagcatttatcatattctaagcatattctacagccattgccacctgagaaggtgaatacaaactccaaaccgccccagctcagcagcaaytcccattcactctacagygcgcagcagacaggatgcagccaactcccatgcccagcatctccctgcctgcatcatttccaccccaaaccactagaaggcacaaaaccccaaagaatagtaacctcagaccggctgtctcaacccaggaccacacaagggcttgggtggctgtgctgaacagagcagctcatctcttgccctggagcagtgagtaactctaatccctttaacctcagtgtaatcaactacacaaagaatcatttgtattacatttgcattgcccaaatatccctgctctcc

SEQ ID NO: 47739 - DNA, 596 bp, Chicken  19866894292123_4
acttcagtcacaggagcaatctgaactccaaaaggaggtgcagggaacgaggctgccycttcaccaaagaagcttcagtggtctggttcacagcacagcctcacaaccctctgcatcaacacagcaaggagaaacaactgctcacaagggataaaacagatctgcgaggccaagaagaggagcatacagaaaaagcatttatcatattctaagcatattctacagccattgccacctgagaaggtgaatacaaactccaaaccgccccagctcagcagcaaytcccattcactctacagygcgcagcagacaggatgcagccaactcccatgcccagcatctccctgcctgcatcatttccaccccaaaccactagaaggcacaaaaccccaaagaatagtaacctcagaccggctgtctcaacccaggaccacacaagggcttgggtggctgtgctgaacagagcagctcatctcttgccctggagcagtgagtaactctaatccctttaacctcagtgtaatcaactacacaaagaatcatttgtattacatttgcattgcccaaatatccctgctctccacccttcccttgtg

SEQ ID NO: 47740 - DNA, 600 bp, Chicken  19866894292125_1
aacacttgcttaatgcagcacccttaggaaaataatgtaggatctgtaacacttgagcagtgcagctaaagaccatgaacagcatgaaggaactcctgaaccctcctgacggatgtttgcgctccacctgctctctgctccctcctagatttcctccagcccagtcacaagagcagagccttgccagaccttctgctaaacacttggcatgcttgctccagccacaacacatgctgacactgcaaagtgttctcaccactcggttcatttcctttttttcttatctaatttattcacatyctggaaattctgccttttagagcagtagacgtaatgccactggatattaagagaaggaatgttaatagctatttttatactgacattaaatagacattataagtttgaatcttattaaacaacttctttacaagtttgctgtttacatatttacattcctcgggcaaatgaaagaatgcaaatatttacactccattggagcaggagatctaaaaattaacagaaaatgagtttccagtgttgcactgaagactgtgacctcttgctctcctagaataaatgtgcccattttctctcttt

SEQ ID NO: 47741 - DNA, 600 bp, Chicken  19866894292133_1
tcttgattaaaaaaatcacttgggaatgcagagttcaacacatctaaatattcagagacaagttcgtgtttgctcaaggccaacccagggccttattcctcctctgtccactgcccgccggccacgtggccgttaatgcggttggagccattgctcgaagtgctgaaaactccttttgtgctgttggatgtcacatcctcctcctcagagctgctttctacatcgctgcggtcatctttggatacctgaacaatccaagtgagatttggtagtggaaaggggagaagttggtaaattcasacaaagttasagcagaaggttgtattgaagggattaaccagccccagtgacagctgccttctgtactccacccttattaacttagagcttaaagagccagtcatcacatgcagaacacaagacagatctagaaaaagacagctgggaattaggagctctgttttccaagcactgtacactgtgaggcaccacacttcatgctcaccgcatcagaggatgccagagatcttggcttgcttttgtcttccaagagttgcattctagactggttaaaggctgcttttccagataaatttgttt

SEQ ID NO: 47742 - DNA, 600 bp, Chicken  19866894292133_2
aaaaatcacttgggaatgcagagttcaacacatctaaatattcagagacaagttcgtgtttgctcaaggccaacccagggccttattcctcctctgtccactgcccgccggccacgtggccgttaatgcggttggagccattgctcgaagtgctgaaaactccttttgtgctgttggatgtcacatcctcctcctcagagctgctttctacatcgctgcggtcatctttggatacctgaacaatccaagtgagatttggtagtggaaaggggagaagttggtaaattcasacaaagttasagcagaaggttgtattgaagggattaaccagccccagtgacagctgccttctgtactccacccttattaacttagagcttaaagagccagtcatcacatgcagaacacaagacagatctagaaaaagacagctgggaattaggagctctgttttccaagcactgtacactgtgaggcaccacacttcatgctcaccgcatcagaggatgccagagatcttggcttgcttttgtcttccaagagttgcattctagactggttaaaggctgcttttccagataaatttgttttcaataacaa

SEQ ID NO: 47743 - DNA, 599 bp, Chicken  19866894292136_1
  misc_feature (1)..(75): n is any nucleotide
nnnnnnnnnnnnnnnnnnnnnnnnnnnnnnnnnnnnnnnnnnnnnnnnnnnnnnnnnnnnnnnnnnnnnnnnnnnatcaagattatgaatttgttatttaataacttgtactgctgtaggggtatttaatttttcacttcatttaatggtccctagatactctgtgtggacatttcctgtctttgttttatgtccaaatgtggaacctgcttgctttcctgcatggttgaatttcattctctcaggattgttcatctacttgtaaatatctaagaagttgattgagatatttctagagarattgaatacatattgtccttagagaacaactcttaagtaatcatgagaacaaagaaatgaccagctaccccttccttcacatttctctaagaaattctgaaacctacacccacacatacccgctgctgagactaatgaaagctatgagtctgtgctgaaacctggaaaccacatccagtgataaagctatgcaagggatttctctgccttgtcttctgaagccacaggcttttgatactgaccacagatcttggaaaaccaaggcatggttaactaaatttcttttaaattattttcaa

SEQ ID NO: 47744 - DNA, 600 bp, Chicken  19866894292146_1
ataaaataaaataaaataaaataaaataaacctctcttccctcgttgagatcacacatgttagtgatagtagaacataaaaaattgcagtgtaactgtgatggattttctgcactccagatcagtcaggctttaacaggagtcttctcaaccctccctttcccccacgtttatggaaacacgaagaggacaggcatgccttgcaatgagcccagagggtggggcactaggagccagcagggaagcactccccctgtgttatctaccagcactgccaccaccacgggagcccccatcctcrcagaacaatgagcttcagtgaggatttcatttgtcttccgtattgtgttcttaaaataaacccagcgccatgttttaaaactgaatccgatcgctgtgtgcagggaatgctgtaacccgtggcagtgacgggtgtgcgtgccaacgtttcctaaatgcagtcgtctgctgcaactcaccagtcagtccccttttccctcctaacaaagagggaagactggatcagaagggatcatctccatagaaattgtgttggcacaacctagactgggcataaataagggtacagaccaagaaaacg

SEQ ID NO: 47745 - DNA, 600 bp, Chicken  19866894292146_10
agggccttgggtaccttgatctccctgtctttcatctagttaactcctgctagctagcacaaagatgagcccttccacataatccatagctgccctktaagcttttgcaaggagaaggtgaagcagatgcccagttttgatctcctcacccactttagctttcctcctacaaggaaagcttctccatggtctcccagcagctcactcctggaatgcccacacccactccaaaccaaggagaagatctcatggctggaggttttgggaatgagtgagtyggggatcttgattttcccctckcttcaagcatttgagcctatcacggtcaccatgccatagactcagcaacctcctggatgcacagacaattattaagtgcatggggcagactgttcttcaagaaatgacctgaatgtcaagkattttgaactgaaaatgcttctagtatgctggtttggtaatgtagatagatgtgaactaggaaaggcaatttgtctgcagtaaaatctgaaatcttacttgtaaatgaccatcagttacacaagtgcaacttcatgacctcctctaaacctgctgttgatgtgatccagcaaatgctac

SEQ ID NO: 47746 - DNA, 600 bp, Chicken  19866894292146_11
agcagatgcccagttttgatctcctcacccactttagctttcctcctacaaggaaagcttctccatggtctcccagcagctcactcctggaatgcccacacccactccaaaccaaggagaagatctcatggctggaggttttgggaatgagtgagtyggggatcttgattttcccctckcttcaagcatttgagcctatcacggtcaccatgccatagactcagcaacctcctggatgcacagacaattattaagtgcatggggcagactgttcttcaagaaatgacctgaatgtcaagkattttgaactgaaaatgcttctagtatgctggtttggtaatgtagatagatgtgaactaggaaaggcaatttgtctgcagtaaaatctgaaatcttacttgtaaatgaccatcagttacacaagtgcaacttcatgacctcctctaaacctgctgttgatgtgatccagcaaatgctactctgattgtataaaaaaagcatgaagttttaagtgctgttgcagagatgaagcatttacttggtcattaccgtgtagctaacactgcrtcatgctctagctaaactctacagtgtcttgaa

SEQ ID NO: 47747 - DNA, 594 bp, Chicken  19866894292146_12
actgttcttcaagaaatgacctgaatgtcaagkattttgaactgaaaatgcttctagtatgctggtttggtaatgtagatagatgtgaactaggaaaggcaatttgtctgcagtaaaatctgaaatcttacttgtaaatgaccatcagttacacaagtgcaacttcatgacctcctctaaacctgctgttgatgtgatccagcaaatgctactctgattgtataaaaaaagcatgaagttttaagtgctgttgcagagatgaagcatttacttggtcattaccgtgtagctaacactgcrtcatgctctagctaaactctacagtgtcttgaagctgaatctgtgtagattatgaaagtaagtgacctcaggtgaaaacatattttttaacacactcctccttcaaaatcagaaaattcttgcacaattttgtgatccaaataaactaccatcttactgccatctgcaccagttctaagccaaaaggatacaattcatctctgagacagattatgtaatttggtggttcagtcaacttcaagagtttcaagacacaagaaccagcaagaataaggagaggactagagaaaaaca

SEQ ID NO: 47748 - DNA, 600 bp, Chicken  19866894292146_2
gtattgtgttcttaaaataaacccagcgccatgttttaaaactgaatccgatcgctgtgtgcagggaatgctgtaacccgtggcagtgacgggtgtgcgtgccaacgtttcctaaatgcagtcgtctgctgcaactcaccagtcagtccccttttccctcctaacaaagagggaagactggatcagaagggatcatctccatagaaattgtgttggcacaacctagactgggcataaataagggtacagaccaagaaaacgagagcaattaactccttcatgctctcagcccacaaagcrcagtgctccacgttcagcctcagtaattcaatatgtgaaggaccctggttcctcatggtggtctccatggcaaaaaaaawaaawaaawaaayaaaatwaaaaactgctctgccttggtcagagctgattcccatcttcctaaggattttaaagctagaaagtactatcttccttatagtaaaatttccaggtattgggggaactgaggatttccaagcacagatggccagatctgcagaatttggatcctgtcagggtgcttgaagcctgggaaagttgatttggccctttgcagtgaca

SEQ ID NO: 47749 - DNA, 600 bp, Chicken  19866894292146_3
tggcagtgacgggtgtgcgtgccaacgtttcctaaatgcagtcgtctgctgcaactcaccagtcagtccccttttccctcctaacaaagagggaagactggatcagaagggatcatctccatagaaattgtgttggcacaacctagactgggcataaataagggtacagaccaagaaaacgagagcaattaactccttcatgctctcagcccacaaagcrcagtgctccacgttcagcctcagtaattcaatatgtgaaggaccctggttcctcatggtggtctccatggcaaaaaaaawaaawaaawaaayaaaatwaaaaactgctctgccttggtcagagctgattcccatcttcctaaggattttaaagctagaaagtactatcttccttatagtaaaatttccaggtattgggggaactgaggatttccaagcacagatggccagatctgcagaatttggatcctgtcagggtgcttgaagcctgggaaagttgatttggccctttgcagtgacagggactccttgccaagttccagtctagctctgaactcctgcagtattctgagatgccagcagccaggatttcttacttag

SEQ ID NO: 47750 - DNA, 600 bp, Chicken  19866894292146_4
agtgacgggtgtgcgtgccaacgtttcctaaatgcagtcgtctgctgcaactcaccagtcagtccccttttccctcctaacaaagagggaagactggatcagaagggatcatctccatagaaattgtgttggcacaacctagactgggcataaataagggtacagaccaagaaaacgagagcaattaactccttcatgctctcagcccacaaagcrcagtgctccacgttcagcctcagtaattcaatatgtgaaggaccctggttcctcatggtggtctccatggcaaaaaaaawaaawaaawaaayaaaatwaaaaactgctctgccttggtcagagctgattcccatcttcctaaggattttaaagctagaaagtactatcttccttatagtaaaatttccaggtattgggggaactgaggatttccaagcacagatggccagatctgcagaatttggatcctgtcagggtgcttgaagcctgggaaagttgatttggccctttgcagtgacagggactccttgccaagttccagtctagctctgaactcctgcagtattctgagatgccagcagccaggatttcttacttagagct

SEQ ID NO: 47751 - DNA, 600 bp, Chicken  19866894292146_5
acgggtgtgcgtgccaacgtttcctaaatgcagtcgtctgctgcaactcaccagtcagtccccttttccctcctaacaaagagggaagactggatcagaagggatcatctccatagaaattgtgttggcacaacctagactgggcataaataagggtacagaccaagaaaacgagagcaattaactccttcatgctctcagcccacaaagcrcagtgctccacgttcagcctcagtaattcaatatgtgaaggaccctggttcctcatggtggtctccatggcaaaaaaaawaaawaaawaaayaaaatwaaaaactgctctgccttggtcagagctgattcccatcttcctaaggattttaaagctagaaagtactatcttccttatagtaaaatttccaggtattgggggaactgaggatttccaagcacagatggccagatctgcagaatttggatcctgtcagggtgcttgaagcctgggaaagttgatttggccctttgcagtgacagggactccttgccaagttccagtctagctctgaactcctgcagtattctgagatgccagcagccaggatttcttacttagagctctgt

SEQ ID NO: 47752 - DNA, 600 bp, Chicken  19866894292146_6
gtgtgcgtgccaacgtttcctaaatgcagtcgtctgctgcaactcaccagtcagtccccttttccctcctaacaaagagggaagactggatcagaagggatcatctccatagaaattgtgttggcacaacctagactgggcataaataagggtacagaccaagaaaacgagagcaattaactccttcatgctctcagcccacaaagcrcagtgctccacgttcagcctcagtaattcaatatgtgaaggaccctggttcctcatggtggtctccatggcaaaaaaaawaaawaaawaaayaaaatwaaaaactgctctgccttggtcagagctgattcccatcttcctaaggattttaaagctagaaagtactatcttccttatagtaaaatttccaggtattgggggaactgaggatttccaagcacagatggccagatctgcagaatttggatcctgtcagggtgcttgaagcctgggaaagttgatttggccctttgcagtgacagggactccttgccaagttccagtctagctctgaactcctgcagtattctgagatgccagcagccaggatttcttacttagagctctgtgtgt

SEQ ID NO: 47753 - DNA, 600 bp, Chicken  19866894292146_7
gtgccaacgtttcctaaatgcagtcgtctgctgcaactcaccagtcagtccccttttccctcctaacaaagagggaagactggatcagaagggatcatctccatagaaattgtgttggcacaacctagactgggcataaataagggtacagaccaagaaaacgagagcaattaactccttcatgctctcagcccacaaagcrcagtgctccacgttcagcctcagtaattcaatatgtgaaggaccctggttcctcatggtggtctccatggcaaaaaaaawaaawaaawaaayaaaatwaaaaactgctctgccttggtcagagctgattcccatcttcctaaggattttaaagctagaaagtactatcttccttatagtaaaatttccaggtattgggggaactgaggatttccaagcacagatggccagatctgcagaatttggatcctgtcagggtgcttgaagcctgggaaagttgatttggccctttgcagtgacagggactccttgccaagttccagtctagctctgaactcctgcagtattctgagatgccagcagccaggatttcttacttagagctctgtgtgttttcaa

SEQ ID NO: 47754 - DNA, 600 bp, Chicken  19866894292146_8
tagctctgaactcctgcagtattctgagatgccagcagccaggatttcttacttagagctctgtgtgttttcaactgtagggtaaaatggcaaacagtgtcttgtatatcatagaacaaggatgtttgtgaggaaaaaaatgatgggtgagcaagcaagtacccatgcagctcttgtccttgggttcattacttgggtacccaagggccttgggtaccttgatctccctgtctttcatctagttaactcctgctagctagcacaaagatgagcccttccacataatccatagctgccctktaagcttttgcaaggagaaggtgaagcagatgcccagttttgatctcctcacccactttagctttcctcctacaaggaaagcttctccatggtctcccagcagctcactcctggaatgcccacacccactccaaaccaaggagaagatctcatggctggaggttttgggaatgagtgagtyggggatcttgattttcccctckcttcaagcatttgagcctatcacggtcaccatgccatagactcagcaacctcctggatgcacagacaattattaagtgcatggggcagactgttctt

SEQ ID NO: 47755 - DNA, 600 bp, Chicken  19866894292146_9
gggttcattacttgggtacccaagggccttgggtaccttgatctccctgtctttcatctagttaactcctgctagctagcacaaagatgagcccttccacataatccatagctgccctktaagcttttgcaaggagaaggtgaagcagatgcccagttttgatctcctcacccactttagctttcctcctacaaggaaagcttctccatggtctcccagcagctcactcctggaatgcccacacccactccaaaccaaggagaagatctcatggctggaggttttgggaatgagtgagtyggggatcttgattttcccctckcttcaagcatttgagcctatcacggtcaccatgccatagactcagcaacctcctggatgcacagacaattattaagtgcatggggcagactgttcttcaagaaatgacctgaatgtcaagkattttgaactgaaaatgcttctagtatgctggtttggtaatgtagatagatgtgaactaggaaaggcaatttgtctgcagtaaaatctgaaatcttacttgtaaatgaccatcagttacacaagtgcaacttcatgacctcctctaaacctgctgtt

SEQ ID NO: 47756 - DNA, 599 bp, Chicken  19866894292152_1
  misc_feature (1)..(176): n is any nucleotide
nnnnnnnnnnnnnnnnnnnnnnnnnnnnnnnnnnnnnnnnnnnnnnnnnnnnnnnnnnnnnnnnnnnnnnnnnnnnnnnnnnnnnnnnnnnnnnnnnnnnnnnnnnnnnnnnnnnnnnnnnnnnnnnnnnnnnnnnnnnnnnnnnnnnnnnnnnnnnnnnnnnnnnnnnnnnnnnncatccactgatggtacggaaaccagcttcacagaggcactgcagaccagcaaacactgcaggtgacaaatccacagtgctgggggcaccaggagcatcacttcacacactgctgacactgcacrtgaatatttttaaatgcacaacaagtggtggacagccccacaatgggcagctaagaggaatgaatgaatgaagggcacccggccttcagcgttcatttccgtgcattttgttgaaatggagcatgttgacatttttgagcagcgaaattgttgtaaaaattgctgataacgttaaactgagaaatgcaatagcgtttgccagccaatgcgttatttctgctttaaaaaaaaaaaagtcaaaattaagcccatttagccgtcagctgcaaagctcccattatgcctcaatatttctccac

SEQ ID NO: 47757 - DNA, 599 bp, Chicken  19866894292159_1
  misc_feature (1)..(86): n is any nucleotide
nnnnnnnnnnnnnnnnnnnnnnnnnnnnnnnnnnnnnnnnnnnnnnnnnnnnnnnnnnnnnnnnnnnnnnnnnnnnnnnnnnnnnnaatgtaaatggcttttttgcctggctgagaatttcaggatgcattagtgttcagagagaagccccagtaaaaaataacagcaatcagcgttccctaactgaccattaaagggacattacagaacatataaataaacagtgcctctgcacagacctaccccttgtcattgtgttatctgatatatgagtgtatgctatattagagaaaacaagcragagagagagagagagagattcgcgctaaccaaatagaaaagcacgccgagcacactgtgcccactgacctgctgtgtggatctggcaatccaggcacgaaggcaaatcctccttcctgacccttcctcctgttccgatgtcccacacggagatccccttgggctgctgtcgtcccgtgctcttcccgtaacctggagcaggagattgcttccacccagtcccgggaagagaggactgacaagcacaggggttaaaatgactttccacttctggaaggctgtttttgccaagtcctctg

SEQ ID NO: 47758 - DNA, 600 bp, Chicken  19866894292159_2
cccttgggctgctgtcgtcccgtgctcttcccgtaacctggagcaggagattgcttccacccagtcccgggaagagaggactgacaagcacaggggttaaaatgactttccacttctggaaggctgtttttgccaagtcctctgtcctgtcagttacacggggaacaaacgcaagcagcagcggcagcggcagctgctgatcttgctcttttctagtctataattataacgccggttgccgtcggaaggacccctttcatttggatgcagagtcttgccatggcttggctggcacctccygttctcttccttttacttcctgtcccaaagtgggacagacaaggagcatttttcgccgtgacctttaaagatttgcctcgttgtacctagccctgaggagacacgttagggaatggcagggactgcacttaaacaggaagactggacaacctgggcaaatttgggacaaaccgggggatgtgccacggctgctcctggatcaccccttggggcgcattgctgttctcttgctgatctgctgcccggaattgggaaatcagaactgcagggcacgctgcagaaatcacccattcctcagaa

SEQ ID NO: 47759 - DNA, 600 bp, Chicken  19866894292164_1
cagcttttagaatcgttgaatagtttgggttgaagaggcttcagaaggtcacctgggtcaacctctccttatcgaagcacggctgactttgaaagtgggccaaattttgtgtatttccaggaagtttgacagcctctacggtttcctgttccagttttgtagcatcttcagtgtgtgtttttttctgatgcacagtcagattcactttctgtagctttcctaccacctcttctattttttcttttgagaagagtctggctctctcttttctataattatccaccaggtattcgtagtctktagaccctgcaaccttaatgttcaggttgaacaatcccagcttagcctcctttgggctrtgccacatgttagtcttttaacagttttgttggttctctgctatactcagatttgttaatatctgttcttgtactgggaagccccagaccgatcatgaactccagatctgccttacaagtgttgaatacaggagaaaaatcacttcctttaacctcttgacaatgcatttcttatgcagcctggtatggggttggccttcacgagagccaggaggcatgctgctgacacttattgtgtcca

SEQ ID NO: 47760 - DNA, 600 bp, Chicken  19866894292164_2
aacctctccttatcgaagcacggctgactttgaaagtgggccaaattttgtgtatttccaggaagtttgacagcctctacggtttcctgttccagttttgtagcatcttcagtgtgtgtttttttctgatgcacagtcagattcactttctgtagctttcctaccacctcttctattttttcttttgagaagagtctggctctctcttttctataattatccaccaggtattcgtagtctktagaccctgcaaccttaatgttcaggttgaacaatcccagcttagcctcctttgggctrtgccacatgttagtcttttaacagttttgttggttctctgctatactcagatttgttaatatctgttcttgtactgggaagccccagaccgatcatgaactccagatctgccttacaagtgttgaatacaggagaaaaatcacttcctttaacctcttgacaatgcatttcttatgcagcctggtatggggttggccttcacgagagccaggaggcatgctgctgacacttattgtgtccaccattattcccagatcccttggtttattttttcccagatgcagatccgatgagcttaat

SEQ ID NO: 47761 - DNA, 600 bp, Chicken  19866894292164_3
actcagatttgttaatatctgttcttgtactgggaagccccagaccgatcatgaactccagatctgccttacaagtgttgaatacaggagaaaaatcacttcctttaacctcttgacaatgcatttcttatgcagcctggtatggggttggccttcacgagagccaggaggcatgctgctgacacttattgtgtccaccattattcccagatcccttggtttattttttcccagatgcagatccgatgagcttaatgaattttctgtcagcccatcactccaaccggtagcaatgcaacygaatgaactttcctcccatgttttaggctgtcctgctctcctcctccccccattattcagtttggtgttatccgccagtttgctgagggcacggtgtatcccatcaccaggtgagtaaaccataaaacactgttactttcactaccagctgtggaggttctccattcccagctgaccgccttctagacttcaagctgttgattgccagtcacagcagtacacacagctttccatccattttgttggatttccatccactccacatttttgttcttgttggaatttgtaagatagggtaaa

SEQ ID NO: 47762 - DNA, 599 bp, Chicken  19866894292165_1
  misc_feature (1)..(151): n is any nucleotide
nnnnnnnnnnnnnnnnnnnnnnnnnnnnnnnnnnnnnnnnnnnnnnnnnnnnnnnnnnnnnnnnnnnnnnnnnnnnnnnnnnnnnnnnnnnnnnnnnnnnnnnnnnnnnnnnnnnnnnnnnnnnnnnnnnnnnnnnnnnnnnnnnnnnnnntgatcagaagccatgctgggtgccatacgcatcaatgagaaagagcatacatttatttttcttctgcaaaagaaagtggccctgagaatctgaacccacatcagttgtgcaatcacttaaaaatgcaatctaaactcattagaaagggyaaaaaaaataaacactgcaccatgggccagcacagtggagctttgtttccaccctctacctctgtccaacctcctgaaggatctggttctttgcaacctcccttgcagcccacctgcctgtgtggcccctccgtgtaatatattttatagatgtcatgaaagcacaggaaaacgctccttccaggctgctggaagtgacaaggtgaggtcacttgcttcactgcaaagctgctccctgccctcactccgtaactcctttctgcacctgcagccctggagatcagctctgtccctctgta

SEQ ID NO: 47763 - DNA, 599 bp, Chicken  19866894292166_1
  misc_feature (1)..(176): n is any nucleotide
nnnnnnnnnnnnnnnnnnnnnnnnnnnnnnnnnnnnnnnnnnnnnnnnnnnnnnnnnnnnnnnnnnnnnnnnnnnnnnnnnnnnnnnnnnnnnnnnnnnnnnnnnnnnnnnnnnnnnnnnnnnnnnnnnnnnnnnnnnnnnnnnnnnnnnnnnnnnnnnnnnnnnnnnnnnnnnnnaaaaggctattgttgctttttaatctcctttcatgtagggagctactgttctctctactgcactgataacacataaattgcttatcctgcacagcagccttcacctgaccactggctgcacttycctctttgtcaagcgcctgataatctcttcccacttctttttcagtcagtgttgtgtttagcttgagtgatttttgtggccccatagagaaatagaatttaaaaggtcctttctccttttttaattttctcaccctcttctgccatcctgtccatctgtgagatgaaaatccactgagagaaaaagaaaatgcagtcatggtgttagcatgtaacttcaattccaaatcatcctgtgagatttcacgtgtactgtgaaataattagaggttgcaaaaagagagagtagattctcagtag

SEQ ID NO: 47764 - DNA, 599 bp, Chicken  19866894292198_1
  misc_feature (1)..(135): n is any nucleotide
nnnnnnnnnnnnnnnnnnnnnnnnnnnnnnnnnnnnnnnnnnnnnnnnnnnnnnnnnnnnnnnnnnnnnnnnnnnnnnnnnnnnnnnnnnnnnnnnnnnnnnnnnnnnnnnnnnnnnnnnnnnnnnnnnnnnnnntggagatggggaggtggagaagtgagatgaattctcagaccttgactaaagaagctgtgtttctggatgcacaggtgacaaccatttctgtccttttaccggctgcctccatctcctctctcttgctctccaccagctttatgaagaaaggggtgtccagcatcrcagccatgtttcacaaaggcagcagttgcaatgatcagatgctgactctgcttaaggctaaattgtgcatatttatcctcagatgaaaagcatcattagattatgccccatgttcgtatgaagttgatagtaacatgtgcaatgagcctgtcctctcttttatgacattacagaatcaagtattttactcrtaaatagggtaagatatgagacagagtgcatacttccttgagctgggagacatgcaccataaatcaggatatgtgtgcgtaattacaagatatcagaacaagtcccag

SEQ ID NO: 47765 - DNA, 600 bp, Chicken  19866894292198_2
gtgtttctggatgcacaggtgacaaccatttctgtccttttaccggctgcctccatctcctctctcttgctctccaccagctttatgaagaaaggggtgtccagcatcrcagccatgtttcacaaaggcagcagttgcaatgatcagatgctgactctgcttaaggctaaattgtgcatatttatcctcagatgaaaagcatcattagattatgccccatgttcgtatgaagttgatagtaacatgtgcaatgagcctgtcctctcttttatgacattacagaatcaagtattttactcrtaaatagggtaagatatgagacagagtgcatacttccttgagctgggagacatgcaccataaatcaggatatgtgtgcgtaattacaagatatcagaacaagtcccaggggtatttttagcactgtaaaatgttagatagatctgctttcctgcagaacattatccttytcgtttctccactcttaggtaccagacagttttgttggtcagattacttgacatggaagcagtgtgataaattacaactgcaggagtatactgtgtttaattgcacaatcagagtttaaaacttctgatta

SEQ ID NO: 47766 - DNA, 556 bp, Chicken  19866894292198_3
aattgtgcatatttatcctcagatgaaaagcatcattagattatgccccatgttcgtatgaagttgatagtaacatgtgcaatgagcctgtcctctcttttatgacattacagaatcaagtattttactcrtaaatagggtaagatatgagacagagtgcatacttccttgagctgggagacatgcaccataaatcaggatatgtgtgcgtaattacaagatatcagaacaagtcccaggggtatttttagcactgtaaaatgttagatagatctgctttcctgcagaacattatccttytcgtttctccactcttaggtaccagacagttttgttggtcagattacttgacatggaagcagtgtgataaattacaactgcaggagtatactgtgtttaattgcacaatcagagtttaaaacttctgattaaattgtgcaaagcctctgaactaattgtcagaaaaatgtcttcaggggctgagtactttcctagcaaacgttttggatgtgaaatcaaaggcttgttttcttctactggtgtggaatattttggg

SEQ ID NO: 47767 - DNA, 600 bp, Chicken  19866894292199_1
tgtctggaaacagagtggctattccatagcctttatccaaaagctccttttgaaagctgaaacactggaccacagagatcggccagaaaacaccagtgggaatgtaggaagtcagtccttgcctagtgtctgtacatcctgccggctcctccctttctgctatgacaattcatatgctggaataatgactatcattgctcacgccatgtataggagcttcagccagtggattcatgaagacaaatctgtttgtcacacatccacacctccaccagccttcacgagaacttccctgaaacmatgttcagcagttacttggacttgcaggcagaacacagctttacccaaactgctctccttcctacagaatggaattatccatgggatccatgggatcatttgtttattatcagttttatttattatcatattatttattatcagtagagtyggcacttactgaacaatctactgttttcaataaagcctttttcaggacctcatgttktcagggcacagaactgccatctaaacggatgcttttacawgattgcagctgtctttgtgggagatggtacaaccttgcagagacagaattaa

SEQ ID NO: 47768 - DNA, 600 bp, Chicken  19866894292199_2
cctttctgctatgacaattcatatgctggaataatgactatcattgctcacgccatgtataggagcttcagccagtggattcatgaagacaaatctgtttgtcacacatccacacctccaccagccttcacgagaacttccctgaaacmatgttcagcagttacttggacttgcaggcagaacacagctttacccaaactgctctccttcctacagaatggaattatccatgggatccatgggatcatttgtttattatcagttttatttattatcatattatttattatcagtagagtyggcacttactgaacaatctactgttttcaataaagcctttttcaggacctcatgttktcagggcacagaactgccatctaaacggatgcttttacawgattgcagctgtctttgtgggagatggtacaaccttgcagagacagaattaagataatgagtgatgcaccttcagcagggagaggacagcttctggccgtgtgaaaagtatctctgcttttcctttaygttgtacatggttagcaaaaactatggctgttctccatggttagggctgtcagtcccttagataatattctttac

SEQ ID NO: 47769 - DNA, 600 bp, Chicken  19866894292199_3
tataggagcttcagccagtggattcatgaagacaaatctgtttgtcacacatccacacctccaccagccttcacgagaacttccctgaaacmatgttcagcagttacttggacttgcaggcagaacacagctttacccaaactgctctccttcctacagaatggaattatccatgggatccatgggatcatttgtttattatcagttttatttattatcatattatttattatcagtagagtyggcacttactgaacaatctactgttttcaataaagcctttttcaggacctcatgttktcagggcacagaactgccatctaaacggatgcttttacawgattgcagctgtctttgtgggagatggtacaaccttgcagagacagaattaagataatgagtgatgcaccttcagcagggagaggacagcttctggccgtgtgaaaagtatctctgcttttcctttaygttgtacatggttagcaaaaactatggctgttctccatggttagggctgtcagtcccttagataatattctttacaatcaaacgatgctttagatcagggggatcaggagcaaaatccaccatcctggtgag

SEQ ID NO: 47770 - DNA, 600 bp, Chicken  19866894292199_4
tttgtcacacatccacacctccaccagccttcacgagaacttccctgaaacmatgttcagcagttacttggacttgcaggcagaacacagctttacccaaactgctctccttcctacagaatggaattatccatgggatccatgggatcatttgtttattatcagttttatttattatcatattatttattatcagtagagtyggcacttactgaacaatctactgttttcaataaagcctttttcaggacctcatgttktcagggcacagaactgccatctaaacggatgcttttacawgattgcagctgtctttgtgggagatggtacaaccttgcagagacagaattaagataatgagtgatgcaccttcagcagggagaggacagcttctggccgtgtgaaaagtatctctgcttttcctttaygttgtacatggttagcaaaaactatggctgttctccatggttagggctgtcagtcccttagataatattctttacaatcaaacgatgctttagatcagggggatcaggagcaaaatccaccatcctggtgagttacacacctccccacatcttcacaatgacattcagaggg

SEQ ID NO: 47771 - DNA, 600 bp, Chicken  19866894292199_5
atccatgggatccatgggatcatttgtttattatcagttttatttattatcatattatttattatcagtagagtyggcacttactgaacaatctactgttttcaataaagcctttttcaggacctcatgttktcagggcacagaactgccatctaaacggatgcttttacawgattgcagctgtctttgtgggagatggtacaaccttgcagagacagaattaagataatgagtgatgcaccttcagcagggagaggacagcttctggccgtgtgaaaagtatctctgcttttcctttaygttgtacatggttagcaaaaactatggctgttctccatggttagggctgtcagtcccttagataatattctttacaatcaaacgatgctttagatcagggggatcaggagcaaaatccaccatcctggtgagttacacacctccccacatcttcacaatgacattcagagggcagcagcacataaaaatacatctttctgtacttaaacagattttcgtggaatatccacaagccattaacttctttagaactcttaccaaacaagaccaaccattaacagccatttataggcagaattt

SEQ ID NO: 47772 - DNA, 600 bp, Chicken  19866894292208_1
gaactgtgtgggctgaatctcatcaaattcactgatgttatgctgatcatgtttaatatctgttcagagatgtgaaaactttttagcaggagtgaaattgtactgactctgcccagtatccatgaaaggaagctaatctaagggcaacacagggaattctattcacttgttaaaaattcctgttttaaacaggttctacagttggctccaagcaaagacactttttccagattaataaccatctcctttctcagaatactgagcagatttacatagagccctaaagtcagctcataaagkgcttttaaactgatggaagagtatttcattatagaaaataaagttcacacttcgaacctatacaaaactgtactcagtagttctcttatacaagacctatggatgtgtttattatttactacctttccttccttaaaatgtatgttyaatgcagccatagcttagtctcagtttattcaatttcacaccaaaatggtgaaagagatgcctcttttcaaatgtctcctttaatgaaaataaatcaagaggacagaggaacaccatctaccaatttatttgcagctctgacttttcaaaaga

SEQ ID NO: 47773 - DNA, 494 bp, Chicken  19866894292208_2
cacagggaattctattcacttgttaaaaattcctgttttaaacaggttctacagttggctccaagcaaagacactttttccagattaataaccatctcctttctcagaatactgagcagatttacatagagccctaaagtcagctcataaagkgcttttaaactgatggaagagtatttcattatagaaaataaagttcacacttcgaacctatacaaaactgtactcagtagttctcttatacaagacctatggatgtgtttattatttactacctttccttccttaaaatgtatgttyaatgcagccatagcttagtctcagtttattcaatttcacaccaaaatggtgaaagagatgcctcttttcaaatgtctcctttaatgaaaataaatcaagaggacagaggaacaccatctaccaatttatttgcagctctgacttttcaaaagatgtgaaatccaaatgagtctgagacttccacacacagatcc

SEQ ID NO: 47774 - DNA, 600 bp, Chicken  19866894292224_1
ccctaaccactggttccatctttatctgctttgaggatctgaaatatatcacaacacgtgcttattgctggaaaatcttgtctgttctctgtctgagcagccctcagcatgccttcctttgtaccacctatatagatgcagtgaatacgttatgcttctcgtgacaatagccaggttataaagccattagctatggtacccagcagtatctctccacactcagtgtttcacacatgaagcgtttgcctaagaattgccccccaccccttatcaaaggggaggcttgccttgaatacacamgtccagaatcttccttttttctttctcaagattaggaaaatcatttttctttcagcatttgctggatagtctttatgcacttgtctcacacaaagagtgcagcaaactgaaagccttctccgcccacatcagagacacatttgcagagctgagatatttttagaatagtgcacacacagagttatattgtttgtgtcttggttaggaaaaaaaaaaaaaaagaaagaaacaggcaattttctatactaaaattatttgtgycttattgctgggcagcagagaaccagtcatcttgctgaa

SEQ ID NO: 47775 - DNA, 600 bp, Chicken  19866894292224_2
caccccttatcaaaggggaggcttgccttgaatacacamgtccagaatcttccttttttctttctcaagattaggaaaatcatttttctttcagcatttgctggatagtctttatgcacttgtctcacacaaagagtgcagcaaactgaaagccttctccgcccacatcagagacacatttgcagagctgagatatttttagaatagtgcacacacagagttatattgtttgtgtcttggttaggaaaaaaaaaaaaaaagaaagaaacaggcaattttctatactaaaattatttgtgycttattgctgggcagcagagaaccagtcatcttgctgaaaccatttaaaatcttttctgcgctctaaagatgacaaacaaaatgacctggtacatatcagagcagtcattaactgtccaacaaggcaaactgtttctgccaatgttaagattcaattcatctctaatggatacagacgtggttctcttggctctagaagacttgcccattccttatgctgttgctgartttggctctgaattgcactttcttaaaagtgttcctggaacttcatgctgctcatgaaaacatgctgaaaaa

SEQ ID NO: 47776 - DNA, 600 bp, Chicken  19866894292224_3
tttgtgtcttggttaggaaaaaaaaaaaaaaagaaagaaacaggcaattttctatactaaaattatttgtgycttattgctgggcagcagagaaccagtcatcttgctgaaaccatttaaaatcttttctgcgctctaaagatgacaaacaaaatgacctggtacatatcagagcagtcattaactgtccaacaaggcaaactgtttctgccaatgttaagattcaattcatctctaatggatacagacgtggttctcttggctctagaagacttgcccattccttatgctgttgctgartttggctctgaattgcactttcttaaaagtgttcctggaacttcatgctgctcatgaaaacatgctgaaaaaaagccatctgagtgtttatgttgcaaaataataagctcttcacaggctgcacttacaaacagcagatgctgtggccaggttagagacacaagcatagcccgggcgctgtgcaatgcagggagggacggcgggctgggatctcctgcacagctctgtcactcctgcaaacacaaatgatgctgcagggcggctgaaggcccatgggagaggaatgctgagcccatctca

SEQ ID NO: 47777 - DNA, 600 bp, Chicken  19866894292226_1
ccgccaaccggtcactactgcagccatcaccacgaagtaactgatattttacaggccgggaagtggagtcggaaagattagggcttgcccaaggccacagagccagcagtcaggcaggaaaggagctccagatttcctggctcccactctcctcctaaattcatcatccacactccagttccttctaaacagatttttttctgagattaaaaaagaaaaaaaagaaaaaagaaaaagcctttccaactggttgaactacgtcacgaggttcggtcccaaatctgtgtcatggaatcaggsagggctggaatgtgatttagcatggtttggagatgctgttttggagataccccatacgacagtacacggcgtgtgagtgccgtgtaaatacggcctcagtctcagcggtttgaggtgagctgagcggtccagatgggagagcagcagtgtgggtcagaacaagcccacgtgagcatggataacaccaaggaaaatttattattgaggattcagggcttgtctgcagcaaaaaaacctgtcacttcagcttgagttttgtccatgcacccatttccgtaggctacaggagaagcaatgttt

SEQ ID NO: 47778 - DNA, 600 bp, Chicken  19866894292226_2
ttagcatggtttggagatgctgttttggagataccccatacgacagtacacggcgtgtgagtgccgtgtaaatacggcctcagtctcagcggtttgaggtgagctgagcggtccagatgggagagcagcagtgtgggtcagaacaagcccacgtgagcatggataacaccaaggaaaatttattattgaggattcagggcttgtctgcagcaaaaaaacctgtcacttcagcttgagttttgtccatgcacccatttccgtaggctacaggagaagcaatgtttgattaaactgttctayaggtgacatttccataggtgacgtccccatttctgagtcattactatcttagcatgctggctgatcgccctcttgctgactaaaaagctgctcatacagaaatgaggcacttaagcaggagtaaatacataagcagggtatccaggtagcacagcrtttagctgagggccatgattgatgattcatctttgatttagctgatgtagctgaagacgttactgctgtttttgctccagatgtaaaaagggggatgtctgctcctcagccatggtgtccggtgtgttaatttaaactgaaatc

SEQ ID NO: 47779 - DNA, 600 bp, Chicken  19866894292226_3
gcatggataacaccaaggaaaatttattattgaggattcagggcttgtctgcagcaaaaaaacctgtcacttcagcttgagttttgtccatgcacccatttccgtaggctacaggagaagcaatgtttgattaaactgttctayaggtgacatttccataggtgacgtccccatttctgagtcattactatcttagcatgctggctgatcgccctcttgctgactaaaaagctgctcatacagaaatgaggcacttaagcaggagtaaatacataagcagggtatccaggtagcacagcrtttagctgagggccatgattgatgattcatctttgatttagctgatgtagctgaagacgttactgctgtttttgctccagatgtaaaaagggggatgtctgctcctcagccatggtgtccggtgtgttaatttaaactgaaatcatgttaggttaattaataacagtaactgtgaatgaagcagctgaaggcagagatctcttctgccctgtcagcaaagctgtcagggctcaggagtcagagattctaattaatgtgttccagcagtggtttctgtaaaacctattttccatctcgctg

SEQ ID NO: 47780 - DNA, 599 bp, Chicken  19866894292232_1
  misc_feature (1)..(19): n is any nucleotide
nnnnnnnnnnnnnnnnnnnatgaggcacccacagcttctctgggcagactgtgacagggcctcaccacgttcatagcgaagaatgtcttcctaatatctactttaaatctcttttagtttaaagctgtcactctttatcttatctccacactccctgataaagagtatccctctccagctttcctgtaggcccctttaatgtactggaaggctgcagtgaggtctccctgtagccttcccttctgcaggctgaacacccccagctctctgcctgtctccacagcagagctgctccaaccyctgagcatcctcatgaccctgttttgacccactccagcagctccacatccttgtgctgggggctgagagctgaacgcagtgccacaaatcagggctcaaatagcatagcagaggggacagtcccctccctcacctctctgggcacacgtaaggcagctatacaccacccatgctatatatacattgggcagagtgcccgtgcagcccagaagcactcagagcagcagagaattaccctgtcggcatcggtgaggcagctcagggaatcgaccagcgacgccacgtggatgtcacagaac

SEQ ID NO: 47781 - DNA, 461 bp, Chicken  19866894292232_2
tgagagctgaacgcagtgccacaaatcagggctcaaatagcatagcagaggggacagtcccctccctcacctctctgggcacacgtaaggcagctatacaccacccatgctatatatacattgggcagagtgcccgtgcagcccagaagcactcagagcagcagagaattaccctgtcggcatcggtgaggcagctcagggaatcgaccagcgacgccacgtggatgtcacagaacctgctcatgttcctcaggatgtggttatacactttgtcctcggcgaaacccatcctggctcagygcctgcagggacacggactgaaggtgagcagagctgaggagcagagctgctgtttgcctctcctcttagcaggctgggctgtcaacagcaggaagggcagtccttgggctggggaaagagcacacgggaaatctcacatgcaaaatatgcataaaatacgg

SEQ ID NO: 47782 - DNA, 509 bp, Chicken  19866894292233_1
gtcacattgggcctgatttgcaggcagtttagcatctgcagattccagcgggagtcctgagtgctcagctgttcccaaatcaggcctacagacgggagatttgggggttgatttgtttgcatcctcccggcctgaactgctttcctgtagggcaatgccgacatccagcggggagactcgtgtattactgcagtattttcacacgggatgagctgttgctgagtctcaatcaggaatcccggtgaacagcctgctgatagaaggtcctgtgctgtggtgggcggctcacgactgagaacmctgtgctgttctcctgactcctgcaataacgtaaaggagatsttaagttctccctcttagaaagaagaaaagggatttgctctgtgtgaaaatgcttgcaactctgtgtgtcgacagtcacactgacactcacttcccagaagggttttctttgctttgttcacttctaaacctgcgattccctgatcttttgcagtgtaataatgctt

SEQ ID NO: 47783 - DNA, 467 bp, Chicken  19866894292233_2
ttccagcgggagtcctgagtgctcagctgttcccaaatcaggcctacagacgggagatttgggggttgatttgtttgcatcctcccggcctgaactgctttcctgtagggcaatgccgacatccagcggggagactcgtgtattactgcagtattttcacacgggatgagctgttgctgagtctcaatcaggaatcccggtgaacagcctgctgatagaaggtcctgtgctgtggtgggcggctcacgactgagaacmctgtgctgttctcctgactcctgcaataacgtaaaggagatsttaagttctccctcttagaaagaagaaaagggatttgctctgtgtgaaaatgcttgcaactctgtgtgtcgacagtcacactgacactcacttcccagaagggttttctttgctttgttcacttctaaacctgcgattccctgatcttttgcagtgtaataatgctt

SEQ ID NO: 47784 - DNA, 599 bp, Chicken  19866894292237_1
  misc_feature (1)..(63): n is any nucleotide
nnnnnnnnnnnnnnnnnnnnnnnnnnnnnnnnnnnnnnnnnnnnnnnnnnnnnnnnnnnnnnnatgcatgactgatccaactcctctagaaggggaaagtatagacgcatctttgtgaatgcagaattctcggcttcctttgcctttgactgtctggttaacatttcacagcctttttttgccacaagaactctcatctcagaagaaattgagaccttattccaggtgtaacttcatccttagttgtatgtgaaagttcaatggtttgttttctggtaaatattagataattcccagttyctggctatattttctctttcctgctgcttctttctccatctctcgcaaggtaagtgggaagaccttgaaaaaattcaacttcactttcatgtcctaaatgggaacrttctaggcatatccttgtggacttttctcccagcaatctcagtaacatccagtaagaacaccagcttttggacctatgcaggactgcactgcaatagtgaagtttctggtgttgatcatggagaaaagtggtagttycctaatgctttgatgcctggttttcaaatgctctcctctgtacgtgagtaatgatt

SEQ ID NO: 47785 - DNA, 600 bp, Chicken  19866894292237_2
gcatctttgtgaatgcagaattctcggcttcctttgcctttgactgtctggttaacatttcacagcctttttttgccacaagaactctcatctcagaagaaattgagaccttattccaggtgtaacttcatccttagttgtatgtgaaagttcaatggtttgttttctggtaaatattagataattcccagttyctggctatattttctctttcctgctgcttctttctccatctctcgcaaggtaagtgggaagaccttgaaaaaattcaacttcactttcatgtcctaaatgggaacrttctaggcatatccttgtggacttttctcccagcaatctcagtaacatccagtaagaacaccagcttttggacctatgcaggactgcactgcaatagtgaagtttctggtgttgatcatggagaaaagtggtagttycctaatgctttgatgcctggttttcaaatgctctcctctgtacgtgagtaatgattattgaaggatggcaggtggacagagaggaaacattctgtgggatgacaatgggaaagtgccagacctgcagcagctgcaatgaacacagcctggaaaacagcaagac

SEQ ID NO: 47786 - DNA, 600 bp, Chicken  19866894292237_3
ttgtatgtgaaagttcaatggtttgttttctggtaaatattagataattcccagttyctggctatattttctctttcctgctgcttctttctccatctctcgcaaggtaagtgggaagaccttgaaaaaattcaacttcactttcatgtcctaaatgggaacrttctaggcatatccttgtggacttttctcccagcaatctcagtaacatccagtaagaacaccagcttttggacctatgcaggactgcactgcaatagtgaagtttctggtgttgatcatggagaaaagtggtagttycctaatgctttgatgcctggttttcaaatgctctcctctgtacgtgagtaatgattattgaaggatggcaggtggacagagaggaaacattctgtgggatgacaatgggaaagtgccagacctgcagcagctgcaatgaacacagcctggaaaacagcaagaccaattagtgtacatctacattgtttaatacattccactggaaaaccgacctgaagcagatgcagaaattcattcatatttactgtaaccagcaacagaaagagtggcttcttacctccctgagaagatgttatgcct

SEQ ID NO: 47787 - DNA, 462 bp, Chicken  19866894292239_1
ataatgggtttaattctaaagggaacagtgtgtgccagaatattgagttatacattgctttattgaagagtaggtcaagatcttatcagctctattatgaggaatgtcaataaaaggctgtgcaatgataaaatgtttaattaaaaatgaacattgtgcaacatatgaactctttgtgttatacagaaagaggagtcaaatgtattatgttctccaagttacaaattgcaccatgtcttttgccgcccccccccccccccccccatcatacattcttgtcagtatgaaatcttgtataayagttgaataagtggtatattttggcaagttaattaaaaaagtaaaggcttaagaatgattcagtatgttgatgaaaaagtaatagaaactagcaagattaattattttacttcattattttaatatacatgcataccgcattagcatcctaaagatctctag

SEQ ID NO: 47788 - DNA, 600 bp, Chicken  19866894292240_1
aatgccatacggaggtaataagtaatccatatcaaataaaatgtcattggctgaatgcatagagaacctaaacatatagacctcagtcttaattacaacattgcctttttccataaagtgttgttttttctaaagaacactgaaagggataaagatacttttttgcctaatatctattgctgaggtttctccttttctcttattccacgagatctgttcaattattgttgttaaagcatgagagaatcatccagatcatccagttcactgtgtttcaagcatatcctctaattacaagamttagaattattttggctttggatctcttttcctaatgtcaaaaagaaactttactgaagaatttgaagttatatatakatcaaaaatcttcactgatgtcatcacaattccacaaatcatttcaacgaatctatttattttttccaatgaaaacacagtttgctgagaaatttctaatcacttatttttcagaaaaaaagttaaaaatgtggacctcaatccagaattctttcctgagacatatttcattctctcacggatttggtctgacaaataaaagaattgggagttgtactagaa

SEQ ID NO: 47789 - DNA, 600 bp, Chicken  19866894292240_2
gacctcagtcttaattacaacattgcctttttccataaagtgttgttttttctaaagaacactgaaagggataaagatacttttttgcctaatatctattgctgaggtttctccttttctcttattccacgagatctgttcaattattgttgttaaagcatgagagaatcatccagatcatccagttcactgtgtttcaagcatatcctctaattacaagamttagaattattttggctttggatctcttttcctaatgtcaaaaagaaactttactgaagaatttgaagttatatatakatcaaaaatcttcactgatgtcatcacaattccacaaatcatttcaacgaatctatttattttttccaatgaaaacacagtttgctgagaaatttctaatcacttatttttcagaaaaaaagttaaaaatgtggacctcaatccagaattctttcctgagacatatttcattctctcacggatttggtctgacaaataaaagaattgggagttgtactagaaataacaatggtctctcacctttattttgttagaaaaggacttattagtggtgaaattcttcttggaactttctttgga

SEQ ID NO: 47790 - DNA, 600 bp, Chicken  19866894292243_1
ctaaagaaaagagctctgcgatttatgttttattgtcaaatgtttaaaggatcaaatctaaataaaatacccaatacacaaacttcaaagcacacattatcttcaacatcttatttccaattagcaagtcaaaataaagaaggcatggggaacatttggcttcaaaagcagagctctggaagaaatcaccattttggttgtttcaggtctcgtttaaaactcctatttccctcaaactgctgaaactggataatatggaaaaatgattctctctcacaaagcggggaagaacagcagacrtaccgccacgtgattgagcattacatcattcgtacttacaaccacgctgagccaacctgccagttcgacttcaaaagaccttttcttttgcctttgaggaaggatatggacgatatggactggccayaaaggcaggctaacagtgaggagggaagaaaaggctcagctgataatttcactggcatgttacaaaatactgaaatatatacgtgctaaaatacaatcagagattgtactatttctgtayagtaagaccacatcatgcaaacaaaatcctggtggcaaacatctcaagaaata

SEQ ID NO: 47791 - DNA, 600 bp, Chicken  19866894292243_2
gtcaaaataaagaaggcatggggaacatttggcttcaaaagcagagctctggaagaaatcaccattttggttgtttcaggtctcgtttaaaactcctatttccctcaaactgctgaaactggataatatggaaaaatgattctctctcacaaagcggggaagaacagcagacrtaccgccacgtgattgagcattacatcattcgtacttacaaccacgctgagccaacctgccagttcgacttcaaaagaccttttcttttgcctttgaggaaggatatggacgatatggactggccayaaaggcaggctaacagtgaggagggaagaaaaggctcagctgataatttcactggcatgttacaaaatactgaaatatatacgtgctaaaatacaatcagagattgtactatttctgtayagtaagaccacatcatgcaaacaaaatcctggtggcaaacatctcaagaaataataagagagctctcaaaaagtatttttactactttttaaaaggcttacactttattcagatgtaagaaaccatcctcaagactattaccraaatacaaagaaaggccagtatgaaaatgacttgttt

SEQ ID NO: 47792 - DNA, 600 bp, Chicken  19866894292243_3
ggataatatggaaaaatgattctctctcacaaagcggggaagaacagcagacrtaccgccacgtgattgagcattacatcattcgtacttacaaccacgctgagccaacctgccagttcgacttcaaaagaccttttcttttgcctttgaggaaggatatggacgatatggactggccayaaaggcaggctaacagtgaggagggaagaaaaggctcagctgataatttcactggcatgttacaaaatactgaaatatatacgtgctaaaatacaatcagagattgtactatttctgtayagtaagaccacatcatgcaaacaaaatcctggtggcaaacatctcaagaaataataagagagctctcaaaaagtatttttactactttttaaaaggcttacactttattcagatgtaagaaaccatcctcaagactattaccraaatacaaagaaaggccagtatgaaaatgacttgtttctccaaaacaaaagtgcaaggtaatattgcttctctgatacaccttcactgtattcttcaacatcaaaagacacaaagaaaaccacgtaagacttcagagcgtgatgaaagcgggcacgg

SEQ ID NO: 47793 - DNA, 600 bp, Chicken  19866894292243_4
cctttgaggaaggatatggacgatatggactggccayaaaggcaggctaacagtgaggagggaagaaaaggctcagctgataatttcactggcatgttacaaaatactgaaatatatacgtgctaaaatacaatcagagattgtactatttctgtayagtaagaccacatcatgcaaacaaaatcctggtggcaaacatctcaagaaataataagagagctctcaaaaagtatttttactactttttaaaaggcttacactttattcagatgtaagaaaccatcctcaagactattaccraaatacaaagaaaggccagtatgaaaatgacttgtttctccaaaacaaaagtgcaaggtaatattgcttctctgatacaccttcactgtattcttcaacatcaaaagacacaaagaaaaccacgtaagacttcagagcgtgatgaaagcgggcacggttgtagcagacctcagctgaagtagtatttgcagatagcaaacacagaagtgcttaccggtctcaattcagtggattttatttactctatttggcattaccaatcttaattaaactatttaagaatatgaaattgtcttctaa

SEQ ID NO: 47794 - DNA, 600 bp, Chicken  19866894292247_1
tgattaaacactgaaggtacacaggagtacacaacagtaggttttggatatttttatggatattcaatttatgatgttcagctggctcagtttaaaacaaaatggtaatatattttctttctttaaatatgttttgagaacattcgtcatgcaagaaaatggaatatgcactttatggcatccacatgtccagagaagattgatctcactagatctcattgccaaaggcatttcagctcctcttgctatatttagtggagatcacagtttgatgtattgtgtcgagaaacacaaatgttktatatgagtcactgaataatgcattttgtttttacaagtaaactaatatttaagtgtgttcaacatttgattccttccatttcctacaaatctgaaaaatatcgtaatataaaataaattgctcgcctacctttccaaaagctcagtggcttttcttttaataacaattaaggtgtttgcagaacagagtaattgtatttattaactccagatggttcaatatttatacatctttttcaaaggcctaaacagtgggggcaagaagccgacagcaagtgtctccttaaacttccacttcct

SEQ ID NO: 47795 - DNA, 600 bp, Chicken  19866894292248_1
gcctagggtaagtggccccagcttcttcttggcctgtctgactcctttgcctctgctttgttcgtcctctaggtaagcaccagccaggactgtcctaggaaaacctgccccagtggaacagagccagagcacagccctgcgctgcccatgtttgctcaggggagtacatgcaaactgagaactggccttgggtctgattgctccatgcaccaggagccatgctaccacctttcatgtgggaatccagacatctccagatgtgtagctcctcatgcctgcaccaacacagcaaagcctgayctgtgggtgcctctttctcctccccaaggtggttgcacttcaccttttggcagaagaagcccatcccaggccctcttccccgctagggcaggggcagtgccagtgccaagccccyagccttgcatccccagggtgcatctccctcaagggcccaaagctacaggagaccctgtggtgacggcaggagaaagcacagctgctgctgctcagtaccatttgggattcctggggctctgggtgacattggccaacttttcacagctgccaactgggccaggtcttcctcctgcctctgcaatt

SEQ ID NO: 47796 - DNA, 600 bp, Chicken  19866894292248_2
gaacagagccagagcacagccctgcgctgcccatgtttgctcaggggagtacatgcaaactgagaactggccttgggtctgattgctccatgcaccaggagccatgctaccacctttcatgtgggaatccagacatctccagatgtgtagctcctcatgcctgcaccaacacagcaaagcctgayctgtgggtgcctctttctcctccccaaggtggttgcacttcaccttttggcagaagaagcccatcccaggccctcttccccgctagggcaggggcagtgccagtgccaagccccyagccttgcatccccagggtgcatctccctcaagggcccaaagctacaggagaccctgtggtgacggcaggagaaagcacagctgctgctgctcagtaccatttgggattcctggggctctgggtgacattggccaacttttcacagctgccaactgggccaggtcttcctcctgcctctgcaattgatgttttccaatgacctcccccagccaagtctggcaccttatggtgttcatcactgttccagacttgttatttaccragtatatcgttttcattattttagttcattagttctc

SEQ ID NO: 47797 - DNA, 600 bp, Chicken  19866894292248_3
cccgctagggcaggggcagtgccagtgccaagccccyagccttgcatccccagggtgcatctccctcaagggcccaaagctacaggagaccctgtggtgacggcaggagaaagcacagctgctgctgctcagtaccatttgggattcctggggctctgggtgacattggccaacttttcacagctgccaactgggccaggtcttcctcctgcctctgcaattgatgttttccaatgacctcccccagccaagtctggcaccttatggtgttcatcactgttccagacttgttatttaccragtatatcgttttcattattttagttcattagttctcactcttcacagaacttctccggtcaaggtctctaatggtttcccttagatcgtggtgttcatccttttggcttgcccggtgcactgagtgaagaggcactgccttgagctgcatacaggtaggctgctccgaaagcaatgcctcctatttatttccatggaaactacaacagatacaatgagcactgtaacacagctacagcaagttctcagctacaaaacgccttttttcaatacatatatttcaatatgacgctacagcat

SEQ ID NO: 47798 - DNA, 600 bp, Chicken  19866894292255_1
agtctgggtgtgtatgcgactgatgaacattttacataaagaaagaaggaaagagctgaattcggacagaaaaaaaagctaatctgagttcctaagatacagaagataaatctgtttctttacatttagatataatggtcaatgggatctcggccaggaggtattggaggacataatttacagagcacagctggaactctactcacaacctctgttggtaagaaaaaaatctactgaaatttatggacttggttatgaagaatatgggaatgtttctgaagtgggctcttaattaacgcrtttgtggccatttactacattygcaaatgcaagtgggttgttaacagctggtgttttcaacttagttatttacaccatgcttgttctgcatgaatgttgggatctcctagtacttgttgctgcagaaagctagtattttctaatgtagtacagttggatcaaaatgtttgttgttttggcaccagctaccgatgaccaattcaaaaaagcttaactgaactgattatatattacaggacaaaggttggaaaaagtctaaacctccagaagactgtagaatatgctgtgtggtttaactaa

SEQ ID NO: 47799 - DNA, 600 bp, Chicken  19866894292255_2
atgaacattttacataaagaaagaaggaaagagctgaattcggacagaaaaaaaagctaatctgagttcctaagatacagaagataaatctgtttctttacatttagatataatggtcaatgggatctcggccaggaggtattggaggacataatttacagagcacagctggaactctactcacaacctctgttggtaagaaaaaaatctactgaaatttatggacttggttatgaagaatatgggaatgtttctgaagtgggctcttaattaacgcrtttgtggccatttactacattygcaaatgcaagtgggttgttaacagctggtgttttcaacttagttatttacaccatgcttgttctgcatgaatgttgggatctcctagtacttgttgctgcagaaagctagtattttctaatgtagtacagttggatcaaaatgtttgttgttttggcaccagctaccgatgaccaattcaaaaaagcttaactgaactgattatatattacaggacaaaggttggaaaaagtctaaacctccagaagactgtagaatatgctgtgtggtttaactaataacrcaatagaaaaacagcaa

SEQ ID NO: 47800 - DNA, 600 bp, Chicken  19866894292255_3
ggccatttactacattygcaaatgcaagtgggttgttaacagctggtgttttcaacttagttatttacaccatgcttgttctgcatgaatgttgggatctcctagtacttgttgctgcagaaagctagtattttctaatgtagtacagttggatcaaaatgtttgttgttttggcaccagctaccgatgaccaattcaaaaaagcttaactgaactgattatatattacaggacaaaggttggaaaaagtctaaacctccagaagactgtagaatatgctgtgtggtttaactaataacrcaatagaaaaacagcaacagagaagaggagttttatctagattcagtgtcagatttcaattaagttacacagatcttaatttttaccttcttcagtggaccatgaatagagtggtttgcttacaatcggttgttgttttttttcagttcccaatagaatcaytgttttgatcatttagggaaaaaaaaaaagagggaaagaggtgaaactgagcaggatacaggtgcaggataagcaggttgacaaaagaaaaggagggatggaaggtatattatgtgaaatgtaggagcaaagctcaaa

SEQ ID NO: 47801 - DNA, 600 bp, Chicken  19866894292255_4
ttgttgttttggcaccagctaccgatgaccaattcaaaaaagcttaactgaactgattatatattacaggacaaaggttggaaaaagtctaaacctccagaagactgtagaatatgctgtgtggtttaactaataacrcaatagaaaaacagcaacagagaagaggagttttatctagattcagtgtcagatttcaattaagttacacagatcttaatttttaccttcttcagtggaccatgaatagagtggtttgcttacaatcggttgttgttttttttcagttcccaatagaatcaytgttttgatcatttagggaaaaaaaaaaagagggaaagaggtgaaactgagcaggatacaggtgcaggataagcaggttgacaaaagaaaaggagggatggaaggtatattatgtgaaatgtaggagcaaagctcaaaataagaagaaatgttaaagaaaataaaataagtagaatagagtattatctcagtttctctgaattgtggccagaaacctttggtgctcttctgaaataacagaagtaaatttaattacttttacataactgagaaaaaaaaatggattgagaaaagtttttt

SEQ ID NO: 47802 - DNA, 600 bp, Chicken  19866894292255_5
taccgatgaccaattcaaaaaagcttaactgaactgattatatattacaggacaaaggttggaaaaagtctaaacctccagaagactgtagaatatgctgtgtggtttaactaataacrcaatagaaaaacagcaacagagaagaggagttttatctagattcagtgtcagatttcaattaagttacacagatcttaatttttaccttcttcagtggaccatgaatagagtggtttgcttacaatcggttgttgttttttttcagttcccaatagaatcaytgttttgatcatttagggyaaaaaaaaaagagggaaagaggtgaaactgagcaggatacaggtgcaggataagcaggttgacaaaagaaaaggagggatggaaggtatattatgtgaaatgtaggagcaaagctcaaaataagaagaaatgttaaagaaaataaaataagtagaatagagtattatctcagtttctctgaattgtggccagaaacctttggtgctcttctgaaataacagaagtaaatttaattacttttacataactgagaaaaaaaaatggattgagaaaagtttttttttcctgtgttaatctgat

SEQ ID NO: 47803 - DNA, 600 bp, Chicken  19866894292255_6; identical to SEQ ID NO: 47802

SEQ ID NO: 47804 - DNA, 600 bp, Chicken  19866894292258_1
aatgataagctaacaacctcttccttggaccagaacagcaggggtaaattaggaagatgtatgcactaccaacgtcttcagctctgtgacaatgagtgtttatgagattacgaattttctcaagattggtgattagatttccaccagccactctgcatttcccctacagtgtcacagaaggatgagcaatataataagcaaagaggagctatgcagcattttacggctccagttgccaaatgcaggattaagtcaaaggccacagtgaataagcaacacgttgccacatcaatgtgttasctcctttcattcagcagatagctttagaaaacataatatctgtgtgattctaagaaaaattgcatttgacatgtctgttcaatgtgtgtgagaaaagtcccaaatgcagactgaaggaaacactgaataagtttggatgtacgtgtatctgagctacaggtaagaaagttaaacagaataattctcagaaattgtagggcctgcaggacgattatctactgattggtacaagtatctgcagtaagcattttccaggtgtaaatctttcatttactatgctcttttatatatacccagaat

SEQ ID NO: 47805 - DNA, 600 bp, Chicken  19866894292266_1
tgtccaagaaggaggttttttttcctccttttgcaaaggggtctcagccatcttagtgtatgtttttcctcacccagttgacccaggccagggagatatttgccaggagggtaagcagctcccagaggcagtgactagagtgcagagctggctggtccaatttggaatagttgggcttttgctcacctctttcatcagggatcctctttttttttttttttttttccctcctgtttaaaattctcctctactcttctttgtttctttattattgcagcatctggatttgcccctctactrtggtactggcagtgtagaaaagcttcttctaggaaggcaactttacttacacttctcaagcatttgagaaaataagcgaatgaaaacacaacatgcaggcaatgctatctaaaaccctgcacctcctgcaactgctctaagatgccagatcctttttgagataaccaagatccataaaaccaaacgcaggatctttcacccaagtaagtccctgtggaggggtgttaccagatgctctctacaaaattcacctatgctgaccatgaaaaaaagagagattttacttgttatgaaaaactt

SEQ ID NO: 47806 - DNA, 600 bp, Chicken  19866894292268_1
atacgttgtttaaacttaaaataataaaataatactgtattgctgcatcttaacccagcacatagctaactgttacacagcctttcacccctcccagtgggatgggggagagaactggaaaaaataatacatagaacttgaaggttgaggtaaaaactattcactagtacaggaaaggaaaaaaaaaaaacaaaacagtaatgatcataatacttatataggcctacaaacaagtgatgcaatttctcatcacccaccaaccaatgttcagccagtccccgagcagcagcttccttcgakccatctcccctcagtttcatagttgttgctatttttttatattatgtcatgtggtatggaacayccctttgaccagtttaggtcagctgtcctggttctaccccttcccagtcagttccttatgatcaccagccatcttgctggaaggacagcacaagaagctgaagcacccttggctttgtgcagcactgctcagcaacaactaaaacgttggtgtgttatcaatgctgcttttctcctaaagcctaaacttagcattgtaccaggtgctattgaagaacatcaactctgttctagctg

SEQ ID NO: 47807 - DNA, 600 bp, Chicken  19866894292268_2
gctaactgttacacagcctttcacccctcccagtgggatgggggagagaactggaaaaaataatacatagaacttgaaggttgaggtaaaaactattcactagtacaggaaaggaaaaaaaaaaaacaaaacagtaatgatcataatacttatataggcctacaaacaagtgatgcaatttctcatcacccaccaaccaatgttcagccagtccccgagcagcagcttccttcgakccatctcccctcagtttcatagttgttgctatttttttatattatgtcatgtggtatggaacayccctttgaccagtttaggtcagctgtcctggttctaccccttcccagtcagttccttatgatcaccagccatcttgctggaaggacagcacaagaagctgaagcacccttggctttgtgcagcactgctcagcaacaactaaaacgttggtgtgttatcaatgctgcttttctcctaaagcctaaacttagcattgtaccaggtgctattgaagaacatcaactctgttctagctgaaatcagaacatgtacatttcaaggtatcatcctttctattgtcgtactctgaagtatataata

SEQ ID NO: 47808 - DNA, 600 bp, Chicken  19866894292269_1
aatttcacacttccaagttattcaatgtaaaaaatgaggtcttttccccctgaatgttcttgcattttaaaatatgttttctcctaggttgaaaggaataattgcaactctctcagttgtagtctgtaagaatttattttacataacactccatgagagataatagtttttcaggatctatcttcttttaggctttttgcacaaatctttagaaggtgttcaagttctttttttttttgaaattacaaagattttttggcaatggaaaattgtatcccagtcagctgagtttagtcctayagaatgtaggtattacagaacatacgtgttgtttgaactcttcactcacctgagaaatttgacttttgtaaaacctgtacagaactcaaagcaaaatggacatcactctaacaaatgcggtgtgattcttgtaattttcttcctctacatcagcacaaaggaaacagcaaacaaatcatcttaccatttccttagagacaaaacttaaagatacaatacttgctttttcacttgagcctttaaaaccattgttttgaattccarggcacagagtactttccaaatgactgagaattacca

SEQ ID NO: 47809 - DNA, 600 bp, Chicken  19866894292269_2
gaaaattgtatcccagtcagctgagtttagtcctayagaatgtaggtattacagaacatacgtgttgtttgaactcttcactcacctgagaaatttgacttttgtaaaacctgtacagaactcaaagcaaaatggacatcactctaacaaatgcggtgtgattcttgtaattttcttcctctacatcagcacaaaggaaacagcaaacaaatcatcttaccatttccttagagacaaaacttaaagatacaatacttgctttttcacttgagcctttaaaaccattgttttgaattccarggcacagagtactttccaaatgactgagaattaccaattagtgataatactccagcataattgtaattgagattattttttctaaygaggtaaacttgttacaaaargagaatacctaaaggtgttcaagatggcacatttaagaaggatttaatcattttttttgattaattgaagcccttcrcaagactgttgggtatctgctagcattggtgtttagcacctttgccagtgtctgaattttcaggctgctaaaaataaactgtgtttctgagtagctataatttgacatgttttaat

SEQ ID NO: 47810 - DNA, 600 bp, Chicken  19866894292269_3
tgagaaatttgacttttgtaaaacctgtacagaactcaaagcaaaatggacatcactctaacaaatgcggtgtgattcttgtaattttcttcctctacatcagcacaaaggaaacagcaaacaaatcatcttaccatttccttagagacaaaacttaaagatacaatacttgctttttcacttgagcctttaaaaccattgttttgaattccarggcacagagtactttccaaatgactgagaattaccaattagtgataatactccagcataattgtaattgagattattttttctaaygaggtaaacttgttacaaaargagaatacctaaaggtgttcaagatggcacatttaagaaggatttaatcattttttttgattaattgaagcccttcrcaagactgttgggtatctgctagcattggtgtttagcacctttgccagtgtctgaattttcaggctgctaaaaataaactgtgtttctgagtagctataatttgacatgttttaatttcacagcttaagaaatgaatcaattctctgcagattgcgtccctagtcagtctgcctcaggagctttgtcatttccttggaggag

SEQ ID NO: 47811 - DNA, 600 bp, Chicken  19866894292269_4
aacctgtacagaactcaaagcaaaatggacatcactctaacaaatgcggtgtgattcttgtaattttcttcctctacatcagcacaaaggaaacagcaaacaaatcatcttaccatttccttagagacaaaacttaaagatacaatacttgctttttcacttgagcctttaaaaccattgttttgaattccarggcacagagtactttccaaatgactgagaattaccaattagtgataatactccagcataattgtaattgagattattttttctaaygaggtaaacttgttacaaaargagaatacctaaaggtgttcaagatggcacatttaagaaggatttaatcattttttttgattaattgaagcccttcrcaagactgttgggtatctgctagcattggtgtttagcacctttgccagtgtctgaattttcaggctgctaaaaataaactgtgtttctgagtagctataatttgacatgttttaatttcacagcttaagaaatgaatcaattctctgcagattgcgtccctagtcagtctgcctcaggagctttgtcatttccttggaggagcagcacgtaaatctttcagat

SEQ ID NO: 47812 - DNA, 600 bp, Chicken  19866894292269_5
atcagcacaaaggaaacagcaaacaaatcatcttaccatttccttagagacaaaacttaaagatacaatacttgctttttcacttgagcctttaaaaccattgttttgaattccarggcacagagtactttccaaatgactgagaattaccaattagtgataatactccagcataattgtaattgagattattttttctaaygaggtaaacttgttacaaaargagaatacctaaaggtgttcaagatggcacatttaagaaggatttaatcattttttttgattaattgaagcccttcrcaagactgttgggtatctgctagcattggtgtttagcacctttgccagtgtctgaattttcaggctgctaaaaataaactgtgtttctgagtagctataatttgacatgttttaatttcacagcttaagaaatgaatcaattctctgcagattgcgtccctagtcagtctgcctcaggagctttgtcatttccttggaggagcagcacgtaaatctttcagatgtgagagaatccaaaagcgtgaatgcaaagcagaggcagtgcaggagaactggtgctgattctcaggtagtgattga

SEQ ID NO: 47813 - DNA, 600 bp, Chicken  19866894292273_1
gatacacagtctccataccacttcatcctctcctgataatattgcctctagtccataaaagctttcttgttctggtggtagggatatgttatatattatggttcacttgtgtagccagcaccctcctccagaagaggtttagctgctgtcacaaattcctcatgcaaccttccctgtgagcctcttggcccctctgcagcattccctccaagccttgaaccatttctgtgctgcttctcaccttaatccccctggtagataaatgaatttctgtcctgcttctgtgagtctgtctgatgmtctgtgtcatggtcatatcaccatgagcttcaccgtgtttctgctctaatgatgaccagccagtcttcaagcagtggtccccccaccagccagccactcccccattataactgttcagtgtgacactatatgrtgtgaaatatccctttggccagtttagatcagttatcttggttctgtcccattctcactccctgtgcacccccagctccttgctgagaacctgaaaagtacttggtgttgtatgagcaccactcagtaacacctaaaacactggtgggtgaccaacattattctcat

SEQ ID NO: 47814 - DNA, 600 bp, Chicken  19866894292273_2
gaggtttagctgctgtcacaaattcctcatgcaaccttccctgtgagcctcttggcccctctgcagcattccctccaagccttgaaccatttctgtgctgcttctcaccttaatccccctggtagataaatgaatttctgtcctgcttctgtgagtctgtctgatgmtctgtgtcatggtcatatcaccatgagcttcaccgtgtttctgctctaatgatgaccagccagtcttcaagcagtggtccccccaccagccagccactcccccattataactgttcagtgtgacactatatgrtgtgaaatatccctttggccagtttagatcagttatcttggttctgtcccattctcactccctgtgcacccccagctccttgctgagaacctgaaaagtacttggtgttgtatgagcaccactcagtaacacctaaaacactggtgggtgaccaacattattctcatcctaagtccacatcaccatacagctattacgaagaataggaactctgtcctggataaaaccagtacgggctgtagtgtcacctgcctgtaaaaacagctagacttggctgaccagcttggaggcactggctgt

SEQ ID NO: 47815 - DNA, 599 bp, Chicken  19866894292276_1
  misc_feature (1)..(104): n is any nucleotide
nnnnnnnnnnnnnnnnnnnnnnnnnnnnnnnnnnnnnnnnnnnnnnnnnnnnnnnnnnnnnnnnnnnnnnnnnnnnnnnnnnnnnnnnnnnnnnnnnnnnnnnntaggcaaaagtaaggttgaattaagccaaatacaaaggtttgcatctatcaacacagaacagcagttctctctggtcatgctgggcatgcatcttggaaagcagagactctgaaaaggtcatgagtgtggataactgggcacagcaacaagtcattccctgtaactaaatgagcaaaatgagaaagagaaaatgcrcagcctagtttgcttatcaggaggccactcagagctgcaagctgtcatggcatttgcaggaagaacatttcaggtacaaatggctgcttagtggagcagggggtgaagcaaataactggtagtcagaaacctgaaggaaggttggagatgactctccctgtttgcctccaacaacgaactttctgagtttatgtattctaacacctttgcttccaaccatagtggcacaagcaatatcctcttccacagggttgaagtcggatctggctgacagaggtgatgcagccatgggctgtctt

SEQ ID NO: 47816 - DNA, 600 bp, Chicken  19866894292284_1
aagcctaaactatgcatttgcttggttaaaaagggcagtgagagagaaatttctttggttttatatctttctttttattataaaaagaattgctgcagattaactataaagctaaaagtgcatgtgaccttatattatcattgaacatcattgtcagtttaatacccacagagtagaagagggagagaatcaccagtcacatgcaagaaaggctcaggtgaaacagagtagtgtcctagtgctttaggaagccaaagttaatgaggttggtacccagccaccatgagcagtctgctgcaygcaggaatcagagtgggctaaggttaccttcacagctataatttcaatactgctgctttttcacagaaagtgatttttttcatttgttcagcaaatgaggcaaaggaagaatggatggacatgtggcgtggaagtggtttcataaaccccaggctgaattcatgttgcttatgagctggtaatatgagtgytggatttggttcttttcttcacacggctgtgatctgaaaagagtgcttatagatactagtgaatttgcctcagaatgaaactggtatgaatgcaagagggtttggacca

SEQ ID NO: 47817 - DNA, 600 bp, Chicken  19866894292284_2
accagtcacatgcaagaaaggctcaggtgaaacagagtagtgtcctagtgctttaggaagccaaagttaatgaggttggtacccagccaccatgagcagtctgctgcaygcaggaatcagagtgggctaaggttaccttcacagctataatttcaatactgctgctttttcacagaaagtgatttttttcatttgttcagcaaatgaggcaaaggaagaatggatggacatgtggcgtggaagtggtttcataaaccccaggctgaattcatgttgcttatgagctggtaatatgagtgytggatttggttcttttcttcacacggctgtgatctgaaaagagtgcttatagatactagtgaatttgcctcagaatgaaactggtatgaatgcaagagggtttggaccaattattggcatgcttagtttcaagaggtttgtctaaaaaatcattcctggttaattgtactacttgtaggcttctaatgtgattatataaagtttctttaatgagagatttttttctttgcttacccgcaaatgaagacctttayttgccatgtcaaatgtagggtaaaggaaattctcctttctttcaaa

SEQ ID NO: 47818 - DNA, 600 bp, Chicken  19866894292284_3
accccaggctgaattcatgttgcttatgagctggtaatatgagtgytggatttggttcttttcttcacacggctgtgatctgaaaagagtgcttatagatactagtgaatttgcctcagaatgaaactggtatgaatgcaagagggtttggaccaattattggcatgcttagtttcaagaggtttgtctaaaaaatcattcctggttaattgtactacttgtaggcttctaatgtgattatataaagtttctttaatgagagatttttttctttgcttacccgcaaatgaagacctttayttgccatgtcaaatgtagggtaaaggaaattctcctttctttcaaaagattttyagtgctcttctacaaaagataatcattttaaaggcaggcagtgtgatacctcgtatctccaaattattttacatgggaaaggtggagaaaaaattccatcctttcatcttcaaagaaagttgtgagaagtgggaataacaaacaagctgaatttaggaggctgataacaagaatcatatacagaaaacactgccattctagtctagaagaattgacccgtaaaaagaattaggaggctttctcatg

SEQ ID NO: 47819 - DNA, 600 bp, Chicken  19866894292284_4
gttcttttcttcacacggctgtgatctgaaaagagtgcttatagatactagtgaatttgcctcagaatgaaactggtatgaatgcaagagggtttggaccaattattggcatgcttagtttcaagaggtttgtctaaaaaatcattcctggttaattgtactacttgtaggcttctaatgtgattatataaagtttctttaatgagagatttttttctttgcttacccgcaaatgaagacctttayttgccatgtcaaatgtagggtaaaggaaattctcctttctttcaaaagattttyagtgctcttctacaaaagataatcattttaaaggcaggcagtgtgatacctcgtatctccaaattattttacatgggaaaggtggagaaaaaattccatcctttcatcttcaaagaaagttgtgagaagtgggaataacaaacaagctgaatttaggaggctgataacaagaatcatatacagaaaacactgccattctagtctagaagaattgacccgtaaaaagaattaggaggctttctcatgcatttctcagctgtcatagggaytattgatgctgtggcagtgtagaaagagtat

SEQ ID NO: 47820 - DNA, 585 bp, Chicken  19866894292284_5
aggaaattctcctttctttcaaaagattttyagtgctcttctacaaaagataatcattttaaaggcaggcagtgtgatacctcgtatctccaaattattttacatgggaaaggtggagaaaaaattccatcctttcatcttcaaagaaagttgtgagaagtgggaataacaaacaagctgaatttaggaggctgataacaagaatcatatacagaaaacactgccattctagtctagaagaattgacccgtaaaaagaattaggaggctttctcatgcatttctcagctgtcatagggaytattgatgctgtggcagtgtagaaagagtatgaggtttggatggtaagggaacttgtttctctgtttatttcgcacatgcagcagtttctagcacctacttagatatttatctgctaacagaagaatgtggaaagcaaagcgactaagtaagagttgtgtagctcgatgccattaatgatctaagcatgaaaaactttgaccacgattgtcttcagtgagagcttgtgattgagtcgttctccccaccaacttcctccttaggcctggctgttacacacaaggca

SEQ ID NO: 47821 - DNA, 599 bp, Chicken  19866894292305_1
  misc_feature (1)..(96): n is any nucleotide
nnnnnnnnnnnnnnnnnnnnnnnnnnnnnnnnnnnnnnnnnnnnnnnnnnnnnnnnnnnnnnnnnnnnnnnnnnnnnnnnnnnnnnnnnnnnnnnnctatagagaagtcagattgtggagtcaagcatttagtagtttttttcccatgtatcttcagtgctttgaaaatctcattctcatatgaacaaacagaagcacaacagttctcccctgtgagccatgcttatgtggtgtagccaattgtcgggccctggaattaggcagtgctgtaagaatctcagctttcacttaaaacaaaawatgtgcttctagtcttttcrtttgtggraaaaggcccaaatccaaaagtgtgggggaaaaaaaaaaaaaaagaatgccacagaagtcccacatttaagcaaacatcacagatttcagagtttgtactttcttaacatacattagtagtattcctcctctgttcataccctttagctcaacagtcacagaaatctgcatgtcagaatacgattcacaccaacaaaagcmtttacatcatccaccagccacaaaacacacacaatgctttaatgcctgcccatacaggattaatactatat

SEQ ID NO: 47822 - DNA, 599 bp, Chicken  19866894292305_2
  misc_feature (1)..(76): n is any nucleotide
nnnnnnnnnnnnnnnnnnnnnnnnnnnnnnnnnnnnnnnnnnnnnnnnnnnnnnnnnnnnnnnnnnnnnnnnnnnnctatagagaagtcagattgtggagtcaagcatttagtagtttttttcccatgtatcttcagtgctttgaaaatctcattctcatatgaacaaacagaagcacaacagttctcccctgtgagccatgcttatgtggtgtagccaattgtcgggccctggaattaggcagtgctgtaagaatctcagctttcacttaaaacaaaawatgtgcttctagtcttttcrtttgtggraaaaggcccaaatccaaaagtgtgggggaaaaaaaaaaaaaaagaatgccacagaagtcccacatttaagcaaacatcacagatttcagagtttgtactttcttaacatacattagtagtattcctcctctgttcataccctttagctcaacagtcacagaaatctgcatgtcagaatacgattcacaccaacaaaagcmtttacatcatccaccagccacaaaacacacacaatgctttaatgcctgcccatacaggattaatactatattattcttctctcttaaaata

SEQ ID NO: 47823 - DNA, 599 bp, Chicken  19866894292305_3
  misc_feature (1)..(68): n is any nucleotide
nnnnnnnnnnnnnnnnnnnnnnnnnnnnnnnnnnnnnnnnnnnnnnnnnnnnnnnnnnnnnnnnnnnnctatagagaagtcagattgtggagtcaagcatttagtagtttttttcccatgtatcttcagtgctttgaaaatctcattctcatatgaacaaacagaagcacaacagttctcccctgtgagccatgcttatgtggtgtagccaattgtcgggccctggaattaggcagtgctgtaagaatctcagctttcacttaaaacaaaawatgtgcttctagtcttttcrtttgtggraaaaggcccaaatccaaaagtgtgggggaaaaaaaaaaaaaaagaatgccacagaagtcccacatttaagcaaacatcacagatttcagagtttgtactttcttaacatacattagtagtattcctcctctgttcataccctttagctcaacagtcacagaaatctgcatgtcagaatacgattcacaccaacaaaagcmtttacatcatccaccagccacaaaacacacacaatgctttaatgcctgcccatacaggattaatactatattattcttctctcttaaaataaggtcata

SEQ ID NO: 47824 - DNA, 600 bp, Chicken  19866894292305_4
tggtgtagccaattgtcgggccctggaattaggcagtgctgtaagaatctcagctttcacttaaaacaaaawatgtgcttctagtcttttcrtttgtggraaaaggcccaaatccaaaagtgtgggggaaaaaaaaaaaaaaagaatgccacagaagtcccacatttaagcaaacatcacagatttcagagtttgtactttcttaacatacattagtagtattcctcctctgttcataccctttagctcaacagtcacagaaatctgcatgtcagaatacgattcacaccaacaaaagcmtttacatcatccaccagccacaaaacacacacaatgctttaatgcctgcccatacaggattaatactatattattcttctctcttaaaataaggtcataccatctttgtcatgttgcaccaggtggttcagaaactgtttcttctctcctaccacttttttagatggatcaaagaggaaaacccaactttctagtttatattagaaatacacagactatatcaatgttctctcaatatacttgtatttgtttccctcaaactgttaggcaaaaaaaatccacaaccaggccaagtagaac

SEQ ID NO: 47825 - DNA, 560 bp, Chicken  19866894292306_1
tttagaaatcagaattcatccaaagacaaaggcagtgctcttggaaaggaatttaactgtacccattactgccggacttcagcaggtaatccatcttcattttcatatgttttacatgacaccaaagccctgagcaacatcatcttcacagaatcacagaaccacaggggttggaagggacctcaagagatcattgagtccaacccccttgctaaatcaggtaccttgcaataggtcacacaggtaggtgtccagatgggtcttgaatatctccatagaaggagactccagaacctctcygggcaacctgtttcagtgctctgtcaaccttaccataaaagaagttcttccgtatgttagtacggaacttcctatgttccagttttaggccgttactccttgtcctatcgctacacaccaccgagaagagcttggcctcatccacttgtctcccatctccctttagatatttgcaaacatttatcagaaccccagatcatgtctctcatgatacttatggacttaccagaaatctgaaaaaggtcttacaagattctcag

SEQ ID NO: 47826 - DNA, 600 bp, Chicken  19866894292313_1
gcttgccatgaggatggatggggaccatttggcagcagctgtcctattcctcagtcctgacccatgcaggagaatcctaggccagcttagagctcttgctgttcaagtctgttaaaatcttggtctcccaatgctcctgtcctatttatctgattctggactcccctgccctgttttctctagaaccaacctttactatcgttctctatatggcatgttatacctcagtgttaatagtgacaccaagcagtgtgtacatacaaaaaattcaggtaaagccctctgtccccattgcgttgkgtaactgtgcttgaggttaaactcaacttagaaaaggcagatggcttaacccagttccatctatcttgcctgtcaggacagagctcaactttaagtcacctcctcccccagtctcaagttggacctgaattttcctatgtggcagctgtcaccttccttgctaaagtcaggatgaaaaatttggggtctggaaatgttgtataagaccccagattgcacaaatgtaattgcagtaaatgaaggatttattctcagcttacgtgctacaattaccccgatcttcctgtatagatatcagaa

SEQ ID NO: 47827 - DNA, 600 bp, Chicken  19866894292313_2
agatggcttaacccagttccatctatcttgcctgtcaggacagagctcaactttaagtcacctcctcccccagtctcaagttggacctgaattttcctatgtggcagctgtcaccttccttgctaaagtcaggatgaaaaatttggggtctggaaatgttgtataagaccccagattgcacaaatgtaattgcagtaaatgaaggatttattctcagcttacgtgctacaattaccccgatcttcctgtatagatatcagaagagagctaagtgctgcaggttcaatatgaagctcctgytggaggtgtgtccatgggctgtaaggtcttcttaagtcttttgccatatacctgctgtagtcaggcatgctgtatcctgtgttagcagccattctcttagcaacacttaaccttttccttgtgagagcartgctctcccctttccagtgaacaccatatttcttctgcagaaggactgctrgggcaaaagtgtatgattgagattgtagagaaacctctgtggagtgtaggggagagcaggttgaacctgcaccgaccttcatctgcacatcactctgggtcttacagaatgcgggcagc

SEQ ID NO: 47828 - DNA, 600 bp, Chicken  19866894292313_3
aggatgaaaaatttggggtctggaaatgttgtataagaccccagattgcacaaatgtaattgcagtaaatgaaggatttattctcagcttacgtgctacaattaccccgatcttcctgtatagatatcagaagagagctaagtgctgcaggttcaatatgaagctcctgytggaggtgtgtccatgggctgtaaggtcttcttaagtcttttgccatatacctgctgtagtcaggcatgctgtatcctgtgttagcagccattctcttagcaacacttaaccttttccttgtgagagcartgctctcccctttccagtgaacaccatatttcttctgcagaaggactgctrgggcaaaagtgtatgattgagattgtagagaaacctctgtggagtgtaggggagagcaggttgaacctgcaccgaccttcatctgcacatcactctgggtcttacagaatgcgggcagcactgctgatgggcactgagtgtyttggtaatcatggcatggctgtaaccagagtgagcaccaggcactgcctatgccaygctcctgttgatgctgccatggaatgttgctttcatgcttctgatctctca

SEQ ID NO: 47829 - DNA, 600 bp, Chicken  19866894292313_4
aaatgtaattgcagtaaatgaaggatttattctcagcttacgtgctacaattaccccgatcttcctgtatagatatcagaagagagctaagtgctgcaggttcaatatgaagctcctgytggaggtgtgtccatgggctgtaaggtcttcttaagtcttttgccatatacctgctgtagtcaggcatgctgtatcctgtgttagcagccattctcttagcaacacttaaccttttccttgtgagagcartgctctcccctttccagtgaacaccatatttcttctgcagaaggactgctrgggcaaaagtgtatgattgagattgtagagaaacctctgtggagtgtaggggagagcaggttgaacctgcaccgaccttcatctgcacatcactctgggtcttacagaatgcgggcagcactgctgatgggcactgagtgtyttggtaatcatggcatggctgtaaccagagtgagcaccaggcactgcctatgccaygctcctgttgatgctgccatggaatgttgctttcatgcttctgatctctcatggctctccatagaggttgacaagcacaaagtcctggtcatccttcctgca

SEQ ID NO: 47830 - DNA, 600 bp, Chicken  19866894292313_5
aggtcttcttaagtcttttgccatatacctgctgtagtcaggcatgctgtatcctgtgttagcagccattctcttagcaacacttaaccttttccttgtgagagcartgctctcccctttccagtgaacaccatatttcttctgcagaaggactgctrgggcaaaagtgtatgattgagattgtagagaaacctctgtggagtgtaggggagagcaggttgaacctgcaccgaccttcatctgcacatcactctgggtcttacagaatgcgggcagcactgctgatgggcactgagtgtyttggtaatcatggcatggctgtaaccagagtgagcaccaggcactgcctatgccaygctcctgttgatgctgccatggaatgttgctttcatgcttctgatctctcatggctctccatagaggttgacaagcacaaagtcctggtcatccttcctgcagatgtttgcaggagaacccactcaagatcaagatctataagaaatgttgccaggcagcttcaaaagggattaaaagatgagaatcaaaatcaaacctacagggagcagaatcccataggaggcagttttccaagcagaagag

SEQ ID NO: 47831 - DNA, 600 bp, Chicken  19866894292313_6
tgttagcagccattctcttagcaacacttaaccttttccttgtgagagcartgctctcccctttccagtgaacaccatatttcttctgcagaaggactgctrgggcaaaagtgtatgattgagattgtagagaaacctctgtggagtgtaggggagagcaggttgaacctgcaccgaccttcatctgcacatcactctgggtcttacagaatgcgggcagcactgctgatgggcactgagtgtyttggtaatcatggcatggctgtaaccagagtgagcaccaggcactgcctatgccaygctcctgttgatgctgccatggaatgttgctttcatgcttctgatctctcatggctctccatagaggttgacaagcacaaagtcctggtcatccttcctgcagatgtttgcaggagaacccactcaagatcaagatctataagaaatgttgccaggcagcttcaaaagggattaaaagatgagaatcaaaatcaaacctacagggagcagaatcccataggaggcagttttccaagcagaagagatttatgtgcatcattctgggtgacagatgcccccaggaaagggctatgtcttacc

SEQ ID NO: 47832 - DNA, 600 bp, Chicken  19866894292317_1
acagaattttgaactaagaaggggtcattttgctactacggaagttatttatgttaaagatacataatgatattaggacttcaaaaactagagctacaaaatcattaaattgagaaagctccgagctattttgtatgagctgtatttgcattttactcataataaatataaattgagaaaattccatttaaaaaatgtcagaaggaaaaataattacttcggaatcaaggattgtgtttattagtatttctgcttctttttgtgttatgcacttggaaatatccgtgaggtcacctcccygcccccgctccagaccgcttggtggtagtttcaggatgaaaaaagaagtcacagaaacacataatttgtttcagtcactgcattcttcctttcatctggatagctgtagcatggctggagtgcgctgtagcctcccagcttctctttgctgcaggaaactttgtaatagcacttaaataaataaagaaactgggtaggagattattgctttcattgtgctattgtatatgtgtattatagagtcaccccacagattgacaccagtagttgaaagcgggacaagacaaatgttgtatatga

SEQ ID NO: 47833 - DNA, 600 bp, Chicken  19866894292324_1
tgatttcagtgatcatcagctggattcccactgcagaacaaacagagcaaaaccaatgctggaagtgctcaagaatctgcatcacattgcccttctaagccaaaggcactcatcttttacttttcaaataatgattgctttaagttctccacaatacatctctaaatctttgctagtctacccacctacctgaatattttcaaagcacctcatctcagttttcaagtctggagtataacatccttatttcatgaccatataaataatcccagtcactgcagaagtagaattacttgcacrcaaaggcattgttcaaagtaagatgaagtgagggagtaatgtcctaacatacaaatcttaataataaaagatggggatttttattgcctgcacataagtacacattattacaaataattacatataacaaattaaagaaaaaaagaaatagttttagtgacaccaagcacattgtttcatttaattaagacctggagtttagttgcttaactctgctatgatctcttcatgcatcctttcactgatgaatactaaagatttttaacttcaagtaaagaaaaatgaaattggtaattaaaa

SEQ ID NO: 47834 - DNA, 556 bp, Chicken  19866894292335_1
tattttattaacagatcgttttgtgtacacacacacacatatatatcgacatcaaagtgctagtggtttgatttccgcatatataactataaatatgtgtgaagctgagtgtaaattgagatgttagcattaagcttcagttaggaaactatccagagaaaggtactgcctaaggatacaaaaatgtcttatttccctgagaaaacacagtggttgcaataggaccgaaaaattatctaatggaggcttttcatggccacatactactggacagaattagaatattcaagctgcataaamgtgtagaatttcttgggatatgtttttgaaataaatttccttagtgtagatctaaatactttccagaaaaataaagaagcaggtatttttctgtagggtacaatttaattgttttttctttccagtcctccagaatactgtgcaaatgaaacatatttgttaagtcaagaaagcttttaaacacctgtgaggaaaattgcagtccttatgaatgcgactggatttctttaaggtatcagattatacaagtaatgat

SEQ ID NO: 47835 - DNA, 600 bp, Chicken  19866894292339_1
cagtgcccctcaacaggcagcagcacccaccaggtgatgcctctccaggtggacagtgctacctggggatacaacagtttgcaacaagctgctgtagtttaaggctgacagaaatcatggagatgctttcagcactactaatcatgacattttcccctttcttcagaaacaggccttcctgtaaggtgtaacattactgaattttagcacaggtttaacaccttgctcagactttgatacgacgtatggaatatgttctcacaagttagcactttactctgctgatctggctccttaccygagcaatgcttaataggcataaattatcagaaaatgttccaagatgtgtgctatgttgtcgagctggtgggcaaaacataggccattagaagtgtagtcaggaataagttctcagccacaatagataagagatatgcaaagcagtttcttgtccttactatttaccttggttgagaagctgatggcagccctccaaagaaatgagtttaagctgaacactgaactcaatttaattagttataaggtattgacacggcagcaagaaccatcagatggaacttcagtgcttgatcaaacaca

SEQ ID NO: 47836 - DNA, 600 bp, Chicken  19866894292341_1
ttctgttctgttccattctaattacattgcattacactacatcacattacacagttccaggagaagattgtttcctctttttctcatcttctttctctcacagcaccaacaatgctgtttctccatactggataatcctcccccagtaaatggtattggccttgcatgatctgcatctgtggtccccagacactaaccacagtgtcaacctgctgttgcctatctccaccagctgccaggctgaaagactggggaggaggagaatagcactcacaaagttagtgggtgtctgagatgccrgaaaaggctcctgatcctttcttgtctcattccatatgcagcctgccatatgcccctctcatctagagactaagagaatttcctctgctctgcttacactggctcccacccttctgcggagtacggtgacccctcttttctgtcattgtggaagactacaatggtctgggaagagagtgtgagggaagaaggctggattctctagaaaaggaagtcaagaattggcaggtagtgccttggcaggacatcagcagaaaggcagtctggaaagaagagaagggaaggtagagaaacaaatgg

SEQ ID NO: 47837 - DNA, 599 bp, Chicken  19866894292346_1
  misc_feature (1)..(112): n is any nucleotide
nnnnnnnnnnnnnnnnnnnnnnnnnnnnnnnnnnnnnnnnnnnnnnnnnnnnnnnnnnnnnnnnnnnnnnnnnnnnnnnnnnnnnnnnnnnnnnnnnnnnnnnnnnnnnnnnaagtagatccatcatttggtttgtggtaggttttgaacttgtattaaagcatcaaaaattgagtgcttgcaactggaaataaagaaattcagtgcatatacaagaaaaagaaggaaaagtggtaaggtagcagcaattaagttcaatcagctcagtcacagcaatagttaacaatagcctgtgaacayacaacaggtcaagtacacatggttaacagcccatgcaaatttgcccaaagtatcttgctcctaaataaatgagggacaggcaaatgaaattaggtttatgatggtgtactgcaaggtaaaaatgcttgcagcactgtagttattgcagagaaatagatgctttatcatatgtttacatgcttgtacaatcagtttacttaataattattgtcaaaagtgtatcaatcatttttcctcattaggaagactaagtagggcckgaaaacaggatgaattctgaataagaggtagatgcaact

SEQ ID NO: 47838 - DNA, 600 bp, Chicken  19866894292346_2
agctcagtcacagcaatagttaacaatagcctgtgaacayacaacaggtcaagtacacatggttaacagcccatgcaaatttgcccaaagtatcttgctcctaaataaatgagggacaggcaaatgaaattaggtttatgatggtgtactgcaaggtaaaaatgcttgcagcactgtagttattgcagagaaatagatgctttatcatatgtttacatgcttgtacaatcagtttacttaataattattgtcaaaagtgtatcaatcatttttcctcattaggaagactaagtagggcckgaaaacaggatgaattctgaataagaggtagatgcaactgaataggaaatgaagttgaaaataacccttagataaggttcttcaagggataaatgaagatatgtttattagtagaactagacatgcttttaaatgacaaagacttcgggcaaatacattttatatattcttaaaactagttcattaaaawatttcctaaatgtgactcctcgataatattctaaagagcaacttyacatatgttattaaacaaaaaaatccccaaagaatgtatgtaatattacatgtgaacaagtgtta

SEQ ID NO: 47839 - DNA, 600 bp, Chicken  19866894292346_3
aaatagatgctttatcatatgtttacatgcttgtacaatcagtttacttaataattattgtcaaaagtgtatcaatcatttttcctcattaggaagactaagtagggcckgaaaacaggatgaattctgaataagaggtagatgcaactgaataggaaatgaagttgaaaataacccttagataaggttcttcaagggataaatgaagatatgtttattagtagaactagacatgcttttaaatgacaaagacttcgggcaaatacattttatatattcttaaaactagttcattaaaawatttcctaaatgtgactcctcgataatattctaaagagcaacttyacatatgttattaaacaaaaaaatccccaaagaatgtatgtaatattacatgtgaacaagtgttattttactacaaaataatccatccttacctgcttctattaatcatgtcttctaaattgtagactttattgggtttgtagtcagcaaaattcccaagaaaatctgaattttgagagggagaaaataccctgttatctcactgttccccttggtagggttctgtggcatgttgctttcatgtaacatacagca

SEQ ID NO: 47840 - DNA, 600 bp, Chicken  19866894292346_4
acttaataattattgtcaaaagtgtatcaatcatttttcctcattaggaagactaagtagggcckgaaaacaggatgaattctgaataagaggtagatgcaactgaataggaaatgaagttgaaaataacccttagataaggttcttcaagggataaatgaagatatgtttattagtagaactagacatgcttttaaatgacaaagacttcgggcaaatacattttatatattcttaaaactagttcattaaaawatttcctaaatgtgactcctcgataatattctaaagagcaacttyacatatgttattaaacaaaaaaatccccaaagaatgtatgtaatattacatgtgaacaagtgttattttactacaaaataatccatccttacctgcttctattaatcatgtcttctaaattgtagactttattgggtttgtagtcagcaaaattcccaagaaaatctgaattttgagagggagaaaataccctgttatctcactgttccccttggtagggttctgtggcatgttgctttcatgtaacatacagcagtggaggtccttcggtatgttttattctgtgtctttgggcaatag

SEQ ID NO: 47841 - DNA, 600 bp, Chicken  19866894292347_1
gcagcaattcgtgtgaacttgttatttatgctctcaaagaggcagttacatgtatatctcataattgactgcctactatgagatgtttgtaaatcacatgctgatgagcacacaattaaaagtgagtctgtgttaggctctagaatagacataatgtagatctaaagaagcctcccggaggagtcctgttcatattgtcagctttgccttgtttgaagtctcactcaagttattaggcagcagtgacttagcaaaatctatctaattgggaccagcatcccctctcttgactttatcaaygctagccaagtgtttgtacatccggcactctctcagatgctagtaatccataaataatgcttgcattgcttgcttcrcaaccatcttatgcagtgcttaattctctgtagtccttcttgtcactcaaattttgtctttggttctcattcacagtgattgtactttgccagcaaggtttgattcatttgagaatctttttcagtatttttttttctgtcaggtctcatactgattgactttgtgattggccttttgtctgaagtttattatttaccttttagtccacattgagaagtgcct

SEQ ID NO: 47842 - DNA, 600 bp, Chicken  19866894292347_2
atgagatgtttgtaaatcacatgctgatgagcacacaattaaaagtgagtctgtgttaggctctagaatagacataatgtagatctaaagaagcctcccggaggagtcctgttcatattgtcagctttgccttgtttgaagtctcactcaagttattaggcagcagtgacttagcaaaatctatctaattgggaccagcatcccctctcttgactttatcaaygctagccaagtgtttgtacatccggcactctctcagatgctagtaatccataaataatgcttgcattgcttgcttcrcaaccatcttatgcagtgcttaattctctgtagtccttcttgtcactcaaattttgtctttggttctcattcacagtgattgtactttgccagcaaggtttgattcatttgagaatctttttcagtatttttttttctgtcaggtctcatactgattgactttgtgattggccttttgtctgaagtttattatttaccttttagtccacattgagaagtgcctggttttgacttgtctgtctccactgcagtatcgtctttgtttgttcttgtccagtgttagcttcctataccagattc

SEQ ID NO: 47843 - DNA, 600 bp, Chicken  19866894292352_1
cttctaagacaggctttccttttctcaaatcatcctactatcacctcttgtttctacccatttcaattggaagtcttcatttccatcagatgactagaattatttgcaagattccagaagatatcaagtgttaatagtacctttcactgctttcccatttgaatgagaaattgcttgacacttcccagacctgtatcatcccatattctcaaagctgtattgcattgatacttagcatctgactacatcacacagttttctgctgttgtttccagatgatgagttctcagattatgatamatttgtattggtcctaaagtacaagctttctggtagtaaatttcctgattgttttcctgttttgagtgctaggaagagaaargagaggacttatcttcttccttcttgcagtcctcaatacctgktgtttctactggaattattatccttgtattgatacaatattccaaattcaatttgtcagccaagatcattaattaatattatttgtttaagtgtgtyaagtctgatttttttttccattatggtctgttttaatattagccccagtattctgtaccttatagattctactaatat

SEQ ID NO: 47844 - DNA, 600 bp, Chicken  19866894292352_2
ccatcagatgactagaattatttgcaagattccagaagatatcaagtgttaatagtacctttcactgctttcccatttgaatgagaaattgcttgacacttcccagacctgtatcatcccatattctcaaagctgtattgcattgatacttagcatctgactacatcacacagttttctgctgttgtttccagatgatgagttctcagattatgatamatttgtattggtcctaaagtacaagctttctggtagtaaatttcctgattgttttcctgttttgagtgctaggaagagaaargagaggacttatcttcttccttcttgcagtcctcaatacctgktgtttctactggaattattatccttgtattgatacaatattccaaattcaatttgtcagccaagatcattaattaatattatttgtttaagtgtgtyaagtctgatttttttttccattatggtctgttttaatattagccccagtattctgtaccttatagattctactaatattgggcaatttgaacttgctgtgcttgtcatctagctataaatttgacatactgtttaattatagatagttgagagtaactat

SEQ ID NO: 47845 - DNA, 600 bp, Chicken  19866894292352_3
aagtgttaatagtacctttcactgctttcccatttgaatgagaaattgcttgacacttcccagacctgtatcatcccatattctcaaagctgtattgcattgatacttagcatctgactacatcacacagttttctgctgttgtttccagatgatgagttctcagattatgatamatttgtattggtcctaaagtacaagctttctggtagtaaatttcctgattgttttcctgttttgagtgctaggaagagaaargagaggacttatcttcttccttcttgcagtcctcaatacctgktgtttctactggaattattatccttgtattgatacaatattccaaattcaatttgtcagccaagatcattaattaatattatttgtttaagtgtgtyaagtctgatttttttttccattatggtctgttttaatattagccccagtattctgtaccttatagattctactaatattgggcaatttgaacttgctgtgcttgtcatctagctataaatttgacatactgtttaattatagatagttgagagtaactattgtgcatcatataaaaaaaaaagtagcattatagtgcatatgt

SEQ ID NO: 47846 - DNA, 600 bp, Chicken  19866894292352_4
cattgatacttagcatctgactacatcacacagttttctgctgttgtttccagatgatgagttctcagattatgatamatttgtattggtcctaaagtacaagctttctggtagtaaatttcctgattgttttcctgttttgagtgctaggaagagaaargagaggacttatcttcttccttcttgcagtcctcaatacctgktgtttctactggaattattatccttgtattgatacaatattccaaattcaatttgtcagccaagatcattaattaatattatttgtttaagtgtgtyaagtctgatttttttttccattatggtctgttttaatattagccccagtattctgtaccttatagattctactaatattgggcaatttgaacttgctgtgcttgtcatctagctataaatttgacatactgtttaattatagatagttgagagtaactattgtgcatcatataaaaaaaaaagtagcattatagtgcatatgtcctaattccaagttacacgtgacagcaaaataagtatatataatccacaaggcagtatgtcatggttaaatgagccagcagttcttctgttaaattg

SEQ ID NO: 47847 - DNA, 600 bp, Chicken  19866894292359_1
taaaatacacatccatgtgcaagcattcgtgtgaagccgcgtgctttgtggggctgtgcagaagaacgggcccggtgcacggggagctccgtggctgcagggacttctggtcggccccggggtcacagaaacagccacacagcagcccgagttggagggaccaactctggatgctgacgcagacggagggggaatggtgccggatgctgcaaccacatcacggggtgtgctgcagctcccaggtggcacggggaacattggggagctgagtttgggtctgatcccaggtccggaggggcrcgrgctgaaggcagcaccacagcacccagcttctacactgagatctacacgctgcatgggcaaggtgtggctggggtcagcgtgagctgggggacccatgtggggtggcaatgagggggagagtgggagaggatgaggaagggcagggcttctcagagaaggagagagcaacagttccttgaacttctgtctgtagagcttctctggaagaagaaaggagaagaaaaatcaaatgtgctgatgacgctgttttggaagaggtggtcagcagcccatgggacccggcggcccagcacagag

SEQ ID NO: 47848 - DNA, 600 bp, Chicken  19866894292359_2
aatacacatccatgtgcaagcattcgtgtgaagccgcgtgctttgtggggctgtgcagaagaacgggcccggtgcacggggagctccgtggctgcagggacttctggtcggccccggggtcacagaaacagccacacagcagcccgagttggagggaccaactctggatgctgacgcagacggagggggaatggtgccggatgctgcaaccacatcacggggtgtgctgcagctcccaggtggcacggggaacattggggagctgagtttgggtctgatcccaggtccggaggggcrcgrgctgaaggcagcaccacagcacccagcttctacactgagatctacacgctgcatgggcaaggtgtggctggggtcagcgtgagctgggggacccatgtggggtggcaatgagggggagagtgggagaggatgaggaagggcagggcttctcagagaaggagagagcaacagttccttgaacttctgtctgtagagcttctctggaagaagaaaggagaagaaaaatcaaatgtgctgatgacgctgttttggaagaggtggtcagcagcccatgggacccggcggcccagcacagagctg

SEQ ID NO: 47849 - DNA, 600 bp, Chicken  19866894292361_1
aaaagctgctccatacatcagtgtgctctctgttccaactagcagctatgcctggagaggaagagacaattgtttatgtgactgagcagatcaggatctgcttttcatccaccctgagtaaattttgtaagtgaatctgaatggatgcaaggcttggcatgttatgggttttgaaaccctcagcttcttgagtaatctgattataagatactcagctattatttttaaaagaatatatttcttcaccgtggataagaatttgaaactgtggtcacatatgacccagaaacagaaagcaaycaaagaaatcaaacatctatttatttacttacctagcccagcatgactttaaggataatttcaagattttgraggctgacttaagacttctgaatgcttggtatttaccactgagttacatgaaggagcactggtgggggcagtcctgtgtcaagatgattttatatatctgtgggttctgtttcagtcaggatcatgggtttccagactcacatttattttcacagggaaagccaacagagtttagtgctttcaggttttataaactctacaggctcatatggagctagtcctccagct

SEQ ID NO: 47850 - DNA, 600 bp, Chicken  19866894292361_2
tttatgtgactgagcagatcaggatctgcttttcatccaccctgagtaaattttgtaagtgaatctgaatggatgcaaggcttggcatgttatgggttttgaaaccctcagcttcttgagtaatctgattataagatactcagctattatttttaaaagaatatatttcttcaccgtggataagaatttgaaactgtggtcacatatgacccagaaacagaaagcaaycaaagaaatcaaacatctatttatttacttacctagcccagcatgactttaaggataatttcaagattttgraggctgacttaagacttctgaatgcttggtatttaccactgagttacatgaaggagcactggtgggggcagtcctgtgtcaagatgattttatatatctgtgggttctgtttcagtcaggatcatgggtttccagactcacatttattttcacagggaaagccaacagagtttagtgctttcaggttttataaactctacaggctcatatggagctagtcctccagctttccagtgtacaaagaaaactttgtgtaacaaaatccatgagcagatagaaaagcctctatgtcccaaagag

SEQ ID NO: 47851 - DNA, 600 bp, Chicken  19866894292361_3
gtatttaccactgagttacatgaaggagcactggtgggggcagtcctgtgtcaagatgattttatatatctgtgggttctgtttcagtcaggatcatgggtttccagactcacatttattttcacagggaaagccaacagagtttagtgctttcaggttttataaactctacaggctcatatggagctagtcctccagctttccagtgtacaaagaaaactttgtgtaacaaaatccatgagcagatagaaaagcctctatgtcccaaagagctgtaaaacccaaagatctgtaaaaaamcactgattaaaatctgccccagcatcaaaagctgaacatgaaagtgaagaagataaatttacaatgaaaatgtccaatttgattattttcacaaatgtaaagacacccagcaacctgcttttgattggacattaatcaggagtatttttgtcctgcagtcacctcatacaatggagayttatagagtttactcttttctacatcactaaccctaaatgaatgctgcagacttcatctgttcctccatagttgyagatcctgatgatgtaaatttcttcttctccctgcactgcacacaga

SEQ ID NO: 47852 - DNA, 600 bp, Chicken  19866894292361_4
atatggagctagtcctccagctttccagtgtacaaagaaaactttgtgtaacaaaatccatgagcagatagaaaagcctctatgtcccaaagagctgtaaaacccaaagatctgtaaaaaamcactgattaaaatctgccccagcatcaaaagctgaacatgaaagtgaagaagataaatttacaatgaaaatgtccaatttgattattttcacaaatgtaaagacacccagcaacctgcttttgattggacattaatcaggagtatttttgtcctgcagtcacctcatacaatggagayttatagagtttactcttttctacatcactaaccctaaatgaatgctgcagacttcatctgttcctccatagttgyagatcctgatgatgtaaatttcttcttctccctgcactgcacacagacaaatacattggcctctctttttcccagtttatgttgctacctctgtggccagcccataactcctatttttttatgaaaccttgggstgcagccacaaaaattttcaaatatgccagcctggttctcaccccacagctcccacttttgaacagtattaactgtggttgatactaacag

SEQ ID NO: 47853 - DNA, 600 bp, Chicken  19866894292361_5
gcctctatgtcccaaagagctgtaaaacccaaagatctgtaaaaaamcactgattaaaatctgccccagcatcaaaagctgaacatgaaagtgaagaagataaatttacaatgaaaatgtccaatttgattattttcacaaatgtaaagacacccagcaacctgcttttgattggacattaatcaggagtatttttgtcctgcagtcacctcatacaatggagayttatagagtttactcttttctacatcactaaccctaaatgaatgctgcagacttcatctgttcctccatagttgyagatcctgatgatgtaaatttcttcttctccctgcactgcacacagacaaatacattggcctctctttttcccagtttatgttgctacctctgtggccagcccataactcctatttttttatgaaaccttgggstgcagccacaaaaattttcaaatatgccagcctggttctcaccccacagctcccacttttgaacagtattaactgtggttgatactaacagtgcattttcccagtggagactgggtgctttggatctaaaaagaactgagaagtccccgtgtgatctcactgcagt

SEQ ID NO: 47854 - DNA, 600 bp, Chicken  19866894292361_6
ttcacaaatgtaaagacacccagcaacctgcttttgattggacattaatcaggagtatttttgtcctgcagtcacctcatacaatggagayttatagagtttactcttttctacatcactaaccctaaatgaatgctgcagacttcatctgttcctccatagttgyagatcctgatgatgtaaatttcttcttctccctgcactgcacacagacaaatacattggcctctctttttcccagtttatgttgctacctctgtggccagcccataactcctatttttttatgaaaccttgggstgcagccacaaaaattttcaaatatgccagcctggttctcaccccacagctcccacttttgaacagtattaactgtggttgatactaacagtgcattttcccagtggagactgggtgctttggatctaaaaagaactgagaagtccccgtgtgatctcactgcagtaggatgtcctcagttgagttcattctttctcacttataccagtgaaaccctcaggatctatcagggagaactgagagcaattcaaaagcagaaatatgagctaagcacatcacagaagtcagtaaatgcaaaaa

SEQ ID NO: 47855 - DNA, 551 bp, Chicken  19866894292363_1
taataagtttttgtatttttgtatatgtttgcagacaacgccttaaaaacgactcccttttaactaactcttattcacaggcctttcctcccggtgttcttcaccctttaccaaagagacaagcacttgaaaaaagcaatggtgccagtgccgttttcaatcccagtgtcttgcactatcaacaggctcttgccaatgctcagttgcagcaacatgcagcgttcatcccgacaggtatgtcgcacccgcaccgaacccaccttgtgctaggtagcctccgcagcgagcagttgtgcttamcgaagggttacgctccccgccctgcttcagatgaggcctgcacagataatttccatgctgatttaattccttccgcaaagcgtgaggggtcaggctgaaactccaacatgccgttagactgcttgtcattttcatagcctccattatcgcccacagtttgcccttttttcctacattgaattggctgtattttgacttcacctgctggagctttcctagggaatgagaggatgaaacagtgctaggaaaag

SEQ ID NO: 47856 - DNA, 599 bp, Chicken  19866894292365_1
  misc_feature (1)..(124): n is any nucleotide
nnnnnnnnnnnnnnnnnnnnnnnnnnnnnnnnnnnnnnnnnnnnnnnnnnnnnnnnnnnnnnnnnnnnnnnnnnnnnnnnnnnnnnnnnnnnnnnnnnnnnnnnnnnnnnnnnnnnnnnnnnnntttgcctgttttatttaccagccctttgtgcttctgtgaggctctgtttgcccatggggacaacatactgcaagtaaacgctgtcatgcccactgcttcctcttctttcctgtctacactgtacccatgacagaagagcaaagagtcagctccaaatgaaacagcaaaaaagcaartcttctctaaagtaaagttgtgctgacaaggagtgtcctctccctacgtgctttgaaagctggcatcrtgttcttgctaggaagacactgaagtacaaaggtttccgtcccttgtaataactayccccttgtgcacacagtgttacagcttttggtctaaggccatgcatatgaaagcctatggactgatgcgcctttcttctctggatgggacctcactgctggccagcagtccagcacaatgctttgtagctggggagctcattatatctagccccattaaatctgtgatgaaagca

SEQ ID NO: 47857 - DNA, 599 bp, Chicken  19866894292365_2
  misc_feature (1)..(56): n is any nucleotide
nnnnnnnnnnnnnnnnnnnnnnnnnnnnnnnnnnnnnnnnnnnnnnnnnnnnnnnntttgcctgttttatttaccagccctttgtgcttctgtgaggctctgtttgcccatggggacaacatactgcaagtaaacgctgtcatgcccactgcttcctcttctttcctgtctacactgtacccatgacagaagagcaaagagtcagctccaaatgaaacagcaaaaaagcaartcttctctaaagtaaagttgtgctgacaaggagtgtcctctccctacgtgctttgaaagctggcatcrtgttcttgctaggaagacactgaagtacaaaggtttccgtcccttgtaataactayccccttgtgcacacagtgttacagcttttggtctaaggccatgcatatgaaagcctatggactgatgcgcctttcttctctggatgggacctcactgctggccagcagtccagcacaatgctttgtagctggggagctcattatatctagccccattaaatctgtgatgaaagcagacatatgatcggtagcwcgttgctctggtctgtcttgtgctattatcaggcatagctatagggaack

SEQ ID NO: 47858 - DNA, 600 bp, Chicken  19866894292365_3
tttgcctgttttatttaccagccctttgtgcttctgtgaggctctgtttgcccatggggacaacatactgcaagtaaacgctgtcatgcccactgcttcctcttctttcctgtctacactgtacccatgacagaagagcaaagagtcagctccaaatgaaacagcaaaaaagcaartcttctctaaagtaaagttgtgctgacaaggagtgtcctctccctacgtgctttgaaagctggcatcrtgttcttgctaggaagacactgaagtacaaaggtttccgtcccttgtaataactayccccttgtgcacacagtgttacagcttttggtctaaggccatgcatatgaaagcctatggactgatgcgcctttcttctctggatgggacctcactgctggccagcagtccagcacaatgctttgtagctggggagctcattatatctagccccattaaatctgtgatgaaagcagacatatgatcggtagcwcgttgctctggtctgtcttgtgctattatcaggcatagctatagggaackgagatgtacatctaaygtggattttgagctccacctagccctagtgtctagtgttcc

SEQ ID NO: 47859 - DNA, 498 bp, Chicken  19866894292365_4
ttgtgctgacaaggagtgtcctctccctacgtgctttgaaagctggcatcrtgttcttgctaggaagacactgaagtacaaaggtttccgtcccttgtaataactayccccttgtgcacacagtgttacagcttttggtctaaggccatgcatatgaaagcctatggactgatgcgcctttcttctctggatgggacctcactgctggccagcagtccagcacaatgctttgtagctggggagctcattatatctagccccattaaatctgtgatgaaagcagacatatgatcggtagcwcgttgctctggtctgtcttgtgctattatcaggcatagctatagggaackgagatgtacatctaaygtggattttgagctccacctagccctagtgtctagtgttccagatctcatccctttgatttccctccagatctcaaggaggtcccaacaaacattgagtcacatttccagaccgacagccaattaattccag

SEQ ID NO: 47860 - DNA, 448 bp, Chicken  19866894292365_5
rtgttcttgctaggaagacactgaagtacaaaggtttccgtcccttgtaataactayccccttgtgcacacagtgttacagcttttggtctaaggccatgcatatgaaagcctatggactgatgcgcctttcttctctggatgggacctcactgctggccagcagtccagcacaatgctttgtagctggggagctcattatatctagccccattaaatctgtgatgaaagcagacatatgatcggtagcwcgttgctctggtctgtcttgtgctattatcaggcatagctatagggaackgagatgtacatctaaygtggattttgagctccacctagccctagtgtctagtgttccagatctcatccctttgatttccctccagatctcaaggaggtcccaacaaacattgagtcacatttccagaccgacagccaattaattccag

SEQ ID NO: 47861 - DNA, 432 bp, Chicken  19866894292365_6
gacactgaagtacaaaggtttccgtcccttgtaataactayccccttgtgcacacagtgttacagcttttggtctaaggccatgcatatgaaagcctatggactgatgcgcctttcttctctggatgggacctcactgctggccagcagtccagcacaatgctttgtagctggggagctcattatatctagccccattaaatctgtgatgaaagcagacatatgatcggtagcwcgttgctctggtctgtcttgtgctattatcaggcatagctatagggaackgagatgtacatctaaygtggattttgagctccacctagccctagtgtctagtgttccagatctcatccctttgatttccctccagatctcaaggaggtcccaacaaacattgagtcacatttccagaccgacagccaattaattccag

SEQ ID NO: 47862 - DNA, 600 bp, Chicken  19866894292366_1
ttctttatttttttcacctcctttctgagatgaggaaaacgcctgtttttctgccatagttcttcaattcctagttccaatccctcagcttgcaaaataagcagtcaccgttactccatccatttgtatcactgacaacctaaaaccacctcaacaagagaaggaaaaagtcatgaaacacttcagccccaacctcatgagcacagactgcagtgagcctcaaccaggcagagcccagggaggaagaggaggagaggagccaagggctgcagcaggtgcagagtttccattcacaagcaygctgaccctctgtaggagcatggcaggaatttcaaatgggattagccacccagacaagagaaaggtcatacttgacatttcccctggaaattctaatgcaaatagacctctgatactcatgacattttttcacacacatctaatagccatacatactgtaaaaggaaaatgataaaatgtgatgactaatttatgtaaatctcataaaggcaataacattaagggctgactagctagaaacattagtcaggcaaagaagcacaacattattgtgctcctcttgtatttgctactatttga

SEQ ID NO: 47863 - DNA, 600 bp, Chicken  19866894292373_1
gtgcaatttaaaaatacctggaaatgccactgtttctgtctttggtggtagcaaagcccttttgttctctgccagtttccttttgtttgaaagagggactgatcggtcagttctgtgatgaatttgtccagtctgtagaactgtaactgtttctgtcctggggacagtactgcagtacggcctgttaatgacagcccctgaccacgtgaactgctttcataaaggtgcagtagttctgtagagcaaagcaaggcaatggtggggactgctgaaaaatggtgttttatggatgagaatttsttctgtcaaacagtgtctttttgctgtttgaatctctgataatttctatggaaataaacaggaggcattactttcagagagacctacacacaagcagaattctgcaaggagcagggaatatccagcactctctggagtgaggtgtgcagactacttttgctgctgtattcataggaatgatctttgcttgtataaataatttcctcaaagtcagttctcttgatcaaagcagagatataaaaatataaaaagagaaagtgagttctgtcctgatgatgtatgtgttttgaagtgttagga

SEQ ID NO: 47864 - DNA, 599 bp, Chicken  19866894292377_1
  misc_feature (1)..(61): n is any nucleotide
nnnnnnnnnnnnnnnnnnnnnnnnnnnnnnnnnnnnnnnnnnnnnnnnnnnnnnnnnnnnnaatgaggaaacagacaagttattttatagctggttctcaccactataatattctcattcccattgaactgtgcattcaagcaaaaacaagaacaaacactaacagctcccattcccacccgcctactagacaggaattcacagatgcttcattatatacctcccattggcactggtgaggcagaagatttgtatagaaaggagagggagactcagacaaaacacaagattcattgtaaytgtygtaatgcataattccatcagctaatgtcaaccaaaacattgtgctacttcaagcttttcctcaccattagatgcaccagcactgtcaagagcatcttaagaaccyttcctagattacacccaggacagatacatgagcttaaagaacacaggaaaggaaaagaaatcataaccattttatgtaataggaattttattttatacataaataataacaagactgaagaattttgagacttgctacttgcaatgctgatcctgcaacgggacaagtgtggcagacttaactcccactg

SEQ ID NO: 47865 - DNA, 599 bp, Chicken  19866894292377_2
  misc_feature (1)..(57): n is any nucleotide
nnnnnnnnnnnnnnnnnnnnnnnnnnnnnnnnnnnnnnnnnnnnnnnnnnnnnnnnnaatgaggaaacagacaagttattttatagctggttctcaccactataatattctcattcccattgaactgtgcattcaagcaaaaacaagaacaaacactaacagctcccattcccacccgcctactagacaggaattcacagatgcttcattatatacctcccattggcactggtgaggcagaagatttgtatagaaaggagagggagactcagacaaaacacaagattcattgtaaytgtygtaatgcataattccatcagctaatgtcaaccaaaacattgtgctacttcaagcttttcctcaccattagatgcaccagcactgtcaagagcatcttaagaaccyttcctagattacacccaggacagatacatgagcttaaagaacacaggaaaggaaaagaaatcataaccattttatgtaataggaattttattttatacataaataataacaagactgaagaattttgagacttgctacttgcaatgctgatcctgcaacgggacaagtgtggcagacttaactcccactgcaga

SEQ ID NO: 47866 - DNA, 600 bp, Chicken  19866894292377_3
tattctcattcccattgaactgtgcattcaagcaaaaacaagaacaaacactaacagctcccattcccacccgcctactagacaggaattcacagatgcttcattatatacctcccattggcactggtgaggcagaagatttgtatagaaaggagagggagactcagacaaaacacaagattcattgtaaytgtygtaatgcataattccatcagctaatgtcaaccaaaacattgtgctacttcaagcttttcctcaccattagatgcaccagcactgtcaagagcatcttaagaaccyttcctagattacacccaggacagatacatgagcttaaagaacacaggaaaggaaaagaaatcataaccattttatgtaataggaattttattttatacataaataataacaagactgaagaattttgagacttgctacttgcaatgctgatcctgcaacgggacaagtgtggcagacttaactcccactgcagagcagaggacaaggtctcaagatcgacccaaaatacatagtgtcctttcacaaatgccattccagaagcccaagcagcacatcggcagtctttcctgaggcagaagg

SEQ ID NO: 47867 - DNA, 600 bp, Chicken  19866894292377_4
ctaacattttgtgtaggaatttaagtattcatatttctgacatgacagcactaatcatagaacggcttaggttggaagggaccccaaggatcatcaggttccctggttcctatagctgtgctgtatggaaatataaaagagaaagaacatttcatagcaacaaagcaacaaaatcaactggcatcttttgtaataaatcagcgttctcaaatggaattctatttcattcccatcgggtatactttctctaatctgatttacactggtataaatctagggtaatttaattggaacaaataraattagataaaaatagaacctgaacaggttaaaagtgatagatgccatggaaaaacacaaactcttrtcgcctccataaagttcaccagcacaacaaagggataaaattaaagcttgtctctcgtctctcccattgatgggatggatgcgatttgggctgtagttcgcatataactgctaactacaaacatgcactaagggaagtgcaatgctgctggttttttttggaacggagaaacatgttactgcttccaagccaaagcaattttgtccttggctgatcagtcaaaattcaaagac

SEQ ID NO: 47868 - DNA, 600 bp, Chicken  19866894292377_5
taggttggaagggaccccaaggatcatcaggttccctggttcctatagctgtgctgtatggaaatataaaagagaaagaacatttcatagcaacaaagcaacaaaatcaactggcatcttttgtaataaatcagcgttctcaaatggaattctatttcattcccatcgggtatactttctctaatctgatttacactggtataaatctagggtaatttaattggaacaaataraattagataaaaatagaacctgaacaggttaaaagtgatagatgccatggaaaaacacaaactcttrtcgcctccataaagttcaccagcacaacaaagggataaaattaaagcttgtctctcgtctctcccattgatgggatggatgcgatttgggctgtagttcgcatataactgctaactacaaacatgcactaagggaagtgcaatgctgctggttttttttggaacggagaaacatgttactgcttccaagccaaagcaattttgtccttggctgatcagtcaaaattcaaagacccatgctgtgacaaatccttctaaggaaaatgagaccgcatttactttataaccagattcaactagg

SEQ ID NO: 47869 - DNA, 600 bp, Chicken  19866894292381_1
gtgctatgctgtgccgtgctatactatactatgctaggccgccggcagcgcgggcccctcagcacagggagggcagcggcacccccgccctcaggcaccgccctcagctttaaagaagaaaatctgtgtaggtattccgtagctgctcccatgatgtgagatcacaagtccttttgcctgtgtaagagctgcggctgcttctggcagatcggagaatcacagaatcattaaggtgggaacaaccaccaaggtcatgctagtccgaccatcgtcctcgcgagggctgccctcgctgctgcrtctccattgttcttgaacacctccagggacggtgatccaccacctccctgagcagcccactccaatatctcaccaatttgagaakaaatgtttcctaatatccaacctgaacctcctctggcacaacttgaggccatcacctctcatcctatcgctgttacccggggggcagaggccgacccccacctcaccacaacctcgtttcaggagttgtagagagcagtgaggtctcccctgagcctcctctgctccagactgaacaatcccagctccctcagctgctccccataagacctgtac

SEQ ID NO: 47870 - DNA, 591 bp, Chicken  19866894292381_2
cgccctcaggcaccgccctcagctttaaagaagaaaatctgtgtaggtattccgtagctgctcccatgatgtgagatcacaagtccttttgcctgtgtaagagctgcggctgcttctggcagatcggagaatcacagaatcattaaggtgggaacaaccaccaaggtcatgctagtccgaccatcgtcctcgcgagggctgccctcgctgctgcrtctccattgttcttgaacacctccagggacggtgatccaccacctccctgagcagcccactccaatatctcaccaatttgagaakaaatgtttcctaatatccaacctgaacctcctctggcacaacttgaggccatcacctctcatcctatcgctgttacccggggggcagaggccgacccccacctcaccacaacctcgtttcaggagttgtagagagcagtgaggtctcccctgagcctcctctgctccagactgaacaatcccagctccctcagctgctccccataagacctgtactccagacccttcacagcttcgttagatgtacctgagataaatggaaaacagtgtttcctcataaactatcgtgtat

SEQ ID NO: 47871 - DNA, 600 bp, Chicken  19866894292391_1
gtagtcagggtgtattatcactgaggggctgtgtagaatgaggaatacagttgtcttttatttaattatttgctgcatctttatataataaaccgttgagattttgggttaaacgtttatttgttcactgtacaacatatatattagaggagttatgggaataatcagatctccagagtgccaacaagattagtacaagagatgaatatgtgatgtgggaattttatggcaaatgagtgtcacacatgacagctttgaactgactcagagactgtgttctgttactcacctgcttactgraggttaccatcttatctctgtaaaatggtgttwgtgacgcaagaacaccattaaaaacccctgtatttatgtgyagytgtggtaatacatgtgcaagataaatatcttgtgctaatgaattatgtaatgaagattttgtggttctttctcatcagtctgtcctgtaacattggaaccttttcaaaatgggaaaacctatatcttaacctcaaggaatatatatacttgtgagatttttcttccacgtttctagataataaataaacatgtattctggcactgtctctactagtcccaacc

SEQ ID NO: 47872 - DNA, 600 bp, Chicken  19866894292391_2
tagaatgaggaatacagttgtcttttatttaattatttgctgcatctttatataataaaccgttgagattttgggttaaacgtttatttgttcactgtacaacatatatattagaggagttatgggaataatcagatctccagagtgccaacaagattagtacaagagatgaatatgtgatgtgggaattttatggcaaatgagtgtcacacatgacagctttgaactgactcagagactgtgttctgttactcacctgcttactgraggttaccatcttatctctgtaaaatggtgttwgtgacgcaagaacaccattaaaaacccctgtatttatgtgyagytgtggtaatacatgtgcaagataaatatcttgtgctaatgaattatgtaatgaagattttgtggttctttctcatcagtctgtcctgtaacattggaaccttttcaaaatgggaaaacctatatcttaacctcaaggaatatatatacttgtgagatttttcttccacgtttctagataataaataaacatgtattctggcactgtctctactagtcccaacctctcacacaggtgagtgatgttgagcaagttct

SEQ ID NO: 47873 - DNA, 600 bp, Chicken  19866894292391_3
gcatctttatataataaaccgttgagattttgggttaaacgtttatttgttcactgtacaacatatatattagaggagttatgggaataatcagatctccagagtgccaacaagattagtacaagagatgaatatgtgatgtgggaattttatggcaaatgagtgtcacacatgacagctttgaactgactcagagactgtgttctgttactcacctgcttactgraggttaccatcttatctctgtaaaatggtgttwgtgacgcaagaacaccattaaaaacccctgtatttatgtgyagytgtggtaatacatgtgcaagataaatatcttgtgctaatgaattatgtaatgaagattttgtggttctttctcatcagtctgtcctgtaacattggaaccttttcaaaatgggaaaacctatatcttaacctcaaggaatatatatacttgtgagatttttcttccacgtttctagataataaataaacatgtattctggcactgtctctactagtcccaacctctcacacaggtgagtgatgttgagcaagttctacatctgcctgttctatgctctgccacttagcctctgcagg

SEQ ID NO: 47874 - DNA, 600 bp, Chicken  19866894292391_4
tctttatataataaaccgttgagattttgggttaaacgtttatttgttcactgtacaacatatatattagaggagttatgggaataatcagatctccagagtgccaacaagattagtacaagagatgaatatgtgatgtgggaattttatggcaaatgagtgtcacacatgacagctttgaactgactcagagactgtgttctgttactcacctgcttactgraggttaccatcttatctctgtaaaatggtgttwgtgacgcaagaacaccattaaaaacccctgtatttatgtgyagytgtggtaatacatgtgcaagataaatatcttgtgctaatgaattatgtaatgaagattttgtggttctttctcatcagtctgtcctgtaacattggaaccttttcaaaatgggaaaacctatatcttaacctcaaggaatatatatacttgtgagatttttcttccacgtttctagataataaataaacatgtattctggcactgtctctactagtcccaacctctcacacaggtgagtgatgttgagcaagttctacatctgcctgttctatgctctgccacttagcctctgcaggaag

SEQ ID NO: 47875 - DNA, 600 bp, Chicken  19866894292392_1
ctgacaaaagcaagcttttttaatttgatttctaccctcattggtacagtagagggggcacagcaaagacagggacagcagtaggattgtgcaagcatcaacaagatgataaatggatccatcagttttccttgctgggaataataataaagagaagcccgatttttctcccagacctcagcaggagttttgcaaggtagaaatcgggcatgggaaggaaggaggttaggaggaagaggtggaaagttgttcatcagtagaagagagatacaactatgagcattcgatgtaccaccatcrttcctctgtataacaccatgtcagtgttgctttacatagaagagacactgaagcagatccctccacaaaccatacatctgacaaatgggcatctcccagcagtgcctgtgtgtgatgtgatgctaaggaaggcgcagaggcggtcaccccgtgtgaatccaaccacctgcctgcgtcttctgcaatgaggaaggaagggaaacaagtgaaggatcgaaaggggaagagctgggtctcttggtattcgctagctatacggtgcctgccatgaacgagtcagcacttgttagcacttcctac

SEQ ID NO: 47876 - DNA, 600 bp, Chicken  19866894292395_1
cacagaatctttaacattgctaaaagacctcctaaagaaaggtgacaggtaattcaggtctgccatgagtaaaaaggtgacaaacggcaattgcaggaaggctaatgcagtatgatacagtcatatgaaaaatttgaagttcctggcaatgctgatacgagaccattcaatctgaatcttagaaaatctttctctgctgctgtatgtcataatatggggaagaactatgaaactggctttgaaccagtgaaatggtgaaaatgaatggtgaaaaaacaaaaaaagttttcattgcctggytgacaatctcattttcacaaactccttccccatggtcgcagatgcacaagattccagtctacctctcaarccaggggcgaactacattgacctgagatagagactggggatccaccatttaaaatttcttaaaagaactgccagaacctatctcccttcgaaggaagagaaggtgtatgcatgtgggcttgtgatggtcagtagcaatctggtgttctttgagcaaattaaacacactgcaggactgccaaatacagatggaccaaagggaaatgtccagatgtaactgcagatgtcata

SEQ ID NO: 47877 - DNA, 600 bp, Chicken  19866894292395_2
aaaaaggtgacaaacggcaattgcaggaaggctaatgcagtatgatacagtcatatgaaaaatttgaagttcctggcaatgctgatacgagaccattcaatctgaatcttagaaaatctttctctgctgctgtatgtcataatatggggaagaactatgaaactggctttgaaccagtgaaatggtgaaaatgaatggtgaaaaaacaaaaaaagttttcattgcctggytgacaatctcattttcacaaactccttccccatggtcgcagatgcacaagattccagtctacctctcaarccaggggcgaactacattgacctgagatagagactggggatccaccatttaaaatttcttaaaagaactgccagaacctatctcccttcgaaggaagagaaggtgtatgcatgtgggcttgtgatggtcagtagcaatctggtgttctttgagcaaattaaacacactgcaggactgccaaatacagatggaccaaagggaaatgtccagatgtaactgcagatgtcataggaaattaagccattcacttgtgtttgtgattcaagaagttctatttctaggtcagatgacagcttcgtt

SEQ ID NO: 47878 - DNA, 600 bp, Chicken  19866894292397_1
atatttattttcagagtacgcagcttttatataactttgcctatctgtgaaccctgctcttgctaagagtcttataggagaacaatttgtgaaaataagccgttccctccttggctgcagctcaaagaaaataggcaggcagagtgttttttctgtgaaaaatatgtacttacaataagttgtctattttagataccatgctgtgaatgactgtgcttgaatgaattgccatcaaagaaccccgagaccctgcatcaattctttctcagtctcattaaatatagcagtagtctgctgtgygagcatctccagatgaatgtcatacccttttctcctgccatcaagagagacagggtgggatcctaaagctgcgtacagccaaaccaatcaaacagactattttaacctaaattacaaatgtagtgatgcttcagagtaagtagtccatttcccaaattaagttgcctttaaagtaaagcaggactgagctgttctcaagtatcttgagaaagtgcaggtctgcctttctttgggaggctttctgataggcaggtatctttgataacaagcctgcaactgttaacataatagctaaatcac

SEQ ID NO: 47879 - DNA, 600 bp, Chicken  19866894292399_1
tattccatgtattgactctaaagaatatgaatgtcatggaactgattttccctttttaaggaaagactgagatacagtatttgtcagcctttgcaaaaacattacgatttttcctcttccccagtaaaataacaattaggaaaccaaatgattcctgtgcaaaaaaacaaataatagctattgctcacatgctagccaggctgaccattttctgttcatatggaaaaacttaatgtcaccatctatatattttttttcctcctattactaacgtggtaaaattaccagcagcttggcaaygaaagtggtttaccttgccaggtacaatggtggtttggttcacataacagtactgagtctagagcaaaatccttttgagttttgaagtacactagcagctgcacccactttttcatcctatagaacaaagtatatcatgatagaaaaccatcaacaacaaaacactattaaaagtcaaacagcaatataattaattccaacatatttcagtacttgacttgaaattactggcactaacacattacaattttaaatgaattttcattctgattccttttaaaaatataattgtgcacacct

SEQ ID NO: 47880 - DNA, 600 bp, Chicken  19866894292403_1
ttagaaatataaatatttatggacagagcagtggctgactggcaccatgtatcatctaagaaacgcatgcacactggacatatgagatggaatttcttttactgtccgtaagaattgcctaaaggagactgaatatactgttccttatggtcattattgtatatgtacataatcaataactcagtatatgtcacttccagcctccacagcaggagacaaacgtaaaaatcctatgaatgctgagggctattcagtatgaaatgggtgcatttcctgttggtatttcaaagcgtaaacatwtagaaaatcctatgtattggagaggaacttgtcctgagtaactccagagctcccttctattaattccagtctacccttatgcaaagcatacacaagacctcaaagaaacactgttactgtgtatgggagagaaagagctttttttgaagactgcctcctttaagataatatttatcttaaaggcctttgtgtttacttcctttggatcactttaagttgtattttttgtttgtttgtttgtttttaaacaatactagtatcaggaccactcatgaatcttagaaagtagagagaaacaca

SEQ ID NO: 47881 - DNA, 600 bp, Chicken  19866894292406_1
tatgcaagtggcatttgcagtttggtaaaaggaattaatatagtctcaaaactgtcaggcttttttcacgatatcttaacaggagtgttttcagggaataaatggaaacatgaagatttttctttttggaattggattgtactttcttactcaaaaagatatagagaatgtatccgattggctgtgtttaattttgcattgcataataagtcacctgctggagtttctcacagcttttccattcacttgtatagaggctaatcctaactgagaaaggaacaagtaattctgtgaccaggrgaacktacgaagctcygttccctgtggctccctcccatgtgttcctttagtgcctaatagcttggttgagttcacgctgcaggttctcccacagtaagatgcccagattagtttccttccgttggactttctgctctcacagaacaagaagaaatttacattgcatttaacatgcaaataaaagttttgtttctycaaataaataaaaccattggtgctttagagcagcattttactttctccccattcactgatgatcataaatgccatcagatttgyagtagtagtacttaagtacct

SEQ ID NO: 47882 - DNA, 600 bp, Chicken  19866894292406_2
aagtggcatttgcagtttggtaaaaggaattaatatagtctcaaaactgtcaggcttttttcacgatatcttaacaggagtgttttcagggaataaatggaaacatgaagatttttctttttggaattggattgtactttcttactcaaaaagatatagagaatgtatccgattggctgtgtttaattttgcattgcataataagtcacctgctggagtttctcacagcttttccattcacttgtatagaggctaatcctaactgagaaaggaacaagtaattctgtgaccaggrgaacktacgaagctcygttccctgtggctccctcccatgtgttcctttagtgcctaatagcttggttgagttcacgctgcaggttctcccacagtaagatgcccagattagtttccttccgttggactttctgctctcacagaacaagaagaaatttacattgcatttaacatgcaaataaaagttttgtttctycaaataaataaaaccattggtgctttagagcagcattttactttctccccattcactgatgatcataaatgccatcagatttgyagtagtagtacttaagtacctgtagt

SEQ ID NO: 47883 - DNA, 600 bp, Chicken  19866894292406_3
gcagtttggtaaaaggaattaatatagtctcaaaactgtcaggcttttttcacgatatcttaacaggagtgttttcagggaataaatggaaacatgaagatttttctttttggaattggattgtactttcttactcaaaaagatatagagaatgtatccgattggctgtgtttaattttgcattgcataataagtcacctgctggagtttctcacagcttttccattcacttgtatagaggctaatcctaactgagaaaggaacaagtaattctgtgaccaggrgaacktacgaagctcygttccctgtggctccctcccatgtgttcctttagtgcctaatagcttggttgagttcacgctgcaggttctcccacagtaagatgcccagattagtttccttccgttggactttctgctctcacagaacaagaagaaatttacattgcatttaacatgcaaataaaagttttgtttctycaaataaataaaaccattggtgctttagagcagcattttactttctccccattcactgatgatcataaatgccatcagatttgyagtagtagtacttaagtacctgtagttgcctttagtt

SEQ ID NO: 47884 - DNA, 600 bp, Chicken  19866894292406_4
gcattgcataataagtcacctgctggagtttctcacagcttttccattcacttgtatagaggctaatcctaactgagaaaggaacaagtaattctgtgaccaggrgaacktacgaagctcygttccctgtggctccctcccatgtgttcctttagtgcctaatagcttggttgagttcacgctgcaggttctcccacagtaagatgcccagattagtttccttccgttggactttctgctctcacagaacaagaagaaatttacattgcatttaacatgcaaataaaagttttgtttctycaaataaataaaaccattggtgctttagagcagcattttactttctccccattcactgatgatcataaatgccatcagatttgyagtagtagtacttaagtacctgtagttgcctttagttttgcatttggtctttctgaaatacagcagtaatttygagcatggtgaagagggaaataamcattgtttcctcagatatcaatgtattgtaactggggaaaccattggttttctaggataatcaggctgtttggtgaggagatgatgtattctcaacatttgttagaaaggatttttgga

SEQ ID NO: 47885 - DNA, 600 bp, Chicken  19866894292406_5
caagtaattctgtgaccaggrgaacktacgaagctcygttccctgtggctccctcccatgtgttcctttagtgcctaatagcttggttgagttcacgctgcaggttctcccacagtaagatgcccagattagtttccttccgttggactttctgctctcacagaacaagaagaaatttacattgcatttaacatgcaaataaaagttttgtttctycaaataaataaaaccattggtgctttagagcagcattttactttctccccattcactgatgatcataaatgccatcagatttgyagtagtagtacttaagtacctgtagttgcctttagttttgcatttggtctttctgaaatacagcagtaatttygagcatggtgaagagggaaataamcattgtttcctcagatatcaatgtattgtaactggggaaaccattggttttctaggataatcaggctgtttggtgaggagatgatgtattctcaacatttgttagaaaggatttttggaatcctgggatttggcagccttcacacctttgacaggtgaggcagatagcactgggatccaatttggctcactactaaagaggga

SEQ ID NO: 47886 - DNA, 600 bp, Chicken  19866894292406_6
cctaatagcttggttgagttcacgctgcaggttctcccacagtaagatgcccagattagtttccttccgttggactttctgctctcacagaacaagaagaaatttacattgcatttaacatgcaaataaaagttttgtttctycaaataaataaaaccattggtgctttagagcagcattttactttctccccattcactgatgatcataaatgccatcagatttgyagtagtagtacttaagtacctgtagttgcctttagttttgcatttggtctttctgaaatacagcagtaatttygagcatggtgaagagggaaataamcattgtttcctcagatatcaatgtattgtaactggggaaaccattggttttctaggataatcaggctgtttggtgaggagatgatgtattctcaacatttgttagaaaggatttttggaatcctgggatttggcagccttcacacctttgacaggtgaggcagatagcactgggatccaatttggctcactactaaagagggagcgctatatattttggatccaggtcatgtctgcacaacggagtttgaatattttagttttctcctaatcacaa

SEQ ID NO: 47887 - DNA, 600 bp, Chicken  19866894292406_7
ctgcaggttctcccacagtaagatgcccagattagtttccttccgttggactttctgctctcacagaacaagaagaaatttacattgcatttaacatgcaaataaaagttttgtttctycaaataaataaaaccattggtgctttagagcagcattttactttctccccattcactgatgatcataaatgccatcagatttgyagtagtagtacttaagtacctgtagttgcctttagttttgcatttggtctttctgaaatacagcagtaatttygagcatggtgaagagggaaataamcattgtttcctcagatatcaatgtattgtaactggggaaaccattggttttctaggataatcaggctgtttggtgaggagatgatgtattctcaacatttgttagaaaggatttttggaatcctgggatttggcagccttcacacctttgacaggtgaggcagatagcactgggatccaatttggctcactactaaagagggagcgctatatattttggatccaggtcatgtctgcacaacggagtttgaatattttagttttctcctaatcacaaacttgtcacatgtcacacaggtta

SEQ ID NO: 47888 - DNA, 600 bp, Chicken  19866894292413_1
acttgaattaggtaattgaaattttagctgtccatgtgtgtaaaacatcctcatagttattgaggggtttactgaagagtaagtgctcatttgtctctagtaaacagtcataaattcaacgcttgctcagttttttaaattccctacatttaaataaggtgtttttataccttttgatgctttgtaacataaaagtgtggggggaaaaaatgatgcacctgaattgaataaagtttaagtttctgagagcaagattggatttccttttcctataaagaatggtaatcagtaagagattcrtatgcacaaatgggttgtatttattaattgtcagttattttaaacaaatatcttttatttcatacgtgcaattaaaaatacatgacctttactttcctctaagttcacaagctgcttagcattctcaaagcccaaatctctgaagttattaaaggctattacatccataggtgttgatagcttttaatacacaaatgtgctgttgcttacacaagaacaacaatagtataggagccaaaaatgcttactacttggctttcagaagagctgtacatcaccagcagtgatcctcaggaacag

SEQ ID NO: 47889 - DNA, 600 bp, Chicken  19866894292436_1
gcttgcgttgtccaccagtggtgtgagtggccaaactccagctagctccagcagtggctaattgcagctcaacactggtccctttggtcgaagctcacacgcatctgcgttctcttcctaggaactggatgcggtgcattagaacattttgctgtttggctttcagggctggtgaattcttggctggtgtgttatgtttctcatacactcgtgttttgaggttatgctgtttgttttggttttgttttgttttgttttgttttttaattgtacctccttaagtgattgcttctttgagcwtgggaaatatttcactttatttaccttgacctaaagtaaattaacctgtatcagcacagaggtaaaagacattgaaaatatatttatatcttaaattgaagttcaaggtaacatttaaatgaataattatttactattttgttaaatgctgacatatatgacagcaatcatatattagtacaaatgcttttctgttttgaatggctcattagttgctttgtagggctgcactggttttttaagattcagattcaaaatctctcctgatttctgctcttcgggttttggcagcgggccagc

SEQ ID NO: 47890 - DNA, 600 bp, Chicken  19866894292437_1
ctgcatccagtacctgcagctgccctctcagacagcagccagaggcatgagaggtctgggtgggcccagggcaatttgcccctttggcaacaaggccgaggaccccgcgtgccccaacagcttctccatcccttcctccagaagacacttccaaatctctaggtgccatcatacaacctgtgctcccacctccgcctttcacagtcaatacctcaaggtgcttggcagacactgattattttcttcttgttgctggaagggtctatccttcaaacaggctcaggtcccactgagggcagygcagccgatggcaccgaccccggtgctgatggagagtggagagatgggacgccttcatctccatggccagagcgcagcgagttgtgaggatgtgcctgtttgaccctaccacactgcctgtggtaccagtgggaaactacaacatgaatgaagggaaggaacagaactttgtctctttatcgagatctgcttcgctaatccacttttcaacaactctgtcccacttctcctagcagctgaatgggcgtgcctggcctggatgccatctgtgagcaagacagaagggagcaggactcatct

SEQ ID NO: 47891 - DNA, 600 bp, Chicken  19866894292451_1
acctccatcatcctgtctaaaggctgaagactccaaaaaagatggaatgtattctgctgagtttgcaaagcaacttgaagcaaagactgctgaacatactgaaaagtgacttacatctgcacattgcatgatgagtatagttgcatatgccacgaagggattaattcagatgggagagaggagcagagaaaagctgtaaattgatccagcagacaaaatgcagagtggtagcagtgtgatggaggaacagaaggcctgagaaagacttacacgagccagtgaaaggatgcctgcagggcygaagtgaaggaattgcacactagaagccaatgaagtcccactatcaggatctgaggagcagctgggaaacagaatcaggcatgtcccagggcatgtagaggagtttcacatagaatacgagggaaaaaacctatctgcaacaggcacgcaggaaaaaatgggacacgaagaatgaagggggacatgagcagaattatgtacgtacgagaaaggaaagcagagagaacatgggagcaatggccatgggaacaatgctggcaaagaatcaacagatctgagtaaaactgcaaagagaatata

SEQ ID NO: 47892 - DNA, 600 bp, Chicken  19866894292452_1
aaagcactttttactagtgcagaacagttttttgtttagtcattattcaaagtaagatatgaatatgcaaatctagttataaaatacaagagagagaataatgtgtgcatgtcactactgaatttttgaaatgtttctcagtaataaagcaattgctatcatcctgactgaaaaatgatatatcatattctatcactgaaggattttttctgtgctacgtagtacatcagaaaagaaaaaaggaatcatttcagacttttctgaataacgaaaggctccccatatacatgttttataggmattattttaacagtctcaggctagaaggtgaatgatacacagtgtcttcacaaaaatcttctyagaaaaaagctctctaatattcattctgatttttttcttactacttcaaggtatctggaaaattattccatagatctttgcctttaagactgtaagattgccttgcaattttggtgcttacaaaatgaaataacacagctggcttttcaaggtgttgctaagattctttcagaataatatcagacttgtatgtctgcttgttttaggtaactttggaaatattggatttcacagaaa

SEQ ID NO: 47893 - DNA, 600 bp, Chicken  19866894292452_2
tatgcaaatctagttataaaatacaagagagagaataatgtgtgcatgtcactactgaatttttgaaatgtttctcagtaataaagcaattgctatcatcctgactgaaaaatgatatatcatattctatcactgaaggattttttctgtgctacgtagtacatcagaaaagaaaaaaggaatcatttcagacttttctgaataacgaaaggctccccatatacatgttttataggmattattttaacagtctcaggctagaaggtgaatgatacacagtgtcttcacaaaaatcttctyagaaaaaagctctctaatattcattctgatttttttcttactacttcaaggtatctggaaaattattccatagatctttgcctttaagactgtaagattgccttgcaattttggtgcttacaaaatgaaataacacagctggcttttcaaggtgttgctaagattctttcagaataatatcagacttgtatgtctgcttgttttaggtaactttggaaatattggatttcacagaaatttcctttcatgattaagcacacaatgaaaactagtattattctaacaaattagtggttgtat

SEQ ID NO: 47894 - DNA, 599 bp, Chicken  19866894292462_1
  misc_feature (1)..(185): n is any nucleotide
nnnnnnnnnnnnnnnnnnnnnnnnnnnnnnnnnnnnnnnnnnnnnnnnnnnnnnnnnnnnnnnnnnnnnnnnnnnnnnnnnnnnnnnnnnnnnnnnnnnnnnnnnnnnnnnnnnnnnnnnnnnnnnnnnnnnnnnnnnnnnnnnnnnnnnnnnnnnnnnnnnnnnnnnnnnnnnnnnnnnnnnnnatggtgtagtgcaacattaaactctcttgcacatcaggaattaattgtcttattgagttaccaaggtatacaatgccacagcaagtgacagagtctgacccatcccctgtgcaaygtaaatctctgtcgttttgctctttactcttcaatggcagsgggttgggacttgatgatccttggggtcccttccaacccaacccatacgattatatgactgctggagaagcctgatcagactgcttgaaccacttttctcaagaaaacacttttcatgcatatagtaaggtagtctgggttccctgactttcattgggaagtttgttcatggcctggaagggagcagragagaaagactgcytggcatcccayggcctgaaacatctggggttttctcgacctggcacaccgtgttct

SEQ ID NO: 47895 - DNA, 599 bp, Chicken  19866894292462_2
  misc_feature (1)..(144): n is any nucleotide
nnnnnnnnnnnnnnnnnnnnnnnnnnnnnnnnnnnnnnnnnnnnnnnnnnnnnnnnnnnnnnnnnnnnnnnnnnnnnnnnnnnnnnnnnnnnnnnnnnnnnnnnnnnnnnnnnnnnnnnnnnnnnnnnnnnnnnnnnnnnnnnnatggtgtagtgcaacattaaactctcttgcacatcaggaattaattgtcttattgagttaccaaggtatacaatgccacagcaagtgacagagtctgacccatcccctgtgcaaygtaaatctctgtcgttttgctctttactcttcaatggcagsgggttgggacttgatgatccttggggtcccttccaacccaacccatacgattatatgactgctggagaagcctgatcagactgcttgaaccacttttctcaagaaaacacttttcatgcatatagtaaggtagtctgggttccctgactttcattgggaagtttgttcatggcctggaagggagcagragagaaagactgcytggcatcccayggcctgaaacatctggggttttctcgacctggcacaccgtgttcttgcttttcacatgccctactcctgacatagagccagcacac

SEQ ID NO: 47896 - DNA, 600 bp, Chicken  19866894292462_3
ttgtcttattgagttaccaaggtatacaatgccacagcaagtgacagagtctgacccatcccctgtgcaaygtaaatctctgtcgttttgctctttactcttcaatggcagsgggttgggacttgatgatccttggggtcccttccaacccaacccatacgattatatgactgctggagaagcctgatcagactgcttgaaccacttttctcaagaaaacacttttcatgcatatagtaaggtagtctgggttccctgactttcattgggaagtttgttcatggcctggaagggagcagragagaaagactgcytggcatcccayggcctgaaacatctggggttttctcgacctggcacaccgtgttcttgcttttcacatgccctactcctgacatagagccagcacacayacaaaaaaaattggagggaasatgaaaaatgcaattctgcacagaacatctgtacaaggaaataacgagcttgacactacattccccttgaaaggatcacgcttgtttattcacctatctgccaaacagacaccaaaatggaagtactttactaatggaattaccagccacaattagcaccatttcc

SEQ ID NO: 47897 - DNA, 600 bp, Chicken  19866894292462_4
taccaaggtatacaatgccacagcaagtgacagagtctgacccatcccctgtgcaaygtaaatctctgtcgttttgctctttactcttcaatggcagsgggttgggacttgatgatccttggggtcccttccaacccaacccatacgattatatgactgctggagaagcctgatcagactgcttgaaccacttttctcaagaaaacacttttcatgcatatagtaaggtagtctgggttccctgactttcattgggaagtttgttcatggcctggaagggagcagragagaaagactgcytggcatcccayggcctgaaacatctggggttttctcgacctggcacaccgtgttcttgcttttcacatgccctactcctgacatagagccagcacacayacaaaaaaaattggagggaasatgaaaaatgcaattctgcacagaacatctgtacaaggaaataacgagcttgacactacattccccttgaaaggatcacgcttgtttattcacctatctgccaaacagacaccaaaatggaagtactttactaatggaattaccagccacaattagcaccatttccatttgccctaaata

SEQ ID NO: 47898 - DNA, 600 bp, Chicken  19866894292462_5
acaatgccacagcaagtgacagagtctgacccatcccctgtgcaaygtaaatctctgtcgttttgctctttactcttcaatggcagsgggttgggacttgatgatccttggggtcccttccaacccaacccatacgattatatgactgctggagaagcctgatcagactgcttgaaccacttttctcaagaaaacacttttcatgcatatagtaaggtagtctgggttccctgactttcattgggaagtttgttcatggcctggaagggagcagragagaaagactgcytggcatcccayggcctgaaacatctggggttttctcgacctggcacaccgtgttcttgcttttcacatgccctactcctgacatagagccagcacacayacaaaaaaaattggagggaasatgaaaaatgcaattctgcacagaacatctgtacaaggaaataacgagcttgacactacattccccttgaaaggatcacgcttgtttattcacctatctgccaaacagacaccaaaatggaagtactttactaatggaattaccagccacaattagcaccatttccatttgccctaaatagccagcgattt

SEQ ID NO: 47899 - DNA, 600 bp, Chicken  19866894292462_6
ggttgggacttgatgatccttggggtcccttccaacccaacccatacgattatatgactgctggagaagcctgatcagactgcttgaaccacttttctcaagaaaacacttttcatgcatatagtaaggtagtctgggttccctgactttcattgggaagtttgttcatggcctggaagggagcagragagaaagactgcytggcatcccayggcctgaaacatctggggttttctcgacctggcacaccgtgttcttgcttttcacatgccctactcctgacatagagccagcacacayacaaaaaaaattggagggaasatgaaaaatgcaattctgcacagaacatctgtacaaggaaataacgagcttgacactacattccccttgaaaggatcacgcttgtttattcacctatctgccaaacagacaccaaaatggaagtactttactaatggaattaccagccacaattagcaccatttccatttgccctaaatagccagcgatttcactgtgccctaaatagccaccaatctacctctccttaatgttaatggagcagagtagtgctcacacacacaagtatttctaattcag

SEQ ID NO: 47900 - DNA, 600 bp, Chicken  19866894292462_7
ggggtcccttccaacccaacccatacgattatatgactgctggagaagcctgatcagactgcttgaaccacttttctcaagaaaacacttttcatgcatatagtaaggtagtctgggttccctgactttcattgggaagtttgttcatggcctggaagggagcagragagaaagactgcytggcatcccayggcctgaaacatctggggttttctcgacctggcacaccgtgttcttgcttttcacatgccctactcctgacatagagccagcacacayacaaaaaaaattggagggaasatgaaaaatgcaattctgcacagaacatctgtacaaggaaataacgagcttgacactacattccccttgaaaggatcacgcttgtttattcacctatctgccaaacagacaccaaaatggaagtactttactaatggaattaccagccacaattagcaccatttccatttgccctaaatagccagcgatttcactgtgccctaaatagccaccaatctacctctccttaatgttaatggagcagagtagtgctcacacacacaagtatttctaattcagaggatctgagggagcctgcac

SEQ ID NO: 47901 - DNA, 513 bp, Chicken  19866894292463_1
ttgagcaacactaaaggtgttctactcttgcattggaaaccattttccaaagggcccacgtgctcttctcttcccccacaaaaccttggaagttgcttcgtgatgcagtaaaattaacaggaattcacattaagctcatgacgggataaagtaagttttaatgtgagcttgggctccttgaacacagcatgaataatagaatattgaattagaagagggggaaaaaagaaagaaaaaaaaaaaaaggcctgaaaggatttaacaatctgaagtgttttttctgtgccaggctcagcaatmtgtaatgggtggaagcaagctagtgttggtttcacttttggactctcgtgcactgctacaaggatgcactgtttcagttgcaggcacttagggggattttattcttatgaaagcccttgttccataatttatttagtgagagcacttctattgatctccttagagcctggaacttgactcgaaattgtccacacacgtggcctgactttcagc

SEQ ID NO: 47902 - DNA, 600 bp, Chicken  19866894292467_1
ctagtacagcaacagcatcacaccccaactggggccttcatttccaccccacaacaaatgctgcatattaaaccaaagggaaagttatcagcctgccagcattagctgatcagtgacgaacacaagctctgatcagctgcagtatccacactcagcctcaggcaaaaccagttgatccatttggaatacagcacacctgttgttagctaatcctccatctgacaaattacaacaggaagaataataagtatgtggtcattggaaacaccgcatttttggtgtgactcaccttatgaaacyccagaacctaaatggattagaagtttgcaacaagattttcaccaggatgctggcttgttactagtgctgacttccagaacaaaggcatttttagactttaacaatatggacttcctaacaacatttacactcttaggagaggaacccaaggctgtgtatgagcaatacaaagactgttccatttgcttactactgatacctatcttgttatgttataagccactcggaggaagcactgagcacaaagattatgcaagttcatctwgttccatcaggcatagcttgcttgccatctagtgg

SEQ ID NO: 47903 - DNA, 549 bp, Chicken  19866894292467_2
caccgcatttttggtgtgactcaccttatgaaacyccagaacctaaatggattagaagtttgcaacaagattttcaccaggatgctggcttgttactagtgctgacttccagaacaaaggcatttttagactttaacaatatggacttcctaacaacatttacactcttaggagaggaacccaaggctgtgtatgagcaatacaaagactgttccatttgcttactactgatacctatcttgttatgttataagccactcggaggaagcactgagcacaaagattatgcaagttcatctwgttccatcaggcatagcttgcttgccatctagtggatacagcacatgaattgaagcaagcatgtccacctccagcaagaactgagcagtcacaggatgtgtggtaatcacagttctgcattaaacattttggttaggagcagatcaagtttagcattgctaatagcactgcctgttcaattctcctgaactctaaatttgtacagccaattaaaaagccactttaaaaaaaacacattctttcctacaa

SEQ ID NO: 47904 - DNA, 600 bp, Chicken  19866894292470_1
ttcccctacccagaaatacccatgcgcagcttgaggggcgagcaaggtccccctggtgagcctggaccaagaggaccaccagggccaccaggattaccaggtcatggcgtgccaggagccaaaggaaaaccgggtccacaaggatatccaggaattgggaagccgggtttgccagggatgcctgggaaaccaggggtgatgggaccacctgggccaagaggagagatggggccgaaaggagaggttgggcccatggggataccggggccacagggaccaccaggacctcatggactcccrgggatagggaaagcgggtgctccggggctgcagggacagccaggaccaaagggtgaacctgggatgaaagggcccccaggggtccctgggatccctggtccaaaaggtgagaagggtgttgggatcccgggtttgccagggctgaagggcccacctgggctgcccggtccccccggccctgtgggtctgccaggggtggggaagccaggtatggtggggttccctggccctcagggccctgtgggtaaacctggtcccccaggtgagctagggctgcaggggcctcccgggtgtccctgg

SEQ ID NO: 47905 - DNA, 600 bp, Chicken  19866894292472_1
cagtcccctggtgcttcgccctccctcgcgatgctcccacagctcctccgccagcatctccctcccagccgcagcctgcgattaccgccgtcgctccccagggatgcccgtgtttagcaatgtgccaccagggacgccccacgtggcacaaagcagcccagcctgcgtcagcctgcggatgcaaggcactgcactgtgcttatatacatgtacacctataggaaagagatgatttagctgcataaactctcattaacggcaatgagatcgcagggctgacagctccaggaagctgtttgrtagcttgctcctgacgtgcagattttgaagcctgtggccgtacctggtgattagcttttcagcaataatctgctgccatgaaaacagagcctctcagtggcttgcgtgaaaaggctcctgagcgagcgctgtgattcatggccaaaaataatacatctcccttaaacaatgccagctctgtggtccaggctgacaaaagccagttaaatttaaagggaccctgttagaataggcttaaaaataactccggccagctgtgttttggtgagtgggtgcgtgctcacatggtgctgtccttct

SEQ ID NO: 47906 - DNA, 600 bp, Chicken  19866894292473_1
cacaatgttgacaagttcacagagtcagttgggcacttgcagatactgtgtatcacattaagttctccagaagtagttggattcaaaaacaaagccagtattgtgctgcacactttcctgccttcccagcttctgggctccctctttcctattgtccatctgatttactaactgacttccttacagcttttttgccctatcaagaatggaaggatatgcacaaatacatacatttgtgttttgtctattacaattgtctatttgtctattgcctgtgtatactatattcttccattcctsctgasrctaaaagactgtaagcaagtcagatagctagtttgcatatatttgggcacacaaaaccacatatcccacatatagatacaagcacacatacattccagatggccacagttttggtcatgatgacactttctcaaaatttatttttaagtcttctggggctgcacagacctaacacattagctcrrtgttttcagagcctgtggcggcctgagcctgactgcacagcgaggaggaattaggtgtattcagagcatgccacacataccagtctctttggggagtttaaatgtgagg

SEQ ID NO: 47907 - DNA, 600 bp, Chicken  19866894292473_2
tgttgacaagttcacagagtcagttgggcacttgcagatactgtgtatcacattaagttctccagaagtagttggattcaaaaacaaagccagtattgtgctgcacactttcctgccttcccagcttctgggctccctctttcctattgtccatctgatttactaactgacttccttacagcttttttgccctatcaagaatggaaggatatgcacaaatacatacatttgtgttttgtctattacaattgtctatttgtctattgcctgtgtatactatattcttccattcctsctgasrctaaaagactgtaagcaagtcagatagctagtttgcatatatttgggcacacaaaaccacatatcccacatatagatacaagcacacatacattccagatggccacagttttggtcatgatgacactttctcaaaatttatttttaagtcttctggggctgcacagacctaacacattagctcrrtgttttcagagcctgtggcggcctgagcctgactgcacagcgaggaggaattaggtgtattcagagcatgccacacataccagtctctttggggagtttaaatgtgaggtcact

SEQ ID NO: 47908 - DNA, 600 bp, Chicken  19866894292473_3
gttgacaagttcacagagtcagttgggcacttgcagatactgtgtatcacattaagttctccagaagtagttggattcaaaaacaaagccagtattgtgctgcacactttcctgccttcccagcttctgggctccctctttcctattgtccatctgatttactaactgacttccttacagcttttttgccctatcaagaatggaaggatatgcacaaatacatacatttgtgttttgtctattacaattgtctatttgtctattgcctgtgtatactatattcttccattcctsctgasrctaaaagactgtaagcaagtcagatagctagtttgcatatatttgggcacacaaaaccacatatcccacatatagatacaagcacacatacattccagatggccacagttttggtcatgatgacactttctcaaaatttatttttaagtcttctggggctgcacagacctaacacattagctcrrtgttttcagagcctgtggcggcctgagcctgactgcacagcgaggaggaattaggtgtattcagagcatgccacacataccagtctctttggggagtttaaatgtgaggtcactt

SEQ ID NO: 47909 - DNA, 600 bp, Chicken  19866894292473_4
tttgccctatcaagaatggaaggatatgcacaaatacatacatttgtgttttgtctattacaattgtctatttgtctattgcctgtgtatactatattcttccattcctsctgasrctaaaagactgtaagcaagtcagatagctagtttgcatatatttgggcacacaaaaccacatatcccacatatagatacaagcacacatacattccagatggccacagttttggtcatgatgacactttctcaaaatttatttttaagtcttctggggctgcacagacctaacacattagctcrrtgttttcagagcctgtggcggcctgagcctgactgcacagcgaggaggaattaggtgtattcagagcatgccacacataccagtctctttggggagtttaaatgtgaggtcacttagttcctggatttatagtgcagagaaaggagacagaacacataggcagcttgaagtgaagtctctgataatgaagcatatatataacacatctttagatatgtagtttgttctgctggacacctcaggcacaacacagcattttagttaggacttgttggactgataccttttagaggcctctt

SEQ ID NO: 47910 - DNA, 600 bp, Chicken  19866894292473_5
ttgccctatcaagaatggaaggatatgcacaaatacatacatttgtgttttgtctattacaattgtctatttgtctattgcctgtgtatactatattcttccattcctsctgasrctaaaagactgtaagcaagtcagatagctagtttgcatatatttgggcacacaaaaccacatatcccacatatagatacaagcacacatacattccagatggccacagttttggtcatgatgacactttctcaaaatttatttttaagtcttctggggctgcacagacctaacacattagctcrrtgttttcagagcctgtggcggcctgagcctgactgcacagcgaggaggaattaggtgtattcagagcatgccacacataccagtctctttggggagtttaaatgtgaggtcacttagttcctggatttatagtgcagagaaaggagacagaacacataggcagcttgaagtgaagtctctgataatgaagcatatatataacacatctttagatatgtagtttgttctgctggacacctcaggcacaacacagcattttagttaggacttgttggactgataccttttagaggcctcttt

SEQ ID NO: 47911 - DNA, 600 bp, Chicken  19866894292473_6
gactgcacagcgaggaggaattaggtgtattcagagcatgccacacataccagtctctttggggagtttaaatgtgaggtcacttagttcctggatttatagtgcagagaaaggagacagaacacataggcagcttgaagtgaagtctctgataatgaagcatatatataacacatctttagatatgtagtttgttctgctggacacctcaggcacaacacagcattttagttaggacttgttggactgataccttttagaggcctctttgctattttagacatcatcttcagcattctygtgccattttattcagagtcacaacaaatctcagcagagtatcatccctggggcccccagtagaggagagatgctgagctgttggagagggtccagaggagggccacaaagwtgatccaagggctggaatacctccccctacaaaggaaagttgagggagtcctgcttgttggaaaaggcacaagggagacctcgctgcagtcttccagtactggaagggagcttacaagtgggagggggacagattttttacatgatctgttttacacgacagtgataggacaaggggaaatgacttta

SEQ ID NO: 47912 - DNA, 600 bp, Chicken  19866894292473_7
ggagacagaacacataggcagcttgaagtgaagtctctgataatgaagcatatatataacacatctttagatatgtagtttgttctgctggacacctcaggcacaacacagcattttagttaggacttgttggactgataccttttagaggcctctttgctattttagacatcatcttcagcattctygtgccattttattcagagtcacaacaaatctcagcagagtatcatccctggggcccccagtagaggagagatgctgagctgttggagagggtccagaggagggccacaaagwtgatccaagggctggaatacctccccctacaaaggaaagttgagggagtcctgcttgttggaaaaggcacaagggagacctcgctgcagtcttccagtactggaagggagcttacaagtgggagggggacagattttttacatgatctgttttacacgacagtgataggacaaggggaaatgactttaaatgaaaagaggggagatttaggttagacattaggaagaaattttttactcagaaggtggtgaggcactggcacaggctgaccggagaagctgtggatgctccatctctgga

SEQ ID NO: 47913 - DNA, 600 bp, Chicken  19866894292476_1
ctgattcggcatttttatgtattgcgagcagtgaaccaaattggatatcatagttattttttccagtggctccattagaaaacaacaacaacaaaaaaacaaccctcggtgtgctaaagattatacagacttgacatggtttattgcatcagtatgcagaaacaaatggttcacttaacacttggcatgaaggtacctcagacaaacaagaaaatgaacatcagtgttttctttttagtcaggaggataaagtaggtagaagtaggcatctgctgtcaggtatcactactggaaacttayagtttgcagattcacataggacagatagacgcatttcagagttaayagcttctctrccacttaaactcatacttgttcctttctgrttttcaaatgcaaacaggtcatcagcgatgtctgatatgatcccctaggcaatgctggtattcaccctagtgactgccatgaaaagggagctaccacccacttcctcctcacagcaaacctccatcacgcattaaggggttgcagtgtwagaggagcacaaacacagtactgccctcataatctgacacctacggacygtgtagcccccaatgg

SEQ ID NO: 47914 - DNA, 600 bp, Chicken  19866894292476_2
atcatagttattttttccagtggctccattagaaaacaacaacaacaaaaaaacaaccctcggtgtgctaaagattatacagacttgacatggtttattgcatcagtatgcagaaacaaatggttcacttaacacttggcatgaaggtacctcagacaaacaagaaaatgaacatcagtgttttctttttagtcaggaggataaagtaggtagaagtaggcatctgctgtcaggtatcactactggaaacttayagtttgcagattcacataggacagatagacgcatttcagagttaayagcttctctrccacttaaactcatacttgttcctttctgrttttcaaatgcaaacaggtcatcagcgatgtctgatatgatcccctaggcaatgctggtattcaccctagtgactgccatgaaaagggagctaccacccacttcctcctcacagcaaacctccatcacgcattaaggggttgcagtgtwagaggagcacaaacacagtactgccctcataatctgacacctacggacygtgtagcccccaatggaaccatcaaatcaaactcacattgacaataaggtttaggaacacrg

SEQ ID NO: 47915 - DNA, 600 bp, Chicken  19866894292476_3
ttttttccagtggctccattagaaaacaacaacaacaaaaaaacaaccctcggtgtgctaaagattatacagacttgacatggtttattgcatcagtatgcagaaacaaatggttcacttaacacttggcatgaaggtacctcagacaaacaagaaaatgaacatcagtgttttctttttagtcaggaggataaagtaggtagaagtaggcatctgctgtcaggtatcactactggaaacttayagtttgcagattcacataggacagatagacgcatttcagagttaayagcttctctrccacttaaactcatacttgttcctttctgrttttcaaatgcaaacaggtcatcagcgatgtctgatatgatcccctaggcaatgctggtattcaccctagtgactgccatgaaaagggagctaccacccacttcctcctcacagcaaacctccatcacgcattaaggggttgcagtgtwagaggagcacaaacacagtactgccctcataatctgacacctacggacygtgtagcccccaatggaaccatcaaatcaaactcacattgacaataaggtttaggaacacrgtatttctagg

SEQ ID NO: 47916 - DNA, 600 bp, Chicken  19866894292476_4
aacaacaaaaaaacaaccctcggtgtgctaaagattatacagacttgacatggtttattgcatcagtatgcagaaacaaatggttcacttaacacttggcatgaaggtacctcagacaaacaagaaaatgaacatcagtgttttctttttagtcaggaggataaagtaggtagaagtaggcatctgctgtcaggtatcactactggaaacttayagtttgcagattcacataggacagatagacgcatttcagagttaayagcttctctrccacttaaactcatacttgttcctttctgrttttcaaatgcaaacaggtcatcagcgatgtctgatatgatcccctaggcaatgctggtattcaccctagtgactgccatgaaaagggagctaccacccacttcctcctcacagcaaacctccatcacgcattaaggggttgcagtgtwagaggagcacaaacacagtactgccctcataatctgacacctacggacygtgtagcccccaatggaaccatcaaatcaaactcacattgacaataaggtttaggaacacrgtatttctaggtggaaataagctcatagaactactactaca

SEQ ID NO: 47917 - DNA, 600 bp, Chicken  19866894292476_5
tagtcaggaggataaagtaggtagaagtaggcatctgctgtcaggtatcactactggaaacttayagtttgcagattcacataggacagatagacgcatttcagagttaayagcttctctrccacttaaactcatacttgttcctttctgrttttcaaatgcaaacaggtcatcagcgatgtctgatatgatcccctaggcaatgctggtattcaccctagtgactgccatgaaaagggagctaccacccacttcctcctcacagcaaacctccatcacgcattaaggggttgcagtgtwagaggagcacaaacacagtactgccctcataatctgacacctacggacygtgtagcccccaatggaaccatcaaatcaaactcacattgacaataaggtttaggaacacrgtatttctaggtggaaataagctcatagaactactactacattgctttttgtcctgctccttcagatgtccttaagatattttccagggtaacgcattaaaaaacattgcctcrgttaggctacaacaggcagaaagtgcactgctgtgatctgcacggcctgacagatctgcaaacagaagacatgaaa

SEQ ID NO: 47918 - DNA, 600 bp, Chicken  19866894292476_6
actactggaaacttayagtttgcagattcacataggacagatagacgcatttcagagttaayagcttctctrccacttaaactcatacttgttcctttctgrttttcaaatgcaaacaggtcatcagcgatgtctgatatgatcccctaggcaatgctggtattcaccctagtgactgccatgaaaagggagctaccacccacttcctcctcacagcaaacctccatcacgcattaaggggttgcagtgtwagaggagcacaaacacagtactgccctcataatctgacacctacggacygtgtagcccccaatggaaccatcaaatcaaactcacattgacaataaggtttaggaacacrgtatttctaggtggaaataagctcatagaactactactacattgctttttgtcctgctccttcagatgtccttaagatattttccagggtaacgcattaaaaaacattgcctcrgttaggctacaacaggcagaaagtgcactgctgtgatctgcacggcctgacagatctgcaaacagaagacatgaaagcttcaaagagagatttggtactgcagcactgcagcaggttgatgttgc

SEQ ID NO: 47919 - DNA, 600 bp, Chicken  19866894292476_7
yagcttctctrccacttaaactcatacttgttcctttctgrttttcaaatgcaaacaggtcatcagcgatgtctgatatgatcccctaggcaatgctggtattcaccctagtgactgccatgaaaagggagctaccacccacttcctcctcacagcaaacctccatcacgcattaaggggttgcagtgtwagaggagcacaaacacagtactgccctcataatctgacacctacggacygtgtagcccccaatggaaccatcaaatcaaactcacattgacaataaggtttaggaacacrgtatttctaggtggaaataagctcatagaactactactacattgctttttgtcctgctccttcagatgtccttaagatattttccagggtaacgcattaaaaaacattgcctcrgttaggctacaacaggcagaaagtgcactgctgtgatctgcacggcctgacagatctgcaaacagaagacatgaaagcttcaaagagagatttggtactgcagcactgcagcaggttgatgttgctctctgcaaggcgtattttgagggaggagatactgcacgtatgtccagcatgctatcctga

SEQ ID NO: 47920 - DNA, 600 bp, Chicken  19866894292476_8
ctgccatgaaaagggagctaccacccacttcctcctcacagcaaacctccatcacgcattaaggggttgcagtgtwagaggagcacaaacacagtactgccctcataatctgacacctacggacygtgtagcccccaatggaaccatcaaatcaaactcacattgacaataaggtttaggaacacrgtatttctaggtggaaataagctcatagaactactactacattgctttttgtcctgctccttcagatgtccttaagatattttccagggtaacgcattaaaaaacattgcctcrgttaggctacaacaggcagaaagtgcactgctgtgatctgcacggcctgacagatctgcaaacagaagacatgaaagcttcaaagagagatttggtactgcagcactgcagcaggttgatgttgctctctgcaaggcgtattttgagggaggagatactgcacgtatgtccagcatgctatcctgaaggatcgctactggcaccacttgtgtcaaattccatacatgcagctagatgctaactttagcctgccggtttcttggccacgtcccagtaattctggcaataacaccttgttga

SEQ ID NO: 47921 - DNA, 600 bp, Chicken  19866894292477_1
aaactgtaggggctgagtggaaagaagaccatgcatacatacattcattggatccacaaccagatataactgatattgtgctcatatatcccgtgtgcattgtgataggtgtatccatgcatgtgtcagtgcagctgtaaatcagatattttctcattttgaggagagagggggcaaggattctacctctcagattttgcactctagatttttgtttgtaatgataattgagtgttgctcctcaatcccatgcagcactatgcaaaactatcactttattactttgggttgtttgaggaygagtcttcatagaaatacttaaaaatgaataaaactgaagtaaaactgaagtgtggaagatactaaaagcagtgtgagccttcaaatttgaattatgttgctaaagggaacttcagaagttgtggtatcttacagctgtacccagaacatcccccacaatgtgctgtgacatgttgaaccctgagtgcaggtctgtgtgaaggcacttgggagcattaactcacaacttcattcaaatgaatttctcctgaggtttcctgtttatgaaagcctaaatgtatgacaagaggtctggcttaa

SEQ ID NO: 47922 - DNA, 599 bp, Chicken  19866894292480_1
  misc_feature (1)..(7): n is any nucleotide
nnnnnnntctagagagtagtgaaaatcagttgtatgcagtgtttggcctggggaagggcaaaaagaaacagagaggctgtgaagtttcagttcttggaggttttcaaaccttgaaagtactgacactgctttgaatgtgggactggacttgatgtatcccaggatccattaacctgcatggttctgtggtagaacagaaagagtaagaataataagaaaggaggtctggcgaaggttgaaggggaatgcaagtatagatgtacaaaatcaataagagggagtaaaactaactataacagygtatggatcactctagtaccatctattctaatgcatcataatgtctttttctcggattagtgtaaaataaaaaaaaaattaaaaacaacaaaacaaacaacaaaaagtcccaccaagctaagtcatagtgagaattaccagtgacttttgcaaataattctgatttccctccccctccctgtggtgcaatggatgttggctaccacatttcagtcttgtatattttttcctgtaactacttgtcagtagaattttaaggtacttgtaaagatttaatgatctcagtatcttttctctgg

SEQ ID NO: 47923 - DNA, 600 bp, Chicken  19866894292486_1
tatataatgcaaattaagttgtaatttgatagttatcaaatatagtgtgtgttttctttgctgtttactgagaaagaaacacttgtgcatgttcgtacctgttatgcagtttgtacataataagcaatatgtttttgaaaaaggagatgtgacagaaaactttactaataaatattcttgatatattttctcttctaaagtctccctctaaaatatttcctcatcctctctattaagtcaaagcagtgatgatatgtgaaaagagtcaaaagaagaagccatgataaagctgagaagagrgaggatccattctgatatagcccatatttacctggttcttctgaacaataaactacaagtactagagaaaatccacctaagaatgtctgggagcatcacctttgggtatcttttacctgtattcttccaaaagatttttaccttctttaaaccctttcctagctgctagagctctaatgttttygtagccatattcatagtgtagtgtgtgtctttcaaatttttaaaagatatttctgctcatgttctgctatacttattgctgccccagctatatgctacagggcagaaagttgtctg

SEQ ID NO: 47924 - DNA, 600 bp, Chicken  19866894292486_2
attttctcttctaaagtctccctctaaaatatttcctcatcctctctattaagtcaaagcagtgatgatatgtgaaaagagtcaaaagaagaagccatgataaagctgagaagagrgaggatccattctgatatagcccatatttacctggttcttctgaacaataaactacaagtactagagaaaatccacctaagaatgtctgggagcatcacctttgggtatcttttacctgtattcttccaaaagatttttaccttctttaaaccctttcctagctgctagagctctaatgttttygtagccatattcatagtgtagtgtgtgtctttcaaatttttaaaagatatttctgctcatgttctgctatacttattgctgccccagctatatgctacagggcagaaagttgtctgtcacaacaggaagaaagcaatttcttacaaatgctactatgagcagtctcttactgggctttaggtaacctcttgttttaagatctgcaagcagatctgtattgaacttttgattaatctacacaaatatatacatgtatatctatactagtgcatttattccaaaataggaaacatcagaact

SEQ ID NO: 47925 - DNA, 600 bp, Chicken  19866894292491_1
gctgtctgctctcgtttcagcacagctcatggttgttgatgtctggttgggttctggtgcatctcatccaaccctcagtttcagccccagttttgtgcactgctacaagattttagccctgtccatttcttaccctcaccctacactggggttcttgcttcttcaaacaacagtagtgcctgaaataacttcccaggtaccttcaggtttctgaataagatcagctgcatccaggcctgcatggggtgatttttattccaagcgtggagtcatcttagttagctttaattcactagatgrgatttcctcatggtgcaaagatttgtctgcctaatatctagakctcaatagatttcactggtcccttgtgaataatttcacatccctgtttacaggatctcttgaacaaaccccaaaccaacacaaatataaaatgagcaataaccactatgtcatgtaatgcagtatccaggaaacataattattagctgtgttttgtgaaagaaagcgcccatattagaatttccatgtgaccatggaaaaagaaaatacctctagaagacatttgtctccacttcagacatcgaagctgccaagtca

SEQ ID NO: 47926 - DNA, 600 bp, Chicken  19866894292491_2
tggttgggttctggtgcatctcatccaaccctcagtttcagccccagttttgtgcactgctacaagattttagccctgtccatttcttaccctcaccctacactggggttcttgcttcttcaaacaacagtagtgcctgaaataacttcccaggtaccttcaggtttctgaataagatcagctgcatccaggcctgcatggggtgatttttattccaagcgtggagtcatcttagttagctttaattcactagatgrgatttcctcatggtgcaaagatttgtctgcctaatatctagakctcaatagatttcactggtcccttgtgaataatttcacatccctgtttacaggatctcttgaacaaaccccaaaccaacacaaatataaaatgagcaataaccactatgtcatgtaatgcagtatccaggaaacataattattagctgtgttttgtgaaagaaagcgcccatattagaatttccatgtgaccatggaaaaagaaaatacctctagaagacatttgtctccacttcagacatcgaagctgccaagtcaacatccacacttccagcctgtagcagagaaagaagcacctcac

SEQ ID NO: 47927 - DNA, 600 bp, Chicken  19866894292491_3
acacttccagcctgtagcagagaaagaagcacctcactatgaagaggagacttccacaacagggagagacattggtagggcacagacctagtgaaattcaggtgaggacccttaagtcctagtaataataaaaatataaatcaagaattcactgccatttgactatttgtatactttagtcctggtaaaatggttgtatgaaccaaagcatgagcacattaaaaaaacaaccaaagcactagtgctctttgatgaactactggagtatttggtgcaaatctgattagactggaacagtgmaggagagctcaaaaccaaaaaaacctgaaggtgtttgggccactgatgaaaatattactaaataggagatacagtgagtaacttgctttgctgtgaagcctggtgttgtctggtgtgctcttccttcactgccccatcactgggaatcaccattatgataccaagagagtaattaaatcactgggttttaatattatttggagagggagcaagagaagaataatgagggagatgtggtgtattatgtgattttggtaatatacaatcattatcaagtatatttcaatgatttcatctggt

SEQ ID NO: 47928 - DNA, 600 bp, Chicken  19866894292494_1
ctgtacctaaagtcatgcctgataaaagctgagactactgaattcaaaactgcatgcaatagctacagccactttgtttttgaaaatctagaggaggataatgagcagctcctacatagaataaaacccaataagaaagtcaatgtcctaggtttgaagaaagcaaaaagtggctattcacatggtgtatggctaagttctggagctacttgccatgcaacattctagatgacaaatgttcccataaatgaaaaggtaaattggtttgttcaatataaaccaatctgcagatatcaccaytgaatcagaaactgcctgtactgcagcttactggaagctgcgacgatgtttaagagagactgcacatatgcctcctctattctttcactcttaggcatccattcctagttrctgttgaagacaggacactaggcaacaggcaccttcagtttttaatgtaaccttttggttacaaacaggtctgttcayagattatgtgctggagctgctagaaagaatctctattttataataattattagacttaaagaaaaaaacctaccgtaaaaggcattaagttttcagttaactaatcgggaa

SEQ ID NO: 47929 - DNA, 600 bp, Chicken  19866894292494_2
ctacatagaataaaacccaataagaaagtcaatgtcctaggtttgaagaaagcaaaaagtggctattcacatggtgtatggctaagttctggagctacttgccatgcaacattctagatgacaaatgttcccataaatgaaaaggtaaattggtttgttcaatataaaccaatctgcagatatcaccaytgaatcagaaactgcctgtactgcagcttactggaagctgcgacgatgtttaagagagactgcacatatgcctcctctattctttcactcttaggcatccattcctagttrctgttgaagacaggacactaggcaacaggcaccttcagtttttaatgtaaccttttggttacaaacaggtctgttcayagattatgtgctggagctgctagaaagaatctctattttataataattattagacttaaagaaaaaaacctaccgtaaaaggcattaagttttcagttaactaatcgggaaaactaattggtagtctaaaatcaagctttttctagctgcttactttagatacattattcttatatacttggcttggcttcaaccaaactggtaagcatttgtgatcacaac

SEQ ID NO: 47930 - DNA, 600 bp, Chicken  19866894292494_3
tggctaagttctggagctacttgccatgcaacattctagatgacaaatgttcccataaatgaaaaggtaaattggtttgttcaatataaaccaatctgcagatatcaccaytgaatcagaaactgcctgtactgcagcttactggaagctgcgacgatgtttaagagagactgcacatatgcctcctctattctttcactcttaggcatccattcctagttrctgttgaagacaggacactaggcaacaggcaccttcagtttttaatgtaaccttttggttacaaacaggtctgttcayagattatgtgctggagctgctagaaagaatctctattttataataattattagacttaaagaaaaaaacctaccgtaaaaggcattaagttttcagttaactaatcgggaaaactaattggtagtctaaaatcaagctttttctagctgcttactttagatacattattcttatatacttggcttggcttcaaccaaactggtaagcatttgtgatcacaaccgtctctcagtaagtgagatattgctagtggcagatgggccaaaaaaactcccacttcctgaaagatatttaactatt

SEQ ID NO: 47931 - DNA, 600 bp, Chicken  19866894292500_1
gtggggagcattaatactactgaagtgtacaatcgtacatgtttttgtgtctgtggtacttgcagcctggattttatcaaccaggatgtatggttcagaacagcagcataaaaatggtttccctttcctgtgtagccacagctcagaaaggaataggagcgcttgaacctccatcagttctgctcttgctgtttctagcggaggagaaactgtctgttgaacatactttgtagcctttttattaaagcagacagcttctttcttacttcctcgctactgcatgtgctgaggtgaatgaaragagcatagacttcatcctttttttaaggaaacagacccagtaaatgcaacatcttttactatgggaattgcagggaagggaggatgcaatcctttgttgtggacctacagaagtgacaacaatcataacttacgacatcaattctactcctagtcggtggaactatgtagattatttactagttgagaacctgcctctggatttcacaaccaaccatgtatgtaaatgtctcatcttgatttagaactgaagctgcaggagttttctgtggaagagaaattggtgcttgacatccttac

SEQ ID NO: 47932 - DNA, 600 bp, Chicken  19866894292500_2
taaatgtctcatcttgatttagaactgaagctgcaggagttttctgtggaagagaaattggtgcttgacatccttacccacgtgaatgttacaaggagggagtgtgaaatagtaagtgtgcaaacatgaagctcctctgttcagaggacaggaaatcccaggcagccaagagatttgctgttgtctaatatcaggttctggatatgcaggttttcttttgagcacataattcagaatttttgttccttttttaaatatttgccatggtcgtgggggttttgtttgagttatcttccctamgttagctctgtaagtgcacatttctgaacatttagtactgctgagtgttggggccggaggctgatagstgggggaaggactgcaagctaccaaaagtgtgcatgctgctgggattctgctgactgaagcaggactgcttttctctgtgtcaactcagtgcttggctactgattgctctgctgtatttttctttgacaggaactggagtacatggattttgatgagaagaaagaaataaataagcggaaacaaatgatccttgaaggaaaggtgagagttgctgctgtatacacaattttg

SEQ ID NO: 47933 - DNA, 600 bp, Chicken  19866894292500_3
catccttacccacgtgaatgttacaaggagggagtgtgaaatagtaagtgtgcaaacatgaagctcctctgttcagaggacaggaaatcccaggcagccaagagatttgctgttgtctaatatcaggttctggatatgcaggttttcttttgagcacataattcagaatttttgttccttttttaaatatttgccatggtcgtgggggttttgtttgagttatcttccctamgttagctctgtaagtgcacatttctgaacatttagtactgctgagtgttggggccggaggctgatagstgggggaaggactgcaagctaccaaaagtgtgcatgctgctgggattctgctgactgaagcaggactgcttttctctgtgtcaactcagtgcttggctactgattgctctgctgtatttttctttgacaggaactggagtacatggattttgatgagaagaaagaaataaataagcggaaacaaatgatccttgaaggaaaggtgagagttgctgctgtatacacaattttgatcagtagctggtataatgctcatgacatggaaaagaaatgacagttcctgcctcactgctgtgttgc

SEQ ID NO: 47934 - DNA, 600 bp, Chicken  19866894292511_1
tatttttctgaataaacttacttagaaaatatcattttctttcctatatttcaaaattgaggtattgcaaaagatcatgtcagtcagaaagcatgcctttttctttaaaaaaaatcatcagccaactgttgaaaactgtctagatacaaaaagtagtgcataacaaaatgtcttgtacagatgaaaaaaacagaaaagacacctgggctgggaaaagcaatatcacaaaaatgcccagaagtaacctcaaaagggataattagaattagcatcttaaaccagtaaaaaactattttttcsttttttttttcttcaaaaacagaaaagttcctttcaaagccaatactcgcaactaaacactgggaaaaacagcttactaaattagacacaaacgaggacatcacgacaaacaaaacccagaacatttaaatctactatgcggtgtcatatccagtcagattgtccccagaactgcaaaaacaaaggaaaaagaaaaagaaaaaaaaatagtgtacacattctcacaatcattagtataccaagtgtgtttatatttatatgctatctgcagccccagagttcatgctaaaaaaatgtcca

SEQ ID NO: 47935 - DNA, 599 bp, Chicken  19866894292520_1
  misc_feature (1)..(51): n is any nucleotide
nnnnnnnnnnnnnnnnnnnnnnnnnnnnnnnnnnnnnnnnnnnnnnnnnnncctcctggtgagacaggaaagttgcagctatcctgcagcaggatcacaggactcacaaggaggcctttgtgcgcagactttttcccatgctcatgtcacagccctctctcagcagatcggcagataatgctggagccaaccatcatttctctgtctgctgagactcagcctttccctaataaaaaaccaaggctccagcatgcttcctgtcaccgaggcagagatcccagggtctaaggcagcagcagsacatgctccagcttcacctactctaaaattcatcttccactgctttggtgtgttctctctcattttctgccagactaatagcaacaagggcattactggccttgtgaagtacacgaacatgactcatactataagatctacgtagttctgttactttaaaagtgtgggaaaaatgagaaatgtcatcgaggctagaagaaacataaagaaaagtagaagcagcagagccccactgcaggaaagaattactcctggatttgtttcccacwtccagcttcagggatggaggtaggagaagt

SEQ ID NO: 47936 - DNA, 600 bp, Chicken  19866894292520_2
cagagatcccagggtctaaggcagcagcagsacatgctccagcttcacctactctaaaattcatcttccactgctttggtgtgttctctctcattttctgccagactaatagcaacaagggcattactggccttgtgaagtacacgaacatgactcatactataagatctacgtagttctgttactttaaaagtgtgggaaaaatgagaaatgtcatcgaggctagaagaaacataaagaaaagtagaagcagcagagccccactgcaggaaagaattactcctggatttgtttcccacwtccagcttcagggatggaggtaggagaagtcagagtaaaagagtcatttactactttactttggcgttttggacaaycttacagcagtacggctgcattttatgtcatctccgtgaaatgctagcaaacctaagacttactgttgcaccacaacaaaggttcctgcgatgtggtttgcaacgtatgacaatgtacatttatggttgcaatctcttgagaagtaaatgagtagaaagcctctccaagatccctatttacagaaggtatctattcctagcaaggctgacaggatccagtttg

SEQ ID NO: 47937 - DNA, 600 bp, Chicken  19866894292520_3
ggtgtgttctctctcattttctgccagactaatagcaacaagggcattactggccttgtgaagtacacgaacatgactcatactataagatctacgtagttctgttactttaaaagtgtgggaaaaatgagaaatgtcatcgaggctagaagaaacataaagaaaagtagaagcagcagagccccactgcaggaaagaattactcctggatttgtttcccacwtccagcttcagggatggaggtaggagaagtcagagtaaaagagtcatttactactttactttggcgttttggacaaycttacagcagtacggctgcattttatgtcatctccgtgaaatgctagcaaacctaagacttactgttgcaccacaacaaaggttcctgcgatgtggtttgcaacgtatgacaatgtacatttatggttgcaatctcttgagaagtaaatgagtagaaagcctctccaagatccctatttacagaaggtatctattcctagcaaggctgacaggatccagtttgtaatcttgcagcaacacaaaaaagccctctaattggtggagaaattactggtctctggagctgagacacactgtaac

SEQ ID NO: 47938 - DNA, 600 bp, Chicken  19866894292520_4
ctagcaaggctgacaggatccagtttgtaatcttgcagcaacacaaaaaagccctctaattggtggagaaattactggtctctggagctgagacacactgtaacctaaaaagcaacagtaaaattactgtgcttaacaagaagttcacagcatggggccaggttctgttacaaactggctatttttaagataaagtacaaaagctttgtttcacagttggcttaactcatctgcgagctctgacacacaaaaaaaggagactgttctgcctcactctgtcttctgccagtgctgtacccyrcacttgtacaagtgcagacttcttaaaatattccactgagctgctcttcagatagaccctgttctctggtcaggctgttgcagccacacacgtgctaaccaagtcagaagagcagcatgggaaaggagcagcgttctgaccgccctgctcagcaggctgggtagatagctgaactcagttccatgtgttaaactgtgtgatttactcctcttcaaacttcggattcggttcaaaataagacctggcttctctctggccaatgaaagaagaactcctaaagaacactgctggaacttctg

SEQ ID NO: 47939 - DNA, 600 bp, Chicken  19866894292520_5
tagcaaggctgacaggatccagtttgtaatcttgcagcaacacaaaaaagccctctaattggtggagaaattactggtctctggagctgagacacactgtaacctaaaaagcaacagtaaaattactgtgcttaacaagaagttcacagcatggggccaggttctgttacaaactggctatttttaagataaagtacaaaagctttgtttcacagttggcttaactcatctgcgagctctgacacacaaaaaaaggagactgttctgcctcactctgtcttctgccagtgctgtacccyrcacttgtacaagtgcagacttcttaaaatattccactgagctgctcttcagatagaccctgttctctggtcaggctgttgcagccacacacgtgctaaccaagtcagaagagcagcatgggaaaggagcagcgttctgaccgccctgctcagcaggctgggtagatagctgaactcagttccatgtgttaaactgtgtgatttactcctcttcaaacttcggattcggttcaaaataagacctggcttctctctggccaatgaaagaagaactcctaaagaacactgctggaacttctgt

SEQ ID NO: 47940 - DNA, 599 bp, Chicken  19866894292535_1
  misc_feature (1)..(225): n is any nucleotide
nnnnnnnnnnnnnnnnnnnnnnnnnnnnnnnnnnnnnnnnnnnnnnnnnnnnnnnnnnnnnnnnnnnnnnnnnnnnnnnnnnnnnnnnnnnnnnnnnnnnnnnnnnnnnnnnnnnnnnnnnnnnnnnnnnnnnnnnnnnnnnnnnnnnnnnnnnnnnnnnnnnnnnnnnnnnnnnnnnnnnnnnnnnnnnnnnnnnnnnnnnnnnnnnnnnnnnnnnnnnnnnnnaaaaagtaatattcacattatatttgtgtattattattattattattattacctgaagggattccactttttttyccccccaatgtactttttgcctggaatctgctttgatttattgatttgtaatgaaacgttgggccctrtctgaatgaatggacagagcacagtgatgtaagtaaatggttatttatttctaaacagtgagaacttctcatggtaacgaggagaaaattaaaatcagaaatgaaaaacagtggttgcagcatggtgtttgggcatgcctttgtgtgccactcagctttgagagagaacaaatcacttagacttaataatgacagaaaaagtccatctgttacacacaacagttacacctc

SEQ ID NO: 47941 - DNA, 599 bp, Chicken  19866894292535_2
  misc_feature (1)..(157): n is any nucleotide
nnnnnnnnnnnnnnnnnnnnnnnnnnnnnnnnnnnnnnnnnnnnnnnnnnnnnnnnnnnnnnnnnnnnnnnnnnnnnnnnnnnnnnnnnnnnnnnnnnnnnnnnnnnnnnnnnnnnnnnnnnnnnnnnnnnnnnnnnnnnnnnnnnnnnnnnnnnnnaaaaagtaatattcacattatatttgtgtattattattattattattattacctgaagggattccactttttttyccccccaatgtactttttgcctggaatctgctttgatttattgatttgtaatgaaacgttgggccctrtctgaatgaatggacagagcacagtgatgtaagtaaatggttatttatttctaaacagtgagaacttctcatggtaacgaggagaaaattaaaatcagaaatgaaaaacagtggttgcagcatggtgtttgggcatgcctttgtgtgccactcagctttgagagagaacaaatcacttagacttaataatgacagaaaaagtccatctgttacacacaacagttacacctctctcaagcagccatggaataatgccggggagagtggcaatccagtgccagcagccccattttgratgg

SEQ ID NO: 47942 - DNA, 600 bp, Chicken  19866894292535_3
ccctrtctgaatgaatggacagagcacagtgatgtaagtaaatggttatttatttctaaacagtgagaacttctcatggtaacgaggagaaaattaaaatcagaaatgaaaaacagtggttgcagcatggtgtttgggcatgcctttgtgtgccactcagctttgagagagaacaaatcacttagacttaataatgacagaaaaagtccatctgttacacacaacagttacacctctctcaagcagccatggaataatgccggggagagtggcaatccagtgccagcagccccattttgratggcattctgcagacagtgggaggagggaacaaagagaaggtggtggtgaggaactggtttgggggcagagagcagagtccacctttcagagcagccaaggcagccagctcagaaatgggcatgattaacggcttcagaggtctctgctgtccttacagyctctacacagacctttggaagtgtttgtcctcttccttgttgtatctrkaggcaggaggaagaggaccttctttttcctccaagtctttcttcctctcctgctcttgggattccctggggtcccttacaatgaaaacag

SEQ ID NO: 47943 - DNA, 600 bp, Chicken  19866894292535_4
tttgagagagaacaaatcacttagacttaataatgacagaaaaagtccatctgttacacacaacagttacacctctctcaagcagccatggaataatgccggggagagtggcaatccagtgccagcagccccattttgratggcattctgcagacagtgggaggagggaacaaagagaaggtggtggtgaggaactggtttgggggcagagagcagagtccacctttcagagcagccaaggcagccagctcagaaatgggcatgattaacggcttcagaggtctctgctgtccttacagyctctacacagacctttggaagtgtttgtcctcttccttgttgtatctrkaggcaggaggaagaggaccttctttttcctccaagtctttcttcctctcctgctcttgggattccctggggtcccttacaatgaaaacagatttgctcccctaaagcaaatatcttttttggcattataaatttggctggtagaaggatttgtacaagctgttgcaacctctttttctgaggcagaaaggttttattcatttatttgaagtaaaatgtccatcatagatgtgatacgtaacacttttggta

SEQ ID NO: 47944 - DNA, 600 bp, Chicken  19866894292535_5
atctgttacacacaacagttacacctctctcaagcagccatggaataatgccggggagagtggcaatccagtgccagcagccccattttgratggcattctgcagacagtgggaggagggaacaaagagaaggtggtggtgaggaactggtttgggggcagagagcagagtccacctttcagagcagccaaggcagccagctcagaaatgggcatgattaacggcttcagaggtctctgctgtccttacagyctctacacagacctttggaagtgtttgtcctcttccttgttgtatctrkaggcaggaggaagaggaccttctttttcctccaagtctttcttcctctcctgctcttgggattccctggggtcccttacaatgaaaacagatttgctcccctaaagcaaatatcttttttggcattataaatttggctggtagaaggatttgtacaagctgttgcaacctctttttctgaggcagaaaggttttattcatttatttgaagtaaaatgtccatcatagatgtgatacgtaacacttttggtaaggaatgacttaaaaaatgaccattgtatgtatacttttaaccacttc

SEQ ID NO: 47945 - DNA, 600 bp, Chicken  19866894292535_6
tctgttacacacaacagttacacctctctcaagcagccatggaataatgccggggagagtggcaatccagtgccagcagccccattttgratggcattctgcagacagtgggaggagggaacaaagagaaggtggtggtgaggaactggtttgggggcagagagcagagtccacctttcagagcagccaaggcagccagctcagaaatgggcatgattaacggcttcagaggtctctgctgtccttacagyctctacacagacctttggaagtgtttgtcctcttccttgttgtatctrkaggcaggaggaagaggaccttctttttcctccaagtctttcttcctctcctgctcttgggattccctggggtcccttacaatgaaaacagatttgctcccctaaagcaaatatcttttttggcattataaatttggctggtagaaggatttgtacaagctgttgcaacctctttttctgaggcagaaaggttttattcatttatttgaagtaaaatgtccatcatagatgtgatacgtaacacttttggtaaggaatgacttaaaaaatgaccattgtatgtatacttttaaccacttca

SEQ ID NO: 47946 - DNA, 599 bp, Chicken  19866894292536_1
  misc_feature (1)..(15): n is any nucleotide
nnnnnnnnnnnnnnnccgggaggcaagatgaatcacagcaacacggcaatgctttttccagagcacccttcccaacaaggcgctgcgggagccccagagccagcatctgtagctttatgttaaaacctgtcaggggctctactgcagccctctttcttctgctaacaccgttaaaaccactttctccaacactgtcttccctagcttttaacatactacttaccctcattaaaaccttgcttcgatcctgtaagggcttacttcaacagcttgtggtgaacaaccttgttgaagtctttsgaaggccatgtggtctatctcaacatccatccacrccaactgatcctttcaggagstttccaggcagtatgtaaggcgtgatttccctctagaaactaaatcaattcatccacagcatgtttctccaggtttccattaatacatcatttattattactttcaccagtttttccaagcccagactgatcagcagtttcctagatcttaccagtaccttttaagaaaaggcctggtgttatgttaggcactttccaatcctctcggaacaagtctacatgaaaggaaggctccaaacagca

SEQ ID NO: 47947 - DNA, 600 bp, Chicken  19866894292536_2
cagcaacacggcaatgctttttccagagcacccttcccaacaaggcgctgcgggagccccagagccagcatctgtagctttatgttaaaacctgtcaggggctctactgcagccctctttcttctgctaacaccgttaaaaccactttctccaacactgtcttccctagcttttaacatactacttaccctcattaaaaccttgcttcgatcctgtaagggcttacttcaacagcttgtggtgaacaaccttgttgaagtctttsgaaggccatgtggtctatctcaacatccatccacrccaactgatcctttcaggagstttccaggcagtatgtaaggcgtgatttccctctagaaactaaatcaattcatccacagcatgtttctccaggtttccattaatacatcatttattattactttcaccagtttttccaagcccagactgatcagcagtttcctagatcttaccagtaccttttaagaaaaggcctggtgttatgttaggcactttccaatcctctcggaacaagtctacatgaaaggaaggctccaaacagcagcacagctgcttcaccctcgtgcagcaggcttgggt

SEQ ID NO: 47948 - DNA, 600 bp, Chicken  19866894292536_3
tccagagcacccttcccaacaaggcgctgcgggagccccagagccagcatctgtagctttatgttaaaacctgtcaggggctctactgcagccctctttcttctgctaacaccgttaaaaccactttctccaacactgtcttccctagcttttaacatactacttaccctcattaaaaccttgcttcgatcctgtaagggcttacttcaacagcttgtggtgaacaaccttgttgaagtctttsgaaggccatgtggtctatctcaacatccatccacrccaactgatcctttcaggagstttccaggcagtatgtaaggcgtgatttccctctagaaactaaatcaattcatccacagcatgtttctccaggtttccattaatacatcatttattattactttcaccagtttttccaagcccagactgatcagcagtttcctagatcttaccagtaccttttaagaaaaggcctggtgttatgttaggcactttccaatcctctcggaacaagtctacatgaaaggaaggctccaaacagcagcacagctgcttcaccctcgtgcagcaggcttgggtgaatactacctattcctggta

SEQ ID NO: 47949 - DNA, 600 bp, Chicken  19866894292539_1
tgacttttaccagatatataaagttgttgctttttttaatctcttagtgagaagtatctttctatctttctacacagatattcccaactgttagtcttcctgtcctcatgttggtcctgtgggcaccaacatgagataggaggtttgagctgtacgtagggagtagcatctccaggatgctgagggctccaaaagcaggagtcctcccaggacccacccctgagcagccaggtcctaccccaagcagacccattcaaagtagcctactgcactatcatctcaccaccacacactgtccayagctttacttcttacagtgaagtaaccttgagttgtcaagctgtcatgttcatgctgaagcatgcagtacattcctccctgaagacacaagagggattgattgcacttgtgatttgttcatttctacaactatcgtaccattaatatccctctctcatccatttgcaacacctgctaagcacacagaattgattgtaatgttcaattcaacatgtaagatcttccgggataggtgtttttttccccttcaggctgcataaggagggaaaaagcaataaaaaaaagaacaccacataggcc

SEQ ID NO: 47950 - DNA, 600 bp, Chicken  19866894292550_1
atattaaccatatatcagtttctaaaagagtgcgaaaattggtttgtgagaaaattgttcttacttagacatattcctaagtcacagagccttcagcatcttttattactgctttaaagtgctaagatgcagggagataaattcacctatgaggcacatgtgcatcataggaaagggcaaactctaccagtttattagcagagtaaaatcccattttctgttactgagacctgtgtcaaacaaaacagatatgtgtagtcatgtttattttgtattttactttattatttaaaaagaacrtgattcagagccaaattgtagaggaagaggagaattcaattacctgggactacagctatagatatagtaatacccttctgcctgagaggttgctccaaagaacaaggaaattgtgtaasatggggagtttggaaaagatcgtatgaacttctggaaactatgaaagttcaagtggataaagtgtaattctgtccatgggaccttctgaacgtggactgcgagaaacaactggtgttgtcaagaaaatcgtactttttagatgcaggtctgggtagcaatgttctgcctcttgaatgggag

SEQ ID NO: 47951 - DNA, 600 bp, Chicken  19866894292550_2
tgctaagatgcagggagataaattcacctatgaggcacatgtgcatcataggaaagggcaaactctaccagtttattagcagagtaaaatcccattttctgttactgagacctgtgtcaaacaaaacagatatgtgtagtcatgtttattttgtattttactttattatttaaaaagaacrtgattcagagccaaattgtagaggaagaggagaattcaattacctgggactacagctatagatatagtaatacccttctgcctgagaggttgctccaaagaacaaggaaattgtgtaasatggggagtttggaaaagatcgtatgaacttctggaaactatgaaagttcaagtggataaagtgtaattctgtccatgggaccttctgaacgtggactgcgagaaacaactggtgttgtcaagaaaatcgtactttttagatgcaggtctgggtagcaatgttctgcctcttgaatgggagaagtgactgatgggtactcacggggagaaagaagcttcacctgaaatcagtgagaataaagatatcagtttggtaatatcagccacagagagagagagaacctcatggaaggagggaag

SEQ ID NO: 47952 - DNA, 600 bp, Chicken  19866894292552_1
gcatggaataaaattgctcagaatcattcgggaatgacagcctgcctaaaactcaatattgtcacactgctcagtaaggaatcttgctcttgggtttaccgattacatactggcgttacctttccttacgatgcttcatgctctttttttcaccttagaatgtgaacactctggggaaaaagaatttggaacatgggagagcaatgcaaatgggtacggcatgaggaatattacaaggtcatcctctttggagcattaacgtttacagtactctcacacatctcaatcaggcacttgagscttayaggatggaatagtctataaatcactggtaatacatacacatttatggaatcggatactcacattttcatttctttttagaagatcatcatcattatayaaaggcaagcttgacaccatccatccagtacaaagcttaatcacacccattaattgtgggctgcctgcaaacacagcggccacaggagcttgtcttctgcaaaagcaacatcagcatacatgtctgagtgcaggacgcayttctcaaaacgatgcttttaattttaataactgtacaaacctttgaagatgctatgg

SEQ ID NO: 47953 - DNA, 600 bp, Chicken  19866894292552_2
gaataaaattgctcagaatcattcgggaatgacagcctgcctaaaactcaatattgtcacactgctcagtaaggaatcttgctcttgggtttaccgattacatactggcgttacctttccttacgatgcttcatgctctttttttcaccttagaatgtgaacactctggggaaaaagaatttggaacatgggagagcaatgcaaatgggtacggcatgaggaatattacaaggtcatcctctttggagcattaacgtttacagtactctcacacatctcaatcaggcacttgagscttayaggatggaatagtctataaatcactggtaatacatacacatttatggaatcggatactcacattttcatttctttttagaagatcatcatcattatayaaaggcaagcttgacaccatccatccagtacaaagcttaatcacacccattaattgtgggctgcctgcaaacacagcggccacaggagcttgtcttctgcaaaagcaacatcagcatacatgtctgagtgcaggacgcayttctcaaaacgatgcttttaattttaataactgtacaaacctttgaagatgctatggcaaga

SEQ ID NO: 47954 - DNA, 600 bp, Chicken  19866894292552_3
tacatactggcgttacctttccttacgatgcttcatgctctttttttcaccttagaatgtgaacactctggggaaaaagaatttggaacatgggagagcaatgcaaatgggtacggcatgaggaatattacaaggtcatcctctttggagcattaacgtttacagtactctcacacatctcaatcaggcacttgagscttayaggatggaatagtctataaatcactggtaatacatacacatttatggaatcggatactcacattttcatttctttttagaagatcatcatcattatayaaaggcaagcttgacaccatccatccagtacaaagcttaatcacacccattaattgtgggctgcctgcaaacacagcggccacaggagcttgtcttctgcaaaagcaacatcagcatacatgtctgagtgcaggacgcayttctcaaaacgatgcttttaattttaataactgtacaaacctttgaagatgctatggcaagaattggcctgcatgacaatacctagaaagagggggacagactctttagcagggtctgctgtgataggacaaggggaaattgaggggatgtttagattgg

SEQ ID NO: 47955 - DNA, 600 bp, Chicken  19866894292552_4
ctctttggagcattaacgtttacagtactctcacacatctcaatcaggcacttgagscttayaggatggaatagtctataaatcactggtaatacatacacatttatggaatcggatactcacattttcatttctttttagaagatcatcatcattatayaaaggcaagcttgacaccatccatccagtacaaagcttaatcacacccattaattgtgggctgcctgcaaacacagcggccacaggagcttgtcttctgcaaaagcaacatcagcatacatgtctgagtgcaggacgcayttctcaaaacgatgcttttaattttaataactgtacaaacctttgaagatgctatggcaagaattggcctgcatgacaatacctagaaagagggggacagactctttagcagggtctgctgtgataggacaaggggaaattgaggggatgtttagattggatacaaggaaaaagtactttagaataagggtggtgaggcactgttacaggttgcccagtgaggtaggggatgccccatccttggagacattcaatgtcaggctggatggggctctgagcaacctgatgtagctgtaggtg

SEQ ID NO: 47956 - DNA, 600 bp, Chicken  19866894292555_1
gagtctgcagcagagataccacacattctgcacatgtctttcagcctcttactgagggactgaagatttcggcgactcaacaaacaactccaatctgaggatacaaaggacatacatttgtctagaagaacagtgcttgctgaagaacacttattctacatatgacgtagtattcacgtgtgttatcttacagctcctttgtatgctttacctaggttttcttccagaaagagattgacgctacatatattatttaacatgaaagcttcaaattgagttttaggctctaaaacgcaaacrttaccttttaattccccatgccctattcttcctaagcggcctattacgaccctccaaggcaaagagctcatctgcacgagtcccaggcaccattcccagagtttctgaagaccaagcctgcgggcagagccctttttcctgcgagctctagaattaaaacagaagagaaaacaaaacttgaacccatctgcaacaaacttctattgccacccttagaacttatttgtgctaacctgaacgttcacaggacacaagaatgctaatattgtggctcattaactgcaacttcaaatcaaaaaa

SEQ ID NO: 47957 - DNA, 600 bp, Chicken  19866894292555_2
atgacattccttctagaaatttaactcaatattacacataatactgaaattatccacttggcttaaatttgcaacatagtgggtctacaaaagcaagagatactcttacatcatcttgatgaaaataattctttgaaagaaagaatattcacatgctaaaaatcaaaggagtttggttcttacctgtttggtacatcaatattaattatgcacgtctctaactgttctccatagagatctgtacaggatgcaagcagccatctttgatcatgagacaaacagtagcctacaaaaagcacrttatacttctggccagcttctccaaaagtttctccaagctctgtttgcttgtcctttacaggagccaatataaaaggaggggtgtacagtcgaatacactcaggtctctatgaggatgacgaacagaaaacaaagtttcaagtagtgattattcctaagaactctgttcagttcacayraaagacaccaaygatttaataaaaagggatgttcctctcatctgcttattaaaagaaccacattaatcatgaagaatactcacatcagggctcttaagagctgtttccatggctaagcctg

SEQ ID NO: 47958 - DNA, 600 bp, Chicken  19866894292555_3
cttacctgtttggtacatcaatattaattatgcacgtctctaactgttctccatagagatctgtacaggatgcaagcagccatctttgatcatgagacaaacagtagcctacaaaaagcacrttatacttctggccagcttctccaaaagtttctccaagctctgtttgcttgtcctttacaggagccaatataaaaggaggggtgtacagtcgaatacactcaggtctctatgaggatgacgaacagaaaacaaagtttcaagtagtgattattcctaagaactctgttcagttcacayraaagacaccaaygatttaataaaaagggatgttcctctcatctgcttattaaaagaaccacattaatcatgaagaatactcacatcagggctcttaagagctgtttccatggctaagcctgggccaaagccagttaacgttttcacattggtggaagatggaagaggtctccgacactgagtaaaagctgaaaatgctaaagacttcaaatgctgagtataaatctgccggtcttcgtgtttcacaggctgcagaaggtactgacacggaacgatctagaacaggtcacacagggaaat

SEQ ID NO: 47959 - DNA, 600 bp, Chicken  19866894292555_4
ttacctgtttggtacatcaatattaattatgcacgtctctaactgttctccatagagatctgtacaggatgcaagcagccatctttgatcatgagacaaacagtagcctacaaaaagcacrttatacttctggccagcttctccaaaagtttctccaagctctgtttgcttgtcctttacaggagccaatataaaaggaggggtgtacagtcgaatacactcaggtctctatgaggatgacgaacagaaaacaaagtttcaagtagtgattattcctaagaactctgttcagttcacayraaagacaccaaygatttaataaaaagggatgttcctctcatctgcttattaaaagaaccacattaatcatgaagaatactcacatcagggctcttaagagctgtttccatggctaagcctgggccaaagccagttaacgttttcacattggtggaagatggaagaggtctccgacactgagtaaaagctgaaaatgctaaagacttcaaatgctgagtataaatctgccggtcttcgtgtttcacaggctgcagaaggtactgacacggaacgatctagaacaggtcacacagggaaata

SEQ ID NO: 47960 - DNA, 600 bp, Chicken  19866894292555_5
tacatcaatattaattatgcacgtctctaactgttctccatagagatctgtacaggatgcaagcagccatctttgatcatgagacaaacagtagcctacaaaaagcacrttatacttctggccagcttctccaaaagtttctccaagctctgtttgcttgtcctttacaggagccaatataaaaggaggggtgtacagtcgaatacactcaggtctctatgaggatgacgaacagaaaacaaagtttcaagtagtgattattcctaagaactctgttcagttcacayraaagacaccaaygatttaataaaaagggatgttcctctcatctgcttattaaaagaaccacattaatcatgaagaatactcacatcagggctcttaagagctgtttccatggctaagcctgggccaaagccagttaacgttttcacattggtggaagatggaagaggtctccgacactgagtaaaagctgaaaatgctaaagacttcaaatgctgagtataaatctgccggtcttcgtgtttcacaggctgcagaaggtactgacacggaacgatctagaacaggtcacacagggaaataaaaytgtttcat

SEQ ID NO: 47961 - DNA, 600 bp, Chicken  19866894292555_6
acaccaaygatttaataaaaagggatgttcctctcatctgcttattaaaagaaccacattaatcatgaagaatactcacatcagggctcttaagagctgtttccatggctaagcctgggccaaagccagttaacgttttcacattggtggaagatggaagaggtctccgacactgagtaaaagctgaaaatgctaaagacttcaaatgctgagtataaatctgccggtcttcgtgtttcacaggctgcagaaggtactgacacggaacgatctagaacaggtcacacagggaaataaaaytgtttcattattacatcttttgagatagtatttgggtaaactgcattcaggatttaactccacaatcatttctttaattctttgaggtctgccacttcttctaaagctacacgggacttcaggtaatcattctcattgaaaatttcctcagagaacagaagaagggcattatcacctccaaaacacagctaaagccaaaggtattttgttaggcacatttctgtgtgacactgtggatattggcttacctgcacagaaattatattcttgatgttgggaggaagaacctgaaccatctct

SEQ ID NO: 47962 - DNA, 600 bp, Chicken  19866894292557_1
ggctaacctagggaagtataaagtgaaatttgcctctcagaactacatgttgagttttatatagctacttatcttttttgaaaatggtatgacaaacgtttacaaacataaaacaagatgatacacaagacaataaagactggaacacatttgaggtatcatttgcttagccaaggtggaataagaagctgagactcttttatattacatttttatctgtcatggtttaaagtgtttagtaaaacaacatttatggttttataacagtaaagaagtatattccgtggaatggtgctttcmaaagaaatgaaaatcagtttccaatcaagtcttaagtgccatcatagacctctccagagatgttctctttgttttactgatgtacttcagatgttcttctccagttgtggaacacgtggaaaatacaaatgatttcccacactattgttatccattttttccacattgttaaagactaatattgccttcttcttacctacatttcccatggagagatagtaaatgttttaagtggcttcttctaaaaaggcagcagaaagaaaaggagaggaaagagaaaggaaatttatcataagtgaa

SEQ ID NO: 47963 - DNA, 600 bp, Chicken  19866894292559_1
cggttaataataacaagacccagaagtcacaaatgaggtcataaagggctttataaaaaacatttaatatgcaagtaaaatgtggggcaacccattatgtaatattatttatatacatttgttttaatttctttaccatgtcttctgatttgaatgatttccctttaagtcaagagctgtttaaacaagtacttctctggcaaactcaagtgatacgcaacagtttctctggtttgtctgttataggatggggactttttgcttagtatgctcttaaattccacgagtaaggagataggwcctatcctggttattttataacaagtaaagggtttgatgactgcttggacatgcatctacaaaacttgtctggtgtatgtggggctgccctctaaaaagattacttgggatttaggaatcaagccattacatatcaatacagcctcaaaagcagtctctttatgacgacttgctttctaacagctccaagcacaaagatgtgctatgagatgatgcacaaagatgaaactatatatatatatatatatgtatacagttgcaaggtataaagcaacataccctgaaagataggaaccacat

SEQ ID NO: 47964 - DNA, 599 bp, Chicken  19866894292564_1
  misc_feature (1)..(86): n is any nucleotide
nnnnnnnnnnnnnnnnnnnnnnnnnnnnnnnnnnnnnnnnnnnnnnnnnnnnnnnnnnnnnnnnnnnnnnnnnnnnnnnnnnnnnntcccctgcccagtttttggcgctggcttttggacaagaagccctgcccatgggaagtgacccttctgcatgctaggggggaggatgagctgactgcttggggtgcaccacttcttatttcttctttccatccacggtggttttgtgtcaactgattccatttgcctgccggcacaaaggtgatgtatgggggaacaggaaattgcagcctgatygctgtgcttcgcttacacatttcacctttcctagaagctcctgtttgtttccaagggagctttgcacccgagcaagactgtgctgagattactcacctctctgctgggctctgagtcccagcagtggggagctcagctgtgagggattttaacgtgctgaaataccccatgtgtttaatggagaggaacagaagcatcaggagttgaactttgtgacccttatgggtcccttccaaatcaggatattctgtgattctaacttttcttctggcacttttaaaggcgagtgaagtaaatct

SEQ ID NO: 47965 - DNA, 599 bp, Chicken  19866894292565_1
  misc_feature (1)..(89): n is any nucleotide
nnnnnnnnnnnnnnnnnnnnnnnnnnnnnnnnnnnnnnnnnnnnnnnnnnnnnnnnnnnnnnnnnnnnnnnnnnnnnnnnnnnnnnnnntgacctgcaaaggcactcaggggcacagcccttgcccaaagggatgcctttactctttcctcagtgtctgctcccctctcctgggcaggtggggaccgagttcaccactatcctgtacaacttcatgtgcaacagcagctgtgtgggaggaatgaacaggagacccatcctcattatcatcaccctggagacgagagagtaagtggctgcmggagcaccattcttgccttaggggaaaggctgctttctgctggctaggaagwgggcaggggaggtacagtggacccattgcagtgctggcttctccccacacagctgaagccttcctctgccccaggagctcctcctcccacaggagactgctcctgctctggctgttcgcagaggggctccccacacccaggaatctgagccaggccataacatgctgggctgagcccaggtgaacgtccctggcagaaacaaattcaccaattcctctctcctcctagtggccaagtcctaggaagg

SEQ ID NO: 47966 - DNA, 599 bp, Chicken  19866894292565_2
  misc_feature (1)..(37): n is any nucleotide
nnnnnnnnnnnnnnnnnnnnnnnnnnnnnnnnnnnnntgacctgcaaaggcactcaggggcacagcccttgcccaaagggatgcctttactctttcctcagtgtctgctcccctctcctgggcaggtggggaccgagttcaccactatcctgtacaacttcatgtgcaacagcagctgtgtgggaggaatgaacaggagacccatcctcattatcatcaccctggagacgagagagtaagtggctgcmggagcaccattcttgccttaggggaaaggctgctttctgctggctaggaagwgggcaggggaggtacagtggacccattgcagtgctggcttctccccacacagctgaagccttcctctgccccaggagctcctcctcccacaggagactgctcctgctctggctgttcgcagaggggctccccacacccaggaatctgagccaggccataacatgctgggctgagcccaggtgaacgtccctggcagaaacaaattcaccaattcctctctcctcctagtggccaagtcctaggaaggcgatcatttgagggacggatctgtgcctgtcctggcagagaccggaaagctg

SEQ ID NO: 47967 - DNA, 600 bp, Chicken  19866894292572_1
tcagcagacatagaagaaaacattagatgacagtctttgcttgtgggtaataatagcaatctactgtgccattgatagtagaagtcatttgtatcatggcatttaatgtatactaatgaattaccagttttattatttgagcctgtattttagatccaagtagagatcaattgcatggaatatccttgctttaaaaaaaaaaaaaaaaaagagataacaataaacacaaacatgattgttattgctagtaactgtattgccttaagactttatttagtcattcatttttctacaaatagyaattccagtagcttgagcacccctcgaattactgtgtggaaggcagtctgtaccaaattcataaagttcctgcttcttccttattctgcaattccaaaatctgttgtttgagaaaactcccatgacacttgtctcataaacattataaggttcttcaaaacctgcggctgttcagcacatcacaaagaaattagttttactccatcaaagtcaatttggtatcatcaagatttattcaataaatgttaatttataatgatagagtactccctgttttatactgtggttttatatattgca

SEQ ID NO: 47968 - DNA, 600 bp, Chicken  19866894292575_1
gcacacataagacagagaatggaaatgaagctttttcataagttctgactgtcacaggttttgtttattggtttatgtaactggtaagtcttgatgaagactacagctgcctgtctgctcactactaccacctgcctgcctgtctcagttttctatcctctcttacctgcaccactgcctcttgtttccttccaatcctctcagacatttagattaggatttaaaaattttgtgaagcagaggtttgtttgtttttagttcagatacaaaactgcatgaagcatgaaaaccaaggaggtrgtgaagaacaaaagggagctgctaatgtctttgccaggctcagctgcagatggaaytggagtctccatggcatargcagattgccacttaaattaataatgaatcaacaaggatactaaatgattacttaggccagaaattataagcagttacatggatatttttaatactacagagtcatcagtttttaaaaatgtagtacagttgaaaaaacagtgctgaaaaagaagcatctgtctggtgattcaggtataccatgcactgaagctattctctatatacttccaatatgtttattat

SEQ ID NO: 47969 - DNA, 600 bp, Chicken  19866894292575_2
ggttttgtttattggtttatgtaactggtaagtcttgatgaagactacagctgcctgtctgctcactactaccacctgcctgcctgtctcagttttctatcctctcttacctgcaccactgcctcttgtttccttccaatcctctcagacatttagattaggatttaaaaattttgtgaagcagaggtttgtttgtttttagttcagatacaaaactgcatgaagcatgaaaaccaaggaggtrgtgaagaacaaaagggagctgctaatgtctttgccaggctcagctgcagatggaaytggagtctccatggcatargcagattgccacttaaattaataatgaatcaacaaggatactaaatgattacttaggccagaaattataagcagttacatggatatttttaatactacagagtcatcagtttttaaaaatgtagtacagttgaaaaaacagtgctgaaaaagaagcatctgtctggtgattcaggtataccatgcactgaagctattctctatatacttccaatatgtttattatcccttatcaatatatagacagctgaattctaattcaactgcaaagtattctgatta

SEQ ID NO: 47970 - DNA, 600 bp, Chicken  19866894292575_3
tgtaactggtaagtcttgatgaagactacagctgcctgtctgctcactactaccacctgcctgcctgtctcagttttctatcctctcttacctgcaccactgcctcttgtttccttccaatcctctcagacatttagattaggatttaaaaattttgtgaagcagaggtttgtttgtttttagttcagatacaaaactgcatgaagcatgaaaaccaaggaggtrgtgaagaacaaaagggagctgctaatgtctttgccaggctcagctgcagatggaaytggagtctccatggcatargcagattgccacttaaattaataatgaatcaacaaggatactaaatgattacttaggccagaaattataagcagttacatggatatttttaatactacagagtcatcagtttttaaaaatgtagtacagttgaaaaaacagtgctgaaaaagaagcatctgtctggtgattcaggtataccatgcactgaagctattctctatatacttccaatatgtttattatcccttatcaatatatagacagctgaattctaattcaactgcaaagtattctgattaaacctaagtttccttatct

SEQ ID NO: 47971 - DNA, 600 bp, Chicken  19866894292575_4
tgaagaagtagtttcctttggaaacacaaagggtacaacttgtccagaaagtgaaatccactgatttcagtaacacaggagtttacatataagctcattgccccaggctgctttcacagtccatgaagagaaataggcacttttggagtaaaattcatctcatctcatcttaattagatacctatttttccatgacatgaatcaagaaagaagtctctcctcctcctttccatcgactccaatagctgtaggtcagttagtctggatgtagatgcctgcaacatagctgtctagaattasgatagctatcatatcttatgctaagcggttaagcttgctgtttatcccttaacccaattctaatggatgagacagaaggaaagacacaattcttaattctcaaggtgaaggatgatatttttaattcatgcaaatctattaccaggtaaagtctaagtctataataacattaaataacctaaattgatacaacgtgctaattacttagcattactctccttggaaaatctaaggccagatgacagatattgtttattttcctgtgcattttcactaatagtgccactagacacatctatt

SEQ ID NO: 47972 - DNA, 585 bp, Chicken  19866894292583_1
attaaagttaactactagcttcataatttttcacaccacaatcatacacccacttcaaaacagagtctgtttttgagtattcctcctcctactctttaaccaacttgagctgtcctctgtatactctgcaattctgactccttttagatgcaggtataaaaattcaagacagagaaagaagttctacacagtaaaaaagcactgtctcactctcagcatctttcctaacagcaaattgcagttgtgattttaatttttgctgctgttgcacattcaacaaaagcatgtttactaatatgktttttttttaactgcttgtgattacaaattcttctctccctttgatcatggctgtaattgcaagccaaaatatgattgaacatgcctaatcaattattgttttaaggcataatcttgattaacragggtgaagactcctgaattctgcyacaaagaagcaccctatccacacttcattttgaaatgatggtaaaaagaatacataaacatacttcctaaaactctattttcatgtattgaactcagatagctcttccccatactctcacttaacagacacaagtt

SEQ ID NO: 47973 - DNA, 461 bp, Chicken  19866894292583_2
tctgcaattctgactccttttagatgcaggtataaaaattcaagacagagaaagaagttctacacagtaaaaaagcactgtctcactctcagcatctttcctaacagcaaattgcagttgtgattttaatttttgctgctgttgcacattcaacaaaagcatgtttactaatatgktttttttttaactgcttgtgattacaaattcttctctccctttgatcatggctgtaattgcaagccaaaatatgattgaacatgcctaatcaattattgttttaaggcataatcttgattaacragggtgaagactcctgaattctgcyacaaagaagcaccctatccacacttcattttgaaatgatggtaaaaagaatacataaacatacttcctaaaactctattttcatgtattgaactcagatagctcttccccatactctcacttaacagacacaagtt

SEQ ID NO: 47974 - DNA, 436 bp, Chicken  19866894292583_3
gcaggtataaaaattcaagacagagaaagaagttctacacagtaaaaaagcactgtctcactctcagcatctttcctaacagcaaattgcagttgtgattttaatttttgctgctgttgcacattcaacaaaagcatgtttactaatatgktttttttttaactgcttgtgattacaaattcttctctccctttgatcatggctgtaattgcaagccaaaatatgattgaacatgcctaatcaattattgttttaaggcataatcttgattaacragggtgaagactcctgaattctgcyacaaagaagcaccctatccacacttcattttgaaatgatggtaaaaagaatacataaacatacttcctaaaactctattttcatgtattgaactcagatagctcttccccatactctcacttaacagacacaagtt

SEQ ID NO: 47975 - DNA, 600 bp, Chicken  19866894292586_1
accatgaaaacttgtgaaaaatattattcatggtcacaaattccctctgtaggtgcaatagattaactcacctttgtgtagtccagatgtttttaatgtgattcaatatttggttctactgaaacagatcaggtctgtggctttcagaacgtctggtgtatgtcagtgcctttttccatcaagactgtcagtctctaatgctctttctcctgactttgctccatgttcagcagacagatgaattcacagtcaaacattttggggctatcttattgctattgtcagtgtttctgtgctgcraagaggttatggtagacatcctcccagctatgtgagctcattcctaataaaagtacatatttcttaactgttaggtaggaaaagggaatctcaytcagtcgattctcagtgaaactgaaaaataaaggacaggaatcagaatcaacaccattaatatatatgagttagcaatcaaaaataccatgtggtctgttggctcattttgttccctgcttttcagtctttccctatatttgatctcttggctgaaatataaaatccattaagaatgatacgtttcagcaaaaatattgataagtg

SEQ ID NO: 47976 - DNA, 600 bp, Chicken  19866894292586_2
aatgtgattcaatatttggttctactgaaacagatcaggtctgtggctttcagaacgtctggtgtatgtcagtgcctttttccatcaagactgtcagtctctaatgctctttctcctgactttgctccatgttcagcagacagatgaattcacagtcaaacattttggggctatcttattgctattgtcagtgtttctgtgctgcraagaggttatggtagacatcctcccagctatgtgagctcattcctaataaaagtacatatttcttaactgttaggtaggaaaagggaatctcaytcagtcgattctcagtgaaactgaaaaataaaggacaggaatcagaatcaacaccattaatatatatgagttagcaatcaaaaataccatgtggtctgttggctcattttgttccctgcttttcagtctttccctatatttgatctcttggctgaaatataaaatccattaagaatgatacgtttcagcaaaaatattgataagtgatttttttcttgccactgcattcactgggagagcagccaagtctagagttacaaaacacatgaacagtaggtaaaaggagattaccttcttgat

SEQ ID NO: 47977 - DNA, 600 bp, Chicken  19866894292595_1
ctggttattccccacagtatttctaaatctaaagctaatcttaagagtttcttatattatttactggggatttggttcataattctttccaagctttctatgcaatcctaatctccaccattaggcaaaactgtgttattaaggtcattgctgcacatttctggagggacactagtcatgccagatagctgtcttttataacgctttcacagactgggactgaagccttcagggcagaaacttcgatttcctttacagattcaagctgccagtttttacagtgcagtaagcaaaagaggrgggaatagtccctttaatccytttggcctatgaatarataacagaaatgaattcctgttatcgacacagtatattgagcacatttgatgtattatggtatcacaaatgtgctgagaacgtttgatgtgttatagtaagtatcacaaatgtgttttatgtaacgtacgtattctgtaattcacaattccttttggttcccttagacacaacaaagacgtgaatataagtacttttagcttcactgcctcagttttggcatcattaaatacttaaagaaaccctaatagaataagataactc

SEQ ID NO: 47978 - DNA, 600 bp, Chicken  19866894292595_2
tctaaatctaaagctaatcttaagagtttcttatattatttactggggatttggttcataattctttccaagctttctatgcaatcctaatctccaccattaggcaaaactgtgttattaaggtcattgctgcacatttctggagggacactagtcatgccagatagctgtcttttataacgctttcacagactgggactgaagccttcagggcagaaacttcgatttcctttacagattcaagctgccagtttttacagtgcagtaagcaaaagaggrgggaatagtccctttaatccytttggcctatgaatarataacagaaatgaattcctgttatcgacacagtatattgagcacatttgatgtattatggtatcacaaatgtgctgagaacgtttgatgtgttatagtaagtatcacaaatgtgttttatgtaacgtacgtattctgtaattcacaattccttttggttcccttagacacaacaaagacgtgaatataagtacttttagcttcactgcctcagttttggcatcattaaatacttaaagaaaccctaatagaataagataactccacctttcctggccacatttc

SEQ ID NO: 47979 - DNA, 600 bp, Chicken  19866894292595_3
atcttaagagtttcttatattatttactggggatttggttcataattctttccaagctttctatgcaatcctaatctccaccattaggcaaaactgtgttattaaggtcattgctgcacatttctggagggacactagtcatgccagatagctgtcttttataacgctttcacagactgggactgaagccttcagggcagaaacttcgatttcctttacagattcaagctgccagtttttacagtgcagtaagcaaaagaggrgggaatagtccctttaatccytttggcctatgaatarataacagaaatgaattcctgttatcgacacagtatattgagcacatttgatgtattatggtatcacaaatgtgctgagaacgtttgatgtgttatagtaagtatcacaaatgtgttttatgtaacgtacgtattctgtaattcacaattccttttggttcccttagacacaacaaagacgtgaatataagtacttttagcttcactgcctcagttttggcatcattaaatacttaaagaaaccctaatagaataagataactccacctttcctggccacatttctacttttcagaatgtg

SEQ ID NO: 47980 - DNA, 599 bp, Chicken  19866894292597_1
  misc_feature (1)..(152): n is any nucleotide
nnnnnnnnnnnnnnnnnnnnnnnnnnnnnnnnnnnnnnnnnnnnnnnnnnnnnnnnnnnnnnnnnnnnnnnnnnnnnnnnnnnnnnnnnnnnnnnnnnnnnnnnnnnnnnnnnnnnnnnnnnnnnnnnnnnnnnnnnnnnnnnnnnnnnnnnatatccaacctgaacctccgctggggcaacttaaggccattacctcttacccttatcattgttacatgggagaagaggctgacccccactgctctacaacctcccttcaggcagctgtagagagcaataaagtctcccctgagcctcyccttctccagactgaacaatcccagttccctcagctgctcttcataagatatgtgcttcagacccttcacagctttgttgcccttctctggacatgaatggtggctgagtgtgtgctctgtttgcatctgctagagctgaaacctgcggcctgcagggagctgasgcttctcaccagaagctgggccgcattggctcgtcccacctgtgtgaatcctgctaaggagacctgtgagtgcacctgccctccagtcaccatgctgggcagggaggaggcaactttcctgccctagcaggatt

SEQ ID NO: 47981 - DNA, 600 bp, Chicken  19866894292597_2
acctccgctggggcaacttaaggccattacctcttacccttatcattgttacatgggagaagaggctgacccccactgctctacaacctcccttcaggcagctgtagagagcaataaagtctcccctgagcctcyccttctccagactgaacaatcccagttccctcagctgctcttcataagatatgtgcttcagacccttcacagctttgttgcccttctctggacatgaatggtggctgagtgtgtgctctgtttgcatctgctagagctgaaacctgcggcctgcagggagctgasgcttctcaccagaagctgggccgcattggctcgtcccacctgtgtgaatcctgctaaggagacctgtgagtgcacctgccctccagtcaccatgctgggcagggaggaggcaactttcctgccctagcaggattcactcatcttttcccattccttttccttttaaaatttaggtattccctctggagcatcactgtaccaggcttctatgaggaaaggctgttgtgactcccacacagcagggaacgttctcagcaaatggtctgcctgggcaccctgcatgagcacgagcagtggcac

SEQ ID NO: 47982 - DNA, 600 bp, Chicken  19866894292601_1
gtgtgtgggtgtgtgtgtctgtgtgtgtgtgtgtgtgtctgtgtgttagaagacagatttttatgatgagtttttaactctgtcatgttataattggatctgtataggcaaaaggtgcatgcctgacaatatacttttttaatctaaattgaaaaaaatagaaaaagacatggcaagtcttgcctctcaaagcatcatttgttttactgaataaatggaattgtcaggtagcaggtttaaattgctcccattttgcaaatgtgaaggattctccatgtaaggaaataagctatgatcatragaatcagcatctaactagctttctataaagagtcagaaatgatctctcatgggagagaggatgattatgacttcctgacaaatttttctttctattttctgtctattatctgaagtaggttgcttgtgcccaaaataagagctgtctctgtgctagttgttwgtaggaagtactcagctcaggctctgatttttccytggattctctatatgcttgcttcaagacaagcagccatgctatataartatataaagcagaattgttgcagtttcctcagaacacaaaacctcattatattc

SEQ ID NO: 47983 - DNA, 600 bp, Chicken  19866894292601_2
aaagacatggcaagtcttgcctctcaaagcatcatttgttttactgaataaatggaattgtcaggtagcaggtttaaattgctcccattttgcaaatgtgaaggattctccatgtaaggaaataagctatgatcatragaatcagcatctaactagctttctataaagagtcagaaatgatctctcatgggagagaggatgattatgacttcctgacaaatttttctttctattttctgtctattatctgaagtaggttgcttgtgcccaaaataagagctgtctctgtgctagttgttwgtaggaagtactcagctcaggctctgatttttccytggattctctatatgcttgcttcaagacaagcagccatgctatataartatataaagcagaattgttgcagtttcctcagaacacaaaacctcattatattcacaggtacttatatttctcaagtatttcaaattctaaaagttggtggatgagaatgtatgtcatttatttgttaaaattgccccacaaagagactctttataataactttaattaatgtagcctgcttttcaagtggattaattggctgctcatcatgtaaac

SEQ ID NO: 47984 - DNA, 600 bp, Chicken  19866894292601_3
ttgttttactgaataaatggaattgtcaggtagcaggtttaaattgctcccattttgcaaatgtgaaggattctccatgtaaggaaataagctatgatcatragaatcagcatctaactagctttctataaagagtcagaaatgatctctcatgggagagaggatgattatgacttcctgacaaatttttctttctattttctgtctattatctgaagtaggttgcttgtgcccaaaataagagctgtctctgtgctagttgttwgtaggaagtactcagctcaggctctgatttttccytggattctctatatgcttgcttcaagacaagcagccatgctatataartatataaagcagaattgttgcagtttcctcagaacacaaaacctcattatattcacaggtacttatatttctcaagtatttcaaattctaaaagttggtggatgagaatgtatgtcatttatttgttaaaattgccccacaaagagactctttataataactttaattaatgtagcctgcttttcaagtggattaattggctgctcatcatgtaaacaacgtgctatttatatgttgatgtattattcccat

SEQ ID NO: 47985 - DNA, 600 bp, Chicken  19866894292601_4
cccattttgcaaatgtgaaggattctccatgtaaggaaataagctatgatcatragaatcagcatctaactagctttctataaagagtcagaaatgatctctcatgggagagaggatgattatgacttcctgacaaatttttctttctattttctgtctattatctgaagtaggttgcttgtgcccaaaataagagctgtctctgtgctagttgttwgtaggaagtactcagctcaggctctgatttttccytggattctctatatgcttgcttcaagacaagcagccatgctatataartatataaagcagaattgttgcagtttcctcagaacacaaaacctcattatattcacaggtacttatatttctcaagtatttcaaattctaaaagttggtggatgagaatgtatgtcatttatttgttaaaattgccccacaaagagactctttataataactttaattaatgtagcctgcttttcaagtggattaattggctgctcatcatgtaaacaacgtgctatttatatgttgatgtattattcccatggaccaaacgcagaggtgagtgcaggrtgtgcagtccagacagaagca

SEQ ID NO: 47986 - DNA, 600 bp, Chicken  19866894292601_5
caagcagccatgctatataartatataaagcagaattgttgcagtttcctcagaacacaaaacctcattatattcacaggtacttatatttctcaagtatttcaaattctaaaagttggtggatgagaatgtatgtcatttatttgttaaaattgccccacaaagagactctttataataactttaattaatgtagcctgcttttcaagtggattaattggctgctcatcatgtaaacaacgtgctatttatatgttgatgtattattcccatggaccaaacgcagaggtgagtgcaggrtgtgcagtccagacagaagcatgcagaactagactgccactcggtggtgtggagatgatcatttcttctgccattacctactggcactgacatgacagggctatatcgtcagcttgacaagataaagtaacatgggtgcagaaatgctgtacagctttagtataatatcctaggaatgccagagtgatcataaatagattctgtaagcaattctgaaaaggacaataggaactgaaatgccatgaagcttaattttgtcaaacagcaaaatgccataattaaagagaactgcctgccttg

SEQ ID NO: 47987 - DNA, 599 bp, Chicken  19866894292604_1
  misc_feature (1)..(193): n is any nucleotide
nnnnnnnnnnnnnnnnnnnnnnnnnnnnnnnnnnnnnnnnnnnnnnnnnnnnnnnnnnnnnnnnnnnnnnnnnnnnnnnnnnnnnnnnnnnnnnnnnnnnnnnnnnnnnnnnnnnnnnnnnnnnnnnnnnnnnnnnnnnnnnnnnnnnnnnnnnnnnnnnnnnnnnnnnnnnnnnnnnnnnnnnnnnnnnnnncttcttcaagccttggagggaacatgtgcctcagcttttatggttgaagatgtaaatttctagtagcagtgggagacaagcaatacaatacttgaatccagcaatcrgtgctataagcccaatctcacttgactggatttcttttacttctcactactgaagataaaatgcagataaagactgacatgaagaaatggcattagtttctccatttatttcacttcatyaaagtgaaaatcatatgcaacgtctgtggaagatgctggtctctgtttatgcaaagcagcggctgtaccctaaaaacatgtatagggcaatacttcatacagtattgtgtataaggatgagttttagataggagtcatttcaaactgaagagctgctttttgccatttattcttcagtc

SEQ ID NO: 47988 - DNA, 599 bp, Chicken  19866894292604_2
  misc_feature (1)..(73): n is any nucleotide
nnnnnnnnnnnnnnnnnnnnnnnnnnnnnnnnnnnnnnnnnnnnnnnnnnnnnnnnnnnnnnnnnnnnnnnnncttcttcaagccttggagggaacatgtgcctcagcttttatggttgaagatgtaaatttctagtagcagtgggagacaagcaatacaatacttgaatccagcaatcrgtgctataagcccaatctcacttgactggatttcttttacttctcactactgaagataaaatgcagataaagactgacatgaagaaatggcattagtttctccatttatttcacttcatyaaagtgaaaatcatatgcaacgtctgtggaagatgctggtctctgtttatgcaaagcagcggctgtaccctaaaaacatgtatagggcaatacttcatacagtattgtgtataaggatgagttttagataggagtcatttcaaactgaagagctgctttttgccatttattcttcagtcctacctttgccatagaatgaaaatataaaatattatagctttatttgcaaaagatcaaattgctctgacttgcaaaccctgcaatgaagttttgggcaactattattctggaagtgaaaa

SEQ ID NO: 47989 - DNA, 599 bp, Chicken  19866894292610_1
  misc_feature (1)..(142): n is any nucleotide
nnnnnnnnnnnnnnnnnnnnnnnnnnnnnnnnnnnnnnnnnnnnnnnnnnnnnnnnnnnnnnnnnnnnnnnnnnnnnnnnnnnnnnnnnnnnnnnnnnnnnnnnnnnnnnnnnnnnnnnnnnnnnnnnnnnnnnnnnnnnnnttacaaaaaggcttttgagtaaccccacattttaagtcacatagttgtttagatttatgcattggcaaaaacagtgcttgtatgtttttattaccaagggtcagtgtgataagcatcggaagtatttgcttcatagtcttctacagtctctcctctartgctggtcaagtctgcctcattctgctgatggtgctggcatgtagcactgtagtgttttaaaagactttattaaattcttattaaagaaaaatgccctttcctcctgtttttaataaaagaatataaagtgtgacaaccttttgatggactggttaaataaaawatgaagtgaaaaggcaggatttcctaggtggcattttttccacgggtgtttcctctaagtttagcctttctgcaatatcttggtagtattgctcattacagaaatgcacttctggaaattatgggaattgccttc

SEQ ID NO: 47990 - DNA, 600 bp, Chicken  19866894292610_2
ccccacattttaagtcacatagttgtttagatttatgcattggcaaaaacagtgcttgtatgtttttattaccaagggtcagtgtgataagcatcggaagtatttgcttcatagtcttctacagtctctcctctartgctggtcaagtctgcctcattctgctgatggtgctggcatgtagcactgtagtgttttaaaagactttattaaattcttattaaagaaaaatgccctttcctcctgtttttaataaaagaatataaagtgtgacaaccttttgatggactggttaaataaaawatgaagtgaaaaggcaggatttcctaggtggcattttttccacgggtgtttcctctaagtttagcctttctgcaatatcttggtagtattgctcattacagaaatgcacttctggaaattatgggaattgccttctgctgatacagtcaattttttttttttttttttgaggaaatattaaaaataggtacaaattgatatctcacagacgtttcttgagagaaattctttgcctcaccacaaagtgacatacatgagaggtgaaatagtctgaaagcagtgaattggatccgccaaaag

SEQ ID NO: 47991 - DNA, 599 bp, Chicken  19866894292612_1
  misc_feature (1)..(151): n is any nucleotide
nnnnnnnnnnnnnnnnnnnnnnnnnnnnnnnnnnnnnnnnnnnnnnnnnnnnnnnnnnnnnnnnnnnnnnnnnnnnnnnnnnnnnnnnnnnnnnnnnnnnnnnnnnnnnnnnnnnnnnnnnnnnnnnnnnnnnnnnnnnnnnnnnnnnnnnccccgctgggtgtagtgccttgcaaatgagcaaatgagtcttcaatttctgtgtggaagctgctgagggaagatctgcagtcagcactcatgtctttcagcttgctgaagtggtaatggtaaacagcagaggctatccctctctccaamaaacacatcagaacgtctgcattcaaaccggggtctgatattgaccaggagaagggatacctgaataacaccctgtatcagacatggaaatagttcagaatttgcgtgcaagacagcaaaccttattgtttttaagaagctgcagtcagaattcgagcagtgagagatcgctgaggaaagcagctcccatcgtgctattatttttattgttgtgaaagcaaatgactatgaataaatgcaccagtaagtacaagtattttgaactacatccttttttttattgcaaaacaattgttaca

SEQ ID NO: 47992 - DNA, 600 bp, Chicken  19866894292613_1
aactgctggtaaggtgcctcgctttcttttcattctaaaaaacacagctcagccttcttaagagaatattctctgcacccaggtaagattcagctgtggaacgccatcaagctttgcctctgcagtgcgcacacgaaagagctgctgagacagatcacatctgttgccttttagagcataagcttgcttttagaggggctgagtgtaaggcacttaatcctcaggtcccccttagtcacctgccctctagctgactgacacactgaaacctgtccccatctgggcagaggagaggaatcrcttcagcacaatactcttccctccctttcccatttccttccctcatgctcttaacacagagttgcaagttcaagtgcaattttcctctcctccttcccttacgccaaggggtatggatatcctaatgcagctcagctgagtctctgcttgcccaaccatgcaagtagcacagaaatgaaagtacgacaaagaactgagacctcacttgtgagagacaactctgtggctagctcacctcagccaagtcctagcagccaaagatcagttactttctttgcagtatcaagtaatgaagagaac

SEQ ID NO: 47993 - DNA, 600 bp, Chicken  19866894292620_1
atttaggtcacgtgcatcctgcattatttcgcaatgttccttggatttaatttggtcactggactttggcatcatgtaggtgtgttaaatgaggaagcacgctatgatacaggctgtggcagtgaacgtcacagggaaggttgctactgtgttgaatgcacagtttgacttgggaatagtccaaatcttttcataattatcaatacatttcaaacagcagcttacactgaatgcacacatatttataccaggaaacctgtaatttattaatcctagctattaaagtaatacatagggttstttgattgatgtttggctctgcttcctgggaattatgcaaagggaaaagatctaawgtaatggatacacaagttttctccgttatacagaggaastgtttagatatcttcatctggatattctcatgactacgtgtctgtggctgaattgatcagtctttttttttttgtcctttgccagttaaagtaggcattacaggaactgttcctttccccagtaacctgtctgtggggaggagttcaaaaggctgcagtacagtcgtgttaactgccagtgcccagatggggtagaacagcagct

SEQ ID NO: 47994 - DNA, 600 bp, Chicken  19866894292620_2
cactggactttggcatcatgtaggtgtgttaaatgaggaagcacgctatgatacaggctgtggcagtgaacgtcacagggaaggttgctactgtgttgaatgcacagtttgacttgggaatagtccaaatcttttcataattatcaatacatttcaaacagcagcttacactgaatgcacacatatttataccaggaaacctgtaatttattaatcctagctattaaagtaatacatagggttstttgattgatgtttggctctgcttcctgggaattatgcaaagggaaaagatctaawgtaatggatacacaagttttctccgttatacagaggaastgtttagatatcttcatctggatattctcatgactacgtgtctgtggctgaattgatcagtctttttttttttgtcctttgccagttaaagtaggcattacaggaactgttcctttccccagtaacctgtctgtggggaggagttcaaaaggctgcagtacagtcgtgttaactgccagtgcccagatggggtagaacagcagctgatagtgaaaactctctctccaacataccctttcctgcagcatttccatactgggt

SEQ ID NO: 47995 - DNA, 600 bp, Chicken  19866894292620_3
agcacgctatgatacaggctgtggcagtgaacgtcacagggaaggttgctactgtgttgaatgcacagtttgacttgggaatagtccaaatcttttcataattatcaatacatttcaaacagcagcttacactgaatgcacacatatttataccaggaaacctgtaatttattaatcctagctattaaagtaatacatagggttstttgattgatgtttggctctgcttcctgggaattatgcaaagggaaaagatctaawgtaatggatacacaagttttctccgttatacagaggaastgtttagatatcttcatctggatattctcatgactacgtgtctgtggctgaattgatcagtctttttttttttgtcctttgccagttaaagtaggcattacaggaactgttcctttccccagtaacctgtctgtggggaggagttcaaaaggctgcagtacagtcgtgttaactgccagtgcccagatggggtagaacagcagctgatagtgaaaactctctctccaacataccctttcctgcagcatttccatactgggtctcttcctgcttttcactcgggccatgttcttggtcagg

SEQ ID NO: 47996 - DNA, 600 bp, Chicken  19866894292622_1
ctttccaaattacgcttggataatactttcaaggtattctcttttaaattctaaggtttttaaagttatactataagccagtcattgaatgcataccatgcaggcacaactaaaaaccgagaaggcaaatttgtaacagaagtgaatatggatttgaaagagagatgctataaattcagtgcttgtgtgtggcatttggagaacatttgtgatcgagatgtttataccactaaggtaaagttctggttttgctcaccatgctttctcattcattttcaaacacttttccttctgagcttstcaattttgccaaaagraggtctgyttgctatccttctagaactgctggttaagtgctttattgcttaaaaatcttaatacaactgtaccctaaatagctgtactgtggagcagatgtctggacctctgtgaccagactagcttgcagcccagacagaacgaccgaagaacaactcatttgtgaactgtttgacatgcagggaagggctgcatattttcaaaacataacacagagcctcagagaggcaggatatattagccctccattttttgcattttgtttgtggtaaaaattctgtg

SEQ ID NO: 47997 - DNA, 600 bp, Chicken  19866894292622_2
ggataatactttcaaggtattctcttttaaattctaaggtttttaaagttatactataagccagtcattgaatgcataccatgcaggcacaactaaaaaccgagaaggcaaatttgtaacagaagtgaatatggatttgaaagagagatgctataaattcagtgcttgtgtgtggcatttggagaacatttgtgatcgagatgtttataccactaaggtaaagttctggttttgctcaccatgctttctcattcattttcaaacacttttccttctgagcttstcaattttgccaaaagraggtctgyttgctatccttctagaactgctggttaagtgctttattgcttaaaaatcttaatacaactgtaccctaaatagctgtactgtggagcagatgtctggacctctgtgaccagactagcttgcagcccagacagaacgaccgaagaacaactcatttgtgaactgtttgacatgcagggaagggctgcatattttcaaaacataacacagagcctcagagaggcaggatatattagccctccattttttgcattttgtttgtggtaaaaattctgtgttagtaaaatacttctt

SEQ ID NO: 47998 - DNA, 600 bp, Chicken  19866894292622_3
ctttcaaggtattctcttttaaattctaaggtttttaaagttatactataagccagtcattgaatgcataccatgcaggcacaactaaaaaccgagaaggcaaatttgtaacagaagtgaatatggatttgaaagagagatgctataaattcagtgcttgtgtgtggcatttggagaacatttgtgatcgagatgtttataccactaaggtaaagttctggttttgctcaccatgctttctcattcattttcaaacacttttccttctgagcttstcaattttgccaaaagraggtctgyttgctatccttctagaactgctggttaagtgctttattgcttaaaaatcttaatacaactgtaccctaaatagctgtactgtggagcagatgtctggacctctgtgaccagactagcttgcagcccagacagaacgaccgaagaacaactcatttgtgaactgtttgacatgcagggaagggctgcatattttcaaaacataacacagagcctcagagaggcaggatatattagccctccattttttgcattttgtttgtggtaaaaattctgtgttagtaaaatacttcttagctgata

SEQ ID NO: 47999 - DNA, 600 bp, Chicken  19866894292622_4
gctgtactgtggagcagatgtctggacctctgtgaccagactagcttgcagcccagacagaacgaccgaagaacaactcatttgtgaactgtttgacatgcagggaagggctgcatattttcaaaacataacacagagcctcagagaggcaggatatattagccctccattttttgcattttgtttgtggtaaaaattctgtgttagtaaaatacttcttagctgatatgtttagacatgtctatgcagagaagataggccaattaaagtaggcttatgaatttctagaattctagttaygttcacaatacacgcaaaatgagaagtagcttattatgtttttcctcagtttaagagaaaaaaataatagtatcttctataatactggcatataactaacacttcttattcagttggagttcataactgatgtgatagctttgctgtgtgttcacttagaggcagattatgaatcatatctycaaagttagcttaagcctraattttgaaataggagctcaggaagttgatggagttctgggtctaagctaaggaatctgcttgtgatgtaaactgcaagataaaaagccttttatgttt

SEQ ID NO: 48000 - DNA, 600 bp, Chicken  19866894292622_5
gtttgtggtaaaaattctgtgttagtaaaatacttcttagctgatatgtttagacatgtctatgcagagaagataggccaattaaagtaggcttatgaatttctagaattctagttaygttcacaatacacgcaaaatgagaagtagcttattatgtttttcctcagtttaagagaaaaaaataatagtatcttctataatactggcatataactaacacttcttattcagttggagttcataactgatgtgatagctttgctgtgtgttcacttagaggcagattatgaatcatatctycaaagttagcttaagcctraattttgaaataggagctcaggaagttgatggagttctgggtctaagctaaggaatctgcttgtgatgtaaactgcaagataaaaagccttttatgtttgttttctgttgtgaaagtaccagcttgtacttgaggtaatattttatccaaaaaatgaaagataatgaaacactaatgtttgtcaacacgtttgtattggtgaggaaaatgtttgatattcckgtaagaatcgggttaatctgacaaagactaagcttgcttctgtttcagctgaatgaggt

SEQ ID NO: 48001 - DNA, 600 bp, Chicken  19866894292622_6
tgttagtaaaatacttcttagctgatatgtttagacatgtctatgcagagaagataggccaattaaagtaggcttatgaatttctagaattctagttaygttcacaatacacgcaaaatgagaagtagcttattatgtttttcctcagtttaagagaaaaaaataatagtatcttctataatactggcatataactaacacttcttattcagttggagttcataactgatgtgatagctttgctgtgtgttcacttagaggcagattatgaatcatatctycaaagttagcttaagcctraattttgaaataggagctcaggaagttgatggagttctgggtctaagctaaggaatctgcttgtgatgtaaactgcaagataaaaagccttttatgtttgttttctgttgtgaaagtaccagcttgtacttgaggtaatattttatccaaaaaatgaaagataatgaaacactaatgtttgtcaacacgtttgtattggtgaggaaaatgtttgatattcckgtaagaatcgggttaatctgacaaagactaagcttgcttctgtttcagctgaatgaggtgctgaaaaaataagtgaaa

SEQ ID NO: 48002 - DNA, 495 bp, Chicken  19866894292622_7
taactgatgtgatagctttgctgtgtgttcacttagaggcagattatgaatcatatctycaaagttagcttaagcctraattttgaaataggagctcaggaagttgatggagttctgggtctaagctaaggaatctgcttgtgatgtaaactgcaagataaaaagccttttatgtttgttttctgttgtgaaagtaccagcttgtacttgaggtaatattttatccaaaaaatgaaagataatgaaacactaatgtttgtcaacacgtttgtattggtgaggaaaatgtttgatattcckgtaagaatcgggttaatctgacaaagactaagcttgcttctgtttcagctgaatgaggtgctgaaaaaataagtgaaaaatatcactatttggagtatcattcagttggaatacgcactgataagcatggataaaatgattttttttcactgcatacagttaatatgggatattttagtactgggttactaaaca

SEQ ID NO: 48003 - DNA, 600 bp, Chicken  19866894292623_1
tctccttctctacaaatacagaaatttaaataaaaggtacctctagctatataagatcacttgttaaagaaaaaacaggatttcagtatcaggcaggaaaatgttaattactgagatgacgctgtctctaaatccctgtgtgaaataacctgaaatacaggtgggatagttgaagggcagtttgaaaaacaagttgagatttacttcacatcttttatttgagaatcgatcagagctttgtctggaatagctacttaaagacagaatacattaagccatgatccttttagccatccatgyattatgtagtgtcaagagaggtgtttcatcacctgtttcaaaaaaaaagccaactgtatataaaagttgttttgtaaatgttgtgaagttgcaaatggatagacttagagtcacgttatggtgaaataaaggctccttaagcaaattcaaagatccaccttggatcctataacgtaataaacttacttctccatatgactctgccttgtttagtacagaaagatgcagtatttagaaaggataaactttttcctagcttaatgacatcactgaaatacacccttaacttctgaaagcccc

SEQ ID NO: 48004 - DNA, 600 bp, Chicken  19866894292625_1
gatgaggctacagcagtacggagcacatccttgaacatgactgtctttgctcagcattttctattttgatgaggtgagtcaaggctgtacagtgaagggaggtgtgcaaagcagtagccgggctggtagggacatgggaatgcaggttgtgcagaggggttagaaaaattacattccgttgaggttaagacagttaaaactgaggctaagggaggtgagaagaagggagcttcattctgtcactcactgaaaaaacatgcagctgagtgactctgctgtgatgtgagcacggtgtagacrtttatttcggtgtggcttaaartcaatgtcctactgcttgtctgaagaaatacgtaacacttggaagccaagcatgaattttacttgtatgctaaatgctcccagtgttgtaaatctcacttcaaacactgggttggtttgggatatttatccacgggaggagtgactttaagaaaaactgtggttttagtgtttgagtctcctctgtgcctggtgggtgaagcagtgcccctctaactctgggtgtgtaagaagctgttctgaaatccattaaccttcttgtgagcacctttattccag

SEQ ID NO: 48005 - DNA, 600 bp, Chicken  19866894292625_2
gcacatccttgaacatgactgtctttgctcagcattttctattttgatgaggtgagtcaaggctgtacagtgaagggaggtgtgcaaagcagtagccgggctggtagggacatgggaatgcaggttgtgcagaggggttagaaaaattacattccgttgaggttaagacagttaaaactgaggctaagggaggtgagaagaagggagcttcattctgtcactcactgaaaaaacatgcagctgagtgactctgctgtgatgtgagcacggtgtagacrtttatttcggtgtggcttaaartcaatgtcctactgcttgtctgaagaaatacgtaacacttggaagccaagcatgaattttacttgtatgctaaatgctcccagtgttgtaaatctcacttcaaacactgggttggtttgggatatttatccacgggaggagtgactttaagaaaaactgtggttttagtgtttgagtctcctctgtgcctggtgggtgaagcagtgcccctctaactctgggtgtgtaagaagctgttctgaaatccattaaccttcttgtgagcacctttattccagaagctgatggaacaagtcctat

SEQ ID NO: 48006 - DNA, 600 bp, Chicken  19866894292641_1
acaaaaacataactcctaacttgtaaaggtagttctagttcacagaacagaaatagctgggtgtttaaggcctattatcgctaatgattatgtaattggacatcatttaggacaaaatatcagattatcttctcacacggaagatattaaagatgtcttttttgaacatgttttttttttgttgcctgtctttgtctgatgttacttccacattatgttaacgagttatttttcatcgggattctagcattgatgtgactccccattatttgtttattcagtgtcctttttactagtaamattcttttattttttcctacctgccaactgtgtaaatagggctcagatttaaaaaactgcaccagttcttattccatacatcatcaccagttgcaaacactatgcagggtgcacacgtctgctgaacaacactgttctgcttttacaactttaacagcaaagctagtttttaatgttgtgcttccattaataaatattgctatagctagttctcaaaagggcagagatgctttgagtggctgacttactgaggttttccttcagacataagagttagttttctgccagaatatgaagtct

SEQ ID NO: 48007 - DNA, 600 bp, Chicken  19866894292641_2
aactcctaacttgtaaaggtagttctagttcacagaacagaaatagctgggtgtttaaggcctattatcgctaatgattatgtaattggacatcatttaggacaaaatatcagattatcttctcacacggaagatattaaagatgtcttttttgaacatgttttttttttgttgcctgtctttgtctgatgttacttccacattatgttaacgagttatttttcatcgggattctagcattgatgtgactccccattatttgtttattcagtgtcctttttactagtaamattcttttamtttttcctacctgccaactgtgtaaatagggctcagatttaaaaaactgcaccagttcttattccatacatcatcaccagttgcaaacactatgcagggtgcacacgtctgctgaacaacactgttctgcttttacaactttaacagcaaagctagtttttaatgttgtgcttccattaataaatattgctatagctagttctcaaaagggcagagatgctttgagtggctgacttactgaggttttccttcagacataagagttagttttctgccagaatatgaagtctctaaacgtgt

SEQ ID NO: 48008 - DNA, 600 bp, Chicken  19866894292645_1
cccagcctgcagtacctggagcagataacatgaaaacaggaattccattttcattaaggagataagttaagccttcttttccttccgggatgaatgttttagggggagctgccaggctcacataaggattcagcatctccctgctctaccatagctcaataatacaacattaacattagtgactgaaggaactggggctgtttagtctggggaaaagaaggctgaggggagaccttattgctctcttccaatatctgaaaggtgcttacagtgagagcgggtttggtctcttctcactgmtgacagctgacaggacgaggggaaatggcctccagttgcaccagggtcagtttagkttggatatcaggaaacacttctttacagaaagggttgttaagcactggaatgggctccccagggaggtggctgagtcaccrtccctggatgtgtttaagagccctttggatgtggtgcacagggacatgatttagcggagggttgttagttagggtaggatggtcaggtcatggttggactcratgatctttaaggtcttttccaacctgagcgattctatgattctatgattctatgattaaa

SEQ ID NO: 48009 - DNA, 600 bp, Chicken  19866894292645_10
crttctgcttgttgtgtccatgccagctgccttatgcccaggagtgttgtatcagttcaattatggctgttggattttttgctttgtgctgccgttcgtaatcgatttaattgtgttgtgatggatttcctgaatgtttgacttgtagttcaggctgcagtatctagacgtgcgtgctagtgaatttgtcaagagtggtgtttagtggggacaagttgasagatgaatccacagacccgattctttaagtcattccatgagcaaatgaaataaagcatgaagcagtgcaaatgccaggtwtgtatttttccagtctcygatcttgatacagayaattaatgattgtttatatcttgaaagaatctgtgtattggcagtagaattcattccagtttgaagagatcaattcaaggtctggttaacacctgctttatgggcatgtgtgaatcttaagcggtgagttagctgatggagctrtttatgctgcacctttgcacagaggaaaaatgtcctttaaatcagtttgcagtgttgtcttttgtatttagttatgtaaattgtcaaaagarggcaaagacttctgcagtccaagtcctcagt

SEQ ID NO: 48010 - DNA, 600 bp, Chicken  19866894292645_11
catgccagctgccttatgcccaggagtgttgtatcagttcaattatggctgttggattttttgctttgtgctgccgttcgtaatcgatttaattgtgttgtgatggatttcctgaatgtttgacttgtagttcaggctgcagtatctagacgtgcgtgctagtgaatttgtcaagagtggtgtttagtggggacaagttgasagatgaatccacagacccgattctttaagtcattccatgagcaaatgaaataaagcatgaagcagtgcaaatgccaggtwtgtatttttccagtctcygatcttgatacagayaattaatgattgtttatatcttgaaagaatctgtgtattggcagtagaattcattccagtttgaagagatcaattcaaggtctggttaacacctgctttatgggcatgtgtgaatcttaagcggtgagttagctgatggagctrtttatgctgcacctttgcacagaggaaaaatgtcctttaaatcagtttgcagtgttgtcttttgtatttagttatgtaaattgtcaaaagarggcaaagacttctgcagtccaagtcctcagttgtgacgttcacattgag

SEQ ID NO: 48011 - DNA, 600 bp, Chicken  19866894292645_12
atgcccaggagtgttgtatcagttcaattatggctgttggattttttgctttgtgctgccgttcgtaatcgatttaattgtgttgtgatggatttcctgaatgtttgacttgtagttcaggctgcagtatctagacgtgcgtgctagtgaatttgtcaagagtggtgtttagtggggacaagttgasagatgaatccacagacccgattctttaagtcattccatgagcaaatgaaataaagcatgaagcagtgcaaatgccaggtwtgtatttttccagtctcygatcttgatacagayaattaatgattgtttatatcttgaaagaatctgtgtattggcagtagaattcattccagtttgaagagatcaattcaaggtctggttaacacctgctttatgggcatgtgtgaatcttaagcggtgagttagctgatggagctrtttatgctgcacctttgcacagaggaaaaatgtcctttaaatcagtttgcagtgttgtcttttgtatttagttatgtaaattgtcaaaagarggcaaagacttctgcagtccaagtcctcagttgtgacgttcacattgagagctgccatttcatg

SEQ ID NO: 48012 - DNA, 600 bp, Chicken  19866894292645_13
tagtgaatttgtcaagagtggtgtttagtggggacaagttgasagatgaatccacagacccgattctttaagtcattccatgagcaaatgaaataaagcatgaagcagtgcaaatgccaggtwtgtatttttccagtctcygatcttgatacagayaattaatgattgtttatatcttgaaagaatctgtgtattggcagtagaattcattccagtttgaagagatcaattcaaggtctggttaacacctgctttatgggcatgtgtgaatcttaagcggtgagttagctgatggagctrtttatgctgcacctttgcacagaggaaaaatgtcctttaaatcagtttgcagtgttgtcttttgtatttagttatgtaaattgtcaaaagarggcaaagacttctgcagtccaagtcctcagttgtgacgttcacattgagagctgccatttcatgaggtcttgtccttagaatgtaaaacatcaccattttcactagatacaattaatgaagttatagatatttatatcatagaagcacagaatggcctgggttgaaaaggaccacaatgatcatcgggttccaaccccctgctatgtg

SEQ ID NO: 48013 - DNA, 600 bp, Chicken  19866894292645_14
ataaagcatgaagcagtgcaaatgccaggtwtgtatttttccagtctcygatcttgatacagayaattaatgattgtttatatcttgaaagaatctgtgtattggcagtagaattcattccagtttgaagagatcaattcaaggtctggttaacacctgctttatgggcatgtgtgaatcttaagcggtgagttagctgatggagctrtttatgctgcacctttgcacagaggaaaaatgtcctttaaatcagtttgcagtgttgtcttttgtatttagttatgtaaattgtcaaaagarggcaaagacttctgcagtccaagtcctcagttgtgacgttcacattgagagctgccatttcatgaggtcttgtccttagaatgtaaaacatcaccattttcactagatacaattaatgaagttatagatatttatatcatagaagcacagaatggcctgggttgaaaaggaccacaatgatcatcgggttccaaccccctgctatgtgcagggtcgccaaccagcagaccaggctgcccagagccacatccagcctggccttgaatgcctccagggatggggcatccacagcctccttgg

SEQ ID NO: 48014 - DNA, 600 bp, Chicken  19866894292645_2
aggagataagttaagccttcttttccttccgggatgaatgttttagggggagctgccaggctcacataaggattcagcatctccctgctctaccatagctcaataatacaacattaacattagtgactgaaggaactggggctgtttagtctggggaaaagaaggctgaggggagaccttattgctctcttccaatatctgaaaggtgcttacagtgagagcgggtttggtctcttctcactgmtgacagctgacaggacgaggggaaatggcctccagttgcaccagggtcagtttagkttggatatcaggaaacacttctttacagaaagggttgttaagcactggaatgggctccccagggaggtggctgagtcaccrtccctggatgtgtttaagagccctttggatgtggtgcacagggacatgatttagcggagggttgttagttagggtaggatggtcaggtcatggttggactcratgatctttaaggtcttttccaacctgagcgattctatgattctatgattctatgattaaactgtctttgtacttgatttcctaaaaaacctttccctgctaattagagatgctctt

SEQ ID NO: 48015 - DNA, 600 bp, Chicken  19866894292645_3
tccctgctctaccatagctcaataatacaacattaacattagtgactgaaggaactggggctgtttagtctggggaaaagaaggctgaggggagaccttattgctctcttccaatatctgaaaggtgcttacagtgagagcgggtttggtctcttctcactgmtgacagctgacaggacgaggggaaatggcctccagttgcaccagggtcagtttagkttggatatcaggaaacacttctttacagaaagggttgttaagcactggaatgggctccccagggaggtggctgagtcaccrtccctggatgtgtttaagagccctttggatgtggtgcacagggacatgatttagcggagggttgttagttagggtaggatggtcaggtcatggttggactcratgatctttaaggtcttttccaacctgagcgattctatgattctatgattctatgattaaactgtctttgtacttgatttcctaaaaaacctttccctgctaattagagatgctcttgttagagctgtctggaatgaatggcattaagaatgggaatacagatagattttttttcttccaatgtcaaatgaagacttt

SEQ ID NO: 48016 - DNA, 600 bp, Chicken  19866894292645_4
gctctcttccaatatctgaaaggtgcttacagtgagagcgggtttggtctcttctcactgmtgacagctgacaggacgaggggaaatggcctccagttgcaccagggtcagtttagkttggatatcaggaaacacttctttacagaaagggttgttaagcactggaatgggctccccagggaggtggctgagtcaccrtccctggatgtgtttaagagccctttggatgtggtgcacagggacatgatttagcggagggttgttagttagggtaggatggtcaggtcatggttggactcratgatctttaaggtcttttccaacctgagcgattctatgattctatgattctatgattaaactgtctttgtacttgatttcctaaaaaacctttccctgctaattagagatgctcttgttagagctgtctggaatgaatggcattaagaatgggaatacagatagattttttttcttccaatgtcaaatgaagactttatttgaaaaaaataatggtaatgacattctgagaattttcaggttgcaatccrtgaagttttgacagtctttttgcacgtggggaatgtaaatgcatatatt

SEQ ID NO: 48017 - DNA, 600 bp, Chicken  19866894292645_5
gcggagggttgttagttagggtaggatggtcaggtcatggttggactcratgatctttaaggtcttttccaacctgagcgattctatgattctatgattctatgattaaactgtctttgtacttgatttcctaaaaaacctttccctgctaattagagatgctcttgttagagctgtctggaatgaatggcattaagaatgggaatacagatagattttttttcttccaatgtcaaatgaagactttatttgaaaaaaataatggtaatgacattctgagaattttcaggttgcaatccrtgaagttttgacagtctttttgcacgtggggaatgtaaatgcatatattatgcacacacatrtagggaaaaattaacttggtgtgagtgaaatatgatttggtgtaaaagcttggccaagctggaacattctacccaaaccctaccagttcctgcccatggtatcagtgctttgataagacacaaatctcagtctggcattttcttcttgaaatacccacctgtgtagtagttatagggatsacagaggaaatatacaataacctgttatcattttaacaggacggacgtttccgaagaa

SEQ ID NO: 48018 - DNA, 600 bp, Chicken  19866894292645_6
tcttttccaacctgagcgattctatgattctatgattctatgattaaactgtctttgtacttgatttcctaaaaaacctttccctgctaattagagatgctcttgttagagctgtctggaatgaatggcattaagaatgggaatacagatagattttttttcttccaatgtcaaatgaagactttatttgaaaaaaataatggtaatgacattctgagaattttcaggttgcaatccrtgaagttttgacagtctttttgcacgtggggaatgtaaatgcatatattatgcacacacatrtagggaaaaattaacttggtgtgagtgaaatatgatttggtgtaaaagcttggccaagctggaacattctacccaaaccctaccagttcctgcccatggtatcagtgctttgataagacacaaatctcagtctggcattttcttcttgaaatacccacctgtgtagtagttatagggatsacagaggaaatatacaataacctgttatcattttaacaggacggacgtttccgaagaaggggcagacgtgtgtggtgcactacacaggtaaggcacrttctgcttgttgtgtccatgcca

SEQ ID NO: 48019 - DNA, 600 bp, Chicken  19866894292645_7
actttatttgaaaaaaataatggtaatgacattctgagaattttcaggttgcaatccrtgaagttttgacagtctttttgcacgtggggaatgtaaatgcatatattatgcacacacatrtagggaaaaattaacttggtgtgagtgaaatatgatttggtgtaaaagcttggccaagctggaacattctacccaaaccctaccagttcctgcccatggtatcagtgctttgataagacacaaatctcagtctggcattttcttcttgaaatacccacctgtgtagtagttatagggatsacagaggaaatatacaataacctgttatcattttaacaggacggacgtttccgaagaaggggcagacgtgtgtggtgcactacacaggtaaggcacrttctgcttgttgtgtccatgccagctgccttatgcccaggagtgttgtatcagttcaattatggctgttggattttttgctttgtgctgccgttcgtaatcgatttaattgtgttgtgatggatttcctgaatgtttgacttgtagttcaggctgcagtatctagacgtgcgtgctagtgaatttgtcaagagtggtgtttag

SEQ ID NO: 48020 - DNA, 600 bp, Chicken  19866894292645_8
tgcatatattatgcacacacatrtagggaaaaattaacttggtgtgagtgaaatatgatttggtgtaaaagcttggccaagctggaacattctacccaaaccctaccagttcctgcccatggtatcagtgctttgataagacacaaatctcagtctggcattttcttcttgaaatacccacctgtgtagtagttatagggatsacagaggaaatatacaataacctgttatcattttaacaggacggacgtttccgaagaaggggcagacgtgtgtggtgcactacacaggtaaggcacrttctgcttgttgtgtccatgccagctgccttatgcccaggagtgttgtatcagttcaattatggctgttggattttttgctttgtgctgccgttcgtaatcgatttaattgtgttgtgatggatttcctgaatgtttgacttgtagttcaggctgcagtatctagacgtgcgtgctagtgaatttgtcaagagtggtgtttagtggggacaagttgasagatgaatccacagacccgattctttaagtcattccatgagcaaatgaaataaagcatgaagcagtgcaaatgccaggtwtg

SEQ ID NO: 48021 - DNA, 600 bp, Chicken  19866894292645_9
aataacctgttatcattttaacaggacggacgtttccgaagaaggggcagacgtgtgtggtgcactacacaggtaaggcacrttctgcttgttgtgtccatgccagctgccttatgcccaggagtgttgtatcagttcaattatggctgttggattttttgctttgtgctgccgttcgtaatcgatttaattgtgttgtgatggatttcctgaatgtttgacttgtagttcaggctgcagtatctagacgtgcgtgctagtgaatttgtcaagagtggtgtttagtggggacaagttgasagatgaatccacagacccgattctttaagtcattccatgagcaaatgaaataaagcatgaagcagtgcaaatgccaggtwtgtatttttccagtctcygatcttgatacagayaattaatgattgtttatatcttgaaagaatctgtgtattggcagtagaattcattccagtttgaagagatcaattcaaggtctggttaacacctgctttatgggcatgtgtgaatcttaagcggtgagttagctgatggagctrtttatgctgcacctttgcacagaggaaaaatgtcctttaaatc

SEQ ID NO: 48022 - DNA, 600 bp, Chicken  19866894292655_1
ttttaaaatttgcagtataatgaacactgcaaaggtcttaactgcttccacactaaatctagatccatgttaccaatctgttttgttttaattttcttaaatttgtattcttaaacatataaattgggattatttgcagaataacagattaattaatagggtgaacttcatttgcataactgacattactaaagctactacaattttaagccactgagactttgctccactgtatgaacaactttcagcaaattattgatgatcatacagagagaacagataaaagtttcatttataaarccaaagaagaaatgtgtctcatctacttttctagacactgggaaagctttccaaacagaaatgatgactaaaattatttcctgtgttctatgcctactttcccttgtgtattaattactcttccatgcttatctgataccagtctgcttttaaatcactaattaaaatatgaaatgtggaaagctatttttaagcacagaattctattgtttcacccrgctgaattattccttccatattcaaaaaggagttaccacacatttcagatcttagggtccaaaatggaacaggcactgagca

SEQ ID NO: 48023 - DNA, 600 bp, Chicken  19866894292655_2
actttgctccactgtatgaacaactttcagcaaattattgatgatcatacagagagaacagataaaagtttcatttataaarccaaagaagaaatgtgtctcatctacttttctagacactgggaaagctttccaaacagaaatgatgactaaaattatttcctgtgttctatgcctactttcccttgtgtattaattactcttccatgcttatctgataccagtctgcttttaaatcactaattaaaatatgaaatgtggaaagctatttttaagcacagaattctattgtttcacccrgctgaattattccttccatattcaaaaaggagttaccacacatttcagatcttagggtccaaaatggaacaggcactgagcagacagcactagctttcagatcgccttacaaaacaaagctttttcctcgtttacagtttccatctcaacagataactaaaatcactatcctctgggaactatcccgatctaatttgtaatgctggagcatgaccacaaatacaaccacatcaatctcatctacattcaaaacacagagaaaagactatttcggaaagaaagattccttctttttcttgt

SEQ ID NO: 48024 - DNA, 600 bp, Chicken  19866894292655_3
tcactatcctctgggaactatcccgatctaatttgtaatgctggagcatgaccacaaatacaaccacatcaatctcatctacattcaaaacacagagaaaagactatttcggaaagaaagattccttctttttcttgttcctgtacaatcctcctctgcttaactgattattcaggatgttcatttcttttgtaccaaaaagcctccatcaaaaatgcatttacaaaatactcttctcccacaggatctttcaaaccacattctgtcagatgcttgccccaaatgaagcactggcacttrgtaaatagcagtaaggattactctaraaggtctttcattagtatttttgcaggattatgtgaacacagtgcaagcaggagattataaaatacgttaaggaaatgaagtctgaaaagtgtactaacagtataccagatccatttgaatcaacagattttcaagaagtatcaccaattccctgctgtttaaacagactcagtattcacagtgggagatctacatggtcaaacagcccaggaggcagcagataatatccagactcaaatccatttaaattatctacatatactgtgtgcgcat

SEQ ID NO: 48025 - DNA, 600 bp, Chicken  19866894292655_4
tctaatttgtaatgctggagcatgaccacaaatacaaccacatcaatctcatctacattcaaaacacagagaaaagactatttcggaaagaaagattccttctttttcttgttcctgtacaatcctcctctgcttaactgattattcaggatgttcatttcttttgtaccaaaaagcctccatcaaaaatgcatttacaaaatactcttctcccacaggatctttcaaaccacattctgtcagatgcttgccccaaatgaagcactggcacttrgtaaatagcagtaaggattactctaraaggtctttcattagtatttttgcaggattatgtgaacacagtgcaagcaggagattataaaatacgttaaggaaatgaagtctgaaaagtgtactaacagtataccagatccatttgaatcaacagattttcaagaagtatcaccaattccctgctgtttaaacagactcagtattcacagtgggagatctacatggtcaaacagcccaggaggcagcagataatatccagactcaaatccatttaaattatctacatatactgtgtgcgcataagatgaaaaaaaaaaacttacaacc

SEQ ID NO: 48026 - DNA, 600 bp, Chicken  19866894292656_1
aattctcactgatttcagtagttcacagctgttttacttcgcagccttccagaactgagtagttttccttaagagagaaatcagcacttattgacaggtagcacatttccagttctagtcattcgataaattttattccttcaggtttttcttttcaattttaaaagatatagaaactttatgagcaagaaaagaccttcagaaaatgcaaatgtcctcttctgatcagggacaggggacaaatatttttctgagggttaaatggagaactaagtgtgactattttttcggtgcacagamgagtaagggaaggaacaaaacccttttcattagaatgcaaagccataatctgatggaacaatttctgtggggaaaaaaaaaaaacactttaattgaaatgggaaagttatgagatgatgttattgatgacatttttgatgagaaacatttcctttagacttttctccttcactacacataattttgaagttttgtactgtaccaagatattaattttaatgtcagcattggttaggttcaaccacacttaactgaggacaatgaaagatggaacagtcacactgcattttggaaaaatgt

SEQ ID NO: 48027 - DNA, 600 bp, Chicken  19866894292656_2
agagaaatcagcacttattgacaggtagcacatttccagttctagtcattcgataaattttattccttcaggtttttcttttcaattttaaaagatatagaaactttatgagcaagaaaagaccttcagaaaatgcaaatgtcctcttctgatcagggacaggggacaaatatttttctgagggttaaatggagaactaagtgtgactattttttcggtgcacagamgagtaagggaaggaacaaaacccttttcattagaatgcaaagccataatctgatggaacaatttctgtggggmaaaaaaaaaaacactttaattgaaatgggaaagttatgagatgatgttattgatgacatttttgatgagaaacatttcctttagacttttctccttcactacacataattttgaagttttgtactgtaccaagatattaattttaatgtcagcattggttaggttcaaccacacttaactgaggacaatgaaagatggaacagtcacactgcattttggaaaaatgtaaaagataattaagttattttaaataggagtatgaaagcttaaatggttagagtttccagccaaaaaaacaga

SEQ ID NO: 48028 - DNA, 600 bp, Chicken  19866894292673_1
ccagaaattgtgcagtggctattttgtctggaagtttcttgttttcttttgccctgttctttgcaatcaaacctactgagggttgaactgtcatgtggtcggttcattgcctcgcttcagctctgccttcctgcgggtgccaacctgaccacgttgggtagcctgccattgcacagctcatttctgaggttcaaatctgaaatagagaggaggaacaatgtgattcctcctgtggttttgtttttctgtgccttgttgatgaaccttgttggtgaacctggtagtccttctaccttctaygcagtcaacttactacactgcttcctactgtattttccaggattctgtagccataaggacacacaattgcctgtgcacagagctggtcctccaaggttaggtatgaatagggattctccttttcttgccacttccataactttcctggtgttttagttaagcaaacacattagactccaggtactgttggaactgggatcaataataacaattgtattctttctgatagcctctaggagccccagtagagcacaaattcagtcccaagtaaaccactttcccttctctcattatcagcca

SEQ ID NO: 48029 - DNA, 599 bp, Chicken  19866894292680_1
  misc_feature (1)..(71): n is any nucleotide
nnnnnnnnnnnnnnnnnnnnnnnnnnnnnnnnnnnnnnnnnnnnnnnnnnnnnnnnnnnnnnnnnnnnnnnatgctttggaaagaaaaacagctgtggacctatagtggtcagtgccatcatccaagtggtgataagacacagggaaatagaaatgctttcatttggcagttgctgtggatgttttaagtgaattgctctcttgtgtttgagaaaaatgaagtggcaagaagggctgtatttacaatgaagctggctggtagcagctcctgacagaccttttccttcttcctggtgtcayagtttcagagaggaagttaaactagcagacaggtcaagttgcatggatagtggtagggcttgaaatgaaacwcatttaagtagcaatgaagatgctgggctccttgctttgctctttgctgtgccatgggagatctgggtcctgtgacatgcttctgctttctctccatcaatttaaggagcctgcagggcacagcaaattagtggatggctcttactgaaagaagcattgtagcccagaatacgttaacctgtaacagctttaatacagccttaggataactggcaggaatgacccat

SEQ ID NO: 48030 - DNA, 600 bp, Chicken  19866894292680_2
tgctttggaaagaaaaacagctgtggacctatagtggtcagtgccatcatccaagtggtgataagacacagggaaatagaaatgctttcatttggcagttgctgtggatgttttaagtgaattgctctcttgtgtttgagaaaaatgaagtggcaagaagggctgtatttacaatgaagctggctggtagcagctcctgacagaccttttccttcttcctggtgtcayagtttcagagaggaagttaaactagcagacaggtcaagttgcatggatagtggtagggcttgaaatgaaacwcatttaagtagcaatgaagatgctgggctccttgctttgctctttgctgtgccatgggagatctgggtcctgtgacatgcttctgctttctctccatcaatttaaggagcctgcagggcacagcaaattagtggatggctcttactgaaagaagcattgtagcccagaatacgttaacctgtaacagctttaatacagccttaggataactggcaggaatgacccatgacacttgtcacggtgtatcttcagcagcctgtgtagctttcaaccagctgtgcaggggggttggaaacagtg

SEQ ID NO: 48031 - DNA, 600 bp, Chicken  19866894292688_1
gaagtaatatcatactttgctacagtaaaactgattaaatatgaaactcggtttcttaaaaatactccttgctctctatacattgagtatctgctaatataagaatcataaaacagaatcagagaacaatttttggttagaagggaccttgagagttcacccagcctgacccctgctcaaagcaaggccaagtggtaagctatgaggtcagttttgtataaggtcacaagtaccccgagcttaactgtatatacttggggtactctttgattcaatattatttttatcctctgagatttktgaaacctgacactcccatttccagaactaaatccaaaacaaaagtgtcttttgaatcattttatattacctaagcattaggaaaagtcaaggcaggtaggcagaaaggaaaaaaaagaaagcagcaaggaaggaaagaaggatggatggactttaggtacacattatgaaattttaaactttctcatttttttccattttctcaaatatgcatttgccaaatgatcatttccttcagtaggagaccagtacaaaaatcaacaatcaaaatcttcatgtcaccctccaaaaagcttgcag

SEQ ID NO: 48032 - DNA, 600 bp, Chicken  19866894292693_1
cattctgacactctgactagtgatgtacttaagcttctggaaccactttcagcagtcgggttcatgcactgtaatgcctcagtgatctgtagattaaattttttggctgtgtgaaaggtacttaagatggcaatcgcaggaatcacagaatggcccgggttggaagggacctcaaggatcatgaagctccaacccccccccccccgccacaggcagggccaccaacctccacatttaatactaaactaggctgcccagggccccatccaacctggccttgaacacctccagggacggggyataaacagcctctgtggacagcctgttccagcacgaggaagacagatcctattggaagaccaaagtgtcttaaactttgttacaaataaatttcagtttcagtgatcaatcaggtggattaatcctctttacaaaattaatccttcctatgttctttaacaaaaactgatgacttaaagatgatacttaagttggggtgtactcagccatggtgctgccccacagctggcaaaagccagtgtaagatggtggctgcagaaagaaggggtgctgtttctgtcctcttgttttaaacagatg

SEQ ID NO: 48033 - DNA, 600 bp, Chicken  19866894292694_1
ggccagggcacctgaaagcagggcaatattcaccctatggagtgaggtgcccccttgggggccttgcacctcgcagccaggtgatgggcaccctttgggtctggtcaccccatggcggagcaatgggcaacctgggagatctaggcaccccccagcagcacaaatggtcccctgtgagctcaggctcaccctacagggcctggctaccctacagccaggtgacaggaaatctacgagttctgtaggctctggttaccctacggtggagtgatggactctgcatgcatccagcccaccccrcagcacagcgatgggcaccctatgagctgtggggcaaagtggaccttatagcatctgcttcctgtgggtctgggccaacttgctgcagggtgatggccaaccagcagctcccagctgccccacagtgcygtggggctgggcgactcttaccatctgcgcccgcaggtacatctgtgcctggctggcagtgagggcgggtgaggcggcgttgcccagcaggacagcttgctgcgcgatgcccgacgccccagggttgacgctctgtgcccggttcaggagctgggcggccgctggcgacgt

SEQ ID NO: 48034 - DNA, 600 bp, Chicken  19866894292694_2
acctgggagatctaggcaccccccagcagcacaaatggtcccctgtgagctcaggctcaccctacagggcctggctaccctacagccaggtgacaggaaatctacgagttctgtaggctctggttaccctacggtggagtgatggactctgcatgcatccagcccaccccrcagcacagcgatgggcaccctatgagctgtggggcaaagtggaccttatagcatctgcttcctgtgggtctgggccaacttgctgcagggtgatggccaaccagcagctcccagctgccccacagtgcygtggggctgggcgactcttaccatctgcgcccgcaggtacatctgtgcctggctggcagtgagggcgggtgaggcggcgttgcccagcaggacagcttgctgcgcgatgcccgacgccccagggttgacgctctgtgcccggttcaggagctgggcggccgctggcgacgtggccaggttgatctgcaatgggacagtgggttttgggaccggggtaggggctgcggggtgctcctggtgagccggggactcaccgtgggctgctgcaccggtgcctgctgtgtgccattgctgccagag

SEQ ID NO: 48035 - DNA, 600 bp, Chicken  19866894292698_1
tactgcctcagcctttgtattacacgtgctctgcattgagggctacacagtgctgaggcagccttcaaggcacacattttcactgatccaaacacatggaataccactagagcaacttgatgaataatcaagtagatgaaatgaccttaattgcttgctttgacacaaccagcattaaacagcttttaaaggccattagaggctattcataatctttttattacagcgagtgtcacaagcttccagcgaggtttgatttctgttaaacacaaccctacaaagttaatttgcaaagccacytgtcggtagcattcacgtgcacttttaacaaggtaagcacttatcaaaacctgttcaactgaatgaagaaaacttcaaacaccgatacctccttcccgaacatctgccaagcacggtgctttcctttttctaggcgagaatgccattgtgagcagtgagaacttcctccagcacagcctcaatgcagctgccctacacagccatgtttctgagtgaccctgaaatctacacagattgtcactgtgtataaagctatcrgaggactcagcctttaatcgttttctcacatatgtgactttt

SEQ ID NO: 48036 - DNA, 600 bp, Chicken  19866894292698_2
tctgttaaacacaaccctacaaagttaatttgcaaagccacytgtcggtagcattcacgtgcacttttaacaaggtaagcacttatcaaaacctgttcaactgaatgaagaaaacttcaaacaccgatacctccttcccgaacatctgccaagcacggtgctttcctttttctaggcgagaatgccattgtgagcagtgagaacttcctccagcacagcctcaatgcagctgccctacacagccatgtttctgagtgaccctgaaatctacacagattgtcactgtgtataaagctatcrgaggactcagcctttaatcgttttctcacatatgtgactttttgtcaagggaaaggataaaataccgaatgaccggatggcgagaagctccctgctcaaatacactgtcaattcttgacatgaattaataggagaatatattttacttcagcataggtttttttaataagctttcttttttcccctccaggagtctttcagatctcataatttaataacagaaagactgaaaagcgtaatgcttttagaagcgtctgatcctgagggccttttccatcctaagtgatgccgcgattctaa

SEQ ID NO: 48037 - DNA, 600 bp, Chicken  19866894292698_3
gcggccggggagagctgaggggcggggtttgctgacaggattacggcaccctccctagcatcctgttgacagttgaggctaaggcacgttttcctgggttctaagagcagtcttttgaggcgaggccatcacactcgagcgggtctgggaagcgagaagccgactcacggaacgacaacagggctgaagcagacgctgtggggaaccgaccccgaccgcctcgcgtcagtaacagcagacgccgaaaattcaggcacacgctctaaattgaaagcatcccctccgccctccgaggataaytgttcacaaagcggaagctctgagaaccgacaccacaacggggttttgcagaagccgcagcagcagctgcatggtaactgggaatgcagaactctcactgctttcgtgtgcttcactgtgggacctcctacaacgcacccgaggctgcatttgtccaactcyatttgtgctgtcaggataagtcagacctgcagcatcactgtctaaaacgctgtgtgttcagttcactgagagctcagactgcactgagcatttgctatgcagacacagctgcagatattcaaataaaatgacctaact

SEQ ID NO: 48038 - DNA, 600 bp, Chicken  19866894292698_4
actcacggaacgacaacagggctgaagcagacgctgtggggaaccgaccccgaccgcctcgcgtcagtaacagcagacgccgaaaattcaggcacacgctctaaattgaaagcatcccctccgccctccgaggataaytgttcacaaagcggaagctctgagaaccgacaccacaacggggttttgcagaagccgcagcagcagctgcatggtaactgggaatgcagaactctcactgctttcgtgtgcttcactgtgggacctcctacaacgcacccgaggctgcatttgtccaactcyatttgtgctgtcaggataagtcagacctgcagcatcactgtctaaaacgctgtgtgttcagttcactgagagctcagactgcactgagcatttgctatgcagacacagctgcagatattcaaataaaatgacctaacttgccatgaaaacttaagataggcgcttctctagtagagaagcagcaccatgagaatacagtggtccattcaccacagcaacagaatttttactcctcctttgcttcaaactgaactttycttctgtttcctwccagccatccttcctcccacgtcacatagc

SEQ ID NO: 48039 - DNA, 600 bp, Chicken  19866894292698_5
gggacctcctacaacgcacccgaggctgcatttgtccaactcyatttgtgctgtcaggataagtcagacctgcagcatcactgtctaaaacgctgtgtgttcagttcactgagagctcagactgcactgagcatttgctatgcagacacagctgcagatattcaaataaaatgacctaacttgccatgaaaacttaagataggcgcttctctagtagagaagcagcaccatgagaatacagtggtccattcaccacagcaacagaatttttactcctcctttgcttcaaactgaactttycttctgtttcctwccagccatccttcctcccacgtcacatagctttatgagatggtattgtaaataaatgaagcagatcaagctgccaaggttcagcttatttggaacacatgtttttggcatctgagggaggaaactgctgtggtacccctataacacatggcagatacaagctccaccaaaacagtcacacaagttgtagtcagaatggccaaaaaacaaccaaggaagtaggagtggagagactaagacagagaaacctaatggtaaaatggtttacattagtcaaaatcagcaaag

SEQ ID NO: 48040 - DNA, 600 bp, Chicken  19866894292698_6
acgcacccgaggctgcatttgtccaactcyatttgtgctgtcaggataagtcagacctgcagcatcactgtctaaaacgctgtgtgttcagttcactgagagctcagactgcactgagcatttgctatgcagacacagctgcagatattcaaataaaatgacctaacttgccatgaaaacttaagataggcgcttctctagtagagaagcagcaccatgagaatacagtggtccattcaccacagcaacagaatttttactcctcctttgcttcaaactgaactttycttctgtttcctwccagccatccttcctcccacgtcacatagctttatgagatggtattgtaaataaatgaagcagatcaagctgccaaggttcagcttatttggaacacatgtttttggcatctgagggaggaaactgctgtggtacccctataacacatggcagatacaagctccaccaaaacagtcacacaagttgtagtcagaatggccaaaaaacaaccaaggaagtaggagtggagagactaagacagagaaacctaatggtaaaatggtttacattagtcaaaatcagcaaagaattacagaaatg

SEQ ID NO: 48041 - DNA, 600 bp, Chicken  19866894292708_1
ccaaaagtagaagaaagttttgcaagttatttcttgtgaatcttgtctctaggtgtgggaggaaactgatgcattcaccatcttgaaatcggttggctatttgatcactggatcagttagttgagtggacagggtagaccatcctttgcaaccattaaacatagaagtaagatgcaatttttatttctattgagagtggctatctaccagttggagtgataattaggctgagggatggatttacagtggtgaaggcgtaaacgtccagctatgaaatctccagcatttcttgattcccaraggcattcagtaggcaygtgacctgctgcccacyaggcacatttagcatctccccagaaagacccagtgatctgtttaaggtgtgggaatacagtataacattcagtgtgaaatagctgtcctttaatttactcagcaagtgtgatcccataaaccccatggtagttatttacagagtaacatgctcccagggaaagctttttctaatcgatarttgagttgttctaactctttctgcctgcgttgtgtaatttgagtaaaacttgaggcaggaggacagtatttgaaggcaagttgctt

SEQ ID NO: 48042 - DNA, 600 bp, Chicken  19866894292708_2
ttttgcaagttatttcttgtgaatcttgtctctaggtgtgggaggaaactgatgcattcaccatcttgaaatcggttggctatttgatcactggatcagttagttgagtggacagggtagaccatcctttgcaaccattaaacatagaagtaagatgcaatttttatttctattgagagtggctatctaccagttggagtgataattaggctgagggatggatttacagtggtgaaggcgtaaacgtccagctatgaaatctccagcatttcttgattcccaraggcattcagtaggcaygtgacctgctgcccacyaggcacatttagcatctccccagaaagacccagtgatctgtttaaggtgtgggaatacagtataacattcagtgtgaaatagctgtcctttaatttactcagcaagtgtgatcccataaaccccatggtagttatttacagagtaacatgctcccagggaaagctttttctaatcgatarttgagttgttctaactctttctgcctgcgttgtgtaatttgagtaaaacttgaggcaggaggacagtatttgaaggcaagttgcttacctgcagtccttttat

SEQ ID NO: 48043 - DNA, 600 bp, Chicken  19866894292708_3
tgtgaatcttgtctctaggtgtgggaggaaactgatgcattcaccatcttgaaatcggttggctatttgatcactggatcagttagttgagtggacagggtagaccatcctttgcaaccattaaacatagaagtaagatgcaatttttatttctattgagagtggctatctaccagttggagtgataattaggctgagggatggatttacagtggtgaaggcgtaaacgtccagctatgaaatctccagcatttcttgattcccaraggcattcagtaggcaygtgacctgctgcccacyaggcacatttagcatctccccagaaagacccagtgatctgtttaaggtgtgggaatacagtataacattcagtgtgaaatagctgtcctttaatttactcagcaagtgtgatcccataaaccccatggtagttatttacagagtaacatgctcccagggaaagctttttctaatcgatarttgagttgttctaactctttctgcctgcgttgtgtaatttgagtaaaacttgaggcaggaggacagtatttgaaggcaagttgcttacctgcagtccttttattgccacacctacctgca

SEQ ID NO: 48044 - DNA, 600 bp, Chicken  19866894292708_4
agtgataattaggctgagggatggatttacagtggtgaaggcgtaaacgtccagctatgaaatctccagcatttcttgattcccaraggcattcagtaggcaygtgacctgctgcccacyaggcacatttagcatctccccagaaagacccagtgatctgtttaaggtgtgggaatacagtataacattcagtgtgaaatagctgtcctttaatttactcagcaagtgtgatcccataaaccccatggtagttatttacagagtaacatgctcccagggaaagctttttctaatcgatarttgagttgttctaactctttctgcctgcgttgtgtaatttgagtaaaacttgaggcaggaggacagtatttgaaggcaagttgcttacctgcagtccttttattgccacacctacctgcagtgcctttattgtcagcgtggctcaggactgtagcatctctcaggattaaggccaccaggagccggcaatttcctcccagttctggttctgacttctacgttatgatataaaattttatttacatatcaagaaacagatgacagtgtttatctcggaatccattgttatcttgcagcgtt

SEQ ID NO: 48045 - DNA, 600 bp, Chicken  19866894292710_1
tactcaatcctgtgcaggcttggaacagtgtaggatttctgtcttgctgtgaaaccacacagagccagggactgcaaaatgcagataacatttttgttcttgggtctagttggggctgctctaaaaagggacaacagggttaagaagaaagaaccaaatcttacagcatctgatctgctttcaaccctggttggtggtagggacagaattaccaactctggctataacctttcaaagtttgtcatatccaggatgaaaattaaatgaaaagtccacaggcaaagaaggaacagatgaacrctkgggcagagccatcatcactrgsaaattgttcactgctttaatttcacagwtgctcacaaaagatgtgggatgtgggaacaaaacttgattgtttcctctgttctgcagggagtcttcatgtacttgacaaatcgacatcagtttggacacatactgtctctggagaattaccaaacaactcacctccacaatgacctctggcaaatattcagcaaccctgaggtgagataacctgcctgctctgcagacttggcagtctatgtggaatgtgaagatctgatggccaacttcaccaat

SEQ ID NO: 48046 - DNA, 600 bp, Chicken  19866894292710_2
tcaatcctgtgcaggcttggaacagtgtaggatttctgtcttgctgtgaaaccacacagagccagggactgcaaaatgcagataacatttttgttcttgggtctagttggggctgctctaaaaagggacaacagggttaagaagaaagaaccaaatcttacagcatctgatctgctttcaaccctggttggtggtagggacagaattaccaactctggctataacctttcaaagtttgtcatatccaggatgaaaattaaatgaaaagtccacaggcaaagaaggaacagatgaacrctkgggcagagccatcatcactrgsaaattgttcactgctttaatttcacagwtgctcacaaaagatgtgggatgtgggaacaaaacttgattgtttcctctgttctgcagggagtcttcatgtacttgacaaatcgacatcagtttggacacatactgtctctggagaattaccaaacaactcacctccacaatgacctctggcaaatattcagcaaccctgaggtgagataacctgcctgctctgcagacttggcagtctatgtggaatgtgaagatctgatggccaacttcaccaataag

SEQ ID NO: 48047 - DNA, 600 bp, Chicken  19866894292710_3
aacagtgtaggatttctgtcttgctgtgaaaccacacagagccagggactgcaaaatgcagataacatttttgttcttgggtctagttggggctgctctaaaaagggacaacagggttaagaagaaagaaccaaatcttacagcatctgatctgctttcaaccctggttggtggtagggacagaattaccaactctggctataacctttcaaagtttgtcatatccaggatgaaaattaaatgaaaagtccacaggcaaagaaggaacagatgaacrctkgggcagagccatcatcactrgsaaattgttcactgctttaatttcacagwtgctcacaaaagatgtgggatgtgggaacaaaacttgattgtttcctctgttctgcagggagtcttcatgtacttgacaaatcgacatcagtttggacacatactgtctctggagaattaccaaacaactcacctccacaatgacctctggcaaatattcagcaaccctgaggtgagataacctgcctgctctgcagacttggcagtctatgtggaatgtgaagatctgatggccaacttcaccaataaggaaggtccagactgtgtgtg

SEQ ID NO: 48048 - DNA, 600 bp, Chicken  19866894292710_4
cagtgtaggatttctgtcttgctgtgaaaccacacagagccagggactgcaaaatgcagataacatttttgttcttgggtctagttggggctgctctaaaaagggacaacagggttaagaagaaagaaccaaatcttacagcatctgatctgctttcaaccctggttggtggtagggacagaattaccaactctggctataacctttcaaagtttgtcatatccaggatgaaaattaaatgaaaagtccacaggcaaagaaggaacagatgaacrctkgggcagagccatcatcactrgsaaattgttcactgctttaatttcacagwtgctcacaaaagatgtgggatgtgggaacaaaacttgattgtttcctctgttctgcagggagtcttcatgtacttgacaaatcgacatcagtttggacacatactgtctctggagaattaccaaacaactcacctccacaatgacctctggcaaatattcagcaaccctgaggtgagataacctgcctgctctgcagacttggcagtctatgtggaatgtgaagatctgatggccaacttcaccaataaggaaggtccagactgtgtgtgat

SEQ ID NO: 48049 - DNA, 600 bp, Chicken  19866894292710_5
accacacagagccagggactgcaaaatgcagataacatttttgttcttgggtctagttggggctgctctaaaaagggacaacagggttaagaagaaagaaccaaatcttacagcatctgatctgctttcaaccctggttggtggtagggacagaattaccaactctggctataacctttcaaagtttgtcatatccaggatgaaaattaaatgaaaagtccacaggcaaagaaggaacagatgaacrctkgggcagagccatcatcactrgsaaattgttcactgctttaatttcacagwtgctcacaaaagatgtgggatgtgggaacaaaacttgattgtttcctctgttctgcagggagtcttcatgtacttgacaaatcgacatcagtttggacacatactgtctctggagaattaccaaacaactcacctccacaatgacctctggcaaatattcagcaaccctgaggtgagataacctgcctgctctgcagacttggcagtctatgtggaatgtgaagatctgatggccaacttcaccaataaggaaggtccagactgtgtgtgattcgtaacatctggattttcaaagcatgt

SEQ ID NO: 48050 - DNA, 600 bp, Chicken  19866894292713_1
tccactgccttcagagtattctccatcagatcagataagacaagaactgggtctgttatatctgaatccatttccattcaggtcactgacctgctgatttgtagaaggctgttatctttcttagaagcaagtttcacagcatcagctgtaaagacattttgaaaacttctctctacttgctcacagtcttgctgctggtacagttagctgtgtgggaggtcttgattgcagaacgatgtctcagaaagctatgatcagacttctgaaggacccaacacgctgctgtagaaattctcattyaggatgtcatgggaggaattaatgcagaaaggaagaatctgaggggcaaagaataatgcttgggtggccacatgtacctgtgaacatttgggattcttgttctagagtgcagaacaatttgagataattatcttgatgaacacaaacataacaggtcagagagggcaccattttctgtgcttagaaataagagcctcttcaatttcaggggctatcgttcttaggaaggattagtgacatttcatgttatcagtatggtgctgccttggaaagctgcttctaaacagttatctgttcttc

SEQ ID NO: 48051 - DNA, 600 bp, Chicken  19866894292720_1
tgtttacacaattcctcacacaacgctttccccaaaagcttatggactcagcctgggccacatttttaaggatcctgtcaagcgctaagtgagatttccaagagcagtttcctcctgcctgcttgctggcagcggcacctgagagccggcggcagctgagccgtgctggaagcagcgcggggtgcggcgagttggccactgtgcttctggccaccgcctgcccactgcttggctgttctggtttgtggcgaaggcttccagagcacagcgcctgcttcctttgccaaggatgctcttgcrgcaagccttgccccggtccgtgtgaagtctgtcggctctcacatagcctttttcttccacccctcaatgtcttctcagcttggaaaccaatgcttcacccctcagcaggatgagttggacgctgcaaagtgaatggccgctgctaacggcctctgtgcagatggttcccggtgcctaccctcaattgctaacttccctttccacccacttccactaaaaggtgctaatcatgcggtgagacgcagccttcctgccccggagagcagcagcatcgcttctggtgctcccagcgctgggaaa

SEQ ID NO: 48052 - DNA, 600 bp, Chicken  19866894292725_1
cattcagggaaccttagcgaagcgaagatttctgctgtcacttgcattggataaggagcagcagcactccataccagcctaaccaattttaaagcagccatttaaaaaaaagcagaattagtttcagttgcacagcctccagaagtggagcagttcagctgagggggtggccctgagtgtttggcctcccttcactctgcctgctctgccctcctaggacctgatggcttatcacacaggtaaccatcctctctgttgggctgcacagcaggctgccaggtacctttggcctaggggcarggtaggtaggtaggtaggtaggtaccgatggcacagcctcactcacctgggagattgcaacatgcatagggagccaggggcaaaataaggtgcagctgacaggaggtgaaagaaagtctaatagcaaggtagctaaaaaaaatctgctggtaggtggagacatgttttgtttctcctttgagggctactgctttactagagaggagtaatgagaatggaaaaaaataaagccttgtcttttcctttaaataatactgtgctactctagctctgtatgcaggagtatttcaaaactaaaag

SEQ ID NO: 48053 - DNA, 600 bp, Chicken  19866894292725_2; identical to SEQ ID NO: 48052

SEQ ID NO: 48054 - DNA, 600 bp, Chicken  19866894292725_3; identical to SEQ ID NO: 48052

SEQ ID NO: 48055 - DNA, 600 bp, Chicken  19866894292725_4; identical to SEQ ID NO: 48052

SEQ ID NO: 48056 - DNA, 600 bp, Chicken  19866894292730_1
gtcatctaattttaactcagttagatgcctgcagcttagggttgtaatagccccgcaggctattttcagcaagttttctgtggatgagctgcatctcactgctagtagatttttagcttcctacctcttattttcattggctgtcccagtgcctttataggacatgtgttgtttccttatttgcactttctaaggatgtggtcccactgtgccaaggagagcacaggctgctggcagctcagcatcctgcctgttgcacactgaggtggagagcaatcattgctgtatgttcctgtgctytagytgaagaaatgtaaactgctcctcattctgaagcggccagaagtctgctcctaagctctgtgtttatgcagtttctttccaggcttatgcgttgcccaaagagggggatttttcttctggatttttggcctttatttatagacactggaatggaagatggaggagaaaataagttttcaattcccacaacagcatgtggacttttgcattctctaacttctctcccctttttttttttttttaatggggtcaagtagaaatcatttaaatagcaaagcttctaaaaaaagagagaaa

SEQ ID NO: 48057 - DNA, 600 bp, Chicken  19866894292730_2
tctaattttaactcagttagatgcctgcagcttagggttgtaatagccccgcaggctattttcagcaagttttctgtggatgagctgcatctcactgctagtagatttttagcttcctacctcttattttcattggctgtcccagtgcctttataggacatgtgttgtttccttatttgcactttctaaggatgtggtcccactgtgccaaggagagcacaggctgctggcagctcagcatcctgcctgttgcacactgaggtggagagcaatcattgctgtatgttcctgtgctytagytgaagaaatgtaaactgctcctcattctgaagcggccagaagtctgctcctaagctctgtgtttatgcagtttctttccaggcttatgcgttgcccaaagagggggatttttcttctggatttttggcctttatttatagacactggaatggaagatggaggagaaaataagttttcaattcccacaacagcatgtggacttttgcattctctaacttctctcccctttttttttttttttaatggggtcaagtagaaatcatttaaatagcaaagcttctaaaaaaagagagaaaaatg

SEQ ID NO: 48058 - DNA, 449 bp, Chicken  19866894292734_1
ttaaaacattgctctttagggaatgattgtagccctagaaatacagtttgggcaggaacaggactgaatcacactgaaaaactagttctagaagtaggtagtaagatgcattaaaggtgatgccccttacttaaaattaccttcctaatcactttttaaaggatgaatgtttcagaactaaattccttgtccacatttagtgcaaactagcagtggtgtttcctataattcctgttactggtttgaaacaggtaagccaagattcagtctcagcttagtcaaaaaatggaatgacacacmgatacatactcaggtgttgaacaatctggtcaattgtaggtttgaacagtgcattcattgcgtctgggctcatcctcagcattccttgcgaagaccacttcacaaagtccacactgcaaaaaaaagcatttagaaaggatattaagaga

SEQ ID NO: 48059 - DNA, 600 bp, Chicken  19866894292735_1
tcgtcaagacacaccaaaagatgccatgatacattgttgtgatttgatgtcatgtgtcattgtcatgacttgtcatcacatctcaatcattagtcgtcactgcatgtaatcatgtggcatgatgtgttatcatgtgtcaattgtgagtcatcgtcacttgtaattatgtgtcatggtgtgtcgtcacctgacattgagttaacttattattgtccatcactgtgagtcactgtcacgtgtcactgtccatcttcacaagtcattttgcgtgtcatcatgtgtcatgatttgctgttatcyatcactgcaaatcattatcacatgttgtcagatgtcatcatcttctccatcacgagttggtatcaagtgtcatgatgtgtcattgcctgtcattgtgtcatcactgtggttcaccacatatcattgcatgtcatcaaccattaccgtgggttgctgtcatgtatcatcacatgtggtcacgtgttgacctccataatcatgaagtgttgtcatggattgtcatgtgtactcatctgtgtcatcatgtgttgccatccatcttcctgagttgtcactgtgtgtcaccatgtgtcatgactt

SEQ ID NO: 48060 - DNA, 600 bp, Chicken  19866894292738_1
cagatgtcccatcaaaaggcatgccaagcaaactgaagttattttagtgatctgctggcactccaggatacgtagctcggtgttattaactgaattctccctgttcacctgaagtggatttaaactcatctttgtcttgcgggaagaactacagaagagtaatatgattagttcagaagctgctagaatgattaaaggaggatgcatagactgaagtgtgtggtgaggaacaacaactagttccagcaagattcgtgatcttcccaccaagagcccagaagcaaactgtattgttccacrtctgtggcggtgtcctggcacgcttttatataacaatctctttctgacacttttgctaatgcattcttttggagatgggctgaagccaaagcctgaactcagagctctgaggcagcacttcttttatccaaacccccaagaagtatttccaccaagcgcyagtaggcagacctaagctttaaaaccaggccttatctttcctttgctcccaccatacaaaatataagcctttttattatattttagtaagaattgatctaagccttcaagcctggacagactgctcctctccccacacta

SEQ ID NO: 48061 - DNA, 600 bp, Chicken  19866894292738_2
aatatgattagttcagaagctgctagaatgattaaaggaggatgcatagactgaagtgtgtggtgaggaacaacaactagttccagcaagattcgtgatcttcccaccaagagcccagaagcaaactgtattgttccacrtctgtggcggtgtcctggcacgcttttatataacaatctctttctgacacttttgctaatgcattcttttggagatgggctgaagccaaagcctgaactcagagctctgaggcagcacttcttttatccaaacccccaagaagtatttccaccaagcgcyagtaggcagacctaagctttaaaaccaggccttatctttcctttgctcccaccatacaaaatataagcctttttattatattttagtaagaattgatctaagccttcaagcctggacagactgctcctctccccacactacaaaatgaccatttctcagcatcagcatacacaytccagacttgggatggcggcgtgtctagagctcaggcagacycactgctgagctccccactgccactgcagcagcacacactttgcttggaaccccagggagcaagatcagcctggcttgcccatg

SEQ ID NO: 48062 - DNA, 600 bp, Chicken  19866894292738_3
aatctctttctgacacttttgctaatgcattcttttggagatgggctgaagccaaagcctgaactcagagctctgaggcagcacttcttttatccaaacccccaagaagtatttccaccaagcgcyagtaggcagacctaagctttaaaaccaggccttatctttcctttgctcccaccatacaaaatataagcctttttattatattttagtaagaattgatctaagccttcaagcctggacagactgctcctctccccacactacaaaatgaccatttctcagcatcagcatacacaytccagacttgggatggcggcgtgtctagagctcaggcagacycactgctgagctccccactgccactgcagcagcacacactttgcttggaaccccagggagcaagatcagcctggcttgcccatggctggcagccaaggggaaaggatatgcctggctagacttctccattcccacactgcgtggagccagttcctcaccccagtgcctttcctccccccacagccctggggcagtgccagcaatgaagactccagtctcaagctcatctgatttaaacacaagaccgtcatttccttc

SEQ ID NO: 48063 - DNA, 600 bp, Chicken  19866894292738_4
gggctgaagccaaagcctgaactcagagctctgaggcagcacttcttttatccaaacccccaagaagtatttccaccaagcgcyagtaggcagacctaagctttaaaaccaggccttatctttcctttgctcccaccatacaaaatataagcctttttattatattttagtaagaattgatctaagccttcaagcctggacagactgctcctctccccacactacaaaatgaccatttctcagcatcagcatacacaytccagacttgggatggcggcgtgtctagagctcaggcagacycactgctgagctccccactgccactgcagcagcacacactttgcttggaaccccagggagcaagatcagcctggcttgcccatggctggcagccaaggggaaaggatatgcctggctagacttctccattcccacactgcgtggagccagttcctcaccccagtgcctttcctccccccacagccctggggcagtgccagcaatgaagactccagtctcaagctcatctgatttaaacacaagaccgtcatttccttccctgaagtcattctccctcttcattacacaattgtcaattcc

SEQ ID NO: 48064 - DNA, 600 bp, Chicken  19866894292744_1
ctccccccttattgcttctgcaatttaagaatgagctactctaagtctactgcctaatgccaagaaagctccaaggtttactgaagtagctggtttgcagagctaagcagtagctggcataactgaatgcaggcaagggggagattgtattacaaatagtcagtcagtgttccttatttcagttgcactgtcttcaggctagagaactgagaaagctttattcacacctcttcctctatcagtattagcttcaacagaacaccacaattgcatcatttttgtgtgggtagaaaaagcccmaaatccagctggaagctggaaaacgtgcactccgtatcttagtagtataagaagacaacttcagctctgtcagaaactctcacagcagctgagtgacgaaattgtcatgcttgttccctcctacttccctatattccctgcacagaacagctcccagaatataacacgtcagatgaagagaaagtaacaccagtacctgagagcaaaagctatgatggagcttggttctttctcacagactgcaataggtacgcgttcatgctcatacattaggtagtgyttatctgggtcactgaatga

SEQ ID NO: 48065 - DNA, 600 bp, Chicken  19866894292744_2
gtgtgggtagaaaaagcccmaaatccagctggaagctggaaaacgtgcactccgtatcttagtagtataagaagacaacttcagctctgtcagaaactctcacagcagctgagtgacgaaattgtcatgcttgttccctcctacttccctatattccctgcacagaacagctcccagaatataacacgtcagatgaagagaaagtaacaccagtacctgagagcaaaagctatgatggagcttggttctttctcacagactgcaataggtacgcgttcatgctcatacattaggtagtgyttatctgggtcactgaatgaaaatggaatagagagaccattagcagacaacagaagtttatgaaaaggttaatttttggtcaaaacccaatctcttcactkcactcgaggcacaagctgaaagtcttagcacagagccaaagcattccagatcagcctctctcaacagacccactcatagctagctacgtggttaaatctaactggcagcgtgttagagcaatcatcacatcaagcaagcttctagtaccagaggaccagctctaagttaaagtctatttgtgtttagcagccactgttt

SEQ ID NO: 48066 - DNA, 600 bp, Chicken  19866894292744_3
acagcagctgagtgacgaaattgtcatgcttgttccctcctacttccctatattccctgcacagaacagctcccagaatataacacgtcagatgaagagaaagtaacaccagtacctgagagcaaaagctatgatggagcttggttctttctcacagactgcaataggtacgcgttcatgctcatacattaggtagtgyttatctgggtcactgaatgaaaatggaatagagagaccattagcagacaacagaagtttatgaaaaggttaatttttggtcaaaacccaatctcttcactkcactcgaggcacaagctgaaagtcttagcacagagccaaagcattccagatcagcctctctcaacagacccactcatagctagctacgtggttaaatctaactggcagcgtgttagagcaatcatcacatcaagcaagcttctagtaccagaggaccagctctaagttaaagtctatttgtgtttagcagccactgtttctaatggcactaaaacctgccagtttgctttatgtgtcctgcagagtagtctgcagagtgaagttaggaggcaaaaaaaccatccagtcttccgaacaaga

SEQ ID NO: 48067 - DNA, 599 bp, Chicken  19866894292746_1
  misc_feature (1)..(118): n is any nucleotide
nnnnnnnnnnnnnnnnnnnnnnnnnnnnnnnnnnnnnnnnnnnnnnnnnnnnnnnnnnnnnnnnnnnnnnnnnnnnnnnnnnnnnnnnnnnnnnnnnnnnnnnnnnnnnnnnnnnnnncctttgtgaggtgcattccatgctctcttggactcacatctgtaactatcttctgccaattaagtggtttgcaaggtcaaaagaacaaagaaacaaaaagacaaacaacctcctccctcaaaacaacgggtgcgtagctttgccttgctctagattgcctcccctctattattttttttttwaacaaccactttaaagcgggaataaatgtttattcagatctgctttaaaatgctcttttgtttaaagcacatttgtaattgcaaggctataaacaaattagaggctttctcattcctaaaatcaaatcttactgcggggaagctgccagtaatgacagtaatttattttagcaaagagcacattctgactaggcaagaaaataaataaagcctacttgctgtaaatagcaactgtctttgaactacatctccccagcttaagtagttcagactgagtagcccttttcccacagcaccaa

SEQ ID NO: 48068 - DNA, 599 bp, Chicken  19866894292762_1
  misc_feature (1)..(289): n is any nucleotide
nnnnnnnnnnnnnnnnnnnnnnnnnnnnnnnnnnnnnnnnnnnnnnnnnnnnnnnnnnnnnnnnnnnnnnnnnnnnnnnnnnnnnnnnnnnnnnnnnnnnnnnnnnnnnnnnnnnnnnnnnnnnnnnnnnnnnnnnnnnnnnnnnnnnnnnnnnnnnnnnnnnnnnnnnnnnnnnnnnnnnnnnnnnnnnnnnnnnnnnnnnnnnnnnnnnnnnnnnnnnnnnnnnnnnnnnnnnnnnnnnnnnnnnnnnnnnnnnnnnnnnnnnnnnnnnnnnnnnnnnnnnnnnnnnatctctctgcrcaggaaggaggatgaaaatacacagacccaaagcagtagtcattctttcagtcaatatggaaataaactttcttcttaagcatgcctttaagactaccatatgatgcaagtgcatgtgcaaagctaagtgaatgtaagaactttctgcttagggaactgtttcctgatacctagcctacagatcacatgagaaccatcagatcttggaaagggaacacagtaacaatatatgagcttggggaaaaatagcatttagtaagttggtggattttccacatcccagcatactaaggtgttct

SEQ ID NO: 48069 - DNA, 600 bp, Chicken  19866894292764_1
tttttactaagcagtctcacagttgctgaaatacactgcaccaatttctgaagtgtgctctgtcaaaacagtacggaactgacaaacgagtatgcttaaaacagtgctgccgtgatccagcttaccactctctgtaccatacccagggaaaagacaaacaagaatgctgttattgcagctcttcctaagagttagagcaagcccttcatatacagtcagataccctgcaagagtagtgctcaatgtagaagaggaaacggaagctgcaactcccagagaaaagagcagagaatcagctasaggttctgcacagctattccatggctagcttggcaatcaaaatcactgtctgcattataaatgacatttctcctttcaattagaactttacataaagaataagaaagctttccttctgcaagatctagagaagagtttttaaaagtgctatgacgtggagatacaatctttcttttgctataccgccctcacagaacagaagaattgatttcaattcacaggcaaagagcaacaaaagagttccaggaaaacaaagaccaaagtgtagtttaaatttgtattaaagctttctcttcatgt

SEQ ID NO: 48070 - DNA, 394 bp, Chicken  19866894292770_1
aaaaactgccttctcgcttgcactcctttcagcagtgacttgttgctgggatgcaaaagagcacaagcccatttttctcggcctttgaagatcgtatttaagagggttgttgttttttttttttttttcctccttttttaaagtttgggaataaatgggagtttttactctccattgctgtcactttaatagttttcaataccaataaccatgttggtaattggagcaggtcaaaagcctctaggaccctctgctgggacacattttccctggaagacatgtcactactccaaaaaacakktcccggagaatgaaactgcctcatagcaattttgttgttgttgttgttgttcaggtaatatctgcgtgccttttgccccatttatcatcctgg

SEQ ID NO: 48071 - DNA, 393 bp, Chicken  19866894292770_2
aaaaactgccttctcgcttgcactcctttcagcagtgacttgttgctgggatgcaaaagagcacaagcccatttttctcggcctttgaagatcgtatttaagagggttgttgttttttttttttttttcctccttttttaaagtttgggaataaatgggagtttttactctccattgctgtcactttaatagttttcaataccaataaccatgttggtaattggagcaggtcaaaagcctctaggaccctctgctgggacacattttccctggaagacatgtcactactccaaaaaacaktcccggagaatgaaactgcctcatagcaattttgttgttgttgttgttgttcaggtaatatctgcgtgccttttgccccatttatcatcctgg

SEQ ID NO: 48072 - DNA, 600 bp, Chicken  19866894292775_1
gcctaccacctgctccatacccagtggcatacagctttagaataaaaaataaactttagttttgtttatgtcttgaagaacagtcactgtggctacagagaagaattcttaatgaatgtatactagaacagaattaatgcaaaggccaccagaaaagtttcttatatgcctctatatcctcctttggaaattttgagaatgcacgtattaacaggatgaggtttttcctttcaaaataaaagtggcattaagacttaacttacgcaagcaacaccagtacatgttctatgctgaagttcytgaacatatggaaggagaagaggaagtactcaagctttcattatggcccttacagtactatataacaatagtctaaggacaaagccaaaacaagttgaagcagagctcatatttgagatcggtatagacagaaagaggagaccagctgtaggcaacaaattcatcatcaaacctgaagcagmaacatttatactgcaaacaactataatctaagaacaattcctcyagtacacgcatctcttttccccttagaaagggcacttatcattcaaggcccctttcctactagcrtgatctcta

SEQ ID NO: 48073 - DNA, 600 bp, Chicken  19866894292775_2
tttggaaattttgagaatgcacgtattaacaggatgaggtttttcctttcaaaataaaagtggcattaagacttaacttacgcaagcaacaccagtacatgttctatgctgaagttcytgaacatatggaaggagaagaggaagtactcaagctttcattatggcccttacagtactatataacaatagtctaaggacaaagccaaaacaagttgaagcagagctcatatttgagatcggtatagacagaaagaggagaccagctgtaggcaacaaattcatcatcaaacctgaagcagmaacatttatactgcaaacaactataatctaagaacaattcctcyagtacacgcatctcttttccccttagaaagggcacttatcattcaaggcccctttcctactagcrtgatctctactgcrtagacatgagtttcttttgctttcagaggtgacctgatacacatctaagtaatttcttcataatgactttcagtctgtgcttagctttaaagccttctgctttttactacctgaagaacgtcttgtgtctccaaaaattgtctactttcccaactccacaagttggtcttggaagag

SEQ ID NO: 48074 - DNA, 600 bp, Chicken  19866894292775_3
cctttcaaaataaaagtggcattaagacttaacttacgcaagcaacaccagtacatgttctatgctgaagttcytgaacatatggaaggagaagaggaagtactcaagctttcattatggcccttacagtactatataacaatagtctaaggacaaagccaaaacaagttgaagcagagctcatatttgagatcggtatagacagaaagaggagaccagctgtaggcaacaaattcatcatcaaacctgaagcagmaacatttatactgcaaacaactataatctaagaacaattcctcyagtacacgcatctcttttccccttagaaagggcacttatcattcaaggcccctttcctactagcrtgatctctactgcrtagacatgagtttcttttgctttcagaggtgacctgatacacatctaagtaatttcttcataatgactttcagtctgtgcttagctttaaagccttctgctttttactacctgaagaacgtcttgtgtctccaaaaattgtctactttcccaactccacaagttggtcttggaagagaataattctacttatcaatgtaactgtgacttaattttgcttat

SEQ ID NO: 48075 - DNA, 600 bp, Chicken  19866894292775_4
tgaagttcytgaacatatggaaggagaagaggaagtactcaagctttcattatggcccttacagtactatataacaatagtctaaggacaaagccaaaacaagttgaagcagagctcatatttgagatcggtatagacagaaagaggagaccagctgtaggcaacaaattcatcatcaaacctgaagcagmaacatttatactgcaaacaactataatctaagaacaattcctcyagtacacgcatctcttttccccttagaaagggcacttatcattcaaggcccctttcctactagcrtgatctctactgcrtagacatgagtttcttttgctttcagaggtgacctgatacacatctaagtaatttcttcataatgactttcagtctgtgcttagctttaaagccttctgctttttactacctgaagaacgtcttgtgtctccaaaaattgtctactttcccaactccacaagttggtcttggaagagaataattctacttatcaatgtaactgtgacttaattttgcttatcagttgttccacaytcaaatgaactctttcccattgcaattyrggtgaattttcaagctcaaaca

SEQ ID NO: 48076 - DNA, 600 bp, Chicken  19866894292775_5
atatggaaggagaagaggaagtactcaagctttcattatggcccttacagtactatataacaatagtctaaggacaaagccaaaacaagttgaagcagagctcatatttgagatcggtatagacagaaagaggagaccagctgtaggcaacaaattcatcatcaaacctgaagcagmaacatttatactgcaaacaactataatctaagaacaattcctcyagtacacgcatctcttttccccttagaaagggcacttatcattcaaggcccctttcctactagcrtgatctctactgcrtagacatgagtttcttttgctttcagaggtgacctgatacacatctaagtaatttcttcataatgactttcagtctgtgcttagctttaaagccttctgctttttactacctgaagaacgtcttgtgtctccaaaaattgtctactttcccaactccacaagttggtcttggaagagaataattctacttatcaatgtaactgtgacttaattttgcttatcagttgttccacaytcaaatgaactctttcccattgcaattyrggtgaattttcaagctcaaacagacaagattcagaa

SEQ ID NO: 48077 - DNA, 600 bp, Chicken  19866894292775_6
ttttccccttagaaagggcacttatcattcaaggcccctttcctactagcrtgatctctactgcrtagacatgagtttcttttgctttcagaggtgacctgatacacatctaagtaatttcttcataatgactttcagtctgtgcttagctttaaagccttctgctttttactacctgaagaacgtcttgtgtctccaaaaattgtctactttcccaactccacaagttggtcttggaagagaataattctacttatcaatgtaactgtgacttaattttgcttatcagttgttccacaytcaaatgaactctttcccattgcaattyrggtgaattttcaagctcaaacagacaagattcagaagctgtagcaggcaactatttagtttcacacaaggaatttaacactagcctgcttcaatgcaccaggtcaggtgcacataaatatgttctggaaaaacaattttccacactacttttgtagcaatacaatctaaccttaatcaaggaaaaattaaacacagacatttcttgccaccggtttcaatgtgtgttgccaaaaaaaaaaaaaaaaaaatcagatcagcatttaataaaat

SEQ ID NO: 48078 - DNA, 600 bp, Chicken  19866894292775_7
tcaaggcccctttcctactagcrtgatctctactgcrtagacatgagtttcttttgctttcagaggtgacctgatacacatctaagtaatttcttcataatgactttcagtctgtgcttagctttaaagccttctgctttttactacctgaagaacgtcttgtgtctccaaaaattgtctactttcccaactccacaagttggtcttggaagagaataattctacttatcaatgtaactgtgacttaattttgcttatcagttgttccacaytcaaatgaactctttcccattgcaattyrggtgaattttcaagctcaaacagacaagattcagaagctgtagcaggcaactatttagtttcacacaaggaatttaacactagcctgcttcaatgcaccaggtcaggtgcacataaatatgttctggaaaaacaattttccacactacttttgtagcaatacaatctaaccttaatcaaggaaaaattaaacacagacatttcttgccaccggtttcaatgtgtgttgccaaaaaaaaaaaaaaaaaaatcagatcagcatttaataaaatgcatgattatataaacatacaaataaaa

SEQ ID NO: 48079 - DNA, 600 bp, Chicken  19866894292775_8
caaggcccctttcctactagcrtgatctctactgcrtagacatgagtttcttttgctttcagaggtgacctgatacacatctaagtaatttcttcataatgactttcagtctgtgcttagctttaaagccttctgctttttactacctgaagaacgtcttgtgtctccaaaaattgtctactttcccaactccacaagttggtcttggaagagaataattctacttatcaatgtaactgtgacttaattttgcttatcagttgttccacaytcaaatgaactctttcccattgcaattyrggtgaattttcaagctcaaacagacaagattcagaagctgtagcaggcaactatttagtttcacacaaggaatttaacactagcctgcttcaatgcaccaggtcaggtgcacataaatatgttctggaaaaacaattttccacactacttttgtagcaatacaatctaaccttaatcaaggaaaaattaaacacagacatttcttgccaccggtttcaatgtgtgttgccaaaaaaaaaaaaaaaaaaatcagatcagcatttaataaaatgcatgattatataaacatacaaataaaat

SEQ ID NO: 48080 - DNA, 599 bp, Chicken  19866894292782_1
  misc_feature (1)..(188): n is any nucleotide
nnnnnnnnnnnnnnnnnnnnnnnnnnnnnnnnnnnnnnnnnnnnnnnnnnnnnnnnnnnnnnnnnnnnnnnnnnnnnnnnnnnnnnnnnnnnnnnnnnnnnnnnnnnnnnnnnnnnnnnnnnnnnnnnnnnnnnnnnnnnnnnnnnnnnnnnnnnnnnnnnnnnnnnnnnnnnnnnnnnnnnnnnnnntgctcttggttctttagctagcatataattctgtgcagtggaagagagttcacttgaagtagaagggaactttcttggtcagctgaaggttatatgggctgttctaccaatsctctgcaaagtgactgcttcctcttcctagaagagttctctcagaacttgtgatgttttgtctggaaaaaggcaaagccactttgcatgttgatattaacagagtcctgagtttttgtggttagttttggtttctgatttacacgtctgtctgggcacgtgggttttaagcagggaaagaatcttgggtatgaggagcagttggagttagagatgtgcttgctctcccctgcagctgttggtttctgtygggaaagtatctcagtgtacgctcttctaataatagcctctggcccasgc

SEQ ID NO: 48081 - DNA, 600 bp, Chicken  19866894292782_2
gaagggaactttcttggtcagctgaaggttatatgggctgttctaccaatsctctgcaaagtgactgcttcctcttcctagaagagttctctcagaacttgtgatgttttgtctggaaaaaggcaaagccactttgcatgttgatattaacagagtcctgagtttttgtggttagttttggtttctgatttacacgtctgtctgggcacgtgggttttaagcagggaaagaatcttgggtatgaggagcagttggagttagagatgtgcttgctctcccctgcagctgttggtttctgtygggaaagtatctcagtgtacgctcttctaataatagcctctggcccasgctcaatggaggactggaatgcactgtttttgtaggactagaactgggtggtttttgagcccatggagggagaagaagtcagttaggaattcaggaggagggggaggtgctttgctgctgccttttgcccgtgaatgtgtgcggagtgtttctggtctgatctctggttaagcaggtaatcatctacaccatctgcttatttcttcccttctgcttttgattgggagtttggtgaaggaagaataattgtgg

SEQ ID NO: 48082 - DNA, 600 bp, Chicken  19866894292782_3
atsctctgcaaagtgactgcttcctcttcctagaagagttctctcagaacttgtgatgttttgtctggaaaaaggcaaagccactttgcatgttgatattaacagagtcctgagtttttgtggttagttttggtttctgatttacacgtctgtctgggcacgtgggttttaagcagggaaagaatcttgggtatgaggagcagttggagttagagatgtgcttgctctcccctgcagctgttggtttctgtygggaaagtatctcagtgtacgctcttctaataatagcctctggcccasgctcaatggaggactggaatgcactgtttttgtaggactagaactgggtggtttttgagcccatggagggagaagaagtcagttaggaattcaggaggagggggaggtgctttgctgctgccttttgcccgtgaatgtgtgcggagtgtttctggtctgatctctggttaagcaggtaatcatctacaccatctgcttatttcttcccttctgcttttgattgggagtttggtgaaggaagaataattgtggttgttggtccttcagtaattccctaacagactttggtttttcaagagc

SEQ ID NO: 48083 - DNA, 600 bp, Chicken  19866894292785_1
gaagactgcaaatgatgtctccctagagccttcttttctccaggctgaacaacttcaactcacaccctcagccttcctttgcaggagagatgctctccagccctctgatcatgtttgtggtttcttctggacccattttccacatctttcttgttctggaggccccagatgtgatctgtaccccagatggagcctcacgagggcagaggagagagggacaatccacctcccccgccctgctggccacccctcttttgatgcaatgcaggatgcagttggccttctgggctgcaagtacarttagccactctttgaatctttaacacagaaaagatcattcactctaataactcagtccttccttcagcacttggaagaataaaactrtgaggacaatagcaatctgtcacctaacctaaggagctaggattgaatacaagacattgatacaacatatgatgtttgtggcctcaaaataaattattttacctgctttgaatatgcagtaagatgtagctaaaagtattcccattaagtttgtgaatttataaattaatcatttcagaatgaatatactataaagggagaatgaagtcagaa

SEQ ID NO: 48084 - DNA, 600 bp, Chicken  19866894292785_2
agatgctctccagccctctgatcatgtttgtggtttcttctggacccattttccacatctttcttgttctggaggccccagatgtgatctgtaccccagatggagcctcacgagggcagaggagagagggacaatccacctcccccgccctgctggccacccctcttttgatgcaatgcaggatgcagttggccttctgggctgcaagtacarttagccactctttgaatctttaacacagaaaagatcattcactctaataactcagtccttccttcagcacttggaagaataaaactrtgaggacaatagcaatctgtcacctaacctaaggagctaggattgaatacaagacattgatacaacatatgatgtttgtggcctcaaaataaattattttacctgctttgaatatgcagtaagatgtagctaaaagtattcccattaagtttgtgaatttataaattaatcatttcagaatgaatatactataaagggagaatgaagtcagaaagtaaaatgcagtcttactggtctcggagtcaatgagccagaagacatcatgcgcaatctttgctgtaattatttaccatttgtcag

SEQ ID NO: 48085 - DNA, 574 bp, Chicken  19866894292786_1
ttgcttgcctttcaagattggcacaaccaggggatgtgtaagaagctttcagctggagccgttatttgatggtgctccatctcagcaaagcatatcaaattattttctagctgtggcaatcagcttttcctgtatccctctcaatcccgttattgaaacaattacttttcaacctcgaactaatttattctgtaaattgattgtttcccaaagaaatgatgcctggtatttaccaaaaatagatttgttttttaatgtagagcaaatgcagatttccctgagccggctgcgtttatctgwgatggakyattattcactcagaggagccgatgatcaatttttccttttctgtgtcttcccctcaggacaaattcagactctgccttgcaccagagcacgatgactccagctcagcaagagtctttttcgggaggatcgcaggacatgcagcagaaaagaggtcaataggatatgggtctgaatttgtcagttttccattgatgacttaagaggggtttctcatcgttaactccattaaatactagctaccagaaattaaattctggaaatcgat

SEQ ID NO: 48086 - DNA, 567 bp, Chicken  19866894292786_2
cctttcaagattggcacaaccaggggatgtgtaagaagctttcagctggagccgttatttgatggtgctccatctcagcaaagcatatcaaattattttctagctgtggcaatcagcttttcctgtatccctctcaatcccgttattgaaacaattacttttcaacctcgaactaatttattctgtaaattgattgtttcccaaagaaatgatgcctggtatttaccaaaaatagatttgttttttaatgtagagcaaatgcagatttccctgagccggctgcgtttatctgwgatggakyattattcactcagaggagccgatgatcaatttttccttttctgtgtcttcccctcaggacaaattcagactctgccttgcaccagagcacgatgactccagctcagcaagagtctttttcgggaggatcgcaggacatgcagcagaaaagaggtcaataggatatgggtctgaatttgtcagttttccattgatgacttaagaggggtttctcatcgttaactccattaaatactagctaccagaaattaaattctggaaatcgat

SEQ ID NO: 48087 - DNA, 566 bp, Chicken  19866894292786_3
ctttcaagattggcacaaccaggggatgtgtaagaagctttcagctggagccgttatttgatggtgctccatctcagcaaagcatatcaaattattttctagctgtggcaatcagcttttcctgtatccctctcaatcccgttattgaaacaattacttttcaacctcgaactaatttattctgtaaattgattgtttcccaaagaaatgatgcctggtatttaccaaaaatagatttgttttttaatgtagagcaaatgcagatttccctgagccggctgcgtttatctgwgatggakyattattcactcagaggagccgatgatcaatttttccttttctgtgtcttcccctcaggacaaattcagactctgccttgcaccagagcacgatgactccagctcagcaagagtctttttcgggaggatcgcaggacatgcagcagaaaagaggtcaataggatatgggtctgaatttgtcagttttccattgatgacttaagaggggtttctcatcgttaactccattaaatactagctaccagaaattaaattctggaaatcgat

SEQ ID NO: 48088 - DNA, 600 bp, Chicken  19866894292789_1
gggggcacggagggatttccttgtgcttgtgcttctgtgtgtgtcttctgagtgtttagaaatcaaattgggtatatacgcactacaaaaagcttttatcagaaatatggtgagatcaatggaaattcccctgttttggcagagccaaggcttagagctttctggctgctggaaagtatgaggctggctgtgagtagacctgttttttccatcagtccattgggtgtgtgttttattaaggcttgggatcccatggtgcctattgcaagagactttgcaccctgcctgcttccccagacrtttaaaaggatccacgtgtttttggcgagatgtgagatctgttggtgggaaaggtttcggtgcgggaagcattgagaatccccagtgagaaatttgatcttctttgtgccrgagcaggggatgaggatggggaccattagcactgcaagcttgtgcattggtttaggtggctattactgctacctgagccctgtgggaaggagagactcctcaggtgtgttagccaagaagcctctgacctcctgcaagcctatttgcttcgaggtacctttcagtgaggatttctgtgagacacagctt

SEQ ID NO: 48089 - DNA, 600 bp, Chicken  19866894292789_2
gagatcaatggaaattcccctgttttggcagagccaaggcttagagctttctggctgctggaaagtatgaggctggctgtgagtagacctgttttttccatcagtccattgggtgtgtgttttattaaggcttgggatcccatggtgcctattgcaagagactttgcaccctgcctgcttccccagacrtttaaaaggatccacgtgtttttggcgagatgtgagatctgttggtgggaaaggtttcggtgcgggaagcattgagaatccccagtgagaaatttgatcttctttgtgccrgagcaggggatgaggatggggaccattagcactgcaagcttgtgcattggtttaggtggctattactgctacctgagccctgtgggaaggagagactcctcaggtgtgttagccaagaagcctctgacctcctgcaagcctatttgcttcgaggtacctttcagtgaggatttctgtgagacacagcttgacagtctggtgtgtacagcctgcttgggattgctgtggaccagagtgtgagaattattctaggcttgtggcactgcctctctcagcatcaccactctctccaaccagtgc

SEQ ID NO: 48090 - DNA, 600 bp, Chicken  19866894292790_1
agatgtctcccacataggttttatagggagacgcttcctacccttcaaaaagcctgagaacttaacactaacatgaatgtaatcttagaaggatccaagtttctggcatcaatcaagtcctgacactatttctgcagagaagcaggtggagtatctcagtagatgtgttgctaagtcatcgttctgcacactggataattagcaaatttagccacagtcactgggtatggaactgcaaagacccattctggttgaacattcaatctgatcattgttaataaaagcttcagtgtaaactgragtgcagttaataacaatttagtgagatggaaacaaaataatctattcttataagtcagtacttttgaagagctctagcaatgcaccataaagtatcttcagttcttcatactgctggtttgttagacaaatattataagaaatcagggcggttattttggatccatactgatagaactgagaacagaatacaattcttcattaacattctgttcacatattaatagggtttcaatcttgctaaatcagattctctgtgttttagaagatcaggaaaacatatactacaccaaattatgc

SEQ ID NO: 48091 - DNA, 600 bp, Chicken  19866894292792_1
gaagggggtcaggaagaggggaaaggatgaaagtcttttattaatgggttaataattaggaaaatgatgatgcttcagagaaattgatttttttcttcacttgaggctctcttacagagagggcattgaggtgacttttttttttgaaactgcttgtggatattgaaaaaaaaacacaactagttattgtgatactcaaagaagtgcaaatgaagatatgttttgagagaaaattatggttacagattcattcttgtcattgtctctttatgttgagaaactgaagtcattgcttacagscttaggcaagctccttgtgttatggcaaggtggagttctagaacaggatgaaaactgtctgggttgattatgtgcaggtgtcttctctgtgcagtactgattctgattgggcattctaataagtgtgacttttctatatcacccgatgcaggsttttgcttgagtgttggtttgagaaccttttgcctaaattacataggttgctctgaagtaatgcctcctacttatttccatggaaactgcaacagatacaaggaccacagcgttaatatttgatagagcaattttttagctattagc

SEQ ID NO: 48092 - DNA, 600 bp, Chicken  19866894292792_2
ttgtggatattgaaaaaaaaacacaactagttattgtgatactcaaagaagtgcaaatgaagatatgttttgagagaaaattatggttacagattcattcttgtcattgtctctttatgttgagaaactgaagtcattgcttacagscttaggcaagctccttgtgttatggcaaggtggagttctagaacaggatgaaaactgtctgggttgattatgtgcaggtgtcttctctgtgcagtactgattctgattgggcattctaataagtgtgacttttctatatcacccgatgcaggsttttgcttgagtgttggtttgagaaccttttgcctaaattacataggttgctctgaagtaatgcctcctacttatttccatggaaactgcaacagatacaaggaccacagcgttaatatttgatagagcaattttttagctattagctaaaagtactatttagctgtaagtactatttttcaacatagtcactatcttgttacaacacatacagaagaggctgaggtacgcaccgagttctttatctcagtcttcactggcagccacacttgtcatttctctcacgttcctgaaccttgc

SEQ ID NO: 48093 - DNA, 600 bp, Chicken  19866894292797_1
ttaagtctacttaatctttatgagtgacatcaaatatggacccaattagcacagttttcagccacttcataattcaaaagaatgtgatcattaagctggaagcacatttgacagaaactccatagtcatgaaggtaaaagcttgcaagatcacccagaaggatggagaagctgtcattctttcatcagtgctgttgaatactaatgtcaaggtcagaagagtgtaattttaggctgccaaaatattgttggatttgatctgccagcagatgtttaagagggaagtagcaaaggaaaaatrtatatacacttttgatatgagagatacaaagtttcaaatgccactggaaatgttctgaatcatttactgctttgattggcactttagtatgcattttttaaattctaatatttgctttaaacatcatcctcattgtcttacatcagaaattctaactgtatacataygttacaaattctcagtgctattttaaattttgatatgtgttcaattagtcacaattacagcaaagtctggatgctgaaacatctgaatactaaatttagacatataaaattggcatgaataataaaatagtgt

SEQ ID NO: 48094 - DNA, 560 bp, Chicken  19866894292797_2
aagctgtcattctttcatcagtgctgttgaatactaatgtcaaggtcagaagagtgtaattttaggctgccaaaatattgttggatttgatctgccagcagatgtttaagagggaagtagcaaaggaaaaatrtatatacacttttgatatgagagatacaaagtttcaaatgccactggaaatgttctgaatcatttactgctttgattggcactttagtatgcattttttaaattctaatatttgctttaaacatcatcctcattgtcttacatcagaaattctaactgtatacataygttacaaattctcagtgctattttaaattttgatatgtgttcaattagtcacaattacagcaaagtctggatgctgaaacatctgaatactaaatttagacatataaaattggcatgaataataaaatagtgtgtttgtctttgccacacttttcattttcatgatgcagttatgctaagggaggattcttacttctgtgttcaagtaagaacctaataataaagtagaaacaagatggagctgagatgttcttagagct

SEQ ID NO: 48095 - DNA, 600 bp, Chicken  19866894292802_1
gtcttgagaggatagtctgcagttcttgaagggatcatgcatagaaagattttgaatagcctcacaagcgaatgatatttagctctctgtctctgatcccattgtgctttgcatggattgttcaacattttgagacactgttgatttgatcacacttttacacatttttcctttttttagtctgctacagggattcactgtactgatagaaaacaaaagtggtccgtgccaccttctgcatctgcacattcagaagctggcaaggctcctgcacatttttttcttccaaatccatggagygcacctgcagaaattatgcatccacatgtgcttctgataacatggctcacagctgtttactttgttttccacaagatctctgtaaatacagagcaagggtcaggggaaaaagaattgaaaatagatacacaacagagagaatacataagtcatggattgaaggagaaagtaaaccactgacatatcaccaagtagaaaaggaaaagatgtttagcagaaatgttgtcccgtcccattctctggtttgttttgcccagtgagaagatagtgactacagcacacttcactgccacagatcag

SEQ ID NO: 48096 - DNA, 599 bp, Chicken  19866894292808_1
  misc_feature (1)..(211): n is any nucleotide
nnnnnnnnnnnnnnnnnnnnnnnnnnnnnnnnnnnnnnnnnnnnnnnnnnnnnnnnnnnnnnnnnnnnnnnnnnnnnnnnnnnnnnnnnnnnnnnnnnnnnnnnnnnnnnnnnnnnnnnnnnnnnnnnnnnnnnnnnnnnnnnnnnnnnnnnnnnnnnnnnnnnnnnnnnnnnnnnnnnnnnnnnnnnnnnnnnnnnnnnnnnnnnnnnnncaacgtgacagattgttctcaatttgtgcacatattctgagaagtgctattattgcctcttaaagatgcaagagtcctctttaaaatcracttatattttcaaagattcaccgcaatgaattaattgaattgagtggaaaagagaaaaatgcacaagcaatggcacatgcctgtgtttgtgccattagggaaaaaagtgaacgcattatttcttggtttcaaacaaacactgcatcagaaacagatcttttctaaacatcccccactaccttctttttctcaatggctgtttaaccattgcttagttcaacccaaacctcctggtgaatgtactcacatcaatgcggtcaacaaagcacctgcttaactcaaagcagataactaaggc

SEQ ID NO: 48097 - DNA, 600 bp, Chicken  19866894292808_2
cttctttttctcaatggctgtttaaccattgcttagttcaacccaaacctcctggtgaatgtactcacatcaatgcggtcaacaaagcacctgcttaactcaaagcagataactaaggctcattcagggaaaatcacccatctgcctcacctgttttctctgaataggggtcctccatcgctttaaaagctgtatttctttgagcataaagtactgcagcagcaaaaatcaatgcactgtgctccatcagtgtgcatctgtcactcagctcccgacactggaaaggaagaaacacacgtmgagaacactcaccctgtcgccttcctttaacaacagccaagagtaaaaggatgcataatttagtggaatggctttatttgtgtatcgggttatattaaacgtcagctaaggttatgttcttgtcttcagttgctgctgggtgttgcttcaaagtcattctgagtcactgctctccatctttatctgctgatgggcccccaggtagcgatgggaacataacttcccctgacacagataacctccaataaaggaatgacttcccttttgacgtgctgattacaataaatgggggggatgttg

SEQ ID NO: 48098 - DNA, 599 bp, Chicken  19866894292820_1
  misc_feature (1)..(173): n is any nucleotide
nnnnnnnnnnnnnnnnnnnnnnnnnnnnnnnnnnnnnnnnnnnnnnnnnnnnnnnnnnnnnnnnnnnnnnnnnnnnnnnnnnnnnnnnnnnnnnnnnnnnnnnnnnnnnnnnnnnnnnnnnnnnnnnnnnnnnnnnnnnnnnnnnnnnnnnnnnnnnnnnnnnnnnnnnnnnnaatgcttaaacaccgttactcagatggggattctctttgaaaagaagtcattaacttttaaatacctgatgtcatccaccattgagagacacacacacacacctacataagggagcagacaaagggrctccctgcgatcagcatcgaggtgatgagtaatgccttcatatgaaagaagctaacaaaaacaaaaccccaaagagaaccccaaaaagctgattgggtattaaaaagcgcacaacattcagtgataatatrgcagttcctaagggagggcgatcgtgggaaatgggagggctacaaccagcacaactccaaattaggacttcaccaaaaaaaaaaaatcggataaaatcgtgtctacgtgatgcagctgggaaaacatccataattcagaaaggcagatgctgccctgagacaggagca

SEQ ID NO: 48099 - DNA, 599 bp, Chicken  19866894292820_2
  misc_feature (1)..(42): n is any nucleotide
nnnnnnnnnnnnnnnnnnnnnnnnnnnnnnnnnnnnnnnnnnaatgcttaaacaccgttactcagatggggattctctttgaaaagaagtcattaacttttaaatacctgatgtcatccaccattgagagacacacacacacacctacataagggagcagacaaagggrctccctgcgatcagcatcgaggtgatgagtaatgccttcatatgaaagaagctaacaaaaacaaaaccccaaagagaaccccaaaaagctgattgggtattaaaaagcgcacaacattcagtgataatatrgcagttcctaagggagggcgatcgtgggaaatgggagggctacaaccagcacaactccaaattaggacttcaccaaaaaaaaaaaatcggataaaatcgtgtctacgtgatgcagctgggaaaacatccataattcagaaaggcagatgctgccctgagacaggagcaggggagaagagagcgaagagctgccacagccccagcacagcggatggcagagcagcatttggttgggctcagcaccacgcagtgggtgcacggagcagctctgcacctcgccctctagatgacagcagcag

SEQ ID NO: 48100 - DNA, 600 bp, Chicken  19866894292823_1
gacccacaggatcatccagtccaaccattcacccttcaccaatggttctcgctaaaccatgtccctcaacacaacatccaaacgttctttgaacgccaccaggctcagtgactccaccacctctctgggcagcccattccagtgcctgaccaccctttcagagaagtagtatttcctaacgtccagcctgaatcttccctgacgcagcttgaagccattccctctagtcctatcactagtcacatgagagaagaggccaacccccagctcactacaacctcccttcaggtagttatagasagcaatgagatctcctctgagcctcctcttctccagactgaacaatcccagctccttcagccacccctcataaggcctgtgctccagacccctcacctttgttgccctcctctgggcacgctccagggcctcgatgtctttcttacagccaggggcccaaaactggacacactactcgaggtgcggcctcaccagtgctgagtacaggaggacaattatttccctgttcctgctggccacactatttctgatgcaagccaggatgccattggccttcttggccacctgggcacactgctg

SEQ ID NO: 48101 - DNA, 599 bp, Chicken  19866894292824_1
  misc_feature (1)..(19): n is any nucleotide
nnnnnnnnnnnnnnnnnnnaatattgagagttaagcttaagatatcattatgtgtatatcaggttttattttgatattttatctctccaaataccatttacatttcagttcaaaccaaactggtatatcatatatattggccatcactgcccactggaattcaccacctggagcaacagccctgatatcaccttttcctttatagtacctggtaatgcaacacagtttgtagttttctgtgcaatatacaacacgttaaagttatctcaaataaacaagaaggaaaggtacctaaaacayatctataaacagaatttctagttgaataagaacacaaccctttttaaacctgttataattttgaaagattttttagaactgctccagttgctagtaaagcactggttcgtaaaaagaagtgatcagtaagtttkaaatcctgtttgcagaggtgtttctgctgagcagacagcaacatcacagacatagctactaacaatatttcatgtaatgcataattttgtatcttctaacagtcattctgtatgctaaactatatttctgaatttgaatatttttcttctaaatacttctgcaga

SEQ ID NO: 48102 - DNA, 600 bp, Chicken  19866894292824_2
tattggccatcactgcccactggaattcaccacctggagcaacagccctgatatcaccttttcctttatagtacctggtaatgcaacacagtttgtagttttctgtgcaatatacaacacgttaaagttatctcaaataaacaagaaggaaaggtacctaaaacayatctataaacagaatttctagttgaataagaacacaaccctttttaaacctgttataattttgaaagattttttagaactgctccagttgctagtaaagcactggttcgtaaaaagaagtgatcagtaagtttkaaatcctgtttgcagaggtgtttctgctgagcagacagcaacatcacagacatagctactaacaatatttcatgtaatgcataattttgtatcttctaacagtcattctgtatgctaaactatatttctgaatttgaatatttttcttctaaatacttctgcagagcatcacatcaggttatatctttcatagtaaacctagtgttggtcattgaagaagatagcctgaacaattcctatatgcacatatttacacagcattctaatctaatgtagctggcagtacctttaatttacttc

SEQ ID NO: 48103 - DNA, 599 bp, Chicken  19866894292830_1
  misc_feature (1)..(66): n is any nucleotide
nnnnnnnnnnnnnnnnnnnnnnnnnnnnnnnnnnnnnnnnnnnnnnnnnnnnnnnnnnnnnnnnnncctttttttgaaatctggcacagacaggatttccaggtgtagcagaaatgcaaagtacagcttgaagcagtgattgagcacctggtgggaaggcagggccaacccaggggagctcaggtgtatgcaatgcagctgagtgcccagaagggctggagccaggatccaccccttcccagacctcatttaaaggttggcagtgggggtgaggggatctcactggggatccctgcctgygtgaggccttcyraaggtaagcrgatttttcatccttyatttctgtatcygtggctgctgcatttgggcttgtcctcgtttgctgcagcccaggactttgccactccactgttattgctgtactttctgtcacgttacagcattacaccaggtctttgctcagatatctatcaacagcaattccagttgggctcatcgagccctgctgaggttggagctgcgatgcccatcaggcacaagctgagtgtttaattagcagccaagcagctccccattaagaaggacactggagggtgcaa

SEQ ID NO: 48104 - DNA, 600 bp, Chicken  19866894292830_10
caggcagatggatacaaaagaaaggccagagcatcatctgtatttgtttctggtttttgtgttggctttttacccaagttttgagtgacctgagaaataagaagcaaaatatccacccctcattctgactgcctcagataccccytgtaggagattygggacagtaacaggtattgatgtcttctgttttctgatcaggttagcattggatgtcctgaaaaaatggaacccattacgaagatctcacatatcccagcgagcagatgggctctgtcctgcagcctctgcaaggaatgcacrgggacctgcattcaggtaccgtggatcagtagcaaggaagctcagaccccatggttgtgcctttagcagccaccagagattctcgagctgttggtggatgggttcgttcctggcttgggtccgaggagcacacctaacaaggagcacgagcaccaatcagacatcatcagctgttgtagtttgcaatcttttaacattattgagtgctaggaatctagattaactttcttttgcgtaacgcagtgatgttgctgtggtgacactaattaccagggctgcagatgaccttggttggagata

SEQ ID NO: 48105 - DNA, 599 bp, Chicken  19866894292830_2
  misc_feature (1)..(54): n is any nucleotide
nnnnnnnnnnnnnnnnnnnnnnnnnnnnnnnnnnnnnnnnnnnnnnnnnnnnnncctttttttgaaatctggcacagacaggatttccaggtgtagcagaaatgcaaagtacagcttgaagcagtgattgagcacctggtgggaaggcagggccaacccaggggagctcaggtgtatgcaatgcagctgagtgcccagaagggctggagccaggatccaccccttcccagacctcatttaaaggttggcagtgggggtgaggggatctcactggggatccctgcctgygtgaggccttcyraaggtaagcrgatttttcatccttyatttctgtatcygtggctgctgcatttgggcttgtcctcgtttgctgcagcccaggactttgccactccactgttattgctgtactttctgtcacgttacagcattacaccaggtctttgctcagatatctatcaacagcaattccagttgggctcatcgagccctgctgaggttggagctgcgatgcccatcaggcacaagctgagtgtttaattagcagccaagcagctccccattaagaaggacactggagggtgcaagctgctgccctg

SEQ ID NO: 48106 - DNA, 599 bp, Chicken  19866894292830_3
  misc_feature (1)..(53): n is any nucleotide
nnnnnnnnnnnnnnnnnnnnnnnnnnnnnnnnnnnnnnnnnnnnnnnnnnnnncctttttttgaaatctggcacagacaggatttccaggtgtagcagaaatgcaaagtacagcttgaagcagtgattgagcacctggtgggaaggcagggccaacccaggggagctcaggtgtatgcaatgcagctgagtgcccagaagggctggagccaggatccaccccttcccagacctcatttaaaggttggcagtgggggtgaggggatctcactggggatccctgcctgygtgaggccttcyraaggtaagcrgatttttcatccttyatttctgtatcygtggctgctgcatttgggcttgtcctcgtttgctgcagcccaggactttgccactccactgttattgctgtactttctgtcacgttacagcattacaccaggtctttgctcagatatctatcaacagcaattccagttgggctcatcgagccctgctgaggttggagctgcgatgcccatcaggcacaagctgagtgtttaattagcagccaagcagctccccattaagaaggacactggagggtgcaagctgctgccctgc

SEQ ID NO: 48107 - DNA, 599 bp, Chicken  19866894292830_4
  misc_feature (1)..(43): n is any nucleotide
nnnnnnnnnnnnnnnnnnnnnnnnnnnnnnnnnnnnnnnnnnncctttttttgaaatctggcacagacaggatttccaggtgtagcagaaatgcaaagtacagcttgaagcagtgattgagcacctggtgggaaggcagggccaacccaggggagctcaggtgtatgcaatgcagctgagtgcccagaagggctggagccaggatccaccccttcccagacctcatttaaaggttggcagtgggggtgaggggatctcactggggatccctgcctgygtgaggccttcyraaggtaagcrgatttttcatccttyatttctgtatcygtggctgctgcatttgggcttgtcctcgtttgctgcagcccaggactttgccactccactgttattgctgtactttctgtcacgttacagcattacaccaggtctttgctcagatatctatcaacagcaattccagttgggctcatcgagccctgctgaggttggagctgcgatgcccatcaggcacaagctgagtgtttaattagcagccaagcagctccccattaagaaggacactggagggtgcaagctgctgccctgctcatkggaag

SEQ ID NO: 48108 - DNA, 599 bp, Chicken  19866894292830_5
  misc_feature (1)..(28): n is any nucleotide
nnnnnnnnnnnnnnnnnnnnnnnnnnnncctttttttgaaatctggcacagacaggatttccaggtgtagcagaaatgcaaagtacagcttgaagcagtgattgagcacctggtgggaaggcagggccaacccaggggagctcaggtgtatgcaatgcagctgagtgcccagaagggctggagccaggatccaccccttcccagacctcatttaaaggttggcagtgggggtgaggggatctcactggggatccctgcctgygtgaggccttcyraaggtaagcrgatttttcatccttyatttctgtatcygtggctgctgcatttgggcttgtcctcgtttgctgcagcccaggactttgccactccactgttattgctgtactttctgtcacgttacagcattacaccaggtctttgctcagatatctatcaacagcaattccagttgggctcatcgagccctgctgaggttggagctgcgatgcccatcaggcacaagctgagtgtttaattagcagccaagcagctccccattaagaaggacactggagggtgcaagctgctgccctgctcatkggaagcacccatgctccctg

SEQ ID NO: 48109 - DNA, 599 bp, Chicken  19866894292830_6
  misc_feature (1)..(16): n is any nucleotide
nnnnnnnnnnnnnnnncctttttttgaaatctggcacagacaggatttccaggtgtagcagaaatgcaaagtacagcttgaagcagtgattgagcacctggtgggaaggcagggccaacccaggggagctcaggtgtatgcaatgcagctgagtgcccagaagggctggagccaggatccaccccttcccagacctcatttaaaggttggcagtgggggtgaggggatctcactggggatccctgcctgygtgaggccttcyraaggtaagcrgatttttcatccttyatttctgtatcygtggctgctgcatttgggcttgtcctcgtttgctgcagcccaggactttgccactccactgttattgctgtactttctgtcacgttacagcattacaccaggtctttgctcagatatctatcaacagcaattccagttgggctcatcgagccctgctgaggttggagctgcgatgcccatcaggcacaagctgagtgtttaattagcagccaagcagctccccattaagaaggacactggagggtgcaagctgctgccctgctcatkggaagcacccatgctccctgaggaggggtgat

SEQ ID NO: 48110 - DNA, 600 bp, Chicken  19866894292830_7
taagcrgatttttcatccttyatttctgtatcygtggctgctgcatttgggcttgtcctcgtttgctgcagcccaggactttgccactccactgttattgctgtactttctgtcacgttacagcattacaccaggtctttgctcagatatctatcaacagcaattccagttgggctcatcgagccctgctgaggttggagctgcgatgcccatcaggcacaagctgagtgtttaattagcagccaagcagctccccattaagaaggacactggagggtgcaagctgctgccctgctcatkggaagcacccatgctccctgaggaggggtgatgttgaaacagtctgtaaagtgtcactttgtcctcccttgatgtgaagtgcaaagaggagtgccagagaggcaaggacataccagcattcagaacaataaggataaatgctagttcaaattggcaggcagatggatacaaaagaaaggccagagcatcatctgtatttgtttctggtttttgtgttggctttttacccaagttttgagtgacctgagaaataagaagcaaaatatccacccctcattctgactgcctcagataccccyt

SEQ ID NO: 48111 - DNA, 600 bp, Chicken  19866894292830_8
kggaagcacccatgctccctgaggaggggtgatgttgaaacagtctgtaaagtgtcactttgtcctcccttgatgtgaagtgcaaagaggagtgccagagaggcaaggacataccagcattcagaacaataaggataaatgctagttcaaattggcaggcagatggatacaaaagaaaggccagagcatcatctgtatttgtttctggtttttgtgttggctttttacccaagttttgagtgacctgagaaataagaagcaaaatatccacccctcattctgactgcctcagataccccytgtaggagattygggacagtaacaggtattgatgtcttctgttttctgatcaggttagcattggatgtcctgaaaaaatggaacccattacgaagatctcacatatcccagcgagcagatgggctctgtcctgcagcctctgcaaggaatgcacrgggacctgcattcaggtaccgtggatcagtagcaaggaagctcagaccccatggttgtgcctttagcagccaccagagattctcgagctgttggtggatgggttcgttcctggcttgggtccgaggagcacacctaacaaggagc

SEQ ID NO: 48112 - DNA, 600 bp, Chicken  19866894292830_9
tgctccctgaggaggggtgatgttgaaacagtctgtaaagtgtcactttgtcctcccttgatgtgaagtgcaaagaggagtgccagagaggcaaggacataccagcattcagaacaataaggataaatgctagttcaaattggcaggcagatggatacaaaagaaaggccagagcatcatctgtatttgtttctggtttttgtgttggctttttacccaagttttgagtgacctgagaaataagaagcaaaatatccacccctcattctgactgcctcagataccccytgtaggagattygggacagtaacaggtattgatgtcttctgttttctgatcaggttagcattggatgtcctgaaaaaatggaacccattacgaagatctcacatatcccagcgagcagatgggctctgtcctgcagcctctgcaaggaatgcacrgggacctgcattcaggtaccgtggatcagtagcaaggaagctcagaccccatggttgtgcctttagcagccaccagagattctcgagctgttggtggatgggttcgttcctggcttgggtccgaggagcacacctaacaaggagcacgagcaccaat

SEQ ID NO: 48113 - DNA, 600 bp, Chicken  19866894292842_1
gttttgggtcaagtttcgtgttttcttgctcatttcaccccccccctccccagtgcttacaccattcagccaaaacctcatggattattcactcgctctcagttatttctgggcccggtgctgaaaaaataatgagccggtttgggaggagaagccccagaggtggggggagtgcagggggaaaggatcatactgcttgtcctgcactcacagcacagtaagctctaactcccaggggtccccctgtgcccacccagctccgtgctggcgttttggccaccccgtgcccaccaccctcgyggggcccatgcacgccccacaaggagctggggacctgcacccaaccttggctcctggccaggctgcatccctgggtaaaagcagaccaggaagcagctgggacgggctttaggagcagcgccgcagcgacccgctgcagagcaatcagtgcagagatgaaagccagctcttccttttttcgtttgctgaaggctgccccagaaaacgtgacttcctctttaagcaatcagtgctctggagaaaaagctgaattctgtcttttggtatttttatggggatataaagtttttcacaggaagc

SEQ ID NO: 48114 - DNA, 532 bp, Chicken  19866894292850_1
gtctgtctctctaggcttggactacatgcctgtaaagaatatttttttattgacctatttaaaatggaaatcatagtgcagactctccagatactgactctcttcttctgttttgtttcttctattttctttgtatcctgtcttactgggacaacagtagccagtgttcatctataaactggatttttactccacaaaaggtctactgttcctgtctaaagaatgtgtaaatctcatcagactaattgaagataggctaggttaggaccctgaaatcccaagatctgttggatgaagctygtagcagctctatgatggtcagatcaggagggatgttaagtatagagattaaaacttcactctccaaatcccttgccactgttctgttctttgagaaaaccacaacagtgctttgcgatctccatgaataacctgttgttttcgtgacaatatagcattttttgtcagaccttgacatgaagtcttacagaatttctttaaccagctcctttccttggactgcctctgattt

SEQ ID NO: 48115 - DNA, 600 bp, Chicken  19866894292852_1
ataccatactgttcaccttttcactgagaaagctgtaaattatatgtgggtctctgctgaagtcctggttgacaaaggtgatcctctggaatccattcaggttacttctttcctctttttctgagtgatcaagtaagcttgattgctaatgcagacttcaatggcaaacatctatttctaaataaatcccacattggatttctgcacctctcatttctggctacgtttcagcttgcacaattttattactaaaatggcacatgtattgcaaactgctaggatgaaaggctgttaggtgargttcttcagtacagactatcgcatcccagagggtgaactatcattgagtgtggtaaatactctctggattgcttgtttactccagagttctctaaacagtgaagatagcagcaggattgtggttttgtctcttttgccttttgcagctcggtggggtgatttttgagtttagttgagctctggtggagccacagccatgcaaacttctcagtattaggtctggtggggatatggtcactttggtctgttgatttactgcattctcgttactattttttgatgttgtgctgtagatctggc

SEQ ID NO: 48116 - DNA, 600 bp, Chicken  19866894292859_1
tcatgataaacttgcttgttcatgaaaaaaataagtgaagctaaaaaaaatcatgcatgtcctgatgctgattcctaatgcactggagaaattgctcaaaaacagcttagcccctgaagtgaagcttgctttccttgtactgagaagtctgagaattcttgcattatatgtagatatatatatacgcacatatatatatatacatgcatgcatactatatatgcatagaaacacataattatgcaaacacaagcccctacatatatgagtgtatacacccacacacacacaccagggctkctctgaaagcaatgcatcttttattatgttgacctacaatatcagaggcagatgttggtgttatggcagcagaggctgaaccttcccaacaacactagaagcaaagccttgcctagcaaccagcagcatcttgtctgcctcagattatgaaagtttgggtttaaacacagtagttgaggttgacagtggctgtctgactatacttaattactcctgcttgaagtatgattttgaatggtttacgaaacctgtgctgacttctctgatggtgttccaaaggaaaccaagtgatcacctgag

SEQ ID NO: 48117 - DNA, 600 bp, Chicken  19866894292883_1
tactttgacaataaacactatctgtagctattaaagatggttatttctatgtcaatttattagcaacattaatgggaatgcttattatttttaaatgtgaaactttgtcttttccactaattttagaactaattttaatttgaatttgacagtaatataagcacgacactgccagtttgccactatgtattgccgtcatgtatctttattttctcatgggaactgacagtgtatgattcataatgacaatattaatataagcctatgaataacaatacggatttataataatattaacayacataacatcatctgtattgaaactgtcgagattaataacttagattttgttccttacatggtatacattttcatgtgtcttcattaatatacatttatgattactattaagcttatgcacagactcttttagtatgcaaataagggttataacatacactcagagacagtgactctctatacatcacttttatctttaataagtcctataaaaagcaagtaggttaaaaactcagccctatgaattaaaattggctcacattcttgaactgaaaatgttcatagtaggggccatctatg

SEQ ID NO: 48118 - DNA, 594 bp, Chicken  19866894292909_1
tctaacgacaatagctgaacacaccgaattgattatcgtcaattaggaccccatttcacctaagcagtaaattctcattcacaatggctttttagtctcaaaagtccgtatttaaaattcaaagatgagaaacttcgacccagaggtatgaggatatatttaaggaaatcagaactaggaacccagaaagcaaaccaaatgatttgctcctcccatactgacttccctgcagtttgttccctttgcccatgcatttctcctgcaggtgctgtttcgagaggcacgttttgggaacagcartgggattcaccagcagtagatccatccacgctcttcccagtcaaaactggtgtggtttagaccttgcagttgcgtttgagtcaacctttaaatgagtgacacagatgttgggtgatgtttaaaagcgagcattagccctggatcttccccagtctgtcttctctgtccccataccctggagcacagaagaagcagtagcagtgaaaagaaactctttcagagactcactttgaaacagacacccaaaggatttaattatttccctgggtctgatgcttgacaatttccagtgca

SEQ ID NO: 48119 - DNA, 600 bp, Chicken  19866894292913_1
gtggaattaacgctatctttgaggtcagcgggtccaaaggtagtatttgaagtgtcttcttcacgtaaaactgcttttaaaagcactatatgcatctctgccataagtgtgcactgctcttgacttaccagagcagcacagaagtcctcaaaacgaaaaggagaaaggcgtaaaacagtgccaaagttccttagtacctcatagatggcaatcacattcatgatgtgctcactaggcaccattaagtcctctgaggatttaggaaactccaaaggtgggatatccttttcttccaatatyggagagcgaggacgatgcactctttgtcgtctcctacctggaattaaaaacaacagtaagaactttgccatttccagatcaacacgttaaaggagctatcatcaatgactgtactaaaacttctttccaacctattgcaagttaaggactcatgtcttcacagctacttaagtaatatttacctaataatcttatttaactacaaatataaagcagaatttcagatatttatctcatgtattttatttttaatcagagctgttgtatatcccatgcaagagatatctattaaatctttta

SEQ ID NO: 48120 - DNA, 599 bp, Chicken  19866894292932_1
  misc_feature (1)..(56): n is any nucleotide
nnnnnnnnnnnnnnnnnnnnnnnnnnnnnnnnnnnnnnnnnnnnnnnnnnnnnnnnctgacatttcccagacagcaaatgcagctgtggggaggggggtttctggggataagtatagaaggaatccagatcccccttggctgcctgaccaatcgagattctgaatattgcttcatcaataacataatcacagaatcataggagttggcagggatcatccagtccaaccctctgctaaagcaggttccccacagtaggttgtgcaggaaagcatccatgggggtcttgaatatctccagaraaggagactccacagcctctctgggcagcctatcccagtgctccgtcacccacaaagtaaagaggttcttcatgtttttatggaacttcctgtgttccagtctgtgcccattgccccttgtcctgtcactgcacatcactgacaagagcccggtcccattcacttgactcccacccattagatatttataaactgtgttgaagttcctctctgtcttctcttctccagactgggcatccccaggtctctcggcctttcctcataaggcagatgcttcaggcccctcatcatctttgtag

SEQ ID NO: 48121 - DNA, 600 bp, Chicken  19866894292932_2
tttcaccttgccagtatctgctcctctcccctgtttttcagcatagttttgtgttctgaactttgccttctgcacagctcctgatacagtgtcatctgaagatttttgaggtatattccctctgttggccaaaacagaccagctcttctctgaatatttctttgttatactacatcttagtagttaagtgtttggttgaggtacatatttctcagataaagcccaactttctaacagctgatgtgattccaggagttatggctgcttaatctctgaagattagtgttctgtaatataaargaagttgaatggaacaggaactgtaggctagaaaatgataatttttccatactgcagacaggaaaatatatcatttccactacttagaacaattaaattgccatttcccttttgtctcctgtgtggttttataccttttgaaatgcatacattttattttgcaaagatacagttggaaatggtgcatgtaaatgcatgcaaaaatgttcaaccacagccaataagaccaaaacayctcgagctttgcttctgagagttgtatctgttcttagttaatatactttgcaaataccatgcaag

SEQ ID NO: 48122 - DNA, 600 bp, Chicken  19866894292932_3
agctgatgtgattccaggagttatggctgcttaatctctgaagattagtgttctgtaatataaargaagttgaatggaacaggaactgtaggctagaaaatgataatttttccatactgcagacaggaaaatatatcatttccactacttagaacaattaaattgccatttcccttttgtctcctgtgtggttttataccttttgaaatgcatacattttattttgcaaagatacagttggaaatggtgcatgtaaatgcatgcaaaaatgttcaaccacagccaataagaccaaaacayctcgagctttgcttctgagagttgtatctgttcttagttaatatactttgcaaataccatgcaagctaaagacaacaatggaggaaaaggcaaacatttttttttgataaagggttccctgttaattatggctccaaaggcaaactacaagtaaaaagtgctaaaggcagaggacttactcattgatgcatattcagaaaagtcatttaatgtgcgttacaaacatcaaaagcaactgggagaagaaatggaacattttcattggaaaataatatgctatatgcatatggtaatctggtt

SEQ ID NO: 48123 - DNA, 600 bp, Chicken  19866894292942_1
cggggtcccttcaacccaaccacactgcagtgctgtgaaatacagagcagcagatagcaccatgcgtgagcaggcacggctttcctttgcagttcccttaacatccaccatctctgcaaccacctgaaccagagagagcaacggacctcttaacaacggagttcaattaaggaaaaaaaaagaatgtatttgccgagaggcaacaaattacaactgcagaacaacaaccgcacgtccccgagagtgcttcaacaaagcaggagttgatgtcagtcctttttcctctcctgcattagggamraagcacagatgaggttcctcgggtacaaccccttgtaccactcctacaccacatcactccgcatcacggagcgcagtctgatgactgaatggagcaasaccacaygcaacgctgcgacgctcgcattcgttcctgggcagagcagctctgtgtctgcaggagcagcagcagaacagcarcaccttcctyctccccacacacacagccgtgtggcctttttttcctcccaaaagcctgtgctaaaaccagagctgctgcacggccaagcactgctggttgcattcctgcagtcacggctc

SEQ ID NO: 48124 - DNA, 600 bp, Chicken  19866894292942_2
ggggtcccttcaacccaaccacactgcagtgctgtgaaatacagagcagcagatagcaccatgcgtgagcaggcacggctttcctttgcagttcccttaacatccaccatctctgcaaccacctgaaccagagagagcaacggacctcttaacaacggagttcaattaaggaaaaaaaaagaatgtatttgccgagaggcaacaaattacaactgcagaacaacaaccgcacgtccccgagagtgcttcaacaaagcaggagttgatgtcagtcctttttcctctcctgcattagggamraagcacagatgaggttcctcgggtacaaccccttgtaccactcctacaccacatcactccgcatcacggagcgcagtctgatgactgaatggagcaasaccacaygcaacgctgcgacgctcgcattcgttcctgggcagagcagctctgtgtctgcaggagcagcagcagaacagcarcaccttcctyctccccacacacacagccgtgtggcctttttttcctcccaaaagcctgtgctaaaaccagagctgctgcacggccaagcactgctggttgcattcctgcagtcacggctca

SEQ ID NO: 48125 - DNA, 600 bp, Chicken  19866894292942_3
aacatccaccatctctgcaaccacctgaaccagagagagcaacggacctcttaacaacggagttcaattaaggaaaaaaaaagaatgtatttgccgagaggcaacaaattacaactgcagaacaacaaccgcacgtccccgagagtgcttcaacaaagcaggagttgatgtcagtcctttttcctctcctgcattagggamraagcacagatgaggttcctcgggtacaaccccttgtaccactcctacaccacatcactccgcatcacggagcgcagtctgatgactgaatggagcaasaccacaygcaacgctgcgacgctcgcattcgttcctgggcagagcagctctgtgtctgcaggagcagcagcagaacagcarcaccttcctyctccccacacacacagccgtgtggcctttttttcctcccaaaagcctgtgctaaaaccagagctgctgcacggccaagcactgctggttgcattcctgcagtcacggctcagcacgagtgttctccaagctctggaaggctccaatgccagcatttgggataaggaaccatatgaacagcactaacgtgtctgctgctcttttttcaga

SEQ ID NO: 48126 - DNA, 600 bp, Chicken  19866894292942_4
accatctctgcaaccacctgaaccagagagagcaacggacctcttaacaacggagttcaattaaggaaaaaaaaagaatgtatttgccgagaggcaacaaattacaactgcagaacaacaaccgcacgtccccgagagtgcttcaacaaagcaggagttgatgtcagtcctttttcctctcctgcattagggamraagcacagatgaggttcctcgggtacaaccccttgtaccactcctacaccacatcactccgcatcacggagcgcagtctgatgactgaatggagcaasaccacaygcaacgctgcgacgctcgcattcgttcctgggcagagcagctctgtgtctgcaggagcagcagcagaacagcarcaccttcctyctccccacacacacagccgtgtggcctttttttcctcccaaaagcctgtgctaaaaccagagctgctgcacggccaagcactgctggttgcattcctgcagtcacggctcagcacgagtgttctccaagctctggaaggctccaatgccagcatttgggataaggaaccatatgaacagcactaacgtgtctgctgctcttttttcagagggattc

SEQ ID NO: 48127 - DNA, 600 bp, Chicken  19866894292942_5
agaatgtatttgccgagaggcaacaaattacaactgcagaacaacaaccgcacgtccccgagagtgcttcaacaaagcaggagttgatgtcagtcctttttcctctcctgcattagggamraagcacagatgaggttcctcgggtacaaccccttgtaccactcctacaccacatcactccgcatcacggagcgcagtctgatgactgaatggagcaasaccacaygcaacgctgcgacgctcgcattcgttcctgggcagagcagctctgtgtctgcaggagcagcagcagaacagcarcaccttcctyctccccacacacacagccgtgtggcctttttttcctcccaaaagcctgtgctaaaaccagagctgctgcacggccaagcactgctggttgcattcctgcagtcacggctcagcacgagtgttctccaagctctggaaggctccaatgccagcatttgggataaggaaccatatgaacagcactaacgtgtctgctgctcttttttcagagggattcacagctctggtggagacaactgggtgcaggttctgtgcttggtgtcatcctcacagcgtctgctccatcagcac

SEQ ID NO: 48128 - DNA, 595 bp, Chicken  19866894292942_6
tgccgagaggcaacaaattacaactgcagaacaacaaccgcacgtccccgagagtgcttcaacaaagcaggagttgatgtcagtcctttttcctctcctgcattagggamraagcacagatgaggttcctcgggtacaaccccttgtaccactcctacaccacatcactccgcatcacggagcgcagtctgatgactgaatggagcaasaccacaygcaacgctgcgacgctcgcattcgttcctgggcagagcagctctgtgtctgcaggagcagcagcagaacagcarcaccttcctyctccccacacacacagccgtgtggcctttttttcctcccaaaagcctgtgctaaaaccagagctgctgcacggccaagcactgctggttgcattcctgcagtcacggctcagcacgagtgttctccaagctctggaaggctccaatgccagcatttgggataaggaaccatatgaacagcactaacgtgtctgctgctcttttttcagagggattcacagctctggtggagacaactgggtgcaggttctgtgcttggtgtcatcctcacagcgtctgctccatcagcacgggga

SEQ ID NO: 48129 - DNA, 599 bp, Chicken  19866894292945_1
  misc_feature (1)..(38): n is any nucleotide
nnnnnnnnnnnnnnnnnnnnnnnnnnnnnnnnnnnnnntttaaagaatcatctgctagagagagatttataaagctagcaattcgcaggatatctgttgtgagttccatctctgtcttttcaaaccctatccagcttgcatgtcccaaagtatttggtttcttccctatatctgctggccttataagaagtactgcttcctccctatatccctgccttgactaagtaatatctcaacacaatgcaacagtcctctctggtccttcttcagctcttctcacccctgagagctatctcagckrtgctgaggtctgttcttctcagaaaccttcaggatctaccatatcccagaagctaattgtttttgtttattctgttacacagccaacaagactagcacagctcagtcaagaagraaacgcagaaatccatctttgactgctactacttagtaatagtatcagcaatcatgcaaagcaggagatcataaaatactcattttcattttactccaccttcccttcaatacctcatgtagactgtcagacatgaatgaataaaatctaagacttgctctttgaagtaaatattgctcctgta

SEQ ID NO: 48130 - DNA, 599 bp, Chicken  19866894292945_2
  misc_feature (1)..(37): n is any nucleotide
nnnnnnnnnnnnnnnnnnnnnnnnnnnnnnnnnnnnntttaaagaatcatctgctagagagagatttataaagctagcaattcgcaggatatctgttgtgagttccatctctgtcttttcaaaccctatccagcttgcatgtcccaaagtatttggtttcttccctatatctgctggccttataagaagtactgcttcctccctatatccctgccttgactaagtaatatctcaacacaatgcaacagtcctctctggtccttcttcagctcttctcacccctgagagctatctcagckrtgctgaggtctgttcttctcagaaaccttcaggatctaccatatcccagaagctaattgtttttgtttattctgttacacagccaacaagactagcacagctcagtcaagaagraaacgcagaaatccatctttgactgctactacttagtaatagtatcagcaatcatgcaaagcaggagatcataaaatactcattttcattttactccaccttcccttcaatacctcatgtagactgtcagacatgaatgaataaaatctaagacttgctctttgaagtaaatattgctcctgtat

SEQ ID NO: 48131 - DNA, 600 bp, Chicken  19866894292945_3
cttttcaaaccctatccagcttgcatgtcccaaagtatttggtttcttccctatatctgctggccttataagaagtactgcttcctccctatatccctgccttgactaagtaatatctcaacacaatgcaacagtcctctctggtccttcttcagctcttctcacccctgagagctatctcagckrtgctgaggtctgttcttctcagaaaccttcaggatctaccatatcccagaagctaattgtttttgtttattctgttacacagccaacaagactagcacagctcagtcaagaagraaacgcagaaatccatctttgactgctactacttagtaatagtatcagcaatcatgcaaagcaggagatcataaaatactcattttcattttactccaccttcccttcaatacctcatgtagactgtcagacatgaatgaataaaatctaagacttgctctttgaagtaaatattgctcctgtatatggagatkaaaatggacctcaggttgttaaataactttcccaggaatgcatcagaacagagaaaaccagaaaaacaaaacaaaacaaaacagaacacaaacaaaaaaaagacca

SEQ ID NO: 48132 - DNA, 600 bp, Chicken  19866894292945_4
tctgttcttctcagaaaccttcaggatctaccatatcccagaagctaattgtttttgtttattctgttacacagccaacaagactagcacagctcagtcaagaagraaacgcagaaatccatctttgactgctactacttagtaatagtatcagcaatcatgcaaagcaggagatcataaaatactcattttcattttactccaccttcccttcaatacctcatgtagactgtcagacatgaatgaataaaatctaagacttgctctttgaagtaaatattgctcctgtatatggagatkaaaatggacctcaggttgttaaataactttcccaggaatgcatcagaacagagaaaaccagaaaaacaaaacaaaacaaaacagaacacaaacaaaaaaaagaccaacacttttttttttggccctggattttgaatcagcaagatcacgtttgataggagcaagtcatttattttaaagccagagaagaatagttggaggcatttgagataacagaaactgtgtattttcttttctcttaacagttgaaatattggcacaatttctccccaagaaacaagagacgctttctagatatta

SEQ ID NO: 48133 - DNA, 600 bp, Chicken  19866894292953_1
ccaagcagggaagggtgctgtgctccttgctttttgctttttgcttttgcttttgcttttgcaaggaggtttcctgcgcagcggtgctcaaaagcagtttctggttacttttctgctgtctgtatggcagtcatgctaaagtgcgttggataggagtaggaggaggaggaaggctgggttactttcccagattaatgctccagtggagggcagagctggaggacggaggtgcccattgcgctgggagctaaatgtggtggtggcagcagagtgaggtatggggcactgagggcagcagartgggcagatggttttgtggggtctggtgagggtcccactggcttgtgctggggaggtctggcagccccagctgctgctcgctgtggctctggacatgctgtgcctgcagcttcttgtgctgtcgtgccaggaccatcctgtgcagtgtgggtgcatccccagcagcctttccatggccctactcctgcatgctctcatggaaaggggaagatgtaacaactgaaccagtctgggggatatgcaacaagcatccttcctcctccctgtttccactttccccttcctccagcccatccctcc

SEQ ID NO: 48134 - DNA, 600 bp, Chicken  19866894292956_1
tctacaggggctcttcccaaatcctggaatttcaagccgtaggacataaataggcatacatttgagattccagccactgcaagtgtgcatgaggcagtgaacttatacaaagtatttttagacttccggcaatcaactgcccccctggcattgctcaacatgacacacagttgcctgagttattcaattgtgctaacacatgctccaatttaaaagttgcatttctgcaaaaataactactgtcaaacttgctcctgcaagaagttgaatcaccaacgatcaagggtcatctaagccaarcagcaytgtgtaaatgcttattaaattagagaaagtaatttgtttttatctataaataatgatgtaaactcaacaaaacaccagtaatgcttgggtgtgtatatactaagagaggcagcaaaattctgtgcagtgagttgtgccattacagcggcacgtaagcctctgtcttacttgcagataacaaatgcattctgtaaaggaaaacaaatcagagatcactgcctcaactttgcaggtcctggaagacagaaccactgcactctaagaattgtcctgtttgctggcatggctcagtaa

SEQ ID NO: 48135 - DNA, 600 bp, Chicken  19866894292956_2
ggggctcttcccaaatcctggaatttcaagccgtaggacataaataggcatacatttgagattccagccactgcaagtgtgcatgaggcagtgaacttatacaaagtatttttagacttccggcaatcaactgcccccctggcattgctcaacatgacacacagttgcctgagttattcaattgtgctaacacatgctccaatttaaaagttgcatttctgcaaaaataactactgtcaaacttgctcctgcaagaagttgaatcaccaacgatcaagggtcatctaagccaarcagcaytgtgtaaatgcttattaaattagagaaagtaatttgtttttatctataaataatgatgtaaactcaacaaaacaccagtaatgcttgggtgtgtatatactaagagaggcagcaaaattctgtgcagtgagttgtgccattacagcggcacgtaagcctctgtcttacttgcagataacaaatgcattctgtaaaggaaaacaaatcagagatcactgcctcaactttgcaggtcctggaagacagaaccactgcactctaagaattgtcctgtttgctggcatggctcagtaaacatcc

SEQ ID NO: 48136 - DNA, 472 bp, Chicken  19866894292956_3
gctgtggcctacatcttggagccaacaaaggaaccttagaagtcctctgctaccaatttaaaaacaagcaaataagttcagtaagatgctgatgatatttctcctacaaatgaagtaaaagatgtcattaagacgttatgactgttcttggtgtattttagcattgtgactgtctttcatagaagaaaatgatttacttttaacaactgcctcagttcacgatcccctcattaaggctgttattttctgcatgctaagccacagaaactgatcacactgtcccaaatcttcaggaaaagyaaaaagaatagatttcatggactaaagctgatgatattgaactgaatggcctttgattcyaagcccagctgagactccaawgcaaaaaaggtacttaaagagttcagtaataacagtaattttcgagggtaaaaaattctcagcagtatctcgttagaaagaaataataatc

SEQ ID NO: 48137 - DNA, 412 bp, Chicken  19866894292956_4
aaaacaagcaaataagttcagtaagatgctgatgatatttctcctacaaatgaagtaaaagatgtcattaagacgttatgactgttcttggtgtattttagcattgtgactgtctttcatagaagaaaatgatttacttttaacaactgcctcagttcacgatcccctcattaaggctgttattttctgcatgctaagccacagaaactgatcacactgtcccaaatcttcaggaaaagaaaaaagaatagatttcatggactaaagctgatgatattgaactgaatggcctttgattcyaagcccagctgagactccaawgcaaaaaaggtacttaaagagttcagtaataacagtaattttcgagggtaaaaaattctcagcagtatctcgttagaaagaaataataatc

SEQ ID NO: 48138 - DNA, 391 bp, Chicken  19866894292956_5
taagatgctgatgatatttctcctacaaatgaagtaaaagatgtcattaagacgttatgactgttcttggtgtattttagcattgtgactgtctttcatagaagaaaatgatttacttttaacaactgcctcagttcacgatcccctcattaaggctgttattttctgcatgctaagccacagaaactgatcacactgtcccaaatcttcaggaaaagaaaaaagaatagatttcatggactaaagctgatgatattgaactgaatggcctttgattcyaagcccagctgagactccaawgcaaaaaaggtacttaaagagttcagtaataacagtaattttcgagggtaaaaaattctcagcagtatctcgttagaaagaaataataatc

SEQ ID NO: 48139 - DNA, 600 bp, Chicken  19866894292963_1
cgcaggtaagaaaccctccttcagaatctcagcccaggcagagaaagacaaggtgggttcttttacaaacaactctggatgacaggagtgtagaagggaacacattccagcacacagagcaaaccacccaagtccagcacagggtagttctggtcaacaacgaactttgaaactgtggaactgaagcttgcacgccatgtattggttccttagtatgctgatgctgagctcttcattggtgtgcctaaatgagatgaccaagataatggaaaataactctccactttgtatccccattcrctgggctggtaccacactgtactttatagtcctgtgaggtcagggaccgacccacactaagctgccattgccactgacctcccaaaagctctccccaagactgctctggctttgacactgactttaaaccatcattgcccccttattcattcttatctggttttactgatacaggaacattgctacagtggtcagagccataggatcaataaagcagagacagaaagagctgcattcccatctgcctcgtccatcaccagccaacccagcatctgaatgttgctgcacgaattccatttt

SEQ ID NO: 48140 - DNA, 600 bp, Chicken  19866894292963_2
cctgctggtggagggacctaaaaccttatatacattaaggcactgaattgataccctgccagacgaagaaaatctctctttatctggtgagagctaatgatgatttattaggcagaacagacaggtcccaggacatatttgcaagcacttgtcaatcagaaaagaaattcttccagagatttgggctaagcttatttcatacttttttatttagaagacatgagaggagaatggggcttcagttttggagtacttctaagataacatggagctttagaaagataaaaaaaaaagcagatragaaaggacatcttaagtcactgcatacaatcccatgtcactgtagaaatgccactgaggaaacacgtttaaatgaataggatttgggggacagtaaaataaacacaaaagcttgcggggaaagttcctgataaaaaggaatgtctggaatgaaaacaatggaaagcacactgccctagagctcaatgaaagccaacaaaacacctccagagatcttcattcacgttctcactatacatgtttttcccccagagcagcagactcctggataagctgtcccaccagggtagggctctgccc

SEQ ID NO: 48141 - DNA, 599 bp, Chicken  19866894292966_1
  misc_feature (1)..(84): n is any nucleotide
nnnnnnnnnnnnnnnnnnnnnnnnnnnnnnnnnnnnnnnnnnnnnnnnnnnnnnnnnnnnnnnnnnnnnnnnnnnnnnnnnnnnaaatagcagaagcactttcataatcagcactcaggcctcagctgtctagctgctgagatccctgttcccaaagtcacagaactcacagatcagtcaacgagctgtgacagccaagtttggatcccccccctaaggccactaacatcagaaatgggaatcaaagccctgcatggcttctgaaggcattgctggccctaatatactacactactttasgaagaatggttcttactgcttgaaaattgattcaaataccccaatggattacagctaattctaygagtttggtttactggacaagttcaactgtccacctacatggagtgatataaccatgcytggtcaasgcaggraacaagtcccaaagtacatctggatgaaagtagcagtgcagctccaacgtgtttaaaaccctttttaagctgcattagtccagcaccactaatgggctgattctgtagagcgctgctcagcctgaaagacctttatacaaacagttcagctctaagacactg

SEQ ID NO: 48142 - DNA, 599 bp, Chicken  19866894292966_2
  misc_feature (1)..(20): n is any nucleotide
nnnnnnnnnnnnnnnnnnnnaaatagcagaagcactttcataatcagcactcaggcctcagctgtctagctgctgagatccctgttcccaaagtcacagaactcacagatcagtcaacgagctgtgacagccaagtttggatcccccccctaaggccactaacatcagaaatgggaatcaaagccctgcatggcttctgaaggcattgctggccctaatatactacactactttasgaagaatggttcttactgcttgaaaattgattcaaataccccaatggattacagctaattctaygagtttggtttactggacaagttcaactgtccacctacatggagtgatataaccatgcytggtcaasgcaggraacaagtcccaaagtacatctggatgaaagtagcagtgcagctccaacgtgtttaaaaccctttttaagctgcattagtccagcaccactaatgggctgattctgtagagcgctgctcagcctgaaagacctttatacaaacagttcagctctaagacactgaggctacggttctgtttctgaggaaagacatggctgccaacaagacaagcagtgctgctctctc

SEQ ID NO: 48143 - DNA, 600 bp, Chicken  19866894292966_3
agctgtctagctgctgagatccctgttcccaaagtcacagaactcacagatcagtcaacgagctgtgacagccaagtttggatcccccccctaaggccactaacatcagaaatgggaatcaaagccctgcatggcttctgaaggcattgctggccctaatatactacactactttasgaagaatggttcttactgcttgaaaattgattcaaataccccaatggattacagctaattctaygagtttggtttactggacaagttcaactgtccacctacatggagtgatataaccatgcytggtcaasgcaggraacaagtcccaaagtacatctggatgaaagtagcagtgcagctccaacgtgtttaaaaccctttttaagctgcattagtccagcaccactaatgggctgattctgtagagcgctgctcagcctgaaagacctttatacaaacagttcagctctaagacactgaggctacggttctgtttctgaggaaagacatggctgccaacaagacaagcagtgctgctctctcccagtgctagcacaagcaagcatgcagccctccagcagcacaagttaacaaaacagtaca

SEQ ID NO: 48144 - DNA, 600 bp, Chicken  19866894292966_4
agctgctgagatccctgttcccaaagtcacagaactcacagatcagtcaacgagctgtgacagccaagtttggatcccccccctaaggccactaacatcagaaatgggaatcaaagccctgcatggcttctgaaggcattgctggccctaatatactacactactttasgaagaatggttcttactgcttgaaaattgattcaaataccccaatggattacagctaattctaygagtttggtttactggacaagttcaactgtccacctacatggagtgatataaccatgcytggtcaasgcaggraacaagtcccaaagtacatctggatgaaagtagcagtgcagctccaacgtgtttaaaaccctttttaagctgcattagtccagcaccactaatgggctgattctgtagagcgctgctcagcctgaaagacctttatacaaacagttcagctctaagacactgaggctacggttctgtttctgaggaaagacatggctgccaacaagacaagcagtgctgctctctcccagtgctagcacaagcaagcatgcagccctccagcagcacaagttaacaaaacagtacagagtaaag

SEQ ID NO: 48145 - DNA, 600 bp, Chicken  19866894292966_5
tgagatccctgttcccaaagtcacagaactcacagatcagtcaacgagctgtgacagccaagtttggatcccccccctaaggccactaacatcagaaatgggaatcaaagccctgcatggcttctgaaggcattgctggccctaatatactacactactttasgaagaatggttcttactgcttgaaaattgattcaaataccccaatggattacagctaattctaygagtttggtttactggacaagttcaactgtccacctacatggagtgatataaccatgcytggtcaasgcaggraacaagtcccaaagtacatctggatgaaagtagcagtgcagctccaacgtgtttaaaaccctttttaagctgcattagtccagcaccactaatgggctgattctgtagagcgctgctcagcctgaaagacctttatacaaacagttcagctctaagacactgaggctacggttctgtttctgaggaaagacatggctgccaacaagacaagcagtgctgctctctcccagtgctagcacaagcaagcatgcagccctccagcagcacaagttaacaaaacagtacagagtaaagctgttt

SEQ ID NO: 48146 - DNA, 600 bp, Chicken  19866894292970_1
gctggatgtggctctgggaagcctggtctggtagttggtgaccctgcacatagcagggggtttgaaacttgatgatcattgtggtccttttcaacccaggccattctatgattctatgattctatgttaagtgaacaactaacagtcgtgcacacatacataaaggaagaaagggtaaataaataaataaataaatagcccaaaatcaagagcacactaagagaatgctcatgtgtacgtgtctcctaaatatgaaaaaccccagttaagtcagtgactttcagccatgagccaacttcwagacatccccacggtaactttctgcataataatacctctgaaattaacatatcaaaactgccagtgtagatctgtccctgcgtcagctgagcaagcctgtgaaatgtgaaaagcttcaaggggagtggagaaaagaaacgatagagaaggatttaagtccactgtaagggtctctactgctgccaaatacaatgatgcctcactgctcactacagtctgagagcagctgatggggcggtgaaaaaccagcagtttcataacaaacatgggaatcattctgtaaggcaaagaggttatgtt

SEQ ID NO: 48147 - DNA, 600 bp, Chicken  19866894292981_1
gcaaggcggtggaaagggtgagatgggcagtgagagtaccatttcatttcaggtagaaggtaatgagatgtgggatgtgctgagcattgtggtgtgaggtgtgctaaatggctccagttggagagagtttgagccttgactgggtgaggggctgtttatattgcagaatcactgatgggtgactgttgcctgtgcttgtgaggttttaggggagacctgaaactctgaaagaggtaagagggtgaaattaaacattgagaccgagctttcctgtaggaaatcacaggatcctgaaggatygcagtgtatgagtgagttacagagaaaatacctttgcagccttcatgtttgctctttctgttgttctttgatgatctgaacagggctttagactacgtagatcagtgccctaaggagagtttctgtcaaatagccttgatctgtaagcacaaaggcagtgctgagatggaaactaggtgatgtaggtgacttgtggaaggggctgactttgcaagagtgacatctttaccgtgcacttctaaggggttgtttgcaccaattcttaccggtgatgagaggctgaaactgtccacctgctga

SEQ ID NO: 48148 - DNA, 600 bp, Chicken  19866894292982_1
tcttaattgtaacactgcaaatgatcacggagacccaaatcaaaggaaaaccattattttccttctcagatgaatctcgtatttaggtatcttctgagcagagaatggttcagactgtaaattcatcttgaatacttaggtaattgagctgtcccatttaataagataaagaagagttgtataaggtactcccatattgcaaagtatcctgatagactcggtgtggaaattaaagtgcagctgctatggagaacatgctcctaacaccaacatacaaagtaaagttcaattttttttttyaagttgaattcattttacaccttcaacacrtccacaagagagctggctgccattttgtgtggtcactgtgtttggttctgctaccaagatccaaatacaagagcttaattttcataaagctgaaatcttccaagctcgggttatgtgctcattgtactgctgtgtgtagcaatgtatgctatgttttttggaggaatgtactaataaagaaatatccctttcaatgtactctgtcagtttagtaacgatagatctaaagtagtgaccactgccaaaaataatccaacagcttttcctact

SEQ ID NO: 48149 - DNA, 600 bp, Chicken  19866894292982_2
agacccaaatcaaaggaaaaccattattttccttctcagatgaatctcgtatttaggtatcttctgagcagagaatggttcagactgtaaattcatcttgaatacttaggtaattgagctgtcccatttaataagataaagaagagttgtataaggtactcccatattgcaaagtatcctgatagactcggtgtggaaattaaagtgcagctgctatggagaacatgctcctaacaccaacatacaaagtaaagttcaattttttttttaaagttgaattcattttacaccttcaacacrtccacaagagagctggctgccattttgtgtggtcactgtgtttggttctgctaccaagatccaaatacaagagcttaattttcataaagctgaaatcttccaagctcgggttatgtgctcattgtactgctgtgtgtagcaatgtatgctatgttttttggaggaatgtactaataaagaaatatccctttcaatgtactctgtcagtttagtaacgatagatctaaagtagtgaccactgccaaaaataatccaacagcttttcctactgttctgccaccctaagaaaacacagcttca

SEQ ID NO: 48150 - DNA, 599 bp, Chicken  19866894293000_1
  misc_feature (1)..(103): n is any nucleotide
nnnnnnnnnnnnnnnnnnnnnnnnnnnnnnnnnnnnnnnnnnnnnnnnnnnnnnnnnnnnnnnnnnnnnnnnnnnnnnnnnnnnnnnnnnnnnnnnnnnnnnnttagagtgcatttataatatatatggaaagtacttaagtatttattcctctgagaggtagaagtctgataagataatgtcgaaagcaattttagctcagatgaaaggaactttaagaagttcttaaaacacttccatgggtgattttactaaaatgacagacattttgcaattacattgttgaaatgaagcaatgcrcatcatcagctgcattttaaatgaatgttctctcacgctgctatactcagggaacagttccatagcgacttaagcccacagttcttgtaaatgaaagtctacagtgatgcatattaacttgtctctccctgccttcctgctgtatttccacctcccaagttgccccctgtacaygagcatgtaagagctgatttatttgctgtgactgacatccaccatttctttaacttgtcacttagttaagtcaccacgctaagttgtgtacaggatgctagaatgtgtctaagaaatgttgttca

SEQ ID NO: 48151 - DNA, 600 bp, Chicken  19866894293000_2
gataatgtcgaaagcaattttagctcagatgaaaggaactttaagaagttcttaaaacacttccatgggtgattttactaaaatgacagacattttgcaattacattgttgaaatgaagcaatgcrcatcatcagctgcattttaaatgaatgttctctcacgctgctatactcagggaacagttccatagcgacttaagcccacagttcttgtaaatgaaagtctacagtgatgcatattaacttgtctctccctgccttcctgctgtatttccacctcccaagttgccccctgtacaygagcatgtaagagctgatttatttgctgtgactgacatccaccatttctttaacttgtcacttagttaagtcaccacgctaagttgtgtacaggatgctagaatgtgtctaagaaatgttgttcaaagaaaagggggtgaacagaaaatctacatacagtcttacatgcagtgaaaccaccttaagacagcggtgtcattcacacaggtagagggctaagcaggtagaattcagtgcctagaagagatggccccagggcaaaggagatttgtgattagaaaggagacatgtgattcgttg

SEQ ID NO: 48152 - DNA, 600 bp, Chicken  19866894293000_3
gggcaaaggagatttgtgattagaaaggagacatgtgattcgttggtttgtgggcaagtctggttaaatttgatttgcaccccatacacagctttcaaaacagtgtactacctcaataactgagatgtttagcataatacattgtcatagataaaaatcacggtgctaaataaacagaattccttgagtaaggtgagtaacatgaaagagagatgacacgaaataaacctaattggctttgaggagcagtgaaacagattaaaagatttaagatttaaagagccaaaggtccaacatctkatcttttgtttgtttgctctgtttaattttgaagagtcagttctgacaagactgatccctactaaatgctactgaagttggccggacaaagaaaaaaggtcaataaaaaataatcagcttctttatataccactgttctaattgttttaactttaaataatgattcctattaattcaatagcacaagctagcccatactacttggagatcaaatacgaccacagtgcagttttgtaaacgttcactagatggcaatagatggcactgacttggagaacgaataccaccttcttcaaatta

SEQ ID NO: 48153 - DNA, 498 bp, Chicken  19866894293003_1
tcttagcaaatatcttttgtgcaaaaaggctctgactcagaaactctgactgaggaagaaacaaaaactgggaatctatgtgggacagagccaatggagatggcatgatgttttggccttgtaaaataagtgaaaacctccaaagatgttaggaaaaaagatgtgggtgtaataacactcaagaattctccatgctatcaatcttcttttaacgattttgtatcaaaaaagtgtgaaaggaggaattttaaaaattttcttcaatgcaagatagagagaagggattaaagatgtgaaatrggaagggcaaatgataacgaactcagtcttgtgaagaaggatcactgctttattcacttgtgtcagtcaatctcctcgcaatcattacaatcgatatgaagtagtggtttagacaaactcctcggaaaactctgtcagcccaaaactgtacttcatatacatttagtttgtatggattttttgcagccagatgttaat

SEQ ID NO: 48154 - DNA, 600 bp, Chicken  19866894293008_1
aagctctctgttcactagaacaaaaccaaaagtcagcaaaatcacattcactcacttgggtcagctacccagaaataccacatgcagaccagtctcagtggctttctgggttgtgccagtactggagcacagtgagaagagatgaccaaggtggagaagcaaaacagagtcaaggctggccactctggatgagccttgccttcagagattacggtgcattattcctagcccaacttttatctcacctgaaggtgacagaggtctggatgaacacacaggcatggctactgagcccaaatrggctcttcaccatagaagctacctggtagcagaggcagcctcctgtctaatgatatcttttcagcctcactcataaagtgcagccccacagtacaccatagctgatggcactgatatgattctatccaacccctctgactgttgcctgtaatctatcattccctgtttcacaactcatgtgaactcccgccagttaaccttcatcccagcctaaatcttctgtaaacattagatcatcctttccaccacactggcatcaccaactgcggtgcaaacatcctgccagcccttcagtcccat

SEQ ID NO: 48155 - DNA, 598 bp, Chicken  19866894293016_1
  misc_feature (1)..(75): n is any nucleotide
nnnnnnnnnnnnnnnnnnnnnnnnnnnnnnnnnnnnnnnnnnnnnnnnnnnnnnnnnnnnnnnnnnnnnnnnnnnatttggagccggtactgcggttcccagaggagaagcgatgattacaaatacatggaacttatttaatatacataatagatttccaatgatgttctgcagattgacacaaggactgcagcgcagggagcagcacgcagccaagcacacggctacagctctcggcttcgtttgggcacagcttctcaacaggaaaagtaccccagccgttccccttcttcactcttyaaaaaatctccagaggttttaactctggtcttttcgacttcttgacaaccgtggattgaattttaacttcgcgcgggggctggatggcaaataaatcttaaatgttgtgtgacgacgagaaacgaggagggagccggccaggctcgtcccgagccgcctcccgcaggcacccgccggcctgaccccgtcccgagcgcgggcagccaggtgagcagcggggccggcgcagagcccggcgttccccgtgagggcggaaaggcggcgatcaccgccgcgcggagccctcccgccgggaagg

SEQ ID NO: 48156 - DNA, 599 bp, Chicken  19866894293018_1
  misc_feature (1)..(22): n is any nucleotide
nnnnnnnnnnnnnnnnnnnnnnacacgtttgcaaatcgtgaatgctgaacacaagagtctatgctggaggttttcatctgcacaggcagaacttgctttgccccgctggtgatactgtttcagtgcaccacctgcagcacaacctcgggttccaccatcatcctgaagattcttctatacgttctccagtctctcctatgggataaaaccagctcccctcgggagcaggcagaggaacgcacagcatgcccaggactggcagctttaagagccacccacagcaataccaacagccccaamgcatggagaaacgactggcctcgagcagcagttcacgagcacccaggggcacctcrctcatgcctcagttctccaggtacagactgacccatgggaaacatggagatacattcccaaggattccaaygaactgcagcaccacgtgaagccaggaataacgcgcactgctcagtctgggggcgctgctgggagcggggcgaaccgctgctctgccgacagcccattgagctctgctttcagccacagatgtggtgagcatcgcttcaccgtgtgcacctctgcctgaagtgtcaaacatg

SEQ ID NO: 48157 - DNA, 600 bp, Chicken  19866894293018_2
gtctatgctggaggttttcatctgcacaggcagaacttgctttgccccgctggtgatactgtttcagtgcaccacctgcagcacaacctcgggttccaccatcatcctgaagattcttctatacgttctccagtctctcctatgggataaaaccagctcccctcgggagcaggcagaggaacgcacagcatgcccaggactggcagctttaagagccacccacagcaataccaacagccccaamgcatggagaaacgactggcctcgagcagcagttcacgagcacccaggggcacctcrctcatgcctcagttctccaggtacagactgacccatgggaaacatggagatacattcccaaggattccaaygaactgcagcaccacgtgaagccaggaataacgcgcactgctcagtctgggggcgctgctgggagcggggcgaaccgctgctctgccgacagcccattgagctctgctttcagccacagatgtggtgagcatcgcttcaccgtgtgcacctctgcctgaagtgtcaaacatgaaagacaacagaaaggagtagatgttggcagagactcaacacagcaggaaattcacc

SEQ ID NO: 48158 - DNA, 600 bp, Chicken  19866894293018_3
ccacctgcagcacaacctcgggttccaccatcatcctgaagattcttctatacgttctccagtctctcctatgggataaaaccagctcccctcgggagcaggcagaggaacgcacagcatgcccaggactggcagctttaagagccacccacagcaataccaacagccccaamgcatggagaaacgactggcctcgagcagcagttcacgagcacccaggggcacctcrctcatgcctcagttctccaggtacagactgacccatgggaaacatggagatacattcccaaggattccaaygaactgcagcaccacgtgaagccaggaataacgcgcactgctcagtctgggggcgctgctgggagcggggcgaaccgctgctctgccgacagcccattgagctctgctttcagccacagatgtggtgagcatcgcttcaccgtgtgcacctctgcctgaagtgtcaaacatgaaagacaacagaaaggagtagatgttggcagagactcaacacagcaggaaattcacccaacagctgttaatgacacatatttaagagcttgtgaaaacacccaacgcagattccacatcccatcccag

SEQ ID NO: 48159 - DNA, 600 bp, Chicken  19866894293018_4
gaaccgctgctctgccgacagcccattgagctctgctttcagccacagatgtggtgagcatcgcttcaccgtgtgcacctctgcctgaagtgtcaaacatgaaagacaacagaaaggagtagatgttggcagagactcaacacagcaggaaattcacccaacagctgttaatgacacatatttaagagcttgtgaaaacacccaacgcagattccacatcccatcccagcagcaaaatgatgctctgaaggcgcgaagtcatgacaacaaacacgaagcgtaagcttactttgttcttasctagcgtgacttgggaaaaaccacagctttgtttctggcactggaggcacacatttcctccccttcggggaagtccttcgagggctcctcctctgcagacgggctggcacaccctgcagaaggcaggcagcacagcaggcggtgccgggagcacccatctctcagagcgaggatggtaattcagacaagtcatcgtcagacccactggtaacataatatgagactattacttgaaatgaaaaacattccatttcagctgctgctccagctattgctacagcctacgtagctctggcagca

SEQ ID NO: 48160 - DNA, 600 bp, Chicken  19866894293018_5
cttgggaaaaaccacagctttgtttctggcactggaggcacacatttcctccccttcggggaagtccttcgagggctcctcctctgcagacgggctggcacaccctgcagaaggcaggcagcacagcaggcggtgccgggagcacccatctctcagagcgaggatggtaattcagacaagtcatcgtcagacccactggtaacataatatgagactattacttgaaatgaaaaacattccatttcagctgctgctccagctattgctacagcctacgtagctctggcagcacacgcaatmattcaaactatttgataaaatacaaagataaaaataagatgcctgggaagggcctatgccaacgcaggcagctgtgggcagagattatttgcatctggcatgatactgggctactcaccaacggagatgcagacccagactccaaaaggagcagggatgaaggctgctgcctccaaaagaacttctgcatttgccatcaagtgctaacgttggcaactgcaaatattcttccatttttgcctacaggtgcactacaaattcgctgccaccgctgggactgagcacgggaacacaggaagc

SEQ ID NO: 48161 - DNA, 600 bp, Chicken  19866894293019_1
ccagatgatgaccagagcatttaaagaagcatgcagaaatgagcagccacagcagagaagctacatgatcacatcagtattcacaaaggaaaaaaatctagatttttttatgccagaaagggtttatatggagagtagggtaatctgaaactgaaactgacagttgaagagactagaaatcaaaagtccagtcttgggtatcctcatacaggacttatttgctaaaatgctgcagaggagttctggaacagtgcccagacttacactaatatcattgttgtcatttatagaaaggcacaraagtaatagtctggcaaagaacaacagtgtgaacaagccaacagtgcctttatggatgcaaatgtgagtgatatctgagtgtaattggctttacagtcatctaaaaattgtcttaggtgcatgcatgcaaggtaggtgtctcctcaggacctcttacagttatttttctttttagacagatctcattaggcatgatgaagtcagtattttttaatgtttctttaagaccttaaagaagctcctctaaaggcgctgtacatatgtagatgtcaggaatacaattacattcttgataaattt

SEQ ID NO: 48162 - DNA, 600 bp, Chicken  19866894293025_1
aaaatcaatggagcgggacctggaaaaacatctctctcctaactacatatatcctaactacatatatcctacagaaacggcagttggttgggtaaaacaaagtgttgtaatgctacactggcaatatgcagtctgtcagctgtgccagacatcgttaatctaagaatactgctccaagtcttttaaagaaagaccaggatccaaaacgtccacccaccacactggggtacagtcagggcactgggtcggattttgtcataacacatgaagttcgaggcattgctaggcagataacatgcragatgaagccaactttccactataatatgttacatattatgagtcaaagttttaaaatggaaacaayaaacactaggacaytggttgtttgctttttatgtgtgctaatatttaactaacagtacagccttacaggaactatttatacagcccccttgtgtttaaagccatgactgggaacaactagccaccaggtttctgcagtragcacacctgaagcaacttataacacaagggataagatttgctgttacaaataccagttgttcagtcaccttaaagccagctaagccttataaa

SEQ ID NO: 48163 - DNA, 600 bp, Chicken  19866894293025_2
cctacagaaacggcagttggttgggtaaaacaaagtgttgtaatgctacactggcaatatgcagtctgtcagctgtgccagacatcgttaatctaagaatactgctccaagtcttttaaagaaagaccaggatccaaaacgtccacccaccacactggggtacagtcagggcactgggtcggattttgtcataacacatgaagttcgaggcattgctaggcagataacatgcragatgaagccaactttccactataatatgttacatattatgagtcaaagttttaaaatggaaacaayaaacactaggacaytggttgtttgctttttatgtgtgctaatatttaactaacagtacagccttacaggaactatttatacagcccccttgtgtttaaagccatgactgggaacaactagccaccaggtttctgcagtragcacacctgaagcaacttataacacaagggataagatttgctgttacaaataccagttgttcagtcaccttaaagccagctaagccttataaaaggcacgactgcaacacagaatgcaacaaaaatgagcttggcagctttgcataaagctctaggaccc

SEQ ID NO: 48164 - DNA, 600 bp, Chicken  19866894293025_3
agttggttgggtaaaacaaagtgttgtaatgctacactggcaatatgcagtctgtcagctgtgccagacatcgttaatctaagaatactgctccaagtcttttaaagaaagaccaggatccaaaacgtccacccaccacactggggtacagtcagggcactgggtcggattttgtcataacacatgaagttcgaggcattgctaggcagataacatgcragatgaagccaactttccactataatatgttacatattatgagtcaaagttttaaaatggaaacaayaaacactaggacaytggttgtttgctttttatgtgtgctaatatttaactaacagtacagccttacaggaactatttatacagcccccttgtgtttaaagccatgactgggaacaactagccaccaggtttctgcagtragcacacctgaagcaacttataacacaagggataagatttgctgttacaaataccagttgttcagtcaccttaaagccagctaagccttataaaaggcacgactgcaacacagaatgcaacaaaaatgagcttggcagctttgcataaagctctaggacccacactgcttgtgac

SEQ ID NO: 48165 - DNA, 600 bp, Chicken  19866894293025_4
cgtccacccaccacactggggtacagtcagggcactgggtcggattttgtcataacacatgaagttcgaggcattgctaggcagataacatgcragatgaagccaactttccactataatatgttacatattatgagtcaaagttttaaaatggaaacaayaaacactaggacaytggttgtttgctttttatgtgtgctaatatttaactaacagtacagccttacaggaactatttatacagcccccttgtgtttaaagccatgactgggaacaactagccaccaggtttctgcagtragcacacctgaagcaacttataacacaagggataagatttgctgttacaaataccagttgttcagtcaccttaaagccagctaagccttataaaaggcacgactgcaacacagaatgcaacaaaaatgagcttggcagctttgcataaagctctaggacccacactgcttgtgacagtgatcaagtttcaggcagcagctagtaacttctagcagattacttttcaccttaagaacagaacgtttctccctacaacattcctttttttttttttcttccccatggtgcaaatttggtaat

SEQ ID NO: 48166 - DNA, 600 bp, Chicken  19866894293031_1
gggagcagctggcacttcacgaggccgcctgctctgtgcctggttgctgagatggccctggtgtcacttgtgctgtccccttccccctcgtcacaccctaaatgggggcacctggggctgggcctgtccctttcaggtgcttaaatcactcctgacacctgaactgcgttaatgaggaggttaattttttttttcctaccacacctctgggggccctttgtccctgttgagaaaataaattccctttccctctgctggagggggtttctctgggagaggagggtgacaaaggtgtgccaygtgggtgaggcctcctccgatgtaacgcccaagcgggtgatggccgatctgagggaagcaggccccaaagtcctcacaaaacccgtccgtgggagccttgcgctgtgccatcggattgggttgctaatttcacgtgtaattaaggcttgtgtcttgtgtgtgagaggggcagtgggaaaagacttcagggccaacctatgcaggggagctacgacagtcctggatattcaaaaataatttagtggcggacatttttagttttgcttctgtaaacataaagcaaggctaagcacgctgtgt

SEQ ID NO: 48167 - DNA, 600 bp, Chicken  19866894293039_1
aggactttctactttgagcaaaagaacggactcagcactttttatattatttagagaataaaattaacccttaatggcccaagctgctatttctcctccccagttaaatatggcccgctcagcaatttctccccatatataattacaggctgctatccatcatctgtaggagaatgcttttctgacactccaaaagtgacgcagtaagcacttttactaatagaataaatattctaaatatctcttttatattttcatttaaattggaatattttaaaataattgtagggacgctgcccrtgtggctagtgctgcaggacagctatgtttttttctttagaagaaatgtttatcctgcacacagacccctccacacaccgacacaaaaaagtaattagccaaagtctaatttattaggatttccctccattcttgctgatgtcctgagtttcttgcagcccttacttttggcttttcttcctcctgtttgcttgttttttgccctgtagccacttcttccatctcgaagggatgggtttgccttgatgaaggtacctggttgtgttttggtgaagggacaactcaagaaacatgtagatg

SEQ ID NO: 48168 - DNA, 600 bp, Chicken  19866894293056_1
gccttttcacagcattggatgggttcaagtgttcagagcctccttcatcccataaattacagacagatttatactttaatcacaatttcacaagtttctggagaaaaatcacttttccactgctagctttacactcctctctagtaaataacctaatttcctctgcattaatttcttgatatcggtgcctttagtgcactcacatctgagatgttgcacccatttttaagaagggtagagaagatgactcagggaactaccgacctgttggcctcacctctgtaccgggtaggatcatgragcagatcctcctggaagctatgctaaggcacgtggaagagagggaggtkatatgggaaaaccacattgtttctccaaaggcaggtcttgcctgaccaacctcgttgctttttacaatggtgtaacagcgtcaatggacaagggaagagccactgatgtcacctatctggacttcagtaaggccttagacacagtcccctataacaaccttctttccaaattggaaagataggaatttgatgagtcaactgtttgattaatgaggaaccagttacgagatggtacccagagagtggtggt

SEQ ID NO: 48169 - DNA, 600 bp, Chicken  19866894293056_2
cataaattacagacagatttatactttaatcacaatttcacaagtttctggagaaaaatcacttttccactgctagctttacactcctctctagtaaataacctaatttcctctgcattaatttcttgatatcggtgcctttagtgcactcacatctgagatgttgcacccatttttaagaagggtagagaagatgactcagggaactaccgacctgttggcctcacctctgtaccgggtaggatcatgragcagatcctcctggaagctatgctaaggcacgtggaagagagggaggtkatatgggaaaaccacattgtttctccaaaggcaggtcttgcctgaccaacctcgttgctttttacaatggtgtaacagcgtcaatggacaagggaagagccactgatgtcacctatctggacttcagtaaggccttagacacagtcccctataacaaccttctttccaaattggaaagataggaatttgatgagtcaactgtttgattaatgaggaaccagttacgagatggtacccagagagtggtggtcaatggctgaatgtccagatggagatcagtgacgagtggtgtccctcagt

SEQ ID NO: 48170 - DNA, 600 bp, Chicken  19866894293057_1
gagtaacctgggtctgttcagcctggggaagacagaggaggaatctgattaatatttataaatatctaaagggagatgggaggcaaacggatgaggccaggctcttctcagcggtgtgtagcaataggataaagagcaaaggcataacacttgaacacaggatgttccatactgatatgtagaagatcttccttatggtaagggtggcagagcactggagcaggttgcccagagagattgtagagtctccttctatggagatattcaagacccatctggacacctacctgtgtgacctawtgtagggaayctgcttcagcaggggagttggacttgattatctcttgaggtcttgcaattctgtgattctgtgataagtaccttcaacaaattcactatttgcctcagaataatcccatwcataaatggcagaagataaaagcagtcttttccatttcctatgggtcttcatggctgtgttcacgttgcaacatggggattctgcttaaggatacgcaatgtccttcagatgagacacagtgcaaagccataggtttgggttttatttatcttgagggcattttgcagaaagaaaaaaac

SEQ ID NO: 48171 - DNA, 600 bp, Chicken  19866894293057_2
ggtctgttcagcctggggaagacagaggaggaatctgattaatatttataaatatctaaagggagatgggaggcaaacggatgaggccaggctcttctcagcggtgtgtagcaataggataaagagcaaaggcataacacttgaacacaggatgttccatactgatatgtagaagatcttccttatggtaagggtggcagagcactggagcaggttgcccagagagattgtagagtctccttctatggagatattcaagacccatctggacacctacctgtgtgacctawtgtagggaayctgcttcagcaggggagttggacttgattatctcttgaggtcttgcaattctgtgattctgtgataagtaccttcaacaaattcactatttgcctcagaataatcccatwcataaatggcagaagataaaagcagtcttttccatttcctatgggtcttcatggctgtgttcacgttgcaacatggggattctgcttaaggatacgcaatgtccttcagatgagacacagtgcaaagccataggtttgggttttatttatcttgagggcattttgcagaaagaaaaaaacatatcgattt

SEQ ID NO: 48172 - DNA, 600 bp, Chicken  19866894293057_3
gcaataggataaagagcaaaggcataacacttgaacacaggatgttccatactgatatgtagaagatcttccttatggtaagggtggcagagcactggagcaggttgcccagagagattgtagagtctccttctatggagatattcaagacccatctggacacctacctgtgtgacctawtgtagggaayctgcttcagcaggggagttggacttgattatctcttgaggtcttgcaattctgtgattctgtgataagtaccttcaacaaattcactatttgcctcagaataatcccatwcataaatggcagaagataaaagcagtcttttccatttcctatgggtcttcatggctgtgttcacgttgcaacatggggattctgcttaaggatacgcaatgtccttcagatgagacacagtgcaaagccataggtttgggttttatttatcttgagggcattttgcagaaagaaaaaaacatatcgatttatagacctttacacattggcataacagacaccataaatgcgtgcaagtcctacagctacattttggataatttaggggaaaacagctttccctaagtgaatatttcactc

SEQ ID NO: 48173 - DNA, 600 bp, Chicken  19866894293072_1
gtgaaaatctggcttgaggtcattgttctcttttatgctcttccctgagttgactttgactacacagtctatgggtagatgatcaagtactcttaatcttttttcatttactattagaaatagtattttgtttcaccagctgaagctggtcttagtagctacaatatttgtttttatgtcgttggcctatcttctccacaaacatttcctaatatttttaatttagtctcctcccaatataagaagctaagctctattaaaggtaagacagtggcgcaaagggattaagtttttgtttcrcacacaaaaaaataaattctgaaaaataatgttattatagaaaggagaactcatagcatctgtgttaagccaagattattctcaaaaaatccctawaaagatataactaaaactaaccaaacaaaaaaaccccagctctgtctgacaaactgttgctacaatgttcacccaagcctgctttgggtgtgctgatctgatctgttttgtgaacctgaagtccagcagtgatgctctgggtgccttgatttattcagtataaatctcactaagtagaaaacaaaaagtaaggaatattatgcg

SEQ ID NO: 48174 - DNA, 600 bp, Chicken  19866894293072_2
tcttttttcatttactattagaaatagtattttgtttcaccagctgaagctggtcttagtagctacaatatttgtttttatgtcgttggcctatcttctccacaaacatttcctaatatttttaatttagtctcctcccaatataagaagctaagctctattaaaggtaagacagtggcgcaaagggattaagtttttgtttcrcacacaaaaaaataaattctgaaaaataatgttattatagaaaggagaactcatagcatctgtgttaagccaagattattctcaaaaaatccctawaaagatataactaaaactaaccaaacaaaaaaaccccagctctgtctgacaaactgttgctacaatgttcacccaagcctgctttgggtgtgctgatctgatctgttttgtgaacctgaagtccagcagtgatgctctgggtgccttgatttattcagtataaatctcactaagtagaaaacaaaaagtaaggaatattatgcgaacactgagtgaaaagtattttccttccatatctccaatctccacaacactgtaccgaactaactttgactaatttcagtctcactgtattcctgt

SEQ ID NO: 48175 - DNA, 600 bp, Chicken  19866894293072_3
gtctgacaaactgttgctacaatgttcacccaagcctgctttgggtgtgctgatctgatctgttttgtgaacctgaagtccagcagtgatgctctgggtgccttgatttattcagtataaatctcactaagtagaaaacaaaaagtaaggaatattatgcgaacactgagtgaaaagtattttccttccatatctccaatctccacaacactgtaccgaactaactttgactaatttcagtctcactgtattcctgtatgtagtgtgtatgtacacacaaccctttctggctaaatcacrgaatcatagaatggcttagrttggaagagatctaaagaatcatccagtcgtaacttcccctactgtgggcaggaactccatccactggaacaaactgctcagtaccccattcaacccagtcttgaatacctccaggaatggagaacttaagaacagattcaggtagaaagcatgctgtatgacaagatccaacttgtaacagaaaagttaacaacaggtctacaatcaacgttccctgaaaactaaggaaatttagctggtaaacaacaacaaaaagtgtttatcttgtccaatatatct

SEQ ID NO: 48176 - DNA, 600 bp, Chicken  19866894293072_4
aatgttcacccaagcctgctttgggtgtgctgatctgatctgttttgtgaacctgaagtccagcagtgatgctctgggtgccttgatttattcagtataaatctcactaagtagaaaacaaaaagtaaggaatattatgcgaacactgagtgaaaagtattttccttccatatctccaatctccacaacactgtaccgaactaactttgactaatttcagtctcactgtattcctgtatgtagtgtgtatgtacacacaaccctttctggctaaatcacrgaatcatagaatggcttagrttggaagagatctaaagaatcatccagtcgtaacttcccctactgtgggcaggaactccatccactggaacaaactgctcagtaccccattcaacccagtcttgaatacctccaggaatggagaacttaagaacagattcaggtagaaagcatgctgtatgacaagatccaacttgtaacagaaaagttaacaacaggtctacaatcaacgttccctgaaaactaaggaaatttagctggtaaacaacaacaaaaagtgtttatcttgtccaatatatctgtatttacacaggtatcaaa

SEQ ID NO: 48177 - DNA, 600 bp, Chicken  19866894293075_1
actcctggggatctgcagtgctcttaagtatgcatttaaagaaggaaaaaaaaatctaacaagaactggcagaagtaagcatctgcagcagctccccaaagttgggggggaggcttttattaacgtgctctggctgcaggaatagcaacaactatgaaacctgcatggcaaacttacctgcttgtgtgggttttgttgtttgtttgtttttagatatctgaatttgacatggttttgtttttccctatagattaaaagcactcgaaaggaagtcaagctggggaagagcctccttgggtrcgcagaacaaagtcacagtgcccacgggaaggcagtgccgtgtgatgaggagctgcgccagggctggagaaagcctgagtcctgctgcatcccgaaggaagcagagatgatgggcttgtgtgacttcaagcataaggtcagtgtttgtccttcatccttggatggagcacagggaaagaaggcttcttgcacacgtgctgtttcccctgcccatacacacagttggccgtatgcgggcagcagccttgctacagcagtcaccttcagtgaaaggcaagagaggttttgattccctttctg

SEQ ID NO: 48178 - DNA, 600 bp, Chicken  19866894293079_1
tttgaccaccaaaatattttgtcaagcatagtgttaaagaggaggaattttcctttgctaatgctatacatctgcaaaattgacagactggaaagggtcatgtacacttctgtgaatagttgaggcagaggtcatgaggcataggtaacactaggaatgaagaattaaaaaatctgaacatatgctaaattttataatctttgagatgaagtcccactgtataatctgcaattgaattataaccaccatgatttacccattatcaatatcaagaatattgttaccaaatatgcaaagtaragataaactgacagtaaaaataataactaagaaattctgagttaaaatttaagcttccttttttaaacgtaattaaaagaaaaagatatcataaatgtgatgcttaaactggggagaataagctctccttgaaataagggagtcatcttttaatcaaaaataatgtacatttgcaacacayaaaaaagttattacaggtgaggttttttagcaggctaaatgtagactggcagtagactgacaattttagttaaaaaaaaaaatctttaaaattgaaatgatagcaaacatctgaagggt

SEQ ID NO: 48179 - DNA, 600 bp, Chicken  19866894293079_2
atgctaaattttataatctttgagatgaagtcccactgtataatctgcaattgaattataaccaccatgatttacccattatcaatatcaagaatattgttaccaaatatgcaaagtaragataaactgacagtaaaaataataactaagaaattctgagttaaaatttaagcttccttttttaaacgtaattaaaagaaaaagatatcataaatgtgatgcttaaactggggagaataagctctccttgaaataagggagtcatcttttaatcaaaaataatgtacatttgcaacacayaaaaaagttattacaggtgaggttttttagcaggctaaatgtagactggcagtagactgacaattttagttaaaaaaaaaaatctttaaaattgaaatgatagcaaacatctgaagggtgagccctggattttcagatctacgccataacttgaaggcttatatttaaagtatcacatagaatctactgcatcttaccctgattctcaggggaaaaggagcctgaattcataattgccataattcacatgtgctgtatgcaggactctaaaggagactgcaaataattagaggaaaaaaa

SEQ ID NO: 48180 - DNA, 600 bp, Chicken  19866894293086_1
gatacacactgacctcacaatatttatagcatgatttctatgtttggtctctggaaacaaagacttctgagatttgtctcaggacagcatctccagaggccataaaaatgtactgcttaaatccagacataaaacatttcttctccaatttctgtttggttatgagagccactccttaatattttcttattggagtgcaaaaacctgaagtaagtggaggattatataaattaacaattgtacctgtatgtcttaagacaaataaaagatgtctgtactgggttcattgtatgtcaactyagaatcttgcagagttcctccactaatctagatagctaagctatgttgagaaatggccttgagccgtttgcatccctgaatgaggcctgctttgtgccacaaaaaatcaaataagtatatttcattacctaatagttattcatgatgtgcattttatcattatcatttaaataaagcctcttattttttttatttacttacccaaatccaccattgctatttcctctgatttgtttagtaatatatagaaaattaattaattgggcatgtcagcacaacaaatgtgtaatgttctaacaa

SEQ ID NO: 48181 - DNA, 600 bp, Chicken  19866894293086_2
tgagaaatggccttgagccgtttgcatccctgaatgaggcctgctttgtgccacaaaaaatcaaataagtatatttcattacctaatagttattcatgatgtgcattttatcattatcatttaaataaagcctcttattttttttatttacttacccaaatccaccattgctatttcctctgatttgtttagtaatatatagaaaattaattaattgggcatgtcagcacaacaaatgtgtaatgttctaacaaatactacaattgcagcccatttgtcaacaaatgacaacttcaatamgagaagtgctcagatcatatatactgtccacacactcctttaataaacactgtctgcaaaatttactgcctcagtaagatgttttaggactttggagaaaggttcaaccataactgaaaacatatggccagaggaaagaactaagcccttcacattatcaagtcttatggatgatttaaatttaagcaagtacgtatagtgaagttcgttaaatctggaaacctgaccttatgcattgccagcaaatccaattataactgtgttgaattgaaattctgatagactggtgtgaacccaacc

SEQ ID NO: 48182 - DNA, 600 bp, Chicken  19866894293093_1
ccattacaccatcgtgttacctcccagagatgggactttgccatcggggagtgccaatagcaatgctctcactgctctccccagctcgaaaccagctgctggagcagagcaggagccttccagcagacctgcagcacggctcagggagagagtgagctcattccatttgacggctcggcttaggaaatttggtcatggagcaggaatgaaaacttgcgtcaactccaagtcgaaatgctcagcgcagcacagcccttctgttccccaaggatagtaatctctgatttgttgctcatatgraagatgtattgcttttccatataccggatgagttatgcatttcataaactaaaccatccatatattcaaagcaatcgttcaccttaactgtacgatgcatcgccgcgccgtttgggtacaaaatcgtgccacaaacacattgctaaatgcttggtgtgtggtggagccctgtctggagctattgcactgcagagaatgatgctcacgatgctttgcgacctcccctgcacaacagctggcagaactccccacacagctgggcaggacagggcagggtggggtgggctgctccgtgctatc

SEQ ID NO: 48183 - DNA, 600 bp, Chicken  19866894293101_1
aaagggtaccctctgcaacccttgccaggccacggagtcagagagtgggaaaggaagttagtctcctgtggagcattgaagggtattaacccttaaatttaatctggactagtttctgcaggatcccaagcccttgacttccagatggaaagtaatgggattggagaaacgggtggtgtttcctagtgcaaacaccacagttgggaactctgccactgcagcctttctcctcccagccaggtcaatgaaacgggagaccaggggtttggttagtcatggtaacgtttttaagttcagttstcttcagaaagaaatctaaaaggattagaaatgaaatcttgagaacctgtgttatagtattagagcagtgaaccctgtcccgtgtcagaaagtacagaatgttatctctttagtctctagtgcttgctgggttttgtgcaytgttctgtggcaatgtccagtgctgtcttattttgtatgtagtccgtgtgtctattgtctcttaacatggtatctcatttttctgtcttttcttgtttcacattaatcttagaattcctagagagtgaccgaagtgctgatgacatcagggcacatcga

SEQ ID NO: 48184 - DNA, 600 bp, Chicken  19866894293101_2
cagatggaaagtaatgggattggagaaacgggtggtgtttcctagtgcaaacaccacagttgggaactctgccactgcagcctttctcctcccagccaggtcaatgaaacgggagaccaggggtttggttagtcatggtaacgtttttaagttcagttstcttcagaaagaaatctaaaaggattagaaatgaaatcttgagaacctgtgttatagtattagagcagtgaaccctgtcccgtgtcagaaagtacagaatgttatctctttagtctctagtgcttgctgggttttgtgcaytgttctgtggcaatgtccagtgctgtcttattttgtatgtagtccgtgtgtctattgtctcttaacatggtatctcatttttctgtcttttcttgtttcacattaatcttagaattcctagagagtgaccgaagtgctgatgacatcagggcacatcgagagaaaaagcgatattacaaggatctcgtgcaagaggaggagaggataacaactcaggtcagaaagcctgcagacaaaaggttgtttggtagctttgctgggtaaatggaggggggtcagtcccagttaaaactgattctg

SEQ ID NO: 48185 - DNA, 600 bp, Chicken  19866894293102_1
agctggctcataagcactcctgggaatgattgttgctccatcagttttagaacccacagttgcctccacagtaggagaggtctttaaattagagaattaccatctggtgttcctgacaaatactgagcatcttaaaagaatacacactgctactgtccaggaaccacagacaataccaagagtattctgtctggaaagtttccccacccccaggcaaaggctgccaaattctattctcagttacaccagaataaagccaacgacccatgtctttgtcagagttgttcttaatttgtaccmgcatgcctggcagcaaatttgggccccaagtctcaaacctcatgggctagaagtgtaagactgcttgaacaacgcgtctcgagaayagaaaatgtataggcagtacagctttattgtattttattgttttatggcatggcctcatgtttttaggccatctcttgcatgttctagtgctattattagagctcatttagttttccaactaaataaccatacaagcaagtaggtttgactacatattctgagcagaatccttgcttcagaggccaggccctgtttctcaggcttacatgataa

SEQ ID NO: 48186 - DNA, 600 bp, Chicken  19866894293102_2
aattagagaattaccatctggtgttcctgacaaatactgagcatcttaaaagaatacacactgctactgtccaggaaccacagacaataccaagagtattctgtctggaaagtttccccacccccaggcaaaggctgccaaattctattctcagttacaccagaataaagccaacgacccatgtctttgtcagagttgttcttaatttgtaccmgcatgcctggcagcaaatttgggccccaagtctcaaacctcatgggctagaagtgtaagactgcttgaacaacgcgtctcgagaayagaaaatgtataggcagtacagctttattgtattttattgttttatggcatggcctcatgtttttaggccatctcttgcatgttctagtgctattattagagctcatttagttttccaactaaataaccatacaagcaagtaggtttgactacatattctgagcagaatccttgcttcagaggccaggccctgtttctcaggcttacatgataaccttttaaaagataaggaaagaataatttaatcttcttagtttgcaaccataacatgtgcttgaagtatgttgtgatttttttggt

SEQ ID NO: 48187 - DNA, 600 bp, Chicken  19866894293103_1
aaatgtagtcactattgatattaaaatatttggacatttcctatgcatcatggctcaaataacaaaattccatgtgaataattaaaacactatatattccaactttctggtgttgcctatttcaattggaaacattttgtagttgtttacccctttctgcaatggactgacggcagaatattccaaatgccacttcactgcagtttatcttttcattatattgagcctctaaattagcaaatttatacacattatctagtttaaaaaaacaaaaaagaggagttttgggtgctagcatcytaagacttaaaaatgttcacaatagtaagagaatcacatgtgaaatgttttcttttgctcatgcttcacagctactctgatggaggggaattttctgtgtgctttagagctgctattaaaggtctactttacatagatggacaacttgggtaaaaaaaaataagaattacatcatgaagatcattacccaatcacctgtaaaggttcaaagccttaaagaggaaagtatttaaaacgcaataacatcacattttaactaataccaccatcattttaagacagaactgtctgaccaactca

SEQ ID NO: 48188 - DNA, 600 bp, Chicken  19866894293107_1
aggatctgtataagcaaggcatattgatgtcaagatgtaaagagtctttgcacaggcgtaaccttgagaggtgtccctgcttaaggggagatcctgtcatgcagccagatgctgtgcgggagagctcagtgtgctcttgggatgattgattcatagtcataggttgctttttaggcatatacttaattgttcctcagctgttgaaacaggtgtctgctatcagtttttttccgtttctaatttgagacagttttgtggtcatcaccagtactgttgctcattgtcttccaaagcagggcyttgtgtgcattgctaggccaaatgaaggagctgagggaagaatggacagggagctgtgagacactgtacaagaactacttttgtctcagagattgctgttgtttgcaaggataactggaggtatccatgcctacacatgggtgtcagaaacaaggaagataaggcgaatgtctcagtgcttatcaccttccaagctaccccctagatacagttgctcagccttgtgtggaggccccaggttctctgatgtggataagcctgcaatggactgttgcacttgtgtygggcattctgttacta

SEQ ID NO: 48189 - DNA, 600 bp, Chicken  19866894293107_2
cttccaaagcagggcyttgtgtgcattgctaggccaaatgaaggagctgagggaagaatggacagggagctgtgagacactgtacaagaactacttttgtctcagagattgctgttgtttgcaaggataactggaggtatccatgcctacacatgggtgtcagaaacaaggaagataaggcgaatgtctcagtgcttatcaccttccaagctaccccctagatacagttgctcagccttgtgtggaggccccaggttctctgatgtggataagcctgcaatggactgttgcacttgtgtygggcattctgttactatgggcaactcaagaagaatatacatatatggactctgcagaaactttgtgtgtgcttttcccttgttgtgttttccttctgcctgtgattgtccaagaaagggaatgtgcacctccccactcccgctgccaaccagagtcatraaacgctgtgacactgcggtggtaactatttttgcattcctagaacaaacccatgcttttgttttctgtctttttattattgttttctttgtcccacctcccatacccaggcctagctaaccaaaacttttataataaact

SEQ ID NO: 48190 - DNA, 524 bp, Chicken  19866894293107_3
tcagaaacaaggaagataaggcgaatgtctcagtgcttatcaccttccaagctaccccctagatacagttgctcagccttgtgtggaggccccaggttctctgatgtggataagcctgcaatggactgttgcacttgtgtygggcattctgttactatgggcaactcaagaagaatatacatatatggactctgcagaaactttgtgtgtgcttttcccttgttgtgttttccttctgcctgtgattgtccaagaaagggaatgtgcacctccccactcccgctgccaaccagagtcatraaacgctgtgacactgcggtggtaactatttttgcattcctagaacaaacccatgcttttgttttctgtctttttattattgttttctttgtcccacctcccatacccaggcctagctaaccaaaacttttataataaactggttgcgaaaatatttgactcttttccgagtcttagtctcacatcaagtatgcatatatcacaaaccatctcaccaccaacag

SEQ ID NO: 48191 - DNA, 599 bp, Chicken  19866894293108_1
  misc_feature (1)..(3): n is any nucleotide
nnntaaaaaaaaaaaaaagagagatggatgtataaacagtttttcttttgactgaggaagatttattttatttcttccaagttgtgaaatgttttgtgtgaaagaaattcacttttctgagttgctttgtgcttgttacccaaaataaaaatgaataagaattaatcacatccatttcttcaaagtctttttcacatcttgggagttttacaaatatgtgctagcaagttttctataggaagggatttatcttagatatcactgaatttgtgtaagacaaatatttgatatcaacaattyttttggtcaatgacttttctttcccgaatgactgattgtttagaagaagagtttrtaaacaggtaaaatgcaggtatttctgcatttaaataatgtattgtgtattattactaatgactgaaatgctcctatagaaaaacaatggtgctttatgtctatattttcattaaaacaatagtatggcagatagaatgaaggtatacctttggttgttgagctacatttcttagtttttttcatgcagatgatcaagtcctgtgttttaggtgctaacagacaaaagttctgttatgtatgtg

SEQ ID NO: 48192 - DNA, 600 bp, Chicken  19866894293108_2
ggaagatttattttatttcttccaagttgtgaaatgttttgtgtgaaagaaattcacttttctgagttgctttgtgcttgttacccaaaataaaaatgaataagaattaatcacatccatttcttcaaagtctttttcacatcttgggagttttacaaatatgtgctagcaagttttctataggaagggatttatcttagatatcactgaatttgtgtaagacaaatatttgatatcaacaattyttttggtcaatgacttttctttcccgaatgactgattgtttagaagaagagtttrtaaacaggtaaaatgcaggtatttctgcatttaaataatgtattgtgtattattactaatgactgaaatgctcctatagaaaaacaatggtgctttatgtctatattttcattaaaacaatagtatggcagatagaatgaaggtatacctttggttgttgagctacatttcttagtttttttcatgcagatgatcaagtcctgtgttttaggtgctaacagacaaaagttctgttatgtatgtgaagtactgcttataatatgtgcagatgtagattataattttctgcatctaattttt

SEQ ID NO: 48193 - DNA, 600 bp, Chicken  19866894293108_3
tattaaagaataaaatcatttcagatattagttgtacagtaaagtgggaaaaatatgaagaagagtggagattagttagcatccttattccaagtagctgaggacattttgtgaaaagtcttttagtactttcaaaatcaattacagttcatgctaaatgatagctttattttgtgctccagttaatacatagtactgagactaatgcattttccatattgaatgtatcttctgaatggatcatagtatgcttttttttcaagagtttagtttttagtgggattcatagctgtaatttcrtctcactcttaaaaaggaagatgcttggctgctttttaaaawttttttattttattttttgccgctgttcagcttttctttcttctgagatgtgcttattctgttttcttctttacactagttttgggttcattacatagtgttgacaagttcttaaatgcgggattgatactgtcttattttgtaaactcacattcaaaacttgggagtgaaaatgacaagaatatagtatctgtgacctggaaactgaaaagtatgtatctagaacttgtagcatttttattagtggactatagtatg

SEQ ID NO: 48194 - DNA, 600 bp, Chicken  19866894293108_4
agtgggaaaaatatgaagaagagtggagattagttagcatccttattccaagtagctgaggacattttgtgaaaagtcttttagtactttcaaaatcaattacagttcatgctaaatgatagctttattttgtgctccagttaatacatagtactgagactaatgcattttccatattgaatgtatcttctgaatggatcatagtatgcttttttttcaagagtttagtttttagtgggattcatagctgtaatttcrtctcactcttaaaaaggaagatgcttggctgctttttaaaawttttttattttattttttgccgctgttcagcttttctttcttctgagatgtgcttattctgttttcttctttacactagttttgggttcattacatagtgttgacaagttcttaaatgcgggattgatactgtcttattttgtaaactcacattcaaaacttgggagtgaaaatgacaagaatatagtatctgtgacctggaaactgaaaagtatgtatctagaacttgtagcatttttattagtggactatagtatgatatatttgctcctaaactcagaacaaaaaaatagatacaat

SEQ ID NO: 48195 - DNA, 599 bp, Chicken  19866894293109_1
  misc_feature (1)..(148): n is any nucleotide
nnnnnnnnnnnnnnnnnnnnnnnnnnnnnnnnnnnnnnnnnnnnnnnnnnnnnnnnnnnnnnnnnnnnnnnnnnnnnnnnnnnnnnnnnnnnnnnnnnnnnnnnnnnnnnnnnnnnnnnnnnnnnnnnnnnnnnnnnnnnnnnnnnnnacctggttatttcagatcagcattcatcaacaagttacatcactcccagcacgtccaacaaacaagacctccaagatttacatatatgcttaacacaaaataaaagttctattacgctcattgtgttatgtatgtatgagggtatacgaatrtaagtgtggtattttccacgctaaagttaactaaatcagcctaataccgagtgaccaacaggagttatagccacaggtccaaagaaaataaaggtgggagaagcaaaaagcaacatttcttttcaaataccagactgtgtcatatttatgagttatgtgcatcaatgattttctcattattcttgagaatgacaatgctcaccattacatttaaattacgataattctgtgaaattagtgttacctcttcctcaaagttagtcacacttcttattcyatttaacagagattgacatact

SEQ ID NO: 48196 - DNA, 600 bp, Chicken  19866894293109_2
gtatgtatgagggtatacgaatrtaagtgtggtattttccacgctaaagttaactaaatcagcctaataccgagtgaccaacaggagttatagccacaggtccaaagaaaataaaggtgggagaagcaaaaagcaacatttcttttcaaataccagactgtgtcatatttatgagttatgtgcatcaatgattttctcattattcttgagaatgacaatgctcaccattacatttaaattacgataattctgtgaaattagtgttacctcttcctcaaagttagtcacacttcttattcyatttaacagagattgacatacttgtyaaacaaacagtagttaaagtaccactgactcacaattccaagcaattataaaagcattccaaatactgtaattacaagactgctgtacctgaaaaaattctgcagacatctccaaaaacggagcctcaaagtcttcttcatagactgaccttccttcaagacctagaatcattaacatctggcaagcatttctgattgcgcctctgccaaaagtaagttgttaacaacttcagaaatcaacataacatwgggagtacacaccagaayaacaact

SEQ ID NO: 48197 - DNA, 600 bp, Chicken  19866894293109_3
gtgtggtattttccacgctaaagttaactaaatcagcctaataccgagtgaccaacaggagttatagccacaggtccaaagaaaataaaggtgggagaagcaaaaagcaacatttcttttcaaataccagactgtgtcatatttatgagttatgtgcatcaatgattttctcattattcttgagaatgacaatgctcaccattacatttaaattacgataattctgtgaaattagtgttacctcttcctcaaagttagtcacacttcttattcyatttaacagagattgacatacttgtyaaacaaacagtagttaaagtaccactgactcacaattccaagcaattataaaagcattccaaatactgtaattacaagactgctgtacctgaaaaaattctgcagacatctccaaaaacggagcctcaaagtcttcttcatagactgaccttccttcaagacctagaatcattaacatctggcaagcatttctgattgcgcctctgccaaaagtaagttgttaacaacttcagaaatcaacataacatwgggagtacacaccagaayaacaactcagaaaattttaacttaaaacatcct

SEQ ID NO: 48198 - DNA, 600 bp, Chicken  19866894293109_4
caaagttagtcacacttcttattcyatttaacagagattgacatacttgtyaaacaaacagtagttaaagtaccactgactcacaattccaagcaattataaaagcattccaaatactgtaattacaagactgctgtacctgaaaaaattctgcagacatctccaaaaacggagcctcaaagtcttcttcatagactgaccttccttcaagacctagaatcattaacatctggcaagcatttctgattgcgcctctgccaaaagtaagttgttaacaacttcagaaatcaacataacatwgggagtacacaccagaayaacaactcagaaaattttaacttaaaacatcctagtaaaaagtctatcctacatctgtttgttgcatgagaggttttccagaagattacagcactacgattatttttgttcaaaacgaaggagctgacaacatttaatattttaaatataacgataggaaagcaggtctcaagttctaccaaytctgaaaactattaacaggaatatatttcaccacacaagaaaataaccaaggaaaactgaaaactgcatgtgtaggttggtagtatacaaggcaattgc

SEQ ID NO: 48199 - DNA, 600 bp, Chicken  19866894293109_5
ttattcyatttaacagagattgacatacttgtyaaacaaacagtagttaaagtaccactgactcacaattccaagcaattataaaagcattccaaatactgtaattacaagactgctgtacctgaaaaaattctgcagacatctccaaaaacggagcctcaaagtcttcttcatagactgaccttccttcaagacctagaatcattaacatctggcaagcatttctgattgcgcctctgccaaaagtaagttgttaacaacttcagaaatcaacataacatwgggagtacacaccagaayaacaactcagaaaattttaacttaaaacatcctagtaaaaagtctatcctacatctgtttgttgcatgagaggttttccagaagattacagcactacgattatttttgttcaaaacgaaggagctgacaacatttaatattttaaatataacgataggaaagcaggtctcaagttctaccaaytctgaaaactattaacaggaatatatttcaccacacaagaaaataaccaaggaaaactgaaaactgcatgtgtaggttggtagtatacaaggcaattgcacagatggaaggtgccat

SEQ ID NO: 48200 - DNA, 600 bp, Chicken  19866894293109_6
ttccttcaagacctagaatcattaacatctggcaagcatttctgattgcgcctctgccaaaagtaagttgttaacaacttcagaaatcaacataacatwgggagtacacaccagaayaacaactcagaaaattttaacttaaaacatcctagtaaaaagtctatcctacatctgtttgttgcatgagaggttttccagaagattacagcactacgattatttttgttcaaaacgaaggagctgacaacatttaatattttaaatataacgataggaaagcaggtctcaagttctaccaaytctgaaaactattaacaggaatatatttcaccacacaagaaaataaccaaggaaaactgaaaactgcatgtgtaggttggtagtatacaaggcaattgcacagatggaaggtgccatgcagagtatgaaaacatacctgcaacttaagcatctgtttaggtataaacacgtgtgataaaattcaaaaacaaaagaattgtatctttgaaaaaattctggtttctggcagcaggggacaatatacagctattgccagcatgtatttttctcgtcttcaactgcacgttgggcaatcccaat

SEQ ID NO: 48201 - DNA, 600 bp, Chicken  19866894293114_1
gatgtgagcacagtgaggcattgagtggggcatgtcagcatttgcaaaagcaacatggccatctctgctggagcagatttttacaagcaggatcttgttcatcgttagtgaaagtacataggtaacagtggtgactatgttgaaaaatagcattttgtagcagagcattttctctatcagtgttactgtgctctttgtgtcttgtagttttttgttataggaaataaataggaggtattattttcagagtgacatatgtagttaattgcagtgcaggagtgtttagttattgaattcacmgatcctggatttgtgtgttttgcttatctggatgtgcatgtctcatcaggtaggtactcacacatattctgacaagcagtggggtgataaagaacatggtaggcaaaatttaagcagattcattaacatcattgtattattaatctaaaattcatccagtggcaaatcacaaatgagctctgtcagcaacttcagttgaatgatggtaaaatgtctgtaataaataattcagctatgtatgttttctattttacagataattttaagatgcttttgcaaaacatttttcctagaaaacat

SEQ ID NO: 48202 - DNA, 600 bp, Chicken  19866894293129_1
acagcagagtatgagagaaaaggaagagaggaaagaaatacaaatccacaagtgcaatttattgataagtttcaaatgtaaaaggactatacaactccactcctcttggtcaggacacccagcctccacccaccaagtcggagctgtgcaaagcttcgtcttcagaagttgaagtcttgcttctccactgagaagttatatagcccatcctcatcggtcccaggctgcagatcaggagtctcctaggaggaggttggcagccatcagttaatgggtctgagtctttactcatttaaacaytgcaggcaaagctcagacctcagctgtgagctctgccaggccactataagcctctactctggtgttccccaatctgtgagcacaaggctggatccaaatatggacctgcgacagttatggaattcccctgcgactcctacctgaggccctatacttttcccatgagtttaacrtgacaggagtcaagtaatccagaaggaacctgagcacagttatcagtgagtaggaggctgcccttcctagcaacaagccagccaggaaagaggaagcctccccacatttgggatgcatatcagcaac

SEQ ID NO: 48203 - DNA, 600 bp, Chicken  19866894293129_2
gtcttgcttctccactgagaagttatatagcccatcctcatcggtcccaggctgcagatcaggagtctcctaggaggaggttggcagccatcagttaatgggtctgagtctttactcatttaaacaytgcaggcaaagctcagacctcagctgtgagctctgccaggccactataagcctctactctggtgttccccaatctgtgagcacaaggctggatccaaatatggacctgcgacagttatggaattcccctgcgactcctacctgaggccctatacttttcccatgagtttaacrtgacaggagtcaagtaatccagaaggaacctgagcacagttatcagtgagtaggaggctgcccttcctagcaacaagccagccaggaaagaggaagcctccccacatttgggatgcatatcagcaactgcagtgatgccattggaaattccaacagcaagatgctatcaaagcatctctattgcacaacagtcagctgacagactggggttctacagagctttggaaggtaaagggagtaagctataggaactaccaaattcaaacagagacttaaggacttatctcagcatctttaaag

SEQ ID NO: 48204 - DNA, 600 bp, Chicken  19866894293129_3
actaccaaattcaaacagagacttaaggacttatctcagcatctttaaaggatgtgcttcactccagcacaaaacagctcattttcaaataagcagcagcaagagcacaacatacctcaccagagaagtacttctctatgatattcagagcagctcggtagaccatgttgttgtcatgggtttgcaaggcttcaattttctccagaccatcaagttcttccaccagcagacacagccgctccgtctctcccagtttctcagctgcctgcaaacacaggaggtaagtgtaacccatgtcaktaatggggccaaggtggtccctgctgtagggccctgaagctaagggtcaagtgactgcaggtaggaacacaagggtctgcattgtgttcagcagagatgcctgaaatacatacagaatatatggcttggcgattagcacactgcatcctctcctttccaggaggagaaaggctcaggaacttcatgtcaagccctttgggcaacccagaaggacccaaggacaaatcaggcatgaagtctaactcactcctgcaagactaactgctgggaaggagctgttccagctgcaccatgcaagca

SEQ ID NO: 48205 - DNA, 600 bp, Chicken  19866894293135_1
tctagttctcgtctgtaactcagattggatgaggttcagaaaatgattatactagtgtactgagcccccaaaatgtagttcatcagaggctcaagaagcttagttgatttagtttaaccaagaaacagcaaagaaaatattttgctgcagcctgcaatggagaaaaggtacttaagagtgaggtttacatctaacagaaaatcagaagattcaaggttttgctggaagctgaaacttatcaaatggagatggtaagtaaatgcaaacatgccattatgaaagcaaataacctttgcagcrtctaccttgtgtacagagtaaattctgtggtctttaaagttttttcagcaagacaggctaacttcyggaaagcaatgatatcagacaaatggaagctatgggcttgatggaggggttcacaagttagaatctttggactctgttctgtggaggaacggacctgcaccatcactcattgcccttttggcaattcatttctgaaaaatactctatcagtccaagcacctactacaatgaactatctatgttattttacaagtacagaatatttctaaaccactacaaactttcaaagtgaaa

SEQ ID NO: 48206 - DNA, 600 bp, Chicken  19866894293135_2
cccaaaatgtagttcatcagaggctcaagaagcttagttgatttagtttaaccaagaaacagcaaagaaaatattttgctgcagcctgcaatggagaaaaggtacttaagagtgaggtttacatctaacagaaaatcagaagattcaaggttttgctggaagctgaaacttatcaaatggagatggtaagtaaatgcaaacatgccattatgaaagcaaataacctttgcagcrtctaccttgtgtacagagtaaattctgtggtctttaaagttttttcagcaagacaggctaacttcyggaaagcaatgatatcagacaaatggaagctatgggcttgatggaggggttcacaagttagaatctttggactctgttctgtggaggaacggacctgcaccatcactcattgcccttttggcaattcatttctgaaaaatactctatcagtccaagcacctactacaatgaactatctatgttattttacaagtacagaatatttctaaaccactacaaactttcaaagtgaaagaccttcataaccaatgtatggcgttgcagaagcatactggtcaaggaccctagggcctcgagaag

SEQ ID NO: 48207 - DNA, 600 bp, Chicken  19866894293144_1
gcacttctaaactggcctttagaactaatgacaaaacccagcctgaacagagctggttttagtaccagcaagcactggggtaggtccaccaagcccagcagaattgttgtgagggcctgacttccaaaaatccagcctatgtccaaaggatttcattcacagatgatggttgatgccagaataacagacaagtttacaaataattggagagataataatttaacggagttaactaaattgtattatccatgtttctctattctttagtgagctatttgttaaatgaggatttatgtaatraggtgaacagaagagcatcggtgtggtagatattgcactaaatgtatacataaaacctctacgaacagacaatttccaacactttgagacaaacactaacaaggaagttagtagaacaacaaagtatttcatgggaccatagaattcctgcagtacaggaagctgcagtttcaataacatattaaccatatgacacaaaaccactgttttaataccatctgttaaagtcttccgaggtcacagctactactaaaataatgtctatcacttgcgttccacctttcaagcaagagaaacctt

SEQ ID NO: 48208 - DNA, 600 bp, Chicken  19866894293150_1
gcctttctggaaacattaaatattacttttgtatggctcattggggtctaaagccaaaagaagaatgacagagccaagtacattcttgtaaatagtaccgacatcaccacccacagaattaaacctagtatttcaagactcttttcgaggtgatggatgagtaacacttacttctggtcaagtacatttttgtacagttaagatttataccacagttatggctttgaatgaacatttgttttacatggcatgtagaggaaatggtaagcagcgtcacaaacacacgcttgttaacaaacycaggctatgaaaaacaggcagctagttctcagcacgtgtgtgtgctgctacaggaccctgagggtggatgaccagggctttactggtggcagccaccaatgttttagcagcattgagttggactcyctgtgctccccttggaaaatgagctggattttgtattttttttcccctcaagcagataacttggtttataaaacgaggttttatccataaccgcattcaagaattaagcactgcttgctttaaagtgaacaagaagagcagcaggaaagcacgatatacactaaaaagcataca

SEQ ID NO: 48209 - DNA, 600 bp, Chicken  19866894293150_2
agtatttcaagactcttttcgaggtgatggatgagtaacacttacttctggtcaagtacatttttgtacagttaagatttataccacagttatggctttgaatgaacatttgttttacatggcatgtagaggaaatggtaagcagcgtcacaaacacacgcttgttaacaaacycaggctatgaaaaacaggcagctagttctcagcacgtgtgtgtgctgctacaggaccctgagggtggatgaccagggctttactggtggcagccaccaatgttttagcagcattgagttggactcyctgtgctccccttggaaaatgagctggattttgtattttttttcccctcaagcagataacttggtttataaaacgaggttttatccataaccgcattcaagaattaagcactgcttgctttaaagtgaacaagaagagcagcaggaaagcacgatatacactaaaaagcatacatatgtgcgtgtgtgtgcttgaaagagtatatcttctacataatagatggaaatttccatatgcattttggaagactcaagcacacctaagcgttgtggctcaccagagttcagaagcagaagcctg

SEQ ID NO: 48210 - DNA, 600 bp, Chicken  19866894293151_1
tttgggtgaggaggctctgaacccacattgagtatcagagaagatcctgttctgttctggaactatggggtggccgtggggatgcaggggagatatctcacttggattttaccttcttcaactgtgcggtggtagaagcaccaggggacaccagcaggatgtgcccggaagcagcatctcctgcttatgcactccttagctgtgatgccagggtagccacagttcactcggatacgaggatcagcagggcacactttcttaactgtgtaaagcaaaaaggaaggaaggatggaggctgcrttaccctatgctccatgtacctggtggaaaaattcacaaataaaaggcagacggggtccatgagcaagcacaactgccgtggtgaccttttccacactgacttcaggcagcaagatcactcaaacccttactatgcctagtatgcaaagccacataccaaaagatgaggaactgctgctgcaccctaggggctagaggggccaaagttcattcctagaagtgcctggcaggcagcaatccggttctgccttttgcagatccagcagtggagcagagggccgactgcagaatggtcacagc

SEQ ID NO: 48211 - DNA, 523 bp, Chicken  19866894293155_1
attagagtactcttgatactctttctgaatcagattagctaatcagagtcccacacagaattaaaaaaaaaaaaaaaagaaagaaaatacaatgaagatctagacagagaagttgtttttgatactggaatcagattgtaactttctgggtactgttttgctaatttaccttatcccttcacattaaaattacccttctaaataggcagtctactctatgtgcaattttctccaccatgtaagttctatgttttcctcttaaacagcagagagagaatcaaaatctcactttataatcaraataaagaatagtagattttatgctaaagctgctaaaaatcacacttctttgaaagcaaaatgctcaacagtcataatattcactcagtttataaatgtcttcatgaaaacaatatttctctttcatgagtaagcttaaactctagcaatccctagcaattcttcaaacacaataacctgtatctaatactgtcctgagagctctcacaacatcatcctccag

SEQ ID NO: 48212 - DNA, 599 bp, Chicken  19866894293159_1
  misc_feature (1)..(143): n is any nucleotide
nnnnnnnnnnnnnnnnnnnnnnnnnnnnnnnnnnnnnnnnnnnnnnnnnnnnnnnnnnnnnnnnnnnnnnnnnnnnnnnnnnnnnnnnnnnnnnnnnnnnnnnnnnnnnnnnnnnnnnnnnnnnnnnnnnnnnnnnnnnnnnnacaggttgcaaagtgacatctcaaattctctaagttttggactaatttaggcctaggattttacctcaagaacatctggaactgttactgctccaaacatgtggtatgtgccatagaaaagaatcttttaaggcaaaataataataaaatcaacatwaaaaagctcagaaccaaccttctggcttttccatagaaggaaggcaaggctgtcactaaactcagtactaacaaccttgggagcccaaaatgaatttatgtaataataacaaatgtaaagtgaacaaatgaagttgggggtgaaaggatatgctgttttctgcttgctacccccctcccccctcctcttctaccttgttcacccacgtgtcattgactgcaagaaaccatgaaagkmgaagcctggcagacatgggcatgctggacctgggcagatgccagtcatggtgctccagatca

SEQ ID NO: 48213 - DNA, 600 bp, Chicken  19866894293159_2
caaacatgtggtatgtgccatagaaaagaatcttttaaggcaaaataataataaaatcaacatwaaaaagctcagaaccaaccttctggcttttccatagaaggaaggcaaggctgtcactaaactcagtactaacaaccttgggagcccaaaatgaatttatgtaataataacaaatgtaaagtgaacaaatgaagttgggggtgaaaggatatgctgttttctgcttgctacccccctcccccctcctcttctaccttgttcacccacgtgtcattgactgcaagaaaccatgaaagkmgaagcctggcagacatgggcatgctggacctgggcagatgccagtcatggtgctccagatcattttgaaaattatatyttctgtatatataaaatgtacatatatcattccaactggaacataaagcaaaccactgaaaccaagataaacaaagacagtggctggcatacatgctgcgtgttctccggatcttgtgtctggttcctgtgtcaggctaactcctctaatgaggttcttgtgcaactttattttagttacagagggcctgagtccttctgcttttagtccttaggaggttt

SEQ ID NO: 48214 - DNA, 600 bp, Chicken  19866894293159_3
aaacatgtggtatgtgccatagaaaagaatcttttaaggcaaaataataataaaatcaacatwaaaaagctcagaaccaaccttctggcttttccatagaaggaaggcaaggctgtcactaaactcagtactaacaaccttgggagcccaaaatgaatttatgtaataataacaaatgtaaagtgaacaaatgaagttgggggtgaaaggatatgctgttttctgcttgctacccccctcccccctcctcttctaccttgttcacccacgtgtcattgactgcaagaaaccatgaaagkmgaagcctggcagacatgggcatgctggacctgggcagatgccagtcatggtgctccagatcattttgaaaattatatyttctgtatatataaaatgtacatatatcattccaactggaacataaagcaaaccactgaaaccaagataaacaaagacagtggctggcatacatgctgcgtgttctccggatcttgtgtctggttcctgtgtcaggctaactcctctaatgaggttcttgtgcaactttattttagttacagagggcctgagtccttctgcttttagtccttaggaggtttt

SEQ ID NO: 48215 - DNA, 600 bp, Chicken  19866894293159_4
aaccttctggcttttccatagaaggaaggcaaggctgtcactaaactcagtactaacaaccttgggagcccaaaatgaatttatgtaataataacaaatgtaaagtgaacaaatgaagttgggggtgaaaggatatgctgttttctgcttgctacccccctcccccctcctcttctaccttgttcacccacgtgtcattgactgcaagaaaccatgaaagkmgaagcctggcagacatgggcatgctggacctgggcagatgccagtcatggtgctccagatcattttgaaaattatatyttctgtatatataaaatgtacatatatcattccaactggaacataaagcaaaccactgaaaccaagataaacaaagacagtggctggcatacatgctgcgtgttctccggatcttgtgtctggttcctgtgtcaggctaactcctctaatgaggttcttgtgcaactttattttagttacagagggcctgagtccttctgcttttagtccttaggaggttttcagctgtttgcgaaaagcagtgtttggtcctcagtttgtcaggcacaagttacagtactcagctttcagagccacagt

SEQ ID NO: 48216 - DNA, 599 bp, Chicken  19866894293168_1
  misc_feature (1)..(95): n is any nucleotide
nnnnnnnnnnnnnnnnnnnnnnnnnnnnnnnnnnnnnnnnnnnnnnnnnnnnnnnnnnnnnnnnnnnnnnnnnnnnnnnnnnnnnnnnnnnnnnncacagatggacgtggctgtggtccatattaatttacgacagtgattatctaggcaatggggctgctcacttcattcggagagagagcttgcaccccaaaagcagaacagcaaagctaacggcagaggagctgctttattagcatggtcacaagcaagtcactttgcaaggatcagggtaggctcaggaatatttcagcaatactyagcagtaaggagttctgtcagagcttcctgtgtctggaaaggtttttgtgggagagcatagaagaacacttgtcactgctgtgtggaaagtcttgatgcagcactccagcttttaaaaacaacagctttctatgactgcccaaggtttcttcataattggcttagaacagcagagaccaccaggctgcaagcagcacttgttcactgtgttataacatctaagaacaacaagttggggcgctattgattttcttatgctaataaagatggtcaggtggaattttcaaagtgagatcttt

SEQ ID NO: 48217 - DNA, 600 bp, Chicken  19866894293171_1
acagctttcagtttaaggacccaacaactgatgtttgttcccatttattttagacaaattaatatatttttttctgaaatatgagcttagagtttcaaatgttactatagattttctgtgctgtcatttaacacccaagttggtagcccttaaagaactgcagtattcaccaatggctgcacatctactcccacaaaatcaggcctctaaggaatgtcagagtttgtgctcttcagaggcggatgcacccagtaatcacagaaatcttgtaaatgtcatctgtaaagaaaaatacttaaygtctgtccattatcctgtgctatgtccaaaataacagacttcccactggttttaagttaataataggcttttcttccaatttttatccatctgaaactatcaggcattctgcaatgtattaagatgggaattctattgaatatatgctcggtagaaagactatttaaaaaagaattttcagtgttctttggtttggtgaagagggaagagccaaactatggaaaagtaaacatgcagcttcggagggatctcaaaattctaaacctccagacactaactccttgaaaagaattaatctca

SEQ ID NO: 48218 - DNA, 600 bp, Chicken  19866894293172_1
actggacaagacagacctgctgccactcttgtggcctcactctgagccatgaggctcagaggggagatgtgtaaggggacacagtcctgccagcagtgcttaaactggcattgttggcttactgccctcatgcttttgtggttaggattctgtgctagcctaacctcctctgaggttgggatctaggccacttaggatttagctcaaaacttggttagtgccagattttcaaagatagatacccagtaggatttttgtaaagaacttcaatactgtagctatctaatttgtatttatttyaaaaaaaaaaaaaaragagagagagagaccacatagtgctttaaaggtcaaaaattaaggctttaaacttgctatggagaactctgtggaaagatatgttttgcacttcttggcttgttagatgattttgattatgctagaaaactcccatttgcagtgtttcagagcatcagagagaggattcttctcctaagcccactttcaatggagtcctgtttggggttcctaatctcattaaatctagttatagattcctgtttaaaaaaaaaaaagtcaccagtgagaagccactgatggtgt

SEQ ID NO: 48219 - DNA, 600 bp, Chicken  19866894293172_2
ctggacaagacagacctgctgccactcttgtggcctcactctgagccatgaggctcagaggggagatgtgtaaggggacacagtcctgccagcagtgcttaaactggcattgttggcttactgccctcatgcttttgtggttaggattctgtgctagcctaacctcctctgaggttgggatctaggccacttaggatttagctcaaaacttggttagtgccagattttcaaagatagatacccagtaggatttttgtaaagaacttcaatactgtagctatctaatttgtatttatttayaaaaaaaaaaaaaragagagagagagaccacatagtgctttaaaggtcaaaaattaaggctttaaacttgctatggagaactctgtggaaagatatgttttgcacttcttggcttgttagatgattttgattatgctagaaaactcccatttgcagtgtttcagagcatcagagagaggattcttctcctaagcccactttcaatggagtcctgtttggggttcctaatctcattaaatctagttatagattcctgtttaaaaaaaaaaaagtcaccagtgagaagccactgatggtgtt

SEQ ID NO: 48220 - DNA, 600 bp, Chicken  19866894293172_3
cctgctgccactcttgtggcctcactctgagccatgaggctcagaggggagatgtgtaaggggacacagtcctgccagcagtgcttaaactggcattgttggcttactgccctcatgcttttgtggttaggattctgtgctagcctaacctcctctgaggttgggatctaggccacttaggatttagctcaaaacttggttagtgccagattttcaaagatagatacccagtaggatttttgtaaagaacttcaatactgtagctatctaatttgtatttatttaaaaaaaaaaaaaaaragagagagagagaccacatagtgctttaaaggtcaaaaattaaggctttaaacttgctatggagaactctgtggaaagatatgttttgcacttcttggcttgttagatgattttgattatgctagaaaactcccatttgcagtgtttcagagcatcagagagaggattcttctcctaagcccactttcaatggagtcctgtttggggttcctaatctcattaaatctagttatagattcctgtttaaaaaaaaaaaagtcaccagtgagaagccactgatggtgttgtcctgcattaatg

SEQ ID NO: 48221 - DNA, 600 bp, Chicken  19866894293176_1
actgttctttaatgaatgaagcttttggttctgctaagtactgttcttttctgatgattcttggagtgcagacaaactaatgtgtttaaattttagtaagttaaaagctaaaatctcctatttttaactttaaaaatggtttactgtctgaagcttgtgtgctattagaaaatgtgtagtaactcgaatcatggcctgaaccactgattgagcacctggagaagggcccctgggagcacaggtgaaggtaattcatctgagtgactggaaggagtggcacctggctccaccttacctagrtctcatttaagggctgactgtcaatgtgggaggatctctggttggagttctctcccctgtggagttttccttgcgagcctttggagacaagtgagcaccttttctttccctctgtagcaccatttcattcgcactagtccttttgctactacgctcctgtattgctcttccatcacgttgatctttctgattgtaatagaaaatatttatgtctaggctggcaaccccccacagctcatccaggcactctagttctcagcctcagagtcagggggactctactyctctcccttccatcaa

SEQ ID NO: 48222 - DNA, 600 bp, Chicken  19866894293176_2
ctccaccttacctagrtctcatttaagggctgactgtcaatgtgggaggatctctggttggagttctctcccctgtggagttttccttgcgagcctttggagacaagtgagcaccttttctttccctctgtagcaccatttcattcgcactagtccttttgctactacgctcctgtattgctcttccatcacgttgatctttctgattgtaatagaaaatatttatgtctaggctggcaaccccccacagctcatccaggcactctagttctcagcctcagagtcagggggactctactyctctcccttccatcaatgaacgcctggccttcctccgcccttcccgggagctgctggaatactaccgcargaagattgctgactttgatgaggagcatgaggatttggtaaaaaggctggagagatacaaagaaacatacgatgagcaggttaggaaaagagctttatttgattaaaaaaaaaccatcaaacaattccaaaatttgagaatcttttcatttgaggagaaagggcttccttgaacttcggtattctcttataccttaatagtgtacgtctgtctgtctgtcgtctttcacg

SEQ ID NO: 48223 - DNA, 600 bp, Chicken  19866894293176_3
ccctgtggagttttccttgcgagcctttggagacaagtgagcaccttttctttccctctgtagcaccatttcattcgcactagtccttttgctactacgctcctgtattgctcttccatcacgttgatctttctgattgtaatagaaaatatttatgtctaggctggcaaccccccacagctcatccaggcactctagttctcagcctcagagtcagggggactctactyctctcccttccatcaatgaacgcctggccttcctccgcccttcccgggagctgctggaatactaccgcargaagattgctgactttgatgaggagcatgaggatttggtaaaaaggctggagagatacaaagaaacatacgatgagcaggttaggaaaagagctttatttgattaaaaaaaaaccatcaaacaattccaaaatttgagaatcttttcatttgaggagaaagggcttccttgaacttcggtattctcttataccttaatagtgtacgtctgtctgtctgtcgtctttcacgttttgattaaccctctggaaatagaatcgtcacttgtgaggggactgttgtggtgcctccccaagtactg

SEQ ID NO: 48224 - DNA, 599 bp, Chicken  19866894293178_1
  misc_feature (1)..(219): n is any nucleotide
nnnnnnnnnnnnnnnnnnnnnnnnnnnnnnnnnnnnnnnnnnnnnnnnnnnnnnnnnnnnnnnnnnnnnnnnnnnnnnnnnnnnnnnnnnnnnnnnnnnnnnnnnnnnnnnnnnnnnnnnnnnnnnnnnnnnnnnnnnnnnnnnnnnnnnnnnnnnnnnnnnnnnnnnnnnnnnnnnnnnnnnnnnnnnnnnnnnnnnnnnnnnnnnnnnnnnnnnnnngtgaattcttggtgatgctgagtggtgccggcccctatggctctgaaccagagaactctgatgtctgaaaacagcagggcrgtttgtggaagtgtttctttgcctttggttcgtcttgctttagagatgagcagagagctggatctgacaggatgtaaaatggagagatttggtgtaggagcktggatggggtgcaaggatggattcttacatgccctggaatttgtagtgtggggaggaaaggatggataacccatatttccatgcacaactcctctctgtgacattgaattataatcttttaaaatatgttttcttttttagctcagcccttgtttatctgctttgaaagctttaaggattagctgagtgcatgatat

SEQ ID NO: 48225 - DNA, 599 bp, Chicken  19866894293178_2
  misc_feature (1)..(117): n is any nucleotide
nnnnnnnnnnnnnnnnnnnnnnnnnnnnnnnnnnnnnnnnnnnnnnnnnnnnnnnnnnnnnnnnnnnnnnnnnnnnnnnnnnnnnnnnnnnnnnnnnnnnnnnnnnnnnnnnnnnnngtgaattcttggtgatgctgagtggtgccggcccctatggctctgaaccagagaactctgatgtctgaaaacagcagggcrgtttgtggaagtgtttctttgcctttggttcgtcttgctttagagatgagcagagagctggatctgacaggatgtaaaatggagagatttggtgtaggagcktggatggggtgcaaggatggattcttacatgccctggaatttgtagtgtggggaggaaaggatggataacccatatttccatgcacaactcctctctgtgacattgaattataatcttttaaaatatgttttcttttttagctcagcccttgtttatctgctttgaaagctttaaggattagctgagtgcatgatatatccatcacttgattatttaactgatatttcagatgtatttgggattgagaggagagccaggargtgggctgagtgtttaaaatgtaagagcccaggaaatc

SEQ ID NO: 48226 - DNA, 600 bp, Chicken  19866894293178_3
ctgacaggatgtaaaatggagagatttggtgtaggagcktggatggggtgcaaggatggattcttacatgccctggaatttgtagtgtggggaggaaaggatggataacccatatttccatgcacaactcctctctgtgacattgaattataatcttttaaaatatgttttcttttttagctcagcccttgtttatctgctttgaaagctttaaggattagctgagtgcatgatatatccatcacttgattatttaactgatatttcagatgtatttgggattgagaggagagccaggargtgggctgagtgtttaaaatgtaagagcccaggaaatctgcttcctgtgctgcatcctgtgcttctccccacacccaggcactgctgggtctgctctggccatggtgtgctggaggctctgctggtgcccccaggccctgcactgtttctcccatccccctgggaatgcaggaggcttctgtactgggtgcacttaagagaaacagctgcaggctatgggaactcgggtaccagccttaaagcctctgtgttgggtcagaggataatgcagcactcaacacaggctcggtatttcccctg

SEQ ID NO: 48227 - DNA, 599 bp, Chicken  19866894293179_1
  misc_feature (1)..(100): n is any nucleotide
nnnnnnnnnnnnnnnnnnnnnnnnnnnnnnnnnnnnnnnnnnnnnnnnnnnnnnnnnnnnnnnnnnnnnnnnnnnnnnnnnnnnnnnnnnnnnnnnnnnnatcctgggcgcgattctcctctcactggtgaccgcagctccactgctggaagagaaccgttctgatgtatggggagagaacctttctaatttatagggctgctcagtgagaccagaatcggggccttccccccacgtcccaaggcctcactgcaggtcctgggcactgcctgggggccgggcactctccatgggatcccrgccatggggacagctctcccaccatggccctgggactgtggctcacrtgcacctcgtggacctgctcctgctgctggctgctgccaacgggctgtgcgaagtcccgaagcagccttcgtctttacttcaaatccgttacaaaaaagcaattaattcccagggtgagcactgctccgcaaacatatgtgtgtgttctagtggaaatgaccaagtcatacgctcagccaaatttgcaaatcctggtagaagctatggaacaaacctgtatcttaactgaatcctcagcagtgcgttgcgag

SEQ ID NO: 48228 - DNA, 599 bp, Chicken  19866894293179_2
  misc_feature (1)..(53): n is any nucleotide
nnnnnnnnnnnnnnnnnnnnnnnnnnnnnnnnnnnnnnnnnnnnnnnnnnnnnatcctgggcgcgattctcctctcactggtgaccgcagctccactgctggaagagaaccgttctgatgtatggggagagaacctttctaatttatagggctgctcagtgagaccagaatcggggccttccccccacgtcccaaggcctcactgcaggtcctgggcactgcctgggggccgggcactctccatgggatcccrgccatggggacagctctcccaccatggccctgggactgtggctcacrtgcacctcgtggacctgctcctgctgctggctgctgccaacgggctgtgcgaagtcccgaagcagccttcgtctttacttcaaatccgttacaaaaaagcaattaattcccagggtgagcactgctccgcaaacatatgtgtgtgttctagtggaaatgaccaagtcatacgctcagccaaatttgcaaatcctggtagaagctatggaacaaacctgtatcttaactgaatcctcagcagtgcgttgcgagctgcgcgctgggaccggcggagagcaaggcagcagcactttgaagca

SEQ ID NO: 48229 - DNA, 599 bp, Chicken  19866894293181_1
  misc_feature (1)..(80): n is any nucleotide
nnnnnnnnnnnnnnnnnnnnnnnnnnnnnnnnnnnnnnnnnnnnnnnnnnnnnnnnnnnnnnnnnnnnnnnnnnnnnnnnagggctataagaaagaaggggacagactctatagcagggtctgttgggataggacaagggaaaatgttttcaaactaaacaaggataaatttacattggatataaggaagaagtttcctaatgataagggtaatgaagcactggaacaggttgcccagagaggtggtggatgccccgtccctggagacactcaaggtcagattggttggggctctgagtkatctgaggggatctggactasatagagtttaaaggtcccttttggctcaaataattctacaattctataattttcaactactaagttgggtttttttcccttcatagtctaattatgaatctattaatctaatggcaagtatcatccactgcttgactgtacatgtacagccttccaaaggatagagtcatttaatttaaattgctgaaatctggccagtgaacaagaatatgtggtgtgcattctttctttattccatcaggaatactccttaacatactcattcaaaaaatactttt

SEQ ID NO: 48230 - DNA, 599 bp, Chicken  19866894293181_2
  misc_feature (1)..(59): n is any nucleotide
nnnnnnnnnnnnnnnnnnnnnnnnnnnnnnnnnnnnnnnnnnnnnnnnnnnnnnnnnnnagggctataagaaagaaggggacagactctatagcagggtctgttgggataggacaagggaaaatgttttcaaactaaacaaggataaatttacattggatataaggaagaagtttcctaatgataagggtaatgaagcactggaacaggttgcccagagaggtggtggatgccccgtccctggagacactcaaggtcagattggttggggctctgagtkatctgaggggatctggactasatagagtttaaaggtcccttttggctcaaataattctacaattctataattttcaactactaagttgggtttttttcccttcatagtctaattatgaatctattaatctaatggcaagtatcatccactgcttgactgtacatgtacagccttccaaaggatagagtcatttaatttaaattgctgaaatctggccagtgaacaagaatatgtggtgtgcattctttctttattccatcaggaatactccttaacatactcattcaaaaaatacttttttattttacttatatgaattt

SEQ ID NO: 48231 - DNA, 600 bp, Chicken  19866894293190_1
aaaaagcaatatccagcctctgtatccataaaagatgtactcctcatataacggcatggatggcaaagccgttttcctcaagaaagttacagtgaaatacacacagttaaaatacctagggagaatatatgtgaagcacaggacagaaaaacaggagcaggaccatcaggattgcaaatcaaaggagatgttaagatttcagagtagacaagttctctaaaacatctcaggcacactgcctgtaacaacataacccaactatgctcttccattcttcatcctcgaaggacttatttgatsttattggtctgagaaatgagaccatgataaaaacaaaagatgttgccaaagattcctgagaaaatttacaggagatgattcacatgaagcgttcagcctcaaatactggacatcattcagaacagtgctgtcttccaaaaagccaacacttcctccagctgcagtaataataatcttgctcgtgtctctttaacaaagaacacgtgctgtctctcatgctgtctttagtcatcacaaatgaatacaagtcataagagacaaaaaaagacttaaaagagcaatgttctttttgttaaaggt

SEQ ID NO: 48232 - DNA, 599 bp, Chicken  19866894293194_1
  misc_feature (1)..(64): n is any nucleotide
nnnnnnnnnnnnnnnnnnnnnnnnnnnnnnnnnnnnnnnnnnnnnnnnnnnnnnnnnnnnnnnncgtcttgacgtatttctcggaaataccattattcaagtaggctataaaagccacaattactgaagtagagagaagaggcagtaccgaaatccctgaactctttcctttacaatgtggcactaacaggaagcagtgctatttcccactttaaactgtccaaaatgaaaatgttccaaggaaacagcgacatcatactgcagaacatttataccttatgcttgcaattgggcactacrtttatctttcttataagcaattaaccatcytttctccctcactgcaataggtcagctatgcagatagccatttaaattagttacaaggacagctgtacttggcagagtggaagtagggatgtgtcttttccttcacttggaaaaaaaaaaatctcttttcctagaaaagtgatctaaatgaatgtgacctggtacttgtgctgtactgaagaactcaggaagaagatacgcatccttgaactgaacattcagttcttctatcggcaatagcagtaaaacagccacaaccaccagatttc

SEQ ID NO: 48233 - DNA, 599 bp, Chicken  19866894293194_2
  misc_feature (1)..(34): n is any nucleotide
nnnnnnnnnnnnnnnnnnnnnnnnnnnnnnnnnncgtcttgacgtatttctcggaaataccattattcaagtaggctataaaagccacaattactgaagtagagagaagaggcagtaccgaaatccctgaactctttcctttacaatgtggcactaacaggaagcagtgctatttcccactttaaactgtccaaaatgaaaatgttccaaggaaacagcgacatcatactgcagaacatttataccttatgcttgcaattgggcactacrtttatctttcttataagcaattaaccatcytttctccctcactgcaataggtcagctatgcagatagccatttaaattagttacaaggacagctgtacttggcagagtggaagtagggatgtgtcttttccttcacttggaaaaaaaaaaatctcttttcctagaaaagtgatctaaatgaatgtgacctggtacttgtgctgtactgaagaactcaggaagaagatacgcatccttgaactgaacattcagttcttctatcggcaatagcagtaaaacagccacaaccaccagatttcatctstgtgttaagatgaaagctctgctgt

SEQ ID NO: 48234 - DNA, 600 bp, Chicken  19866894293194_3
tctttcttataagcaattaaccatcytttctccctcactgcaataggtcagctatgcagatagccatttaaattagttacaaggacagctgtacttggcagagtggaagtagggatgtgtcttttccttcacttggaaaaaaaaaaatctcttttcctagaaaagtgatctaaatgaatgtgacctggtacttgtgctgtactgaagaactcaggaagaagatacgcatccttgaactgaacattcagttcttctatcggcaatagcagtaaaacagccacaaccaccagatttcatctstgtgttaagatgaaagctctgctgttgttttaacctattcaacaacatattccaaactcccgatttctaatcttaacacaggtatgtcattcatcttggagaaaatccatacaaggactggctgcttcactggcagagctctagcaaagcactgtgttctaaaggcgaacagttgaatcrccagttccttcttttgttaaagctgaagtagttaacttgtagacgtgttgctatcaactgaacagcttaagacttctgagtgcatataatcatgtcccttagaagtccctgatagtgttg

SEQ ID NO: 48235 - DNA, 600 bp, Chicken  19866894293194_4
tgacctggtacttgtgctgtactgaagaactcaggaagaagatacgcatccttgaactgaacattcagttcttctatcggcaatagcagtaaaacagccacaaccaccagatttcatctstgtgttaagatgaaagctctgctgttgttttaacctattcaacaacatattccaaactcccgatttctaatcttaacacaggtatgtcattcatcttggagaaaatccatacaaggactggctgcttcactggcagagctctagcaaagcactgtgttctaaaggcgaacagttgaatcrccagttccttcttttgttaaagctgaagtagttaacttgtagacgtgttgctatcaactgaacagcttaagacttctgagtgcatataatcatgtcccttagaagtccctgatagtgttgagtatttgcagtgcattaatacacttaatctgtcactgtaacatattgctacaataaagaaatctcaacttatttcattgcttttacacctataaactgttaaagtggaatattctacacagtcatcacatatgctacttcactaagatacacatgtgaagaaaacagtgtaaatcaaga

SEQ ID NO: 48236 - DNA, 600 bp, Chicken  19866894293200_1
attttatataagattgaggaggccacatgaaaagtgctgcagggagttgttaatcaaaaccatcctaattcgtaaatcaaaaataaaatacagcaactgtttgctctaaatgtcattgtacttcatggaatgaatgtctttgggggggaaaaaacttccaagttgctggagctttgggcaacctgatagtagtgagtggcaacactgtccatggctggggtttggagccaggtgatcttcaaggtcacttccagcccaaatcattcaatgatttctgtaactaaaaatgattaatttaartgttactttattgtaaatgcttttttgcattctgttctggattataaatgattatttaatactttacaagttacctgcaacatagtgattttcagtgcttgtcttttgtgacttttactcctttggagtaactgtttgccatatacagattgtgcttcctctttagggagaatctcatcagtattgctgagctaattaatgcaatgaaacaaatccagaagattccagaggagaagctaacgaggattgcagaggcattagatgaaaacaaagatggcaaaattgatatagataatgttg

SEQ ID NO: 48237 - DNA, 599 bp, Chicken  19866894293201_1
  misc_feature (1)..(194): n is any nucleotide
nnnnnnnnnnnnnnnnnnnnnnnnnnnnnnnnnnnnnnnnnnnnnnnnnnnnnnnnnnnnnnnnnnnnnnnnnnnnnnnnnnnnnnnnnnnnnnnnnnnnnnnnnnnnnnnnnnnnnnnnnnnnnnnnnnnnnnnnnnnnnnnnnnnnnnnnnnnnnnnnnnnnnnnnnnnnnnnnnnnnnnnnnnnnnnnnnncctctgcggaaacaacccgggcgctgccctcggagatgcgcggagtgcggagggaacggggagagcacggaccgagtgcttggagagatggaggacgtacgcctayatacgtgcgcgtgtgcgtacgtctacgcatacacatacacgtgaaatctgttccgtgcgyccgaaaacgagtcggccttaatttagaactcggagctgcaatggaggtggtttaatggagatttaatttttccgaggaccaaagctggatgtcggaggggttcggttcggtccggtccggccttcccgcatcccctgcgcgggtgctgagcgcggtgcccggccctgtccggccgctgctcgctctgatccggctgcgtgctctctgccggggccgcgcattattgcggaacactgtca

SEQ ID NO: 48238 - DNA, 599 bp, Chicken  19866894293201_2
  misc_feature (1)..(134): n is any nucleotide
nnnnnnnnnnnnnnnnnnnnnnnnnnnnnnnnnnnnnnnnnnnnnnnnnnnnnnnnnnnnnnnnnnnnnnnnnnnnnnnnnnnnnnnnnnnnnnnnnnnnnnnnnnnnnnnnnnnnnnnnnnnnnnnnnnnnnncctctgcggaaacaacccgggcgctgccctcggagatgcgcggagtgcggagggaacggggagagcacggaccgagtgcttggagagatggaggacgtacgcctayatacgtgcgcgtgtgcgtacgtctacgcatacacatacacgtgaaatctgttccgtgcgyccgaaaacgagtcggccttaatttagaactcggagctgcaatggaggtggtttaatggagatttaatttttccgaggaccaaagctggatgtcggaggggttcggttcggtccggtccggccttcccgcatcccctgcgcgggtgctgagcgcggtgcccggccctgtccggccgctgctcgctctgatccggctgcgtgctctctgccggggccgcgcattattgcggaacactgtcacctgcctaattgttctaaatggccacctcctattattaataatagctggaacgtggctcc

SEQ ID NO: 48239 - DNA, 600 bp, Chicken  19866894293209_1
tcagaagctcacactaaaataatgaaataaaatgctggatatagcatttcccaccagctattatagaagaagaattgggctccaaataaattaggaaaactattagcatagcaatgtatgagatatataacaacatgataagaatactttaatcctgcagactctacttagtttctttcaagaaaaaaaaaatcaagaaaaaaacactgaagatcattgttaagagcactggattttgttttgaaataaattcacaaaagaaagaatcagttaaaaaaaacctttttttctatgtattascattttaatatttacttattaaccagtttttaaaatgcagacaaacatcacgttaccaaaattgtawgaaaactgttccaccacaggtactcaggaacaacaagtttaatagtcctatatttttttcgttgttgacagaagggcacaagggcattgaatatattgtgtatatttctatttctattcctcagcttctttggcttacacactcctgacagcctgaagcaatggctgacctgctgctgttgggcatcagtaggatgtcatatgcaagtggcaagagtaggccaggaaaaacct

SEQ ID NO: 48240 - DNA, 600 bp, Chicken  19866894293209_2
agaagaattgggctccaaataaattaggaaaactattagcatagcaatgtatgagatatataacaacatgataagaatactttaatcctgcagactctacttagtttctttcaagaaaaaaaaaatcaagaaaaaaacactgaagatcattgttaagagcactggattttgttttgaaataaattcacaaaagaaagaatcagttaaaaaaaacctttttttctatgtattascattttaatatttacttattaaccagtttttaaaatgcagacaaacatcacgttaccaaaattgtawgaaaactgttccaccacaggtactcaggaacaacaagtttaatagtcctatatttttttcgttgttgacagaagggcacaagggcattgaatatattgtgtatatttctatttctattcctcagcttctttggcttacacactcctgacagcctgaagcaatggctgacctgctgctgttgggcatcagtaggatgtcatatgcaagtggcaagagtaggccaggaaaaacctttttcacaaaaggtaaattgtgcaaaaatactggaatggggataaatgttggaaaacgagaaggaaa

SEQ ID NO: 48241 - DNA, 600 bp, Chicken  19866894293215_1
gctacaagaaatgatatggtattttgtaacagaaccaactgtaacctcagatttgtaattggaactagtacctatagttaattcatgcagcagatcagtagatataattctgacagataatgatttcctccactgaaaataattagaatttattaatacatatatgaatttgatagaaaacatacattttttgcatgtaaaacatgtaaaactttgcacgcatactttcaagctaaaaatgccatacgatcttataacagttgccaccagactactataaataatgtctccaattggggraaaaaagcacaattttaacagcagatatagattgaaatgaaacaataaagaggttttcagattgctattgccagtaggattggctatgccattgattttgattctgaaaacacataaaatagaaaatctcaaacagaatgaattctgctaatacagttgagttgttaatcttcagagagactacactaagatacttaaatcaatagtttaaatagatgagagtacaayagattataaacccatagcagagatttgatcatatttrttattgagaccagttactgaagaggcctttctttc

SEQ ID NO: 48242 - DNA, 600 bp, Chicken  19866894293215_2
caagctaaaaatgccatacgatcttataacagttgccaccagactactataaataatgtctccaattggggraaaaaagcacaattttaacagcagatatagattgaaatgaaacaataaagaggttttcagattgctattgccagtaggattggctatgccattgattttgattctgaaaacacataaaatagaaaatctcaaacagaatgaattctgctaatacagttgagttgttaatcttcagagagactacactaagatacttaaatcaatagtttaaatagatgagagtacaayagattataaacccatagcagagatttgatcatatttrttattgagaccagttactgaagaggcctttctttcagacttcctgtaaatacagatgatccagcaaaaattctaagggttttagatttttatcaatcatctcttgctttctttaaaggcagctcatcccactaatgtttaagaaacacatttaatgattttgttcttcatgtttcattgtttttatggccaattttcagttctggcaactgtaaaaggttatcctcatgtacagctgagaacagagaaagatatggggatacg

SEQ ID NO: 48243 - DNA, 600 bp, Chicken  19866894293215_3
accagactactataaataatgtctccaattggggraaaaaagcacaattttaacagcagatatagattgaaatgaaacaataaagaggttttcagattgctattgccagtaggattggctatgccattgattttgattctgaaaacacataaaatagaaaatctcaaacagaatgaattctgctaatacagttgagttgttaatcttcagagagactacactaagatacttaaatcaatagtttaaatagatgagagtacaayagattataaacccatagcagagatttgatcatatttrttattgagaccagttactgaagaggcctttctttcagacttcctgtaaatacagatgatccagcaaaaattctaagggttttagatttttatcaatcatctcttgctttctttaaaggcagctcatcccactaatgtttaagaaacacatttaatgattttgttcttcatgtttcattgtttttatggccaattttcagttctggcaactgtaaaaggttatcctcatgtacagctgagaacagagaaagatatggggatacgcaaaccttttcaatagcccttgcaatacatcagtcaa

SEQ ID NO: 48244 - DNA, 599 bp, Chicken  19866894293216_1
  misc_feature (1)..(53): n is any nucleotide
nnnnnnnnnnnnnnnnnnnnnnnnnnnnnnnnnnnnnnnnnnnnnnnnnnnnnccttccagtacttgaagggagcatataaacaggaaggggaacggctatttacgagggtggatagtgataggacaagggggaatggttttaaactgtggcaggggaggtttaggttggatattaggaagaagtttttcacccagagagtggtgacgcactggaacgggttgcccaaggaggttgtggatgccccatccctggaggcattcaaggccaggctgaatgtggctctgggcagcctggtctrgtggtyggtgaccctgcacatagcaggggggttgaaactcatgaatgaaatgatccttgtggtccttttcaacccaggccattctatgattctgtgattctatgattctataatcctatgattctaatccagccagtgcccacaagccaagaccaaaatgctactgtgcaagccaaaagacctgccactaatactctagaaaacctcaccaactagctacactggggctggactgtaaatgaaagtgtaaaactccattataccctctaccatctacaatcagcacaacgtgctccaga

SEQ ID NO: 48245 - DNA, 599 bp, Chicken  19866894293216_2
  misc_feature (1)..(47): n is any nucleotide
nnnnnnnnnnnnnnnnnnnnnnnnnnnnnnnnnnnnnnnnnnnnnnnccttccagtacttgaagggagcatataaacaggaaggggaacggctatttacgagggtggatagtgataggacaagggggaatggttttaaactgtggcaggggaggtttaggttggatattaggaagaagtttttcacccagagagtggtgacgcactggaacgggttgcccaaggaggttgtggatgccccatccctggaggcattcaaggccaggctgaatgtggctctgggcagcctggtctrgtggtyggtgaccctgcacatagcaggggggttgaaactcatgaatgaaatgatccttgtggtccttttcaacccaggccattctatgattctgtgattctatgattctataatcctatgattctaatccagccagtgcccacaagccaagaccaaaatgctactgtgcaagccaaaagacctgccactaatactctagaaaacctcaccaactagctacactggggctggactgtaaatgaaagtgtaaaactccattataccctctaccatctacaatcagcacaacgtgctccagagcttgt

SEQ ID NO: 48246 - DNA, 600 bp, Chicken  19866894293224_1
ttgtgcttgacagtgcctagagacttgtggataaaaatcaaatccatttaaagaaacctacttttcttaggacctgtggcttttcatgtacttatttgaaagaaggagagagactgcatattatggaaggggaggagggcaggtctgcctttgcagcatccagttctggcattagcctttgtaattcaattcattttaataggtctgcttccttgcctaacaggaatgcatacgtaaggttacattcaataaaacatccagatggctctgataccacagactccttcagaacatgccctrtgatcagatattttacttgttatacaggcatctgtcaaatggggagacgaaacagagtttattgaatctagtccttagtgttaggaaggaaacaaaagaaattgtctggctgccacagaaatttttcatattatagctgatggcacagaacacacactttgctttcaggtccaactaagcctcatatatgattagatattaacacattaaatgtagcaggaaaagaaatgctttcagccacatgcaaagttagacaaagagtgtccactccactcaacatactgacttgaggcttcactg

SEQ ID NO: 48247 - DNA, 600 bp, Chicken  19866894293225_1
attttgcatgtatcaaaagtagttccccttaagagtatgatgatgattcttttaaagaaacccatgtgcttaggaacatattcatgcattaaggaataaatgaatgaaggcatgcaaataatattttaatttacataaaatttcacaattagaccaccagtctcaaattatttacatgcttaaacaagtacactgcattttgctcatttccatagggaaaacatgaagcctacagatacacgaaatattttaaaaactgtaattatcgctatcaggatcaacatttctcttagaaaagarctcagctgttttactttcacaaagtttcataataaaatggaagtgtaagacgacctgcatggcttgctatttaaaatagaacttgctgaagcaaggagtgggaattcaagagtttaagagtgagaattaataccacacgcaacaggaacaagcaagtaaagaaagacaacaggctacttactcggagccactccaccatattctcctcaatttcactatcagctgatatatctaatatcaggcgccttgttaagtgagctttgtgatatcgcatgaaaacgtctttattctgtacatatt

SEQ ID NO: 48248 - DNA, 600 bp, Chicken  19866894293228_1
ttgccccagtggagcttaataactagtgaaatgagctcgggtttttgtttgtttggggctattgagaagaaaggttaactttaaatgtgtacataaatatgtgaggcatactacatgaaaagattgtaaatggttttgtggcttctgggaacagtaaacaaaagcctggagaccttgtttggtgctcaggaagagattgcttttttgttttttaagctgcaggccaagggggaagcgtgaatccaggggcagctactcaactgctgttaaggtgactcaagtaattgctccaaatacttrtggcagtggctgcccagtgaaggcactgctggggaagaaaacatcagtaaggttgtcttcgaggaagagtggtggtctgtgagtcatcccaggctcttctgtgtctcccatgacatctttgtcagtttattaacgtgggtagagaagcccagggaaaaggtgaatgcagaggttgtttttcaagagcaaggcacagagcgtgcaaacttacactttcytctcaaaatcagctccttttcacatgattctttcaaaattatttcccrctgttgtattatctyagcctcttcagcaccttat

SEQ ID NO: 48249 - DNA, 600 bp, Chicken  19866894293228_2
gcaggccaagggggaagcgtgaatccaggggcagctactcaactgctgttaaggtgactcaagtaattgctccaaatacttrtggcagtggctgcccagtgaaggcactgctggggaagaaaacatcagtaaggttgtcttcgaggaagagtggtggtctgtgagtcatcccaggctcttctgtgtctcccatgacatctttgtcagtttattaacgtgggtagagaagcccagggaaaaggtgaatgcagaggttgtttttcaagagcaaggcacagagcgtgcaaacttacactttcytctcaaaatcagctccttttcacatgattctttcaaaattatttcccrctgttgtattatctyagcctcttcagcaccttatttctgagtttaccagcatgcaagtctggatgcttctgtgcgtatttatatacggaaactcctcgtggcaaatacattgtgcattaaaagcatctgtctaacgctctggagcagaactttggcactagaatatcaaccagacgttgctcctagtgtacttagcattacagtattacgttgagtgcgctgggaaggggactgatagtggaaaattggctc

SEQ ID NO: 48250 - DNA, 600 bp, Chicken  19866894293228_3
ttaaggtgactcaagtaattgctccaaatacttrtggcagtggctgcccagtgaaggcactgctggggaagaaaacatcagtaaggttgtcttcgaggaagagtggtggtctgtgagtcatcccaggctcttctgtgtctcccatgacatctttgtcagtttattaacgtgggtagagaagcccagggaaaaggtgaatgcagaggttgtttttcaagagcaaggcacagagcgtgcaaacttacactttcytctcaaaatcagctccttttcacatgattctttcaaaattatttcccrctgttgtattatctyagcctcttcagcaccttatttctgagtttaccagcatgcaagtctggatgcttctgtgcgtatttatatacggaaactcctcgtggcaaatacattgtgcattaaaagcatctgtctaacgctctggagcagaactttggcactagaatatcaaccagacgttgctcctagtgtacttagcattacagtattacgttgagtgcgctgggaaggggactgatagtggaaaattggctcctgccaaggcaagtgtttgtacactgatactcgttggacatgcatcaa

SEQ ID NO: 48251 - DNA, 600 bp, Chicken  19866894293228_4
taattgctccaaatacttrtggcagtggctgcccagtgaaggcactgctggggaagaaaacatcagtaaggttgtcttcgaggaagagtggtggtctgtgagtcatcccaggctcttctgtgtctcccatgacatctttgtcagtttattaacgtgggtagagaagcccagggaaaaggtgaatgcagaggttgtttttcaagagcaaggcacagagcgtgcaaacttacactttcytctcaaaatcagctccttttcacatgattctttcaaaattatttcccrctgttgtattatctyagcctcttcagcaccttatttctgagtttaccagcatgcaagtctggatgcttctgtgcgtatttatatacggaaactcctcgtggcaaatacattgtgcattaaaagcatctgtctaacgctctggagcagaactttggcactagaatatcaaccagacgttgctcctagtgtacttagcattacagtattacgttgagtgcgctgggaaggggactgatagtggaaaattggctcctgccaaggcaagtgtttgtacactgatactcgttggacatgcatcaattcgagttctggctt

SEQ ID NO: 48252 - DNA, 600 bp, Chicken  19866894293229_1
tgcattacactcagcatcaggaccataatgttgtgactggggctttggaattactacaacagctctttagaacaccgccacctgaacttctccatgccttgacttctttaggtggcattgcacaggtcagtgtatccaaagatgaatctgccatcaggagccgcagtgggagcatagtggagctcataggtaagatgtattttcagtaatttgagttaaattgagatgacaggctctttccttgatgtaatctgaaagtatgaagtataaaatagaaagtgtagcatttttccaggtgcwgggtaagattccctmctgtccccccctttaagtgggtatgcatctgttgagtaatgagaaactccgaagtaaattttttttgttggtgttttcttatttacacagagcaagttaatggtggtgactgattttttttttcacaacatttatgttcttttcactaagcacctggcaattgtgattcacagaaagctgatctaaccagaatttatgtatcaactctatatactaactaagagttttgtgctgaataagaaaaccagcatggaactaaagcatgaccttaatttatccataact

SEQ ID NO: 48253 - DNA, 600 bp, Chicken  19866894293229_2
atcaggaccataatgttgtgactggggctttggaattactacaacagctctttagaacaccgccacctgaacttctccatgccttgacttctttaggtggcattgcacaggtcagtgtatccaaagatgaatctgccatcaggagccgcagtgggagcatagtggagctcataggtaagatgtattttcagtaatttgagttaaattgagatgacaggctctttccttgatgtaatctgaaagtatgaagtataaaatagaaagtgtagcatttttccaggtgcwgggtaagattccctmctgtccccccctttaagtgggtatgcatctgttgagtaatgagaaactccgaagtaaattttttttgttggtgttttcttatttacacagagcaagttaatggtggtgactgattttttttttcacaacatttatgttcttttcactaagcacctggcaattgtgattcacagaaagctgatctaaccagaatttatgtatcaactctatatactaactaagagttttgtgctgaataagaaaaccagcatggaactaaagcatgaccttaatttatccataactttaaaaatctgttat

SEQ ID NO: 48254 - DNA, 543 bp, Chicken  19866894293229_3
caacatttatgttcttttcactaagcacctggcaattgtgattcacagaaagctgatctaaccagaatttatgtatcaactctatatactaactaagagttttgtgctgaataagaaaaccagcatggaactaaagcatgaccttaatttatccataactttaaaaatctgttattaatcttctagtctgtgaagtgcacgttcttaaaattgtcttttaactgctacttaactgtttcaaaagaatcagcctctgactggatttctgtaaggacttctttgaactatcagatcattctrgtattgctgctcttagaaggtaattcataagccaggagcaatcatagcagtgaaattaagaacacttttttttttttttttttaaagcaaactttgctcaagttgcatagaaaattaaaaagtcatttgacggtgcatgatgcaggaaaaaaaaccaacccaacttcataagcagcaagtttgctattttttcctggctttgtattttcttttaacttcccatctgggctgttagaattcctt

SEQ ID NO: 48255 - DNA, 599 bp, Chicken  19866894293231_1
  misc_feature (1)..(174): n is any nucleotide
nnnnnnnnnnnnnnnnnnnnnnnnnnnnnnnnnnnnnnnnnnnnnnnnnnnnnnnnnnnnnnnnnnnnnnnnnnnnnnnnnnnnnnnnnnnnnnnnnnnnnnnnnnnnnnnnnnnnnnnnnnnnnnnnnnnnnnnnnnnnnnnnnnnnnnnnnnnnnnnnnnnnnnnnnnnnnnaggggcttggctactacatcaggccactccctcaggactctgggatgcatctcatttggaccataggcttgtagatgttcaggtttctcaggtggtgacaaacatgatcttcacttacagtgggarggatatttcttcttcaggcccctccttccaaaccrcacatttcagggctatgtgatgagcagttatcagagaagaccgaggcaaaaaaagttgctgattacttcagttttcttcttgtctgttgttaccagcttgcttgtgtcatatgctgcataaaagtggttattgagaacaatcatgtctcttgcttgtctgtactcttcagagtactttatagttttggtacctggtaatgaaaaatagtttagctctccaagcagttgtaactatatagaaatgcttacttacttgtagaggaa

SEQ ID NO: 48256 - DNA, 599 bp, Chicken  19866894293231_2
  misc_feature (1)..(139): n is any nucleotide
nnnnnnnnnnnnnnnnnnnnnnnnnnnnnnnnnnnnnnnnnnnnnnnnnnnnnnnnnnnnnnnnnnnnnnnnnnnnnnnnnnnnnnnnnnnnnnnnnnnnnnnnnnnnnnnnnnnnnnnnnnnnnnnnnnnnnnnnnnnaggggcttggctactacatcaggccactccctcaggactctgggatgcatctcatttggaccataggcttgtagatgttcaggtttctcaggtggtgacaaacatgatcttcacttacagtgggarggatatttcttcttcaggcccctccttccaaaccrcacatttcagggctatgtgatgagcagttatcagagaagaccgaggcaaaaaaagttgctgattacttcagttttcttcttgtctgttgttaccagcttgcttgtgtcatatgctgcataaaagtggttattgagaacaatcatgtctcttgcttgtctgtactcttcagagtactttatagttttggtacctggtaatgaaaaatagtttagctctccaagcagttgtaactatatagaaatgcttacttacttgtagaggaattaactggatttaaaatcactttacacttacgtgt

SEQ ID NO: 48257 - DNA, 599 bp, Chicken  19866894293231_3
  misc_feature (1)..(91): n is any nucleotide
nnnnnnnnnnnnnnnnnnnnnnnnnnnnnnnnnnnnnnnnnnnnnnnnnnnnnnnnnnnnnnnnnnnnnnnnnnnnnnnnnnnnnnnnnnnaggggcttggctactacatcaggccactccctcaggactctgggatgcatctcatttggaccataggcttgtagatgttcaggtttctcaggtggtgacaaacatgatcttcacttacagtgggarggatatttcttcttcaggcccctccttccaaaccrcacatttcagggctatgtgatgagcagttatcagagaagaccgaggcraaaaaagttgctgattacttcagttttcttcttgtctgttgttaccagcttgcttgtgtcatatgctgcataaaagtggttattgagaacaatcatgtctcttgcttgtctgtactcttcagagtactttatagttttggtacctggtaatgaaaaatagtttagctctccaagcagttgtaactatatagaaatgcttacttacttgtagaggaattaactggatttaaaatcactttacacttacgtgtctctttacctctggataaattagacaaactgactaatctaacatgcca

SEQ ID NO: 48258 - DNA, 493 bp, Chicken  19866894293231_4
acttcagttttcttcttgtctgttgttaccagcttgcttgtgtcatatgctgcataaaagtggttattgagaacaatcatgtctcttgcttgtctgtactcttcagagtactttatagttttggtacctggtaatgaaaaatagtttagctctccaagcagttgtaactatatagaaatgcttacttacttgtagaggaattaactggatttaaaatcactttacacttacgtgtctctttacctctggataaattagacaaactgactaatctaacatgccaacaaagaagtacttctratttacttaacctgatgcagacagaaaacaaagctttcaaaactggccacctttcaccagtaagcccaagcatttcctactcagttcctgtttggacagggaattttgacactggtcctaacttggtagttttcatcagtggttggtggctatttctaatcttcagcaatgatttaacaattgaaaagaaatt

SEQ ID NO: 48259 - DNA, 599 bp, Chicken  19866894293237_1
  misc_feature (1)..(147): n is any nucleotide
nnnnnnnnnnnnnnnnnnnnnnnnnnnnnnnnnnnnnnnnnnnnnnnnnnnnnnnnnnnnnnnnnnnnnnnnnnnnnnnnnnnnnnnnnnnnnnnnnnnnnnnnnnnnnnnnnnnnnnnnnnnnnnnnnnnnnnnnnnnnnnnnnnnctttaatttaaatgcccaaaatctacatgcagacatacagtcaagtgataagaaacttaatattattctaaaatgagacaagttctctagttaaatcacaacaacatcctgaaaagaaaaaaaaaggacagttgccacaaaataatatcttaraaagcactaatgagaagtctttaaacttttagacaccrgtttatactacatactacttctcttctgtgctcaggatatgtgaggatatccatggaatgcaacccagatattatcctcttttcwgtgtaagcctttctaaaacatcaaaactggtgaggtgaatagattttttttcagccaccaatctgttaattacaaatgagtttgtctggctgagttgggaaaggacggagagcagtcacccgtgccaacaaatactgaaatagattcaactggtagttgtaattgtcagtattaat

SEQ ID NO: 48260 - DNA, 599 bp, Chicken  19866894293237_2
  misc_feature (1)..(109): n is any nucleotide
nnnnnnnnnnnnnnnnnnnnnnnnnnnnnnnnnnnnnnnnnnnnnnnnnnnnnnnnnnnnnnnnnnnnnnnnnnnnnnnnnnnnnnnnnnnnnnnnnnnnnnnnnnnnnctttaatttaaatgcccaaaatctacatgcagacatacagtcaagtgataagaaacttaatattattctaaaatgagacaagttctctagttaaatcacaacaacatcctgaaaagaaaaaaaaaggacagttgccacaaaataatatcttaraaagcactaatgagaagtctttaaacttttagacaccrgtttatactacatactacttctcttctgtgctcaggatatgtgaggatatccatggaatgcaacccagatattatcctcttttcwgtgtaagcctttctaaaacatcaaaactggtgaggtgaatagattttttttcagccaccaatctgttaattacaaatgagtttgtctggctgagttgggaaaggacggagagcagtcacccgtgccaacaaatactgaaatagattcaactggtagttgtaattgtcagtattaatcttccattcttggttttaaatagaaccataattctaya

SEQ ID NO: 48261 - DNA, 599 bp, Chicken  19866894293237_3
  misc_feature (1)..(24): n is any nucleotide
nnnnnnnnnnnnnnnnnnnnnnnnctttaatttaaatgcccaaaatctacatgcagacatacagtcaagtgataagaaacttaatattattctaaaatgagacaagttctctagttaaatcacaacaacatcctgaaaagaaaaaaaaaggacagttgccacaaaataatatcttaraaagcactaatgagaagtctttaaacttttagacaccrgtttatactacatactacttctcttctgtgctcaggatatgtgaggatatccatggaatgcaacccagatattatcctcttttcwgtgtaagcctttctaaaacatcaaaactggtgaggtgaatagattttttttcagccaccaatctgttaattacaaatgagtttgtctggctgagttgggaaaggacggagagcagtcacccgtgccaacaaatactgaaatagattcaactggtagttgtaattgtcagtattaatcttccattcttggttttaaatagaaccataattctayatcgtcccatccagggaagacttactctgaagttaatttgaggaaggtaacttctgcagctcccgactcatgaggtccataccaaa

SEQ ID NO: 48262 - DNA, 600 bp, Chicken  19866894293237_4
crgtttatactacatactacttctcttctgtgctcaggatatgtgaggatatccatggaatgcaacccagatattatcctcttttcwgtgtaagcctttctaaaacatcaaaactggtgaggtgaatagattttttttcagccaccaatctgttaattacaaatgagtttgtctggctgagttgggaaaggacggagagcagtcacccgtgccaacaaatactgaaatagattcaactggtagttgtaattgtcagtattaatcttccattcttggttttaaatagaaccataattctayatcgtcccatccagggaagacttactctgaagttaatttgaggaaggtaacttctgcagctcccgactcatgaggtccataccaaaaccacaatatacatcagttattggatccaacctgttgccaaaggactgctgagaaggtggttaatctgaaatccaaactccaacacattttccaggtctgacttgtctccaggctcacagatgtgggcatgccaaagaaaagaaagagccggtgaaaataattactgtcattatttctsggcaacaactttaacatgtataccacttaatatat

SEQ ID NO: 48263 - DNA, 519 bp, Chicken  19866894293237_5
tccattcttggttttaaatagaaccataattctayatcgtcccatccagggaagacttactctgaagttaatttgaggaaggtaacttctgcagctcccgactcatgaggtccataccaaaaccacaatatacatcagttattggatccaacctgttgccaaaggactgctgagaaggtggttaatctgaaatccaaactccaacacattttccaggtctgacttgtctccaggctcacagatgtgggcatgccaaagaaaagaaagagccggtgaaaataattactgtcattatttctsggcaacaactttaacatgtataccacttaatatatttttgtatcttacatgtctgtagatagctttataggtattactggtgtttggacatgtggaagcaaaccagatgccttggcttggcaccaccttaagggttttctgccaatttgcccacttccagtaaaagctgtaaccaaacggatgtttgtgattgtactatcagaagagaagtagactaca

SEQ ID NO: 48264 - DNA, 599 bp, Chicken  19866894293238_1
  misc_feature (1)..(69): n is any nucleotide
nnnnnnnnnnnnnnnnnnnnnnnnnnnnnnnnnnnnnnnnnnnnnnnnnnnnnnnnnnnnnnnnnnnnnaggctgatttttgtcccctgctacttcacattgttgccattgctttatacagcgtgctgaagcatacttctctttgtggagcttctcttccctctgtgcagagcagctgatgtgcaaagcaattatttgggcattagtagggcagagtttgcatcccatagtagatgggcacgcaaagcacttgctatatatcacactgcctctctttcactttttcccctaagctcattkctgccctaacacctagaccatatctcacttcccttaataacatgctttaaatacagcaggacctgcctgcatcagtaataagacctcctttttcaaaactggaagctttagtatttgcaggcggctgctcctgtgatgttttcagcacgttgctaacctatgagcacccgctgctgtaaatagctgaggcctcctgcactgggatttccactgaggctgtgggtgattggcacccacagggcagggcctgagtggggagaggggaaactgctgggccgatggagcaataggtggcttcc

SEQ ID NO: 48265 - DNA, 435 bp, Chicken  19866894293238_2
catcagtaataagacctcctttttcaaaactggaagctttagtatttgcaggcggctgctcctgtgatgttttcagcacgttgctaacctatgagcacccgctgctgtaaatagctgaggcctcctgcactgggatttccactgaggctgtgggtgattggcacccacagggcagggcctgagtggggagaggggaaactgctgggccgatggagcaataggtggcttcctgtgagatgtgggcttctgtattcagtttgtcttaaaaatctgagaaaagttggacttgatgtgagtagrtatatttaaaaataattaaaaagaacccacaattaaacaacagaagagtttattcaaatgtgaaacatcttcaggtatccatggtagggctgctcacgggaaaagtcactgcagttgtaggcagagaaaataata

SEQ ID NO: 48266 - DNA, 599 bp, Chicken  19866894293241_1
  misc_feature (1)..(55): n is any nucleotide
nnnnnnnnnnnnnnnnnnnnnnnnnnnnnnnnnnnnnnnnnnnnnnnnnnnnnnngagatcgggatgtgacctgcaaaccaggactcatgcttgtaatagcagagagcaaatgccagcatttgatctgctgacctcaaatgcagacacacctgttttctggcaagtctaagaagtacactgtaggttagttgttatgaagaaatctttgttcagagggtgatgaggcataagctgtccagagaagctgtggatgccccatctttgaaggcatataaggccaacctggttggggccctggrcagcctgagctagtgaggtagaactagatgattgttaatgtcccttccaacctaagctattctataattctaaggaacaaaatgctaggtagctctgagacagctaacagcaatcagctaaagaaaatatgttaatactacttggaattgttgtgatagagagcagagcttcagttcagaagaactggattttcacaaacaagttctgatcccttttttaaaccatgccgtgagaagcagcactgtgctgatggcttgggtgatttctgagtgtgggttgttcttgttttttaaaggag

SEQ ID NO: 48267 - DNA, 600 bp, Chicken  19866894293248_1
cagcctgtgtgaacagatgagctgggttacaaacaataggaatgagcagcaacacccacaaacacacccagccccatgtggtcagtagttacaccactatgggctgatggcctggagaaaacccatgtaaaatggttggatctcaccaatttctagtaggcatttttatgtaatataatagaagatgacagtggtaagatcagcaaagcgtcataggccacagcatgtgcactgctgtaagtgaccattaaacataatgggttaaaaaaagtggaaatgcctgcaaggcagatgtgagasctcagctcaggctgtacaacaaagaaaaacatatttcaggcaccacaaacagatttctcaccaacacacacacacacaaaacccaccaaatttcaggcactataaccccagactgctcaccaacactgattccatataaaacagcagcagagtctgaggaagaaatarctactatactttgagacatttatattacattttattggctaacatgtaaccttgcagggttatgtaactgagcagctgaagtagctagctgtacagtattacatagtatttgacacaactgtattagcccaa

SEQ ID NO: 48268 - DNA, 600 bp, Chicken  19866894293248_2
tgtaatataatagaagatgacagtggtaagatcagcaaagcgtcataggccacagcatgtgcactgctgtaagtgaccattaaacataatgggttaaaaaaagtggaaatgcctgcaaggcagatgtgagasctcagctcaggctgtacaacaaagaaaaacatatttcaggcaccacaaacagatttctcaccaacacacacacacacaaaacccaccaaatttcaggcactataaccccagactgctcaccaacactgattccatataaaacagcagcagagtctgaggaagaaatarctactatactttgagacatttatattacattttattggctaacatgtaaccttgcagggttatgtaactgagcagctgaagtagctagctgtacagtattacatagtatttgacacaactgtattagcccaaagcataaaatagtaagaggggctttactgagcttaaacaccttatcaacattcctttatcaaaccttgatttacagaaagttttgattctgcaagctccgataacagaatagatcaaatgtgagaggcactgcaaacttcagcacatatacagtaacagctccaagaa

SEQ ID NO: 48269 - DNA, 600 bp, Chicken  19866894293248_3
acatgtaaccttgcagggttatgtaactgagcagctgaagtagctagctgtacagtattacatagtatttgacacaactgtattagcccaaagcataaaatagtaagaggggctttactgagcttaaacaccttatcaacattcctttatcaaaccttgatttacagaaagttttgattctgcaagctccgataacagaatagatcaaatgtgagaggcactgcaaacttcagcacatatacagtaacagctccaagaaagagtaaatacgcttccatttgtgcccttgttttcaccaasatttatctacgttacatttaaagctttgaaaataatgatccatcatggatcacacaagaaacaccgtctgcctatcagagcagagattaacacaacgtccagaaccatcttgttcatgctccacatcttactaaaatccatgaatcaatgacatctggcattatatttgcactaaaactcagcttcaaacgttttctctggagcactggctggatttagctgcattttcttctaacaggaactttagaggaacggagttcaaacctgcacccttagctccccacaacacaagagcacgtg

SEQ ID NO: 48270 - DNA, 600 bp, Chicken  19866894293249_1
atttacattacacgaagactattatttgtatcagtctcaatagcattttaatctgaacaggtgccatgttagtcatggaaatttattttccataattccatattgcttgccattagttataatgtctttttttatttccttattagtcaagcctcataccagctgtttcgttgttttgcgtaggctaaatttgagactgatgagactgtaattccctatgtcttcccccttccccttaatttagaattggcacagctttagctttctaccacttggcttcctcacagctgcaagacttaytggaaaacaatttaaaaagaaaggctgtgaggagcaaaattaaaacgtatacaattattacttaattcttgaaactctatttagttctctcatgctaaaaattgaattatatataatttaatctgcacacagaacacatctttatgcatgaaacaagtaaatatatttaaaaatattttaggaacaacatattcttagatatgtatgcataaaaataatctgattttgcagattgtggcacttgtatgtattttgtctgctgcaggatttctgaaacaggtaaactggcaaaatatagga

SEQ ID NO: 48271 - DNA, 599 bp, Chicken  19866894293253_1
  misc_feature (1)..(131): n is any nucleotide
nnnnnnnnnnnnnnnnnnnnnnnnnnnnnnnnnnnnnnnnnnnnnnnnnnnnnnnnnnnnnnnnnnnnnnnnnnnnnnnnnnnnnnnnnnnnnnnnnnnnnnnnnnnnnnnnnnnnnnnnnnnnnnnnnnnctgcgcccaccctgctgcccccatccccaccttgtcctcatggccgctgccgcccctgtagggtctccagttcttcccatcacggctggaggacacccggtaggacgtcacgtagaagtcatatatctcagcagatcccttggtgacgatccctgttgggcaggatgcrcccttaggtcaccccaacccactccccccccaaaagctccttcctgggcacccacatcccccgctctgccccgaggagccgataaaccccggctgcattccttcctcctccggcccccggtctcacaatgtccccattttcttcctgccggcctttgcacaaagcccccgttggcggcgggctcggctgaacaaaaggcgctcgctggcaccagatgcaagagcataatattgacttgttcatcccagaaatggctgcggtggggaaggaacaaaatggggacaggaaaaagccccgag

SEQ ID NO: 48272 - DNA, 600 bp, Chicken  19866894293255_1
taacttacatagaaaatcgatgtggtttgcaggaagagtacaatattgggtatatagtatgcattgcaatgtgtctcaggctgatcatttgtatggtaggcaataacagacccaaatagatctgagaagtgcctttagtttgcacttaaaagaggctttccctgaagtttgttttgtttcactgtttgtttgctgctgcttccactgatctgaaatgtacttttaatatgaaaatgctgcagtaaatgattcccatgaaacaaccttgtttacttgttaattgcaccttttaatgatatrgagggtgtgtatttgaccattaaatgtggcatctgagcatccagctcccaatagcagctagaaatgttgcctataacgaggtattttgttccattcttgcaccgtctgtctttcagacaggctggcgaaacgaaatcagcagcatggacttccacttcccttggcaaaagccaaagcttggatgatttttctttcagaaatacaactggaaaaagcagcacaggctgttctctgccagttgggatgcctctgcaactgtaatgcatttctgtattcctggggaggagaaggaaagaagag

SEQ ID NO: 48273 - DNA, 424 bp, Chicken  19866894293256_1
gcccggcgcagcctccccccgtcccgccggcgctgtggtctcggccggaagcggagggcggtgctggcgccgagctccggctgcgctctccgacgaacaatagtggagcgcggtgcggttggtggtacagcacggcgaggggtgcgctggggggacggcgcggtggcgacggcggttttgggctcggcggcgatgtgctgggcacggggggcgggaggagcttgagctgggggcagagggacggaacagagctgcgaggaaggaggaaggggtgcgcagggtcgcggggggggcggcaayttggagtaacaatcttgcgccttgttccctcctctctcagggcacgatgaacgaggagcagttcgtcaacatcgacctggacgatgacaacgtgtgcagcgtctgcaagctcggcacagagaag

SEQ ID NO: 48274 - DNA, 600 bp, Chicken  19866894293268_1
ttctgatgagcatcatgtttcatcgtcctcagaggctgaattcacacactgtaccttctctctctttggcttgacttctctaactacatcacagtagctcatcaccgcttcaacaaacttgagcattcccaggccagctctgctaacaagttccatttcagtgaaggtagtattaagactctttaacacagctaaatggacaaagacaaagatattgcaagtgagccaagttatagtgcagaaatcttcagagaataaggtttccattcagcaatattgagcagtactgtaacagataayaggaatcatttgtcagaatataaamgattctgaacttaccacgaaggtacgggactgtaactatacaacaacactgctagtgatttctcaagctccttctcaaaaaaaaaaaaaaagcagtgcattcatttttccagcttgtctcatggccatggcttgttttctctacagcagtcagataccattttgttaaaagtgcaaaattcagctcttaatggaactactctggatcacatccttgcgatcatctgcaaagcttgactacgtcagttttatatacagcttatcttcttttcactg

SEQ ID NO: 48275 - DNA, 600 bp, Chicken  19866894293268_2
tcctcagaggctgaattcacacactgtaccttctctctctttggcttgacttctctaactacatcacagtagctcatcaccgcttcaacaaacttgagcattcccaggccagctctgctaacaagttccatttcagtgaaggtagtattaagactctttaacacagctaaatggacaaagacaaagatattgcaagtgagccaagttatagtgcagaaatcttcagagaataaggtttccattcagcaatattgagcagtactgtaacagataayaggaatcatttgtcagaatataaamgattctgaacttaccacgaaggtacgggactgtaactatacaacaacactgctagtgatttctcaagctccttctcaaaaaaaaaaaaaaagcagtgcattcatttttccagcttgtctcatggccatggcttgttttctctacagcagtcagataccattttgttaaaagtgcaaaattcagctcttaatggaactactctggatcacatccttgcgatcatctgcaaagcttgactacgtcagttttatatacagcttatcttcttttcactgtgtacaaatcacatctcaattgcca

SEQ ID NO: 48276 - DNA, 600 bp, Chicken  19866894293272_1
cagcaaagatgatgcaatgctggactctcctagcaggagagttgtggacctgttagagcacatccagaagagagccaaaaaagtgattcaaggaatgggacatctcttctatggggacaggctgagagagagctgaggctgttcagcctggagaagagaaggctctgatgagacctgttagcagcctttcagtatctaaagaggggctataagaaggaagcagacagacacattagcagggcctcttgtgataggacaaggggaagtggtttcaaactaaaagagaggagatttagactsgatataaagaaggttgttgttgtcgttgttgttgttttaatagtaaagttggttaggcactggaacaggttacccagagcaatggtggatgcttagaccctggagacattcaagctcagactggatggggctctgagcaacctgatctaagtgtagatgtccccatttattgcatgggagttggagtagattgtcttcagaggtcccttctaattcaaaagattctctgactttatgattctaagtataacagtgactggcttttctttctcattgtctttatgtctttcacagaggaga

SEQ ID NO: 48277 - DNA, 600 bp, Chicken  19866894293272_2
ctgtcatttttgatgaagacttaaaaaaaaggatccttttgtatttggctgttcttcccaattttctttcctctgtcttgtccaaaaattccctcacacggaaccttgctgctggagaaaggtttctaccaggagaaactgtgcaggctgctgccacttgagttagtaaagttagatgtcttcaagggatttaattgtcttatttacttcaatcatgagaaagagaaggtttgcttatagatgtaagtctccttttattttacattggtgtgatgtttttctaaaacgttttcatccttytcctgttcatctgtagttcttatcccaggctcattctccttgtctttcaaatttcctggctgtggacatttcatttcacctcttgtttcttgtccattttttttttctttacttgtatgccttaatttgaatatttgtacttgacatatttcccttctctccttttgcatgtgaacttttgctaaaacttttcatctgcttcttcccctgtgtccttgttctctactttttatgctcacttttctggtcttgttaaacagatttatttgcttcccttctcattgtaagacccagatactt

SEQ ID NO: 48278 - DNA, 600 bp, Chicken  19866894293279_1
aaatttgcaagaagaaaaagaatgaggaaatagttcaataagccaagacaagtgttttgcctgacgttttattggtgtcactgatattagattatggcatagtcttaatcgataaaagaatttctaaacattgtcaaggttatcaaagttgcaggtgttgcaaaaaggaaaaattcagttaagttgcagaaatattgtcctgtttttgaccagatatttttctaaagaaagacttgcatattttgttttaaaataaacctgtctattgtggcaataacagaattgaattcaagggaaatkactcgcatgtgtcaagaaggtaatgtaccccttcactttcaaagggttggcatcagygcaagttattgcttacaggtgttaagtaacctctttgatgttttttctttttttttttttttttaattggctgatgcccatttcttcggaagataaaaagctacagtaatggagcagtttaataaaaaaggactaaggatttttagacagtgaagaaattactgtgtttgggtaattttgttgaatggacttgggtccactggttattatttcacttgtatgttcattttgtttggataaaga

SEQ ID NO: 48279 - DNA, 600 bp, Chicken  19866894293279_2
tgcctgacgttttattggtgtcactgatattagattatggcatagtcttaatcgataaaagaatttctaaacattgtcaaggttatcaaagttgcaggtgttgcaaaaaggaaaaattcagttaagttgcagaaatattgtcctgtttttgaccagatatttttctaaagaaagacttgcatattttgttttaaaataaacctgtctattgtggcaataacagaattgaattcaagggaaatkactcgcatgtgtcaagaaggtaatgtaccccttcactttcaaagggttggcatcagygcaagttattgcttacaggtgttaagtaacctctttgatgttttttctttttttttttttttttaattggctgatgcccatttcttcggaagataaaaagctacagtaatggagcagtttaataaaaaaggactaaggatttttagacagtgaagaaattactgtgtttgggtaattttgttgaatggacttgggtccactggttattatttcacttgtatgttcattttgtttggataaagatactgacttgtaatttaaataacacatatagtgacatttaaaaattgtttatagact

SEQ ID NO: 48280 - DNA, 600 bp, Chicken  19866894293279_3
taatcgataaaagaatttctaaacattgtcaaggttatcaaagttgcaggtgttgcaaaaaggaaaaattcagttaagttgcagaaatattgtcctgtttttgaccagatatttttctaaagaaagacttgcatattttgttttaaaataaacctgtctattgtggcaataacagaattgaattcaagggaaatkactcgcatgtgtcaagaaggtaatgtaccccttcactttcaaagggttggcatcagygcaagttattgcttacaggtgttaagtaacctctttgatgttttttcyttttttttttttttttaattggctgatgcccatttcttcggaagataaaaagctacagtaatggagcagtttaataaaaaaggactaaggatttttagacagtgaagaaattactgtgtttgggtaattttgttgaatggacttgggtccactggttattatttcacttgtatgttcattttgtttggataaagatactgacttgtaatttaaataacacatatagtgacatttaaaaattgtttatagactttggtgtgatttgaaatccttcatccaatatagcccttcagaattact

SEQ ID NO: 48281 - DNA, 600 bp, Chicken  19866894293279_4
aatcgataaaagaatttctaaacattgtcaaggttatcaaagttgcaggtgttgcaaaaaggaaaaattcagttaagttgcagaaatattgtcctgtttttgaccagatatttttctaaagaaagacttgcatattttgttttaaaataaacctgtctattgtggcaataacagaattgaattcaagggaaatkactcgcatgtgtcaagaaggtaatgtaccccttcactttcaaagggttggcatcagygcaagttattgcttacaggtgttaagtaacctctttgatgttttttctytttttttttttttttaattggctgatgcccatttcttcggaagataaaaagctacagtaatggagcagtttaataaaaaaggactaaggatttttagacagtgaagaaattactgtgtttgggtaattttgttgaatggacttgggtccactggttattatttcacttgtatgttcattttgtttggataaagatactgacttgtaatttaaataacacatatagtgacatttaaaaattgtttatagactttggtgtgatttgaaatccttcatccaatatagcccttcagaattactt

SEQ ID NO: 48282 - DNA, 600 bp, Chicken  19866894293279_5
atcgataaaagaatttctaaacattgtcaaggttatcaaagttgcaggtgttgcaaaaaggaaaaattcagttaagttgcagaaatattgtcctgtttttgaccagatatttttctaaagaaagacttgcatattttgttttaaaataaacctgtctattgtggcaataacagaattgaattcaagggaaatkactcgcatgtgtcaagaaggtaatgtaccccttcactttcaaagggttggcatcagygcaagttattgcttacaggtgttaagtaacctctttgatgttttttcttyttttttttttttttaattggctgatgcccatttcttcggaagataaaaagctacagtaatggagcagtttaataaaaaaggactaaggatttttagacagtgaagaaattactgtgtttgggtaattttgttgaatggacttgggtccactggttattatttcacttgtatgttcattttgtttggataaagatactgacttgtaatttaaataacacatatagtgacatttaaaaattgtttatagactttggtgtgatttgaaatccttcatccaatatagcccttcagaattacttg

SEQ ID NO: 48283 - DNA, 600 bp, Chicken  19866894293285_1
aaaggattaactcctatttgtacatgcagctcacctggaaggaaggtttggagagcaaaaaaacccggagggaagatgtgtattcactgcaggaaaagcctgttcccaagcctgctgatgtgaggggaagcttgctggctgcagagggaacatcaggcccatctccaagcttgtgtaaaaaaaatcatgtcggagcatgttcaattaattactgcacacaggagaaggaagggtcaaaacgatggggtctgtgaggccactgcccacgctgagggctgcatggaattttgcagctccccrggggctgctcagagcagcgccgtgcctcaggcacacccttgctgtctccagaaacacagaaagctcaatgagagtgtctgtgctaggatggyctytaaaaggatgtcccctatgttctctctcttgtgctgttgggttttatcagacctgtagtggggkcctctgtccctcagcagtagcttagtttgcacaccccaaagaagacattgctcctactgagaaggcctaagaacttagygtgtgacttctctgtgtgcaggagttccygagttccttaggggaattggggtgcgaggrgtc

SEQ ID NO: 48284 - DNA, 523 bp, Chicken  19866894293285_2
gaaaagcctgttcccaagcctgctgatgtgaggggaagcttgctggctgcagagggaacatcaggcccatctccaagcttgtgtaaaaaaaatcatgtcggagcatgttcaattaattactgcacacaggagaaggaagggtcaaaacgatggggtctgtgaggccactgcccacgctgagggctgcatggaattttgcagctccccrggggctgctcagagcagcgccgtgcctcaggcacacccttgctgtctccagaaacacagaaagctcaatgagagtgtctgtgctaggatggyctytaaaaggatgtcccctatgttctctctcttgtgctgttgggttttatcagacctgtagtggggkcctctgtccctcagcagtagcttagtttgcacaccccaaagaagacattgctcctactgagaaggcctaagaacttagygtgtgacttctctgtgtgcaggagttccygagttccttaggggaattggggtgcgaggrgtcttgctcccactgttg

SEQ ID NO: 48285 - DNA, 520 bp, Chicken  19866894293285_3
aagcctgttcccaagcctgctgatgtgaggggaagcttgctggctgcagagggaacatcaggcccatctccaagcttgtgtaaaaaaaatcatgtcggagcatgttcaattaattactgcacacaggagaaggaagggtcaaaacgatggggtctgtgaggccactgcccacgctgagggctgcatggaattttgcagctccccrggggctgctcagagcagcgccgtgcctcaggcacacccttgctgtctccagaaacacagaaagctcaatgagagtgtctgtgctaggatggyctytaaaaggatgtcccctatgttctctctcttgtgctgttgggttttatcagacctgtagtggggkcctctgtccctcagcagtagcttagtttgcacaccccaaagaagacattgctcctactgagaaggcctaagaacttagygtgtgacttctctgtgtgcaggagttccygagttccttaggggaattggggtgcgaggrgtcttgctcccactgttg

SEQ ID NO: 48286 - DNA, 456 bp, Chicken  19866894293285_4
catctccaagcttgtgtaaaaaaaatcatgtcggagcatgttcaattaattactgcacacaggagaaggaagggtcaaaacgatggggtctgtgaggccactgcccacgctgagggctgcatggaattttgcagctccccrggggctgctcagagcagcgccgtgcctcaggcacacccttgctgtctccagaaacacagaaagctcaatgagagtgtctgtgctaggatggyctytaaaaggatgtcccctatgttctctctcttgtgctgttgggttttatcagacctgtagtggggkcctctgtccctcagcagtagcttagtttgcacaccccaaagaagacattgctcctactgagaaggcctaagaacttagygtgtgacttctctgtgtgcaggagttccygagttccttaggggaattggggtgcgaggrgtcttgctcccactgttg

SEQ ID NO: 48287 - DNA, 377 bp, Chicken  19866894293285_5
acgatggggtctgtgaggccactgcccacgctgagggctgcatggaattttgcagctccccrggggctgctcagagcagcgccgtgcctcaggcacacccttgctgtctccagaaacacagaaagctcaatgagagtgtctgtgctaggatggyctytaaaaggatgtcccctatgttctctctcttgtgctgttgggttttatcagacctgtagtggggkcctctgtccctcagcagtagcttagtttgcacaccccaaagaagacattgctcctactgagaaggcctaagaacttagygtgtgacttctctgtgtgcaggagttccygagttccttaggggaattggggtgcgaggrgtcttgctcccactgttg

SEQ ID NO: 48288 - DNA, 348 bp, Chicken  19866894293285_6
gctgagggctgcatggaattttgcagctccccrggggctgctcagagcagcgccgtgcctcaggcacacccttgctgtctccagaaacacagaaagctcaatgagagtgtctgtgctaggatggyctytaaaaggatgtcccctatgttctctctcttgtgctgttgggttttatcagacctgtagtggggkcctctgtccctcagcagtagcttagtttgcacaccccaaagaagacattgctcctactgagaaggcctaagaacttagygtgtgacttctctgtgtgcaggagttccygagttccttaggggaattggggtgcgaggrgtcttgctcccactgttg

SEQ ID NO: 48289 - DNA, 318 bp, Chicken  19866894293285_7
ccrggggctgctcagagcagcgccgtgcctcaggcacacccttgctgtctccagaaacacagaaagctcaatgagagtgtctgtgctaggatggyctytaaaaggatgtcccctatgttctctctcttgtgctgttgggttttatcagacctgtagtggggkcctctgtccctcagcagtagcttagtttgcacaccccaaagaagacattgctcctactgagaaggcctaagaacttagygtgtgacttctctgtgtgcaggagttccygagttccttaggggaattggggtgcgaggrgtcttgctcccactgttg

SEQ ID NO: 48290 - DNA, 600 bp, Chicken  19866894293286_1
acatttgtctgcttagaatactgtttctaatctaagaggcagaacaaacagtggcatttgaaaaggcgtcatgagaagggactctgccaagcacaaggctctttgaacaggagctggaaatcccacagcaactgcctgagagcagctccagctgctaccaccatgctaaaccagcacaggcaaggagcgaggtaaaaaagcatctcaatacactgtagtacatgctgagcttttccaagaggtgggaaatgcatgctccaagtgtggaaacttggcctgaacgtcagaatcatccaaatycacttacaatcgaggtggctgcatatagaagcatgagacattttagggatggaaccaaaatatgacctgtaggcaaactccttgatgggatacaacaggaaagcactgccctttccctggctcactcagacatacctcagtgggttgttctgctcatcacacattgtggccagttcccasagagcaaaaataactattgctagtttcccagcatagatcacccttcacccctctttttcccaatagttaaaaatttgacaattgtagagatgttgaagaggaaataacttcatctagaga

SEQ ID NO: 48291 - DNA, 600 bp, Chicken  19866894293286_2
caaggagcgaggtaaaaaagcatctcaatacactgtagtacatgctgagcttttccaagaggtgggaaatgcatgctccaagtgtggaaacttggcctgaacgtcagaatcatccaaatycacttacaatcgaggtggctgcatatagaagcatgagacattttagggatggaaccaaaatatgacctgtaggcaaactccttgatgggatacaacaggaaagcactgccctttccctggctcactcagacatacctcagtgggttgttctgctcatcacacattgtggccagttcccasagagcaaaaataactattgctagtttcccagcatagatcacccttcacccctctttttcccaatagttaaaaatttgacaattgtagagatgttgaagaggaaataacttcatctagagagaacttctggcattcattgattcttctttcaaggaataacattgagccagtaatttagatttgtcagaaaaatgtacacagagtttccatttagaaggaagcaataaatatcttgattgattgcaaccaagcctggttgacacttggcagtacagtgaattattcattcctggaaagtga

SEQ ID NO: 48292 - DNA, 599 bp, Chicken  19866894293289_1
  misc_feature (1)..(78): n is any nucleotide
nnnnnnnnnnnnnnnnnnnnnnnnnnnnnnnnnnnnnnnnnnnnnnnnnnnnnnnnnnnnnnnnnnnnnnnnnnnnnnccccgccgtgggtacgtctccccgtgtgtgtttgtggcactggggcagcgtcggctcgtgagctgacagaaccgtccccaaccatcctcgtgcagaagcggaggtggggccgcgatggtggcgctgtgcccttcgaacggctgctcccagggaggacgctgctgtctgtgcccggctgcgtgggctgatggatggggcaggccgggatgctgggctgggcasggaagggcgcgttgcagcagcggtgctcggttacaaagcggcgtatagagcagtgttggataggcggagatggaagcagaggagccggaggtgctgcagttgatgcacactgcctgcgatggtccgctgtgtcctgaggcgccccttggacttcatgtaytgctcaggggggtaccgttgcccagacaggttctgttattcccatttgcattggattatccaagggaaagaacggtaatgacaagcagggaatcgctgctctggctgaccaccagggaggggrggagaggggacaccac

SEQ ID NO: 48293 - DNA, 600 bp, Chicken  19866894293289_2
catcctcgtgcagaagcggaggtggggccgcgatggtggcgctgtgcccttcgaacggctgctcccagggaggacgctgctgtctgtgcccggctgcgtgggctgatggatggggcaggccgggatgctgggctgggcasggaagggcgcgttgcagcagcggtgctcggttacaaagcggcgtatagagcagtgttggataggcggagatggaagcagaggagccggaggtgctgcagttgatgcacactgcctgcgatggtccgctgtgtcctgaggcgccccttggacttcatgtaytgctcaggggggtaccgttgcccagacaggttctgttattcccatttgcattggattatccaagggaaagaacggtaatgacaagcagggaatcgctgctctggctgaccaccagggaggggrggagaggggacaccacggaaccctttgcccgcgtgtgcagctcaggagggcccatcagacacragccaggatgcgtttcagccagcagcaaatcatttccgtgccaggcatgctttcaacacgaggctgttccgtgcatacgcgtccccgtcctccccctttggactgtgtccctca

SEQ ID NO: 48294 - DNA, 522 bp, Chicken  19866894293289_3
gatgctgggctgggcasggaagggcgcgttgcagcagcggtgctcggttacaaagcggcgtatagagcagtgttggataggcggagatggaagcagaggagccggaggtgctgcagttgatgcacactgcctgcgatggtccgctgtgtcctgaggcgccccttggacttcatgtaytgctcaggggggtaccgttgcccagacaggttctgttattcccatttgcattggattatccaagggaaagaacggtaatgacaagcagggaatcgctgctctggctgaccaccagggaggggrggagaggggacaccacggaaccctttgcccgcgtgtgcagctcaggagggcccatcagacacragccaggatgcgtttcagccagcagcaaatcatttccgtgccaggcatgctttcaacacgaggctgttccgtgcatacgcgtccccgtcctccccctttggactgtgtccctcatagaaggttgatgtttctgtgtttgcccctaggggacaggaagct

SEQ ID NO: 48295 - DNA, 459 bp, Chicken  19866894293289_4
agagcagtgttggataggcggagatggaagcagaggagccggaggtgctgcagttgatgcacactgcctgcgatggtccgctgtgtcctgaggcgccccttggacttcatgtaytgctcaggggggtaccgttgcccagacaggttctgttattcccatttgcattggattatccaagggaaagaacggtaatgacaagcagggaatcgctgctctggctgaccaccagggaggggrggagaggggacaccacggaaccctttgcccgcgtgtgcagctcaggagggcccatcagacacragccaggatgcgtttcagccagcagcaaatcatttccgtgccaggcatgctttcaacacgaggctgttccgtgcatacgcgtccccgtcctccccctttggactgtgtccctcatagaaggttgatgtttctgtgtttgcccctaggggacaggaagct

SEQ ID NO: 48296 - DNA, 599 bp, Chicken  19866894293294_1
  misc_feature (1)..(198): n is any nucleotide
nnnnnnnnnnnnnnnnnnnnnnnnnnnnnnnnnnnnnnnnnnnnnnnnnnnnnnnnnnnnnnnnnnnnnnnnnnnnnnnnnnnnnnnnnnnnnnnnnnnnnnnnnnnnnnnnnnnnnnnnnnnnnnnnnnnnnnnnnnnnnnnnnnnnnnnnnnnnnnnnnnnnnnnnnnnnnnnnnnnnnnnnnnnnnnnnnnnnnnccaaagcagaagcaagagacatttgattttcacaccttctacatgtaaaatttcatatttcttttctgatggaaaattaaaatccagctctaagagtgcatrtatatgtgaagtcagataactctagatcactttctagatcactccaaaagtaatgtcctctgtttatttctgtggaaactaaaacagacacaaagagcacaatagaacatgacagagtaaattctcagccacaaaacactatttttcaacacagtcaccactattagccacgcattttcgtcactgatgaacaagagcctacatgctgagctcataaaagtctgctccagcagaggtggcccactgtcaccactgaaaagaaccacccaccacctcactgtgctcacatccactgtttg

SEQ ID NO: 48297 - DNA, 352 bp, Chicken  19866894293294_2
tgtcaatgaatgtatatttttttcagcatggaggaattcagtgacacactttttcttcacacacacttgtcagacaccatttgtcagatcgcccctctgctgccatctgtggtaacatggcaacaaaatgcaatacagtattagtgggaaaattagacaaccagcatggcttcaccaagcgcagatctttcctgaccagtctggtggccttctatgttggagtaacagacgggagaagggcgatagatgtcatctacctggattctgcaaagcctttgacatggtccctcaccacatctytctctccaaatttgagaggtgtggatttgaaggatggactgttcagtggatt

SEQ ID NO: 48298 - DNA, 600 bp, Chicken  19866894293295_1
cttagaaaagcttctggggtggcaaaagaaaagactctgaatcagtctcaagttactcaaatatcagcctactcactatatccccttcactgttaaagttcagttgcattattaactatctaaagtaaaactaaatggcaaccatggcacgactgagccaactccttcatcccataactatatacacccaattttgacttcagcttgacatgctgtagaaatgagtggcagtgtcacactggcaacctgcaccaacttctgggagggaaggctaggcatcctggaggaaggacaacctgytctgccctaagcactgcacatcagaaatgcctgatccttctgctggcagcccacagagcagcactgcctttctccacaaccacgactgaaaacagaagctgacgcttttgtctcctatggtttaacatgttcttagggaattcaagtaactgctaaagtcttccagaaagaggaggaaaatgtaatctaaaacttacaaaacaagcaggcttttttgagtggaggcaaaaaaataaagggatgtttttataaaccctaaaggaacaataaactgcgcaaaatataattcaatttttgttt

SEQ ID NO: 48299 - DNA, 600 bp, Chicken  19866894293299_1
tacgaagattgcaaagcctttccaattgtaaatttttggttctttggcaatcccttctttccccacagcaaacttctgaccaatctcctcagctgcatgcacttgcacttggattcagtctctgaaggccccttccaactgagctattctattctgctccatctcccacagaagtgtcagcctcactgccacagcacggggagcacagtcactgcattctttgtggccctgagagatctcacaagcacttggctgcacacacaagagactctttttctttcccagtgctgtcagcagcaygtaagacagcaggctgatggctccrtagccccacatgctcccacaaggcacagctgaactggtaccatttgacagcttatcttcatatcttctaatctggcatggaaactcatcacgtgaaaaattagtcaaatttcattttctcacaaaggagtggacaagacacaatttattaaggacacgttctctgccaattttgtaaatagccattgatgtacaaacaaaaagcatcactggatgtactgagtaatgaaggaagaaggctcctttgtggtaggaagcagacacctaactgccttg

SEQ ID NO: 48300 - DNA, 600 bp, Chicken  19866894293299_2
ttgtaaatttttggttctttggcaatcccttctttccccacagcaaacttctgaccaatctcctcagctgcatgcacttgcacttggattcagtctctgaaggccccttccaactgagctattctattctgctccatctcccacagaagtgtcagcctcactgccacagcacggggagcacagtcactgcattctttgtggccctgagagatctcacaagcacttggctgcacacacaagagactctttttctttcccagtgctgtcagcagcaygtaagacagcaggctgatggctccrtagccccacatgctcccacaaggcacagctgaactggtaccatttgacagcttatcttcatatcttctaatctggcatggaaactcatcacgtgaaaaattagtcaaatttcattttctcacaaaggagtggacaagacacaatttattaaggacacgttctctgccaattttgtaaatagccattgatgtacaaacaaaaagcatcactggatgtactgagtaatgaaggaagaaggctcctttgtggtaggaagcagacacctaactgccttgctaaattatcccagcagcaaattga

SEQ ID NO: 48301 - DNA, 600 bp, Chicken  19866894293307_1
gttttcaaggctacccattgctggttatgtcttcagggatcctcggagcacagaagttagctgtgtactagtttacttataaaatacctagaatggcacagtgttcctgtaggtgaagctcaggagtctggaggtctattctataaaaattgaaagaagtcttttaattggggtcacctcggtttctttttctttttcttgctaatatattttttacagtgtttatgaaacttacgttagcaatagtttgatttttacaccctttcattatcctgtactaattaattggggcagttgacrttccagtttatacctgagtctgaccggacgtacttctgaaaccacaccagctgttgtgtttctgtgctagtcagaatcagagaaagctttgtcattatgtttttattttagtcccagaagacattttcaagaatttggatatgcaagtttcayatggtcttgcagaattcagtctgcaaagaatatgaaggactagaggaaaaacacaagtaacaaatacaggtagactgttccttatgtgacgtcttggtcacgttaaaagctgaattactgttgcaattgtaaggaaaatttaagtta

SEQ ID NO: 48302 - DNA, 600 bp, Chicken  19866894293307_2
aagaagtcttttaattggggtcacctcggtttctttttctttttcttgctaatatattttttacagtgtttatgaaacttacgttagcaatagtttgatttttacaccctttcattatcctgtactaattaattggggcagttgacrttccagtttatacctgagtctgaccggacgtacttctgaaaccacaccagctgttgtgtttctgtgctagtcagaatcagagaaagctttgtcattatgtttttattttagtcccagaagacattttcaagaatttggatatgcaagtttcayatggtcttgcagaattcagtctgcaaagaatatgaaggactagaggaaaaacacaagtaacaaatacaggtagactgttccttatgtgacgtcttggtcacgttaaaagctgaattactgttgcaattgtaaggaaaatttaagttagcatttcatccactgcttcccttcttgccttcttttccgaaggaagatctgtcgagttttttcacacgtgtgcagatcagctgaagaatggttgggaagtggaagtctgagatcaggttgctgtcaccaaaacagttcagcctgccagtgtct

SEQ ID NO: 48303 - DNA, 600 bp, Chicken  19866894293314_1
cagatacggtcctatagctgcagcaactccacatgtacccagacaggatttagagcttattttcccatagtattggacaagcttcaggtatctctcgctgcttcttcttgccaatgccaggactcaaggcagagggaaagccttgcgttccctgaaggaggactgagaggggaaggagcccttccttatccagtgaaccacagtgtcccttccaggcagctgttggtcctgcttaaatccatggctgggcagaccttcacaacagatgctgaaccccttcccggtgtctcatggccacgygtgctggctctgaacatctcagacatgaggtgggcygcacctatggttcacattgctcgtgtctattactctcctggaatactaagtgttttccagttctgaacaatttatgaagttaaaaacctctcacagttctcagtgattcaaaatacaggttctcttcccccttcttgttcttcaaagcacagaaatgcacatgtattaatacaatcaaatgagtgagccaagttaattggcctgatttggtctggaagaaaaagcacataattagagtgccaagtaccagtactatcagcagtg

SEQ ID NO: 48304 - DNA, 600 bp, Chicken  19866894293314_2
acccagacaggatttagagcttattttcccatagtattggacaagcttcaggtatctctcgctgcttcttcttgccaatgccaggactcaaggcagagggaaagccttgcgttccctgaaggaggactgagaggggaaggagcccttccttatccagtgaaccacagtgtcccttccaggcagctgttggtcctgcttaaatccatggctgggcagaccttcacaacagatgctgaaccccttcccggtgtctcatggccacgygtgctggctctgaacatctcagacatgaggtgggcygcacctatggttcacattgctcgtgtctattactctcctggaatactaagtgttttccagttctgaacaatttatgaagttaaaaacctctcacagttctcagtgattcaaaatacaggttctcttcccccttcttgttcttcaaagcacagaaatgcacatgtattaatacaatcaaatgagtgagccaagttaattggcctgatttggtctggaagaaaaagcacataattagagtgccaagtaccagtactatcagcagtgatataacacttgaagcactgaagggacattcagtat

SEQ ID NO: 48305 - DNA, 600 bp, Chicken  19866894293317_1
tgtaagccctacgttacccattctctgctgagatggaggacagaaatgacaaagtgcagaaggagaggtaggagcagtgcatgtccctgagccccacgagccctatagagctgtgcattgccaaatgcttgccctctctctgctgggttcttgactgacttctgcacaggagtggtaaggaaagtaaagagggggagagtgtgatatgtgagttattttcacaagttagggatgaccccataactcataagtggtggagcggagcctgcagaaaggaatttcagtccaccactgactgtkctcacataatttattgcttggtgcgtacctctcatcatcagcaatgagaaaactggttttctgtgtgaagctgatgctttcacttgcttgttcccagggcagaggcagccttcttccccctctttcccrtgagtgcaagatatgtctttgggtaacgtgttttcaggtgagctctgtgtgtgctggatcatcatctccatgcagcatcacagacaaacttttcagtgataaaacaaattgacaagtatgtgtgcgacatggcatctgactatcagatgttagaggaatgcgaaagacata

SEQ ID NO: 48306 - DNA, 600 bp, Chicken  19866894293317_2
tgccctctctctgctgggttcttgactgacttctgcacaggagtggtaaggaaagtaaagagggggagagtgtgatatgtgagttattttcacaagttagggatgaccccataactcataagtggtggagcggagcctgcagaaaggaatttcagtccaccactgactgtkctcacataatttattgcttggtgcgtacctctcatcatcagcaatgagaaaactggttttctgtgtgaagctgatgctttcacttgcttgttcccagggcagaggcagccttcttccccctctttcccrtgagtgcaagatatgtctttgggtaacgtgttttcaggtgagctctgtgtgtgctggatcatcatctccatgcagcatcacagacaaacttttcagtgataaaacaaattgacaagtatgtgtgcgacatggcatctgactatcagatgttagaggaatgcgaaagacataccatcgtgaggcatataattcagtatgtgtgtgtgtgtctgtatatatagaactaacaatttatattctaatcatcacaatgcaatcacactgcgagtgcatttttgttattaatacttactctttgat

SEQ ID NO: 48307 - DNA, 600 bp, Chicken  19866894293327_1
taggtcccactgtacttctctattttatgtaattcatatttcagtaaggctgctcaaaagtttactgtatagttgctttaatttatgaggattaataaagactggtcttatgtggggagtcaaacattctggtctctacctggaaacatatgatattttaaacacaggtctgagcactgtttttcccccatcttcgttcttaagtcttcaaattgtatttctcagtcattctttgaaaccatgattgcaactgattttattgttagctgaggctctgctgttatctctggcttcaggaaytggaaccataaggaaaacactaaacagaacaaagcttgagataagcatggtggatattaataawgttgatgagctgcaagtgcttgtgttataagttattacaaacatggtgggagtttgtgttgttacacagatagtgctgtgcagctctatgtcatctgtggatccctctacatgtcagtgactttcttataactagccaagttgctgttacattgctttctgttagcagtgtcatctrtaactaggagagaatctgggtatgtatttccaaacctacttgttgttgcgtggaagcaa

SEQ ID NO: 48308 - DNA, 600 bp, Chicken  19866894293327_2
ctgtatagttgctttaatttatgaggattaataaagactggtcttatgtggggagtcaaacattctggtctctacctggaaacatatgatattttaaacacaggtctgagcactgtttttcccccatcttcgttcttaagtcttcaaattgtatttctcagtcattctttgaaaccatgattgcaactgattttattgttagctgaggctctgctgttatctctggcttcaggaaytggaaccataaggaaaacactaaacagaacaaagcttgagataagcatggtggatattaataawgttgatgagctgcaagtgcttgtgttataagttattacaaacatggtgggagtttgtgttgttacacagatagtgctgtgcagctctatgtcatctgtggatccctctacatgtcagtgactttcttataactagccaagttgctgttacattgctttctgttagcagtgtcatctrtaactaggagagaatctgggtatgtatttccaaacctacttgttgttgcgtggaagcaataacttgatggaggatgtgaataagagtcttgaataacattaatccattgaaaccacttccttt

SEQ ID NO: 48309 - DNA, 600 bp, Chicken  19866894293327_3
tgattgcaactgattttattgttagctgaggctctgctgttatctctggcttcaggaaytggaaccataaggaaaacactaaacagaacaaagcttgagataagcatggtggatattaataawgttgatgagctgcaagtgcttgtgttataagttattacaaacatggtgggagtttgtgttgttacacagatagtgctgtgcagctctatgtcatctgtggatccctctacatgtcagtgactttcttataactagccaagttgctgttacattgctttctgttagcagtgtcatctrtaactaggagagaatctgggtatgtatttccaaacctacttgttgttgcgtggaagcaataacttgatggaggatgtgaataagagtcttgaataacattaatccattgaaaccacttcctttccaygttcagatgctgttaaaataagaaataatgccatgtggtcatccagagctgtgactggatagcagaaatatcctygtaaaaataaagaaaacaaaggaaatccacacaggcttaaacaaactagtacaaatgaggtaaagtgctgtgctgtagtgttagttcaaataggagga

SEQ ID NO: 48310 - DNA, 600 bp, Chicken  19866894293327_4
atgagctgcaagtgcttgtgttataagttattacaaacatggtgggagtttgtgttgttacacagatagtgctgtgcagctctatgtcatctgtggatccctctacatgtcagtgactttcttataactagccaagttgctgttacattgctttctgttagcagtgtcatctrtaactaggagagaatctgggtatgtatttccaaacctacttgttgttgcgtggaagcaataacttgatggaggatgtgaataagagtcttgaataacattaatccattgaaaccacttcctttccaygttcagatgctgttaaaataagaaataatgccatgtggtcatccagagctgtgactggatagcagaaatatcctygtaaaaataaagaaaacaaaggaaatccacacaggcttaaacaaactagtacaaatgaggtaaagtgctgtgctgtagtgttagttcaaataggaggacgtgtgaaagactgaagtgtagtaatatattaacatttttatatattaatattaacatatttctgttagagattcttggcaagggatgaaatgaagaggattcagataggacaaaaggacaagaggg

SEQ ID NO: 48311 - DNA, 600 bp, Chicken  19866894293327_5
gcagctctatgtcatctgtggatccctctacatgtcagtgactttcttataactagccaagttgctgttacattgctttctgttagcagtgtcatctrtaactaggagagaatctgggtatgtatttccaaacctacttgttgttgcgtggaagcaataacttgatggaggatgtgaataagagtcttgaataacattaatccattgaaaccacttcctttccaygttcagatgctgttaaaataagaaataatgccatgtggtcatccagagctgtgactggatagcagaaatatcctygtaaaaataaagaaaacaaaggaaatccacacaggcttaaacaaactagtacaaatgaggtaaagtgctgtgctgtagtgttagttcaaataggaggacgtgtgaaagactgaagtgtagtaatatattaacatttttatatattaatattaacatatttctgttagagattcttggcaagggatgaaatgaagaggattcagataggacaaaaggacaagagggaatggccttaagttgcaccaagggagattcaggttggatgttaggaaatacttctctgagagtgatcaggcactg

SEQ ID NO: 48312 - DNA, 600 bp, Chicken  19866894293331_1
tacctttttatttacatctaaaatggagattccttgtctctgaacaaggaatccttcctcttgctgtgatagtttgttaaaaatagcaataattaacacaaaaagcttgttgagttttggttacaggtgcactttgattcttaggatgatttcaagtgttgtcctgcctatttgttttcataataccattagctttcacagctggattttcaattcacatgaaagaatggaaatttcttggaaggactcatagcagaaaacgtgtaattgggttaaagaaaatgtctctgcgtttcaaasaaaacccaggtgaagcatcaggaagctgtgttctctgctaatgcctgctgacaccacctyccacccaaatggcttaagaatgcagcgttgcagyaggagaggarggtgtcgtagaggaagggtgccttcctataggaagcatctgtaaagaacaacaccaaatcagccaggcaggggctcaggaaccagtcctgctgtccaaccccattgtttccagggaggggtctgtggcattttgtgaaagcggctgtgtgtactatgtaacagtaggtctgagtctgctgtgagctgtagtgcaag

SEQ ID NO: 48313 - DNA, 600 bp, Chicken  19866894293331_2
ttgctgtgatagtttgttaaaaatagcaataattaacacaaaaagcttgttgagttttggttacaggtgcactttgattcttaggatgatttcaagtgttgtcctgcctatttgttttcataataccattagctttcacagctggattttcaattcacatgaaagaatggaaatttcttggaaggactcatagcagaaaacgtgtaattgggttaaagaaaatgtctctgcgtttcaaasaaaacccaggtgaagcatcaggaagctgtgttctctgctaatgcctgctgacaccacctyccacccaaatggcttaagaatgcagcgttgcagyaggagaggarggtgtcgtagaggaagggtgccttcctataggaagcatctgtaaagaacaacaccaaatcagccaggcaggggctcaggaaccagtcctgctgtccaaccccattgtttccagggaggggtctgtggcattttgtgaaagcggctgtgtgtactatgtaacagtaggtctgagtctgctgtgagctgtagtgcaaggargcatgcaacctgctgtctcttaaatcatttgtgcccatagctattagaaaaactttg

SEQ ID NO: 48314 - DNA, 600 bp, Chicken  19866894293331_3
aacacaaaaagcttgttgagttttggttacaggtgcactttgattcttaggatgatttcaagtgttgtcctgcctatttgttttcataataccattagctttcacagctggattttcaattcacatgaaagaatggaaatttcttggaaggactcatagcagaaaacgtgtaattgggttaaagaaaatgtctctgcgtttcaaasaaaacccaggtgaagcatcaggaagctgtgttctctgctaatgcctgctgacaccacctyccacccaaatggcttaagaatgcagcgttgcagyaggagaggarggtgtcgtagaggaagggtgccttcctataggaagcatctgtaaagaacaacaccaaatcagccaggcaggggctcaggaaccagtcctgctgtccaaccccattgtttccagggaggggtctgtggcattttgtgaaagcggctgtgtgtactatgtaacagtaggtctgagtctgctgtgagctgtagtgcaaggargcatgcaacctgctgtctcttaaatcatttgtgcccatagctattagaaaaactttgatagataagttacctcaaaacttaactgctgaaa

SEQ ID NO: 48315 - DNA, 600 bp, Chicken  19866894293331_4
gcttgttgagttttggttacaggtgcactttgattcttaggatgatttcaagtgttgtcctgcctatttgttttcataataccattagctttcacagctggattttcaattcacatgaaagaatggaaatttcttggaaggactcatagcagaaaacgtgtaattgggttaaagaaaatgtctctgcgtttcaaasaaaacccaggtgaagcatcaggaagctgtgttctctgctaatgcctgctgacaccacctyccacccaaatggcttaagaatgcagcgttgcagyaggagaggarggtgtcgtagaggaagggtgccttcctataggaagcatctgtaaagaacaacaccaaatcagccaggcaggggctcaggaaccagtcctgctgtccaaccccattgtttccagggaggggtctgtggcattttgtgaaagcggctgtgtgtactatgtaacagtaggtctgagtctgctgtgagctgtagtgcaaggargcatgcaacctgctgtctcttaaatcatttgtgcccatagctattagaaaaactttgatagataagttacctcaaaacttaactgctgaaattacaggaat

SEQ ID NO: 48316 - DNA, 439 bp, Chicken  19866894293331_5
acccaggtgaagcatcaggaagctgtgttctctgctaatgcctgctgacaccacctyccacccaaatggcttaagaatgcagcgttgcagyaggagaggarggtgtcgtagaggaagggtgccttcctataggaagcatctgtaaagaacaacaccaaatcagccaggcaggggctcaggaaccagtcctgctgtccaaccccattgtttccagggaggggtctgtggcattttgtgaaagcggctgtgtgtactatgtaacagtaggtctgagtctgctgtgagctgtagtgcaaggargcatgcaacctgctgtctcttaaatcatttgtgcccatagctattagaaaaactttgatagataagttacctcaaaacttaactgctgaaattacaggaattttaccttgtgaatttattattttttttagctgaagta

SEQ ID NO: 48317 - DNA, 600 bp, Chicken  19866894293333_1
tgcttcatgaaacaatgccacactatcattacaatagctggtaacagaaatacaaatagataatgtaatagagggcttccaggtcttttttttcctttacaactttgttgacaaccagcagcagctttactggttacagtctgaagcagcaacagagtttggaaagatgctgtgatgagtagaacccccatttaatacacagggaaaataaatcagtgaaatggctgtcagtactgagacctccattttttcctcatattgtttccgctagagaccccagctcatacccacagccccagyccatgtctcaaagctgtaataagatcttcagtggggaaaaagtagaagacatttttggactgctggaaccctttcagggcatttcaggtcattatggcattacaaactttagagacctgtgtatgcccacgctaaggctcagctcaggttagggactcaagcaccaagaggcactgggatgcaccttgtccacacctggtgaggatgcactggcacagctcctgcctccctgtgtcagctactctctgcctccagcccctctgcagtgttccgagtgaggagctgctttactacctgaaa

SEQ ID NO: 48318 - DNA, 600 bp, Chicken  19866894293346_1
gtggtacccttgggttaggcagccccccaaggttgctggtcacaaactctgcctctcatttagtaaccacattaataaaacatactgaacgttgcagtccctctcatgcaataagggcattaatcatctaatgaatgttacagcctccatgttcaaacagatggtgttcagtttctccatagtggtgagtggtaggtgttggccatggagctttcttcttttctttaatcatagaatcacagacttgtggagtcactagggttggaagagacctctaggctcacctggcttatctttgtrttggactgaagaagccaagcatctcattgtatgyatgagcctgttaatgtcaatgggaaagcctgtggcagagagctctgctgatctgggattggagcaaggatgactaaagaacatatgtgggtatttacacttcagatgaaattatgtttttattaattggcatttgcttgtatgccatacaccagggtgtaggcagggtgaaggtaaggagacgctgcatggatgtgtggagcccgagcctcagattctgcagtggctttctggcagcagcagcagccaggagggatgctgcaaagg

SEQ ID NO: 48319 - DNA, 600 bp, Chicken  19866894293346_2
gctggtcacaaactctgcctctcatttagtaaccacattaataaaacatactgaacgttgcagtccctctcatgcaataagggcattaatcatctaatgaatgttacagcctccatgttcaaacagatggtgttcagtttctccatagtggtgagtggtaggtgttggccatggagctttcttcttttctttaatcatagaatcacagacttgtggagtcactagggttggaagagacctctaggctcacctggcttatctttgtrttggactgaagaagccaagcatctcattgtatgyatgagcctgttaatgtcaatgggaaagcctgtggcagagagctctgctgatctgggattggagcaaggatgactaaagaacatatgtgggtatttacacttcagatgaaattatgtttttattaattggcatttgcttgtatgccatacaccagggtgtaggcagggtgaaggtaaggagacgctgcatggatgtgtggagcccgagcctcagattctgcagtggctttctggcagcagcagcagccaggagggatgctgcaaagggaactgggagcttctggcttcctgcacctgactt

SEQ ID NO: 48320 - DNA, 600 bp, Chicken  19866894293351_1
ggtgacctcaggagctgctgatggtctcaaatgacgctgaactaaaccaaaagactaccaaaagaaagatgaataatttcctgaacaagttcggtaaatgtccacatgaaattcttagattaaaacacagggaatgtgtaaatccaggctctggatatgtacatttcatggcatggtaagagagcgtggcacactaaccagccctcaattaccagggctgaacacagcctaaaaaataggttttgaaacctgtgctgtttcttctgtttggtacctagaaatgttagccttagagctaaygtacagcctgcttaaagaaaagcctaagctgtgaacgttgaaatatgaccggtggcagattgcagggcaaaacaagaaacaacagacgtaaagaaaaacacaagaaaggttaaaaggaaatgcaaggaaagagatgaatactgtttgactcctaaagcaggcgatgcagcagatgtgatgctaatgatgaaagaagacttgctaaaagaatccaaatgcttagcggggctgaacggaagcaggaataacaaccaaatggtgagaaataaactttccagctgtacgaaggctgggaaaatc

SEQ ID NO: 48321 - DNA, 600 bp, Chicken  19866894293352_1
aacaatcttacactgcgggagacagatgtgggaacttctccttattcctcttactcagcaaggaaggaaaagcagtagtgaggcaaatgatctgcatatccacttgttcctataatactgaggaaagaaaagatgagtggcatttgaagtttcttctcacttgtatgaccatttaataacacttggaggctttgttctatgtgttaagtgatatgatagacaaatcacttctactcatgtgaattttgtgctttgcttcttgtttttatcactaccatcttatccattttcctttcacaraatgagtgcaaatcagacttaacgcttgaatcagtttgttctgaatcagcactgatttctgtcagctcagcaaaatggacttgaatgttgaggcactgaaagtaatggaatgagcagcctgattggtccaactgtgctatagactctagcatgcgtttctctgtgcactcatattcttagttgtatgggaaggacatgtagaagaaagtcatagttttggctccctttgctccctttgtctgtcaggttctttcagggagtaattttgaacagctagctctcacagcagtcttctcctac

SEQ ID NO: 48322 - DNA, 600 bp, Chicken  19866894293358_1
agattcataacaagttttactcttttttatgcaaagctgtctctggcagcccagcattcagtgataccatgccaagtattaactgttagaatgcacaaaacccagtataatctcttgaattaatactttctgcagcatcagggctgatttacccctgaattacaaggctctccttcaaatactgacaaggctgacaatccctctaagtgaaactccagcccacctcctaacgcttaaggatgtgacaaacaggaaagcagaacttccacacttctctgctttaggagcctgacagtgtcragcacattgttacttgtgtgaatctatcaacacgtaaaaataataaccagaagtaggagacaaaactgcaggaacctacaaggcaaatccactgttccaaacccactgttaacactttctagaatgcagtgatttcctctcaatgtatccaacacggtacatcataagaagcaatgactaagctcagtgaaagatttcttcccatagatgactgcactcctgcatttacctgaaagattcaccgtaacycagttgtgaaataaactgatamaagccttcattatatttcataactacttt

SEQ ID NO: 48323 - DNA, 600 bp, Chicken  19866894293358_2
caggaaagcagaacttccacacttctctgctttaggagcctgacagtgtcragcacattgttacttgtgtgaatctatcaacacgtaaaaataataaccagaagtaggagacaaaactgcaggaacctacaaggcaaatccactgttccaaacccactgttaacactttctagaatgcagtgatttcctctcaatgtatccaacacggtacatcataagaagcaatgactaagctcagtgaaagatttcttcccatagatgactgcactcctgcatttacctgaaagattcaccgtaacycagttgtgaaataaactgatamaagccttcattatatttcataactacttttacaccagaagtataaaaaaaatccttaaaaatgcagtctagtaagtttgttaagacagccagaagaagtaccttgttgtacagcatccagccagagaggtcccccaccaccagctctgccatggtaaagattgggttttgactgtgctcattatgatacagcacaagtgtagaaaaaggaagtgggtaaagaaaaaaaaaaaaagcacacaaaaaaccctgctgaattgaacaatgcaaagctattct

SEQ ID NO: 48324 - DNA, 600 bp, Chicken  19866894293358_3
ttctctgctttaggagcctgacagtgtcragcacattgttacttgtgtgaatctatcaacacgtaaaaataataaccagaagtaggagacaaaactgcaggaacctacaaggcaaatccactgttccaaacccactgttaacactttctagaatgcagtgatttcctctcaatgtatccaacacggtacatcataagaagcaatgactaagctcagtgaaagatttcttcccatagatgactgcactcctgcatttacctgaaagattcaccgtaacycagttgtgaaataaactgatamaagccttcattatatttcataactacttttacaccagaagtataaaaaaaatccttaaaaatgcagtctagtaagtttgttaagacagccagaagaagtaccttgttgtacagcatccagccagagaggtcccccaccaccagctctgccatggtaaagattgggttttgactgtgctcattatgatacagcacaagtgtagaaaaaggaagtgggtaaagaaaaaaaaaaaaagcacacaaaaaaccctgctgaattgaacaatgcaaagctattctaacacctcgcagaggcaaaccg

SEQ ID NO: 48325 - DNA, 381 bp, Chicken  19866894293358_4
ttatatttcataactacttttacaccagaagtataaaaaaaatccttaaaaatgcagtctagtaagtttgttaagacagccagaagaagtaccttgttgtacagcatccagccagagaggtcccccaccaccagctctgccatggtaaagattgggttttgactgtgctcattatgatacagcacaagtgtagaaaaaggaagtgggtaaagaaaaaaaaaaaaagcacacaaaaaaccctgctgaattgaacaatgcaaagctattctaacacctcgcagaggcaaaccgtgatcagayacagttctgttttacagtatcaggtacaggattgggtgaaggggaagagaacaggacatgcaccttgcaaatacaacggcc

SEQ ID NO: 48326 - DNA, 599 bp, Chicken  19866894293360_1
  misc_feature (1)..(11): n is any nucleotide
nnnnnnnnnnnccaaaatgtattttaggctgcataagatttgattcctgtttcatgttaagtttggaattctgaaaagaatctcatctacatattcaaaacttgaaaccaaacctgttgccaacagaaaaatactgttacctaccccagcactgggtccccatcagaatgagcagcttttatttgttcttctcatcagtctattttgtcacatttttcccctttgaaagatacagcaagtttcctttatagtatgacaatgataagctaaaacacccctctgggttactcagttattctytgttctggtgctatgatttgaccagcaattccacagaacacaaaaaggtcaatgcatatcactgcacttcgaaacctcattgttgaggtcatttaagaggcaaaggcaagtggccaaggcaaatgagagctagtcttagaaaaatctcacaatgtcagccaaagaaacagttgccaggaggatcatactataagacaagaaagattggagcccactttggagattcataaagtctacttaaacagacatggtcttcttgctgctattgaattgtgaatacatctgcaggaatatgcatt

SEQ ID NO: 48327 - DNA, 600 bp, Chicken  19866894293362_1
gggcagggcacgaggcctgcggcgcagcgggcaggcaggcccacggcggcaccggcgtcgcggggccactcagcaaacaatgaggagcccggtgcagccccagcccagtggtgctggccaggaagaaagcctgccctttgtgctggacctgcagagcttgccagggctggccaacgttgacctgagcgcccagaaccccaacattcaggtgagaagcggggctgggtgggatgcaggttgagtgattccctaacagttttctatggctttgtgtgtcttggtatcttggcaactctctcrggtgcaaatagcacctcagcttctgaggggctccattggccagcctgcagcgttgccacaaacagtgcttttcactctgaccctgcttagtccctccaaatgatgagatctcttgtgctcgtagtcctgtagaccaaagcagctattgcctcaggcagtccttacgccagaggacatcccacagccaggccatcagccatgccctgactcaccactctgccttgtatctggcttccaggtaaccattgaagtggtggatgatcctcaggctgagatggagatggacttgttgaaggaaac

SEQ ID NO: 48328 - DNA, 600 bp, Chicken  19866894293367_1
agtgtttatactgcaaaagtgctgaggtatttaaagggggtgtgttccaactaacccgtgttttctgactgaacttttcccacctacttcacagcactgaaaagtgcagtgactgaaaggatttagatgctggtttgttttacttgctgtggattgtattttgcaaggaaataaatgacatgaaagaaactggcttttgtaaaagttctctcacagctacaaagcagaagtaaatgggtaaaaaaaacaaacactagtcatcatcaagctgcagcttttagtaggagcacttgctatgtrtaagggccagaaaaacttcctcttgtttactaaattacaagccatcattgtatgagctttgagaagatgttattaagttaraagaaagcaggacagggagtgtagttctttggacatttttttatagttcttaatttwaaaaaaawtgttttttaaactgattatctgaataaataataacctgagtaaaacaagaataaaaaatgctgttagtttaatattaacatactttgtgtagatggaagtaacaacaaagaaatataatagaggcaacctaggaggttagcaatttaattctgt

SEQ ID NO: 48329 - DNA, 600 bp, Chicken  19866894293367_2
acctacttcacagcactgaaaagtgcagtgactgaaaggatttagatgctggtttgttttacttgctgtggattgtattttgcaaggaaataaatgacatgaaagaaactggcttttgtaaaagttctctcacagctacaaagcagaagtaaatgggtaaaaaaaacaaacactagtcatcatcaagctgcagcttttagtaggagcacttgctatgtrtaagggccagaaaaacttcctcttgtttactaaattacaagccatcattgtatgagctttgagaagatgttattaagttaraagaaagcaggacagggagtgtagttctttggacatttttttatagttcttaatttwaaaaaaawtgttttttaaactgattatctgaataaataataacctgagtaaaacaagaataaaaaatgctgttagtttaatattaacatactttgtgtagatggaagtaacaacaaagaaatataatagaggcaacctaggaggttagcaatttaattctgtcttaattacaattaatcagagaaactttttagcttgcctacatccagttttctgtgcaagatttttctattcagcttgtaa

SEQ ID NO: 48330 - DNA, 600 bp, Chicken  19866894293367_3
tttacttgctgtggattgtattttgcaaggaaataaatgacatgaaagaaactggcttttgtaaaagttctctcacagctacaaagcagaagtaaatgggtaaaaaaaacaaacactagtcatcatcaagctgcagcttttagtaggagcacttgctatgtrtaagggccagaaaaacttcctcttgtttactaaattacaagccatcattgtatgagctttgagaagatgttattaagttaraagaaagcaggacagggagtgtagttctttggacatttttttatagttcttaatttwaaaaaaawtgttttttaaactgattatctgaataaataataacctgagtaaaacaagaataaaaaatgctgttagtttaatattaacatactttgtgtagatggaagtaacaacaaagaaatataatagaggcaacctaggaggttagcaatttaattctgtcttaattacaattaatcagagaaactttttagcttgcctacatccagttttctgtgcaagatttttctattcagcttgtaaataacacgctgcagaataagcagatgtggaccttctcaaagtatttgagtgttttgt

SEQ ID NO: 48331 - DNA, 600 bp, Chicken  19866894293367_4
ctgtggattgtattttgcaaggaaataaatgacatgaaagaaactggcttttgtaaaagttctctcacagctacaaagcagaagtaaatgggtaaaaaaaacaaacactagtcatcatcaagctgcagcttttagtaggagcacttgctatgtrtaagggccagaaaaacttcctcttgtttactaaattacaagccatcattgtatgagctttgagaagatgttattaagttaraagaaagcaggacagggagtgtagttctttggacatttttttatagttcttaatttwaaaaaaawtgttttttaaactgattatctgaataaataataacctgagtaaaacaagaataaaaaatgctgttagtttaatattaacatactttgtgtagatggaagtaacaacaaagaaatataatagaggcaacctaggaggttagcaatttaattctgtcttaattacaattaatcagagaaactttttagcttgcctacatccagttttctgtgcaagatttttctattcagcttgtaaataacacgctgcagaataagcagatgtggaccttctcaaagtatttgagtgttttgtcaggcgtt

SEQ ID NO: 48332 - DNA, 600 bp, Chicken  19866894293373_1
gagctcagggacactgagatatcagcactgtccccactgtcccatgagcacccaccagcagagctgctgtaaggctctgggtcccatctggggccatgttgggatatctgcagtgttcccattgcctcatgacaacgggaaatgagactgaatggatggattgagtgggaacccagtgcccaacggagctcccagagagctccaggacaacactggggttctgctccacatcttgggcacgtggggatatctgaggaacctggtggtgttgagaggggtgaaaacccttccggtaactgytgaccccgttccagcagagctgtacagctacactgaggagcccgagctcagcaccaaccggcgatgctttgaggaggagttttgcccccaaggtatgggctctgtgttcagcaccccatggcacagggctgccccgtggcccacacatcgctctgtcscctctgcagcgcggggccggcagtggccgcagctggacacggcgcagcagaaggcccacatcctgcggctgctggaggggctggaggtggtcagcagggagcggcggctgcgggcggcgcgggccatcctctacctggcaca

SEQ ID NO: 48333 - DNA, 600 bp, Chicken  19866894293373_2
gattgagtgggaacccagtgcccaacggagctcccagagagctccaggacaacactggggttctgctccacatcttgggcacgtggggatatctgaggaacctggtggtgttgagaggggtgaaaacccttccggtaactgytgaccccgttccagcagagctgtacagctacactgaggagcccgagctcagcaccaaccggcgatgctttgaggaggagttttgcccccaaggtatgggctctgtgttcagcaccccatggcacagggctgccccgtggcccacacatcgctctgtcscctctgcagcgcggggccggcagtggccgcagctggacacggcgcagcagaaggcccacatcctgcggctgctggaggggctggaggtggtcagcagggagcggcggctgcgggcggcgcgggccatcctctacctggcacagggtgagcactcggcccagctctgtcccagaagggtcccggggggtcccagggcagcactcgctgaccacattcctccctgggcctcctcaggagtgtttggagactgtgagagcgaaggcgatgtcctgcactggtcacggcacaacagcttcctgc

SEQ ID NO: 48334 - DNA, 600 bp, Chicken  19866894293374_1
cagctgcaagatgccagacgctatccctgccagcacagcacaagagcaagctccctcagcagcagtgcatcctcagcctgcctgctgttcagataacgtgcagagtaattcagcaagtcccactctacataataagccactccatacttctggaagaatggaaagggtcagctaagtgaaaaacagcattacatgaaaggttgacattgtcttttcttctttcttcactacgcaaccctccttccctgctttagacttacagttctgtgaggatatgcagccggctgcagaaaacgcackctacgcacagccacgtactccaatgatggaagctgctctaacgagctaaagcagcagaacctgacacatcatctgattcaatcaaagccatggctctgatgaaaagatgtatgatgaacatacacttttgaaactgctttgtaacatactgtcgtgtcttgaatttatattttcaaacatacatgcaccaccaaaatctaagacaaaaaaaaaaaaagggagaaagcagtaattccttttagtttttggctgcaaactctgtaaagataaaaccaggtaatatttaaagtatcccatcac

SEQ ID NO: 48335 - DNA, 600 bp, Chicken  19866894293374_2
aatgatggaagctgctctaacgagctaaagcagcagaacctgacacatcatctgattcaatcaaagccatggctctgatgaaaagatgtatgatgaacatacacttttgaaactgctttgtaacatactgtcgtgtcttgaatttatattttcaaacatacatgcaccaccaaaatctaagacaaaaaaaaaaaaagggagaaagcagtaattccttttagtttttggctgcaaactctgtaaagataaaaccaggtaatatttaaagtatcccatcactcgcctcaacattaaccttgrgatggaacaccaacagttaaagtcaaaccaaaaggctggccatttcactccccaaattactgtactcatgttcaacatgtctatccatatcaacagaacagcacttacaggcctgcaacagaaatgctggcatatgcacttataagctaacaacataagcatggttcaagcaaaaatctatcatataataaagctttaatcagagtgtgccagagaaccgaaggaaatttactcaattcccaatgctcaactaatgctcacctattatttcacccctccttattattatttctccctctc

SEQ ID NO: 48336 - DNA, 600 bp, Chicken  19866894293383_1
cacttgccttaaagcaatgtcagtaacactggttactgtaaggttaacagaaccttattgacattgctttaaggcaagtgtggtgcctgatgtgctgagctgacagggcctggccccaaggcaccacttgcccatgaaatccacgagctagtccccgaagccagcatgcttctttgttttctaaactcaactttctgagatgttgctttgatgcctttcaaggtctaaaatattgaagctttgctttactacgataaaatgttaagttgtacgactatgtaaatatataggcagtttgtrcttttccccatgactgatctgtcactgtcattatttatcgttccactacatttctctcactgcaaaattcaacaattgtattttccttttaatcacttaaatgcttgtgaaactgtagaatagcatgacatcaaaaccagactgatccctttgatacttgaatagaaacacctgttgaattaagaatttcccaggtgtgagttgttctgatttttctcctctctcctttgaaggtctcatctgccagaacgatgagtaagccaaagtcagatgtcttacagaagacctttgtgtcactgc

SEQ ID NO: 48337 - DNA, 600 bp, Chicken  19866894293386_1
agagttggaactagcaaagatgcagatactaccatctctctcttgtgttaaatggggatttgggcttaggagacctagcggagaagtgtgcagtgagggagtgtggtgatttattaaaccattggctaaacgtacacaagggaataattcccactgatcagttacgtgcaacatatgtatggttactgagtaaaaagggatattgattcagatactaaaatgtcaagggaatagtactgtaaagcaaaagaaatgttgcaaagagtttacatctcaacgtggatcttgcagagagtggcscaggcaggaygtcacactggcacacacctgttcccagcygtggggtggaggggaagatttttctccttcagcctacaaagcaaacaacacagagtactacaagcccctaatcaaacagcatgttctagagtaaataggatttggggagtagtcagggggacttggtactacagatgcaaaactgtagacagacaactttcactcaarggctgtaaatcaagtcatgtctacatrgatgcaaagacaattcactctccctgttccaggcagaatgaacaagagccagaggggtagtcagag

SEQ ID NO: 48338 - DNA, 600 bp, Chicken  19866894293386_2
ctagcaaagatgcagatactaccatctctctcttgtgttaaatggggatttgggcttaggagacctagcggagaagtgtgcagtgagggagtgtggtgatttattaaaccattggctaaacgtacacaagggaataattcccactgatcagttacgtgcaacatatgtatggttactgagtaaaaagggatattgattcagatactaaaatgtcaagggaatagtactgtaaagcaaaagaaatgttgcaaagagtttacatctcaacgtggatcttgcagagagtggcscaggcaggaygtcacactggcacacacctgttcccagcygtggggtggaggggaagatttttctccttcagcctacaaagcaaacaacacagagtactacaagcccctaatcaaacagcatgttctagagtaaataggatttggggagtagtcagggggacttggtactacagatgcaaaactgtagacagacaactttcactcaarggctgtaaatcaagtcatgtctacatrgatgcaaagacaattcactctccctgttccaggcagaatgaacaagagccagaggggtagtcagagaacatacata

SEQ ID NO: 48339 - DNA, 600 bp, Chicken  19866894293386_3
ctcttgtgttaaatggggatttgggcttaggagacctagcggagaagtgtgcagtgagggagtgtggtgatttattaaaccattggctaaacgtacacaagggaataattcccactgatcagttacgtgcaacatatgtatggttactgagtaaaaagggatattgattcagatactaaaatgtcaagggaatagtactgtaaagcaaaagaaatgttgcaaagagtttacatctcaacgtggatcttgcagagagtggcscaggcaggaygtcacactggcacacacctgttcccagcygtggggtggaggggaagatttttctccttcagcctacaaagcaaacaacacagagtactacaagcccctaatcaaacagcatgttctagagtaaataggatttggggagtagtcagggggacttggtactacagatgcaaaactgtagacagacaactttcactcaarggctgtaaatcaagtcatgtctacatrgatgcaaagacaattcactctccctgttccaggcagaatgaacaagagccagaggggtagtcagagaacatacatagtatatgagattgttccatcaagaggctg

SEQ ID NO: 48340 - DNA, 600 bp, Chicken  19866894293386_4
tcagatactaaaatgtcaagggaatagtactgtaaagcaaaagaaatgttgcaaagagtttacatctcaacgtggatcttgcagagagtggcscaggcaggaygtcacactggcacacacctgttcccagcygtggggtggaggggaagatttttctccttcagcctacaaagcaaacaacacagagtactacaagcccctaatcaaacagcatgttctagagtaaataggatttggggagtagtcagggggacttggtactacagatgcaaaactgtagacagacaactttcactcaarggctgtaaatcaagtcatgtctacatrgatgcaaagacaattcactctccctgttccaggcagaatgaacaagagccagaggggtagtcagagaacatacatagtatatgagattgttccatcaagaggctgggtgtgtcagctcaagctcagagctacataacagagcactagggcatgcaggctggagctggctcaygtctgatcaccttctagcacaagcagaagtcctgtctctgtacctgtctggtggtttgctgggagcaggggcttgtggaayccagctgcagaaggaccaca

SEQ ID NO: 48341 - DNA, 600 bp, Chicken  19866894293386_5
tactgtaaagcaaaagaaatgttgcaaagagtttacatctcaacgtggatcttgcagagagtggcscaggcaggaygtcacactggcacacacctgttcccagcygtggggtggaggggaagatttttctccttcagcctacaaagcaaacaacacagagtactacaagcccctaatcaaacagcatgttctagagtaaataggatttggggagtagtcagggggacttggtactacagatgcaaaactgtagacagacaactttcactcaarggctgtaaatcaagtcatgtctacatrgatgcaaagacaattcactctccctgttccaggcagaatgaacaagagccagaggggtagtcagagaacatacatagtatatgagattgttccatcaagaggctgggtgtgtcagctcaagctcagagctacataacagagcactagggcatgcaggctggagctggctcaygtctgatcaccttctagcacaagcagaagtcctgtctctgtacctgtctggtggtttgctgggagcaggggcttgtggaayccagctgcagaaggaccacattcacacctgataagtgctctaattag

SEQ ID NO: 48342 - DNA, 600 bp, Chicken  19866894293386_6
ctaatcaaacagcatgttctagagtaaataggatttggggagtagtcagggggacttggtactacagatgcaaaactgtagacagacaactttcactcaarggctgtaaatcaagtcatgtctacatrgatgcaaagacaattcactctccctgttccaggcagaatgaacaagagccagaggggtagtcagagaacatacatagtatatgagattgttccatcaagaggctgggtgtgtcagctcaagctcagagctacataacagagcactagggcatgcaggctggagctggctcaygtctgatcaccttctagcacaagcagaagtcctgtctctgtacctgtctggtggtttgctgggagcaggggcttgtggaayccagctgcagaaggaccacattcacacctgataagtgctctaattagaaatccaagtgagttttacggtatggtcgatggtcctttgctaccaccatcactttctatgtactactcaaatcaccatgcctttgcaaagggatgtggaagcactattaaaaccctttatagaatcaaataattacttccattggaaagtatctcaaagatcattcaattc

SEQ ID NO: 48343 - DNA, 600 bp, Chicken  19866894293386_7
acagacaactttcactcaarggctgtaaatcaagtcatgtctacatrgatgcaaagacaattcactctccctgttccaggcagaatgaacaagagccagaggggtagtcagagaacatacatagtatatgagattgttccatcaagaggctgggtgtgtcagctcaagctcagagctacataacagagcactagggcatgcaggctggagctggctcaygtctgatcaccttctagcacaagcagaagtcctgtctctgtacctgtctggtggtttgctgggagcaggggcttgtggaayccagctgcagaaggaccacattcacacctgataagtgctctaattagaaatccaagtgagttttacggtatggtcgatggtcctttgctaccaccatcactttctatgtactactcaaatcaccatgcctttgcaaagggatgtggaagcactattaaaaccctttatagaatcaaataattacttccattggaaagtatctcaaagatcattcaattccagtccccctgccaacagcagggctgccagccccagatcatgctgcccagggccccatacaacctggctttgaatgcctcc

SEQ ID NO: 48344 - DNA, 599 bp, Chicken  19866894293389_1
  misc_feature (1)..(185): n is any nucleotide
nnnnnnnnnnnnnnnnnnnnnnnnnnnnnnnnnnnnnnnnnnnnnnnnnnnnnnnnnnnnnnnnnnnnnnnnnnnnnnnnnnnnnnnnnnnnnnnnnnnnnnnnnnnnnnnnnnnnnnnnnnnnnnnnnnnnnnnnnnnnnnnnnnnnnnnnnnnnnnnnnnnnnnnnnnnnnnnnnnnnnnnnnacacctgaggttaggttttctagtagtgctatgttcttaccacattctgtagtgagacacaaaagcactgaaagtacatattcatacccatcttctcaatttcggtgccttcacmaagcatctaattgagatgggatgtactcaagcatctgtatgtttcaaagactgaatgatttaatgctcataaccacgccaggctgctccttccagaaactatgcacaagacaagaattttcctgttacttgggaattttatccatttaccaatatgttcactgctctccttccctacatgtgaatatcttctgcttgtctgttttaccaagaaaggaatgctcaggattcctgtgcgccgtcaattcaagaaaagcrcaagggtgaaattcacagcagctcctgaagtttatcagtggc

SEQ ID NO: 48345 - DNA, 600 bp, Chicken  19866894293389_2
agtacatattcatacccatcttctcaatttcggtgccttcacmaagcatctaattgagatgggatgtactcaagcatctgtatgtttcaaagactgaatgatttaatgctcataaccacgccaggctgctccttccagaaactatgcacaagacaagaattttcctgttacttgggaattttatccatttaccaatatgttcactgctctccttccctacatgtgaatatcttctgcttgtctgttttaccaagaaaggaatgctcaggattcctgtgcgccgtcaattcaagaaaagcrcaagggtgaaattcacagcagctcctgaagtttatcagtggctctgatggctattcttgtcttaccatcacgtacactaatcacattaataatttattcattatattaactgcaattattcctttgatcttttatgaatagggaaggatacttaataaaaaatgactgattatctgtgtggtagcatcaccaataaaaagagtagaaagactaataaagttacttcaaagtgaccagcagttctctctaatgaaaagaacagcattttacccatacttatcaatttttaaaataaatacg

SEQ ID NO: 48346 - DNA, 531 bp, Chicken  19866894293392_1
tggggttacggtcttatgagagtgtaggcatgtactgaaagagcagtaatatccagggttggaatagttaatgctaaaaggaagagtattggaacaaaaatgaaaccttatgcttcagcatttaaagcaatctcaacttactaagagatttttctcagcgtgatgaaaagagggaggcattatccacctttgctgctctgagattctgaaaccttcctccgaaataccaggtcctggatgctgctgcaaatacaggcactgcactgggtggatctcaaacttgatgcagactgtcatttwtgttaccagtatctcctgtacattgtactgttgaccacgtactacaacaggacatcattctatacaacacgcatttctttgagggcatgatcttcagctgacctattacctatttgttcatttatttatttcagtgccagagacgtcttctcatgccacatatatacttatttcacataaagcataattagactttggagctcattatcacaatctcccccggggtacaca

SEQ ID NO: 48347 - DNA, 600 bp, Chicken  19866894293394_1
cccagtccattactggggtcatcatggtagcagctattccccactgagtggcatggcccagccttggccacttgcccagcactcacaacaaccaaacactgatgttcaattggcactgtcagagctgaaaccaggggccaaggagtgtgtagtgcagggctaacacaagttatggcaaatagttgtatcattttgatacattggctaaacagaatcctgtgtacagcaaaatacaggtatattaataaaggaatttgagaacaagtttcaatatttcataagaagcatcatttttttttyccgtataactgcaaactccattttcagttggcgtaaacatattttccgtggattttaaaatggtatgtaaagagctgcaatcagatattcaactcaaaaatttgagctcgtgccactttaccagactttgataagactttttataagagattatcagagaaaaatatctctcacttcccaatcctgtcttattcaagtcatcatttttggcaataagtacatttgtgattaactgttttcaaaaatgaagtacaggaagagtaaaatttcatcaaatatctcttatgaataccttgaaaa

SEQ ID NO: 48348 - DNA, 600 bp, Chicken  19866894293397_1
aaataaattgggaaaacagaattcttgctttgtttaagcatctcttttagccagttagcaagagcctgtcttgtaccagaagtcctagcactgatttttctaggctttaccttttaacgctcttccttttgacttacactgcgtgctctttgccatttgagcacctcggaccctgcatctctgtgcacattgagccacgtgatgtacttagaggacatccaaggtgcccaggcctcacagcccacctgcagaaccagacacccacctacaggacagagggaacctgtccttttcttctgygggagcagaatgaggctgggggagtggtggctgtcactctggtgttcccactagccctggcccacagtaggctgtagggcatccttgagttggctgtgatttctcatctcacctgggactgaatggcttgcttcccacagtcctgtcgttgtagcatcagtatagacgtgacacaacactgcgtcytctcagagcacatctgtcagaagtgccccctgcagagctgtgggcatccttccactgtcycagcagaccttatgcagcacatcaaaacatctgggctgagagcctgtgggggtt

SEQ ID NO: 48349 - DNA, 600 bp, Chicken  19866894293397_2
acattgagccacgtgatgtacttagaggacatccaaggtgcccaggcctcacagcccacctgcagaaccagacacccacctacaggacagagggaacctgtccttttcttctgygggagcagaatgaggctgggggagtggtggctgtcactctggtgttcccactagccctggcccacagtaggctgtagggcatccttgagttggctgtgatttctcatctcacctgggactgaatggcttgcttcccacagtcctgtcgttgtagcatcagtatagacgtgacacaacactgcgtcytctcagagcacatctgtcagaagtgccccctgcagagctgtgggcatccttccactgtcycagcagaccttatgcagcacatcaaaacatctgggctgagagcctgtgggggttgttattgttttcccgttcattttattaacagaaaatgcctagaactagaggagcttagtgcagggggacgcagctgctgttgaagaacataacrtgacaatcaaaggagaggcggtgaccttggtattcatttaaatgactttttcattggcattgaatttaatggcaatcctcgcaggactattg

SEQ ID NO: 48350 - DNA, 600 bp, Chicken  19866894293397_3
tgcagaaccagacacccacctacaggacagagggaacctgtccttttcttctgygggagcagaatgaggctgggggagtggtggctgtcactctggtgttcccactagccctggcccacagtaggctgtagggcatccttgagttggctgtgatttctcatctcacctgggactgaatggcttgcttcccacagtcctgtcgttgtagcatcagtatagacgtgacacaacactgcgtcytctcagagcacatctgtcagaagtgccccctgcagagctgtgggcatccttccactgtcycagcagaccttatgcagcacatcaaaacatctgggctgagagcctgtgggggttgttattgttttcccgttcattttattaacagaaaatgcctagaactagaggagcttagtgcagggggacgcagctgctgttgaagaacataacrtgacaatcaaaggagaggcggtgaccttggtattcatttaaatgactttttcattggcattgaatttaatggcaatcctcgcaggactattgaagggtaggataaataattgtaggagagatgaatggatttgcagtgtgtggatctgactt

SEQ ID NO: 48351 - DNA, 527 bp, Chicken  19866894293397_4
tgtgatttctcatctcacctgggactgaatggcttgcttcccacagtcctgtcgttgtagcatcagtatagacgtgacacaacactgcgtcytctcagagcacatctgtcagaagtgccccctgcagagctgtgggcatccttccactgtcycagcagaccttatgcagcacatcaaaacatctgggctgagagcctgtgggggttgttattgttttcccgttcattttattaacagaaaatgcctagaactagaggagcttagtgcagggggacgcagctgctgttgaagaacataacrtgacaatcaaaggagaggcggtgaccttggtattcatttaaatgactttttcattggcattgaatttaatggcaatcctcgcaggactattgaagggtaggataaataattgtaggagagatgaatggatttgcagtgtgtggatctgacttctgactcgtctctccaccctctgccatggtagatgggaacaggctgtggcaagcaatagcaaaattcttataaag

SEQ ID NO: 48352 - DNA, 599 bp, Chicken  19866894293402_1
  misc_feature (1)..(153): n is any nucleotide
nnnnnnnnnnnnnnnnnnnnnnnnnnnnnnnnnnnnnnnnnnnnnnnnnnnnnnnnnnnnnnnnnnnnnnnnnnnnnnnnnnnnnnnnnnnnnnnnnnnnnnnnnnnnnnnnnnnnnnnnnnnnnnnnnnnnnnnnnnnnnnnnnnnnnnnnntctcctgatatcttttgttgttgttgggtttctttgtatttatgtatcaaaaggtttgggacagatggatgactccctgccatagggatacttacaaaaccccatttctcctaaggaaacagtcaacatattctgcttgctgagagwcccatgacacagctgcacrcacagagttttagcatagtcacattgccagaagactggataggatagaaagcacaagtagatacctatatccacatccctatgaatttaagaaagaaacctgaggaagctgttagctttctgatttcaaattgggtataaacagagaaagagaagaaaaatgtatttcytcctrtaacattcacttttgctttcagaaacagtggatgtatttcagccatttccatacgtcacattggaacctccctgtttatttcctgttgagcttatttttcttgttt

SEQ ID NO: 48353 - DNA, 599 bp, Chicken  19866894293402_2
  misc_feature (1)..(134): n is any nucleotide
nnnnnnnnnnnnnnnnnnnnnnnnnnnnnnnnnnnnnnnnnnnnnnnnnnnnnnnnnnnnnnnnnnnnnnnnnnnnnnnnnnnnnnnnnnnnnnnnnnnnnnnnnnnnnnnnnnnnnnnnnnnnnnnnnnnnnntctcctgatatcttttgttgttgttgggtttctttgtatttatgtatcaaaaggtttgggacagatggatgactccctgccatagggatacttacaaaaccccatttctcctaaggaaacagtcaacatattctgcttgctgagagwcccatgacacagctgcacrcacagagttttagcatagtcacattgccagaagactggataggatagaaagcacaagtagatacctatatccacatccctatgaatttaagaaagaaacctgaggaagctgttagctttctgatttcaaattgggtataaacagagaaagagaagaaaaatgtatttcytcctrtaacattcacttttgctttcagaaacagtggatgtatttcagccatttccatacgtcacattggaacctccctgtttatttcctgttgagcttatttttcttgtttttctttcagttaatggtgc

SEQ ID NO: 48354 - DNA, 600 bp, Chicken  19866894293402_3
gtatttatgtatcaaaaggtttgggacagatggatgactccctgccatagggatacttacaaaaccccatttctcctaaggaaacagtcaacatattctgcttgctgagagwcccatgacacagctgcacrcacagagttttagcatagtcacattgccagaagactggataggatagaaagcacaagtagatacctatatccacatccctatgaatttaagaaagaaacctgaggaagctgttagctttctgatttcaaattgggtataaacagagaaagagaagaaaaatgtatttcytcctrtaacattcacttttgctttcagaaacagtggatgtatttcagccatttccatacgtcacattggaacctccctgtttatttcctgttgagcttatttttcttgtttttctttcagttaatggtgccgttcaaaagaaagaggaaaaaagctgtaattctctgctccttccaaccaaattcactcttatggttaacattttctatagctacatgtccaggaacacacatcccttgacatctcctctctgcacgctttgattaccgcacctcataaatatatttattttcaagttca

SEQ ID NO: 48355 - DNA, 600 bp, Chicken  19866894293402_4
tatgtatcaaaaggtttgggacagatggatgactccctgccatagggatacttacaaaaccccatttctcctaaggaaacagtcaacatattctgcttgctgagagwcccatgacacagctgcacrcacagagttttagcatagtcacattgccagaagactggataggatagaaagcacaagtagatacctatatccacatccctatgaatttaagaaagaaacctgaggaagctgttagctttctgatttcaaattgggtataaacagagaaagagaagaaaaatgtatttcytcctrtaacattcacttttgctttcagaaacagtggatgtatttcagccatttccatacgtcacattggaacctccctgtttatttcctgttgagcttatttttcttgtttttctttcagttaatggtgccgttcaaaagaaagaggaaaaaagctgtaattctctgctccttccaaccaaattcactcttatggttaacattttctatagctacatgtccaggaacacacatcccttgacatctcctctctgcacgctttgattaccgcacctcataaatatatttattttcaagttcactaat

SEQ ID NO: 48356 - DNA, 600 bp, Chicken  19866894293409_1
aggctggttggggctcagagtacctgctgtagctgtaggtgtccttgttcattctgtgattctatgattaaggtaatcctcctgggctacactgaatttcatcaagttttggggattagttcttatagaaggaaaagctgagtcagcctcagctgaatgccatttccatcactctaattagaagtgcttgcagccgatgaggagagctgttaggcatgcaagggatttccttcatgcaggtgagctgggctatttggtactctatccgtgggtcatcattcatgcctgaggagtaccgcrtggtggcttggagaagaaaccgtgagtagtaactgctgttttgtttggggggagggggagggctagcatgtgaggcagtttatttggcagactggaattaagctatgttttttcaaatgtagttcattatcatagtcagcagtttctttactgtccttgacatgtattttcacgattgctgtctctacagctttgctagtggttttaggctctgcatgctctttgctctgttacggaattcctacttttagatccttctgttttaaactttgttatttccaagttcctgagttgtaaggt

SEQ ID NO: 48357 - DNA, 600 bp, Chicken  19866894293410_1
gaaatctgggcccaaactgcaatgcatgtgacacagcatatgaggggagtgagcaggctgacgtaggcaggaggaagaatggaggtgtcatagcaaagcaaagtgtatatggttcaggtcagtgatcctgggctcctttcctgaccccctgcggtgtcttctcactgtagctctcactctggaaccagaggctcaaaggagcaagaggggcacaggagggagggatgggcctgcagctcatcgtagcagatgttatgtgcaggggttgctgacctctcgtgaggtgtatgatcaatagayccatctggtacatctagtgtaaccaaatggggagcataaggtgtcctaaaggtgtgtcctgtaaccacaagtggcttaggtgccttgttagggctttgtgctggtgatggggcaggtatgttgttagtgctggagctctctgtgtctgggacagagcggggatgtggctggagagatgtgcatctacatgtttgtggtgccacagtatatgggtgtaagaatatatacacaattaggcatagcagacccttaatattaaataaatcttcttgtgctatttccaactttgattaaaatgta

SEQ ID NO: 48358 - DNA, 600 bp, Chicken  19866894293410_2
tatgttgttagtgctggagctctctgtgtctgggacagagcggggatgtggctggagagatgtgcatctacatgtttgtggtgccacagtatatgggtgtaagaatatatacacaattaggcatagcagacccttaatattaaataaatcttcttgtgctatttccaactttgattaaaatgtaactcaaaatagagtactatatgaggggtgcattctgataaatgtgaaataatggtttttcatgagtgctctgagtggattgtggagttcatcacaagagttcttagccggctgctyrgcagataaggagcacgaggtgagggtgaaggaaggccttgttcagagaagtgggtcagtagggaaccaaatctgtgtgctgctcttaaggctgtgctgctgcagctgcatttttgtagtgcttgctcaggattatgctgtttcttgtttgttccctctaagcgtgctttgatggctctggttctattatgcagattaaaaccatgtctttagcaggcgtaggaaatcattgccaggattatcttgactttggcctgttttagacttgaagttatgcgtgaaacttcgttttattgctgg

SEQ ID NO: 48359 - DNA, 600 bp, Chicken  19866894293410_3
atgttgttagtgctggagctctctgtgtctgggacagagcggggatgtggctggagagatgtgcatctacatgtttgtggtgccacagtatatgggtgtaagaatatatacacaattaggcatagcagacccttaatattaaataaatcttcttgtgctatttccaactttgattaaaatgtaactcaaaatagagtactatatgaggggtgcattctgataaatgtgaaataatggtttttcatgagtgctctgagtggattgtggagttcatcacaagagttcttagccggctgctyrgcagataaggagcacgaggtgagggtgaaggaaggccttgttcagagaagtgggtcagtagggaaccaaatctgtgtgctgctcttaaggctgtgctgctgcagctgcatttttgtagtgcttgctcaggattatgctgtttcttgtttgttccctctaagcgtgctttgatggctctggttctattatgcagattaaaaccatgtctttagcaggcgtaggaaatcattgccaggattatcttgactttggcctgttttagacttgaagttatgcgtgaaacttcgttttattgctgga

SEQ ID NO: 48360 - DNA, 600 bp, Chicken  19866894293415_1
gaaaaataagattttctgactggtgtgaaaaggtatgtgtgtatacgtgtctgtgtgtatatatgtatatacgtgtatgtatgtctattaaaaagagaatatcattcctcttgcatctttttgatgtaagtggtgtataggtaaaaggcagagctagaagtgattgttagataagatattcccttttggctacccttctcttccctctgccatcacttttttgttatttctatttatttatggaaatgaatgtgtgttgtacctcctataaaggttatcagatagatattccctgtgacyggggacctgatgaactacctgaggaactccattacgtataatctaatttcattaacttttggcacaatatttattacctttatttctatatggttaatccctgctcctggaaaaaagataatttttagaagtccagttagtttcactaaaactgtattctcttcctcagtgtctttacttaaaaaaagaatccctcttgtggggattccccatgttctgaggaaacgttgttgttttttagctttagaagaaataaatcagactagtgaaaaaatgggtctatccatagttgcaatattc

SEQ ID NO: 48361 - DNA, 544 bp, Chicken  19866894293415_2
atggttaatccctgctcctggaaaaaagataatttttagaagtccagttagtttcactaaaactgtattctcttcctcagtgtctttacttaaaaaaagaatccctcttgtggggattccccatgttctgaggaaacgttgttgttttttagctttagaagaaataaatcagactagtgaaaaaatgggtctatccatagttgcaatattctaattaatcactgtgacagcctggattgtctggaaagttaggagaaaagaagagtaacttccctgagtcacttgccaagagagcattayrtttccaaaagtgaagtggttcgtcttttcagactccatactttcaaggtgaggactattttagtcaattgcctatccaggaagaagaataaagatattctggaagtatgaagtgtgcacatgagaatgtgaagtatgcttgtccattatgatttcatgaagaagggatttcagggggagagctttcaggagtagtttgttttgggaagaaaaagaactcacttggggcattacattggttttt

SEQ ID NO: 48362 - DNA, 543 bp, Chicken  19866894293415_3
tggttaatccctgctcctggaaaaaagataatttttagaagtccagttagtttcactaaaactgtattctcttcctcagtgtctttacttaaaaaaagaatccctcttgtggggattccccatgttctgaggaaacgttgttgttttttagctttagaagaaataaatcagactagtgaaaaaatgggtctatccatagttgcaatattctaattaatcactgtgacagcctggattgtctggaaagttaggagaaaagaagagtaacttccctgagtcacttgccaagagagcattayrtttccaaaagtgaagtggttcgtcttttcagactccatactttcaaggtgaggactattttagtcaattgcctatccaggaagaagaataaagatattctggaagtatgaagtgtgcacatgagaatgtgaagtatgcttgtccattatgatttcatgaagaagggatttcagggggagagctttcaggagtagtttgttttgggaagaaaaagaactcacttggggcattacattggttttt

SEQ ID NO: 48363 - DNA, 600 bp, Chicken  19866894293422_1
tgagtgtcttaaggctgcaatttcaagaagttgataaaccatcagtgtatcctccagccggcgtgcagcactgcaggctccaggctgctctgtctctgtgctgttatgatctgccagccccacgtgtgggtcccactgaggagctcctttcagaagccatatgttcactgctttcattgtgggattgcagtttcctgaacaagacataaaatttaagagcctctcctcctggaactgaggatttccttctcattaggatcactgtgcccatctctgtgcagaacccttctcaggagacakttccagccaagrcgcccaccgaagtcctaatattgctgatgattgtctttcccaatttcttccaatagcttcagtctaatgaaacaccctgtgctaggagaaaatctgggaggaaaagaatgcacgtggatgtagatgcctgtgtgcagctggggatggggctgtgctggtagtgcacaggtacccatgggagtggtttgcatggggacygytacagggacaggaggaggtggtcacctctgaagcatgacrctgatgaggactgaggtgcccaagcccactgcatcccaccgatgtcag

SEQ ID NO: 48364 - DNA, 600 bp, Chicken  19866894293422_2
ggctgcaatttcaagaagttgataaaccatcagtgtatcctccagccggcgtgcagcactgcaggctccaggctgctctgtctctgtgctgttatgatctgccagccccacgtgtgggtcccactgaggagctcctttcagaagccatatgttcactgctttcattgtgggattgcagtttcctgaacaagacataaaatttaagagcctctcctcctggaactgaggatttccttctcattaggatcactgtgcccatctctgtgcagaacccttctcaggagacakttccagccaagrcgcccaccgaagtcctaatattgctgatgattgtctttcccaatttcttccaatagcttcagtctaatgaaacaccctgtgctaggagaaaatctgggaggaaaagaatgcacgtggatgtagatgcctgtgtgcagctggggatggggctgtgctggtagtgcacaggtacccatgggagtggtttgcatggggacygytacagggacaggaggaggtggtcacctctgaagcatgacrctgatgaggactgaggtgcccaagcccactgcatcccaccgatgtcagcattgctgtctt

SEQ ID NO: 48365 - DNA, 600 bp, Chicken  19866894293422_3
atttaagagcctctcctcctggaactgaggatttccttctcattaggatcactgtgcccatctctgtgcagaacccttctcaggagacakttccagccaagrcgcccaccgaagtcctaatattgctgatgattgtctttcccaatttcttccaatagcttcagtctaatgaaacaccctgtgctaggagaaaatctgggaggaaaagaatgcacgtggatgtagatgcctgtgtgcagctggggatggggctgtgctggtagtgcacaggtacccatgggagtggtttgcatggggacygytacagggacaggaggaggtggtcacctctgaagcatgacrctgatgaggactgaggtgcccaagcccactgcatcccaccgatgtcagcattgctgtcttccacccgtctcttttagagcaatctattttttggctgctcatggggagcgtttaccataatggatgggttgggcaatagcacgggaagaagaccacatccctgctgagctttcaggaggagccgtgcacctgtgggggctctgtgcatggaggaggaccaggatatgtttggtatccagaaggttttgatgactgctg

SEQ ID NO: 48366 - DNA, 600 bp, Chicken  19866894293422_4
ttaagagcctctcctcctggaactgaggatttccttctcattaggatcactgtgcccatctctgtgcagaacccttctcaggagacakttccagccaagrcgcccaccgaagtcctaatattgctgatgattgtctttcccaatttcttccaatagcttcagtctaatgaaacaccctgtgctaggagaaaatctgggaggaaaagaatgcacgtggatgtagatgcctgtgtgcagctggggatggggctgtgctggtagtgcacaggtacccatgggagtggtttgcatggggacygytacagggacaggaggaggtggtcacctctgaagcatgacrctgatgaggactgaggtgcccaagcccactgcatcccaccgatgtcagcattgctgtcttccacccgtctcttttagagcaatctattttttggctgctcatggggagcgtttaccataatggatgggttgggcaatagcacgggaagaagaccacatccctgctgagctttcaggaggagccgtgcacctgtgggggctctgtgcatggaggaggaccaggatatgtttggtatccagaaggttttgatgactgctgac

SEQ ID NO: 48367 - DNA, 600 bp, Chicken  19866894293422_5
ttaggatcactgtgcccatctctgtgcagaacccttctcaggagacakttccagccaagrcgcccaccgaagtcctaatattgctgatgattgtctttcccaatttcttccaatagcttcagtctaatgaaacaccctgtgctaggagaaaatctgggaggaaaagaatgcacgtggatgtagatgcctgtgtgcagctggggatggggctgtgctggtagtgcacaggtacccatgggagtggtttgcatggggacygytacagggacaggaggaggtggtcacctctgaagcatgacrctgatgaggactgaggtgcccaagcccactgcatcccaccgatgtcagcattgctgtcttccacccgtctcttttagagcaatctattttttggctgctcatggggagcgtttaccataatggatgggttgggcaatagcacgggaagaagaccacatccctgctgagctttcaggaggagccgtgcacctgtgggggctctgtgcatggaggaggaccaggatatgtttggtatccagaaggttttgatgactgctgacccaggatgaagccagcagggctgctccgatgctccaggcc

SEQ ID NO: 48368 - DNA, 600 bp, Chicken  19866894293444_1
acagctaaggcttgtgtgtggaggggaatatgggttaatggaccatggctataactgggggaaaactcttccagtttgggtctgagagaacagtttatcatgccgtggttaaattgctcaagcattgatcctttttccatagctgttttaaataagccactccaaaaagcttcggtgtttccggtctcatgtagcacctcaggaagggtgtgggtatttttcccccatactcaaatcagtggtacttttctcaccttcttccctatgttctctatgtgtaacgtttcccctattgttgtmaatgaccactttgtcccattgtagagcaaacaccagctgcaattctgttataggggagctgagatctggtaagttggctgtatgctgcagggctggggctgggcacacgggttggtccaaacagtggtgacacctgtttggagacaggatttgtggaaggtgaaatacgaggggattactctacattgctgggaggctgcagtccggtgatttgtactgcaggcgctccctctgaagtcaatgagatttgcaaagcgtgtaaatcactatggaatttggcattttcctaggaaaacaggg

SEQ ID NO: 48369 - DNA, 600 bp, Chicken  19866894293449_1
tgttggtatagctgaggttgccagacatatttctcttttttccctgaccagaaatctttcccaggtagaatcagaaaacggcactgtagttagtgacgctcaagcatgatcttctatgaagcatccagtatgctaaatgagacttgtctcccataggcagtgcaggtggtctggatgcaaaagactcagggcagatataaggagaatgaaataaggttgctatttcccagatgtactgttgaaagtcccaaacaggtgttgtagtggtggcctgcaaatttacagtaaatctgatgtacwcaaaaagtgcaaactcaagcgagtatgtgagttgcctagggaatatacatacagttcagaaactgcaatatcctgttagggtgacataaaatatggtctgacaatcagttgagaaaatgcaatggtattgccattctgaaattgacatcgccagagacaagtcccttaatgttaagaaatacctagttaccaaaaagagacaaaagaaaaggcaatagcagaagactaatcccacaagtagcgtctggataaagaagtgtctggatatgatgtgtgtgataggaccatttcttagaagct

SEQ ID NO: 48370 - DNA, 600 bp, Chicken  19866894293464_1
aatgttgcaggtactgaaatcagatgaatcagattcagaacatctttgtgcgcaggcacgctgagttcaaatgtgctcatttttcaaatgttggggaaggcacacaaaaatttcacttcctggcacccacaggacttcactgcctatatgatgggcatgtcacccagacagcagacaagaaacatttccagtatcacctttgcttaagtgcactgatgaaagactgaaggatttgattggtcatacctagctgatgtacatgaccacagcaatactgaagctgcaatggatttctagcayaaatgacagcatagcaacactgcctcagcgtagctgtgccttcagctgaaactccagccctgggactctgccaacaagtgtggtctaacagccttccctggcaagcccttctagggtagaaggactgtctctttctacaccttacttatatttgatcaggaatatatcttttggagcaattaaaattttgctcagaagcagataatactgcagcccagatagctattttgaaactatactaactgcataatagagaaatgatgtgtggacacctgacatgaacccaaatctctgatttgc

SEQ ID NO: 48371 - DNA, 600 bp, Chicken  19866894293466_1
tttgtcacaatacttaaccttggtttcctgcattgtacaacagcagtagtcctccatagtaaaagaacattaagcgctgggggttctggctttttcgtttgcctagtggaaaacagatgtctgttcaggttgtttcatcttcaggtgaattaaagagacctgggaaattctgtgtcaatttatattacaagtattagaagatttccagcaagcatgccaaaaggtggaaggggaagtatcgaaataggttgtgtttctgacccattaggtgttcattgtgcttgttcttgtctcctggcrataggtatccgactggtatatcgatttcagtacttcgggtggaactgaccgggaaggctggcagtatgcggcagactttccagcgtaagkaaataacttcttctgcctaaaatcctcacaggcatcttttaacttctctttttctcatttgctgttttgcacattaaccatgcttgatcagggacaagcatgccttgatttctcctgtcctatggggacagtaacgctgacatttgcaggggaggcagggcagcaggtctgtctggtgggcagaagcatggacagtgctctcaggctgcc

SEQ ID NO: 48372 - DNA, 600 bp, Chicken  19866894293466_2
tttttcgtttgcctagtggaaaacagatgtctgttcaggttgtttcatcttcaggtgaattaaagagacctgggaaattctgtgtcaatttatattacaagtattagaagatttccagcaagcatgccaaaaggtggaaggggaagtatcgaaataggttgtgtttctgacccattaggtgttcattgtgcttgttcttgtctcctggcrataggtatccgactggtatatcgatttcagtacttcgggtggaactgaccgggaaggctggcagtatgcggcagactttccagcgtaagkaaataacttcttctgcctaaaatcctcacaggcatcttttaacttctctttttctcatttgctgttttgcacattaaccatgcttgatcagggacaagcatgccttgatttctcctgtcctatggggacagtaacgctgacatttgcaggggaggcagggcagcaggtctgtctggtgggcagaagcatggacagtgctctcaggctgcccctgaggttggagttgccctgacatcctcatgaacacatatttcaacctgttttggtaggtcctaccatggccacaagacaatgaaagac

SEQ ID NO: 48373 - DNA, 600 bp, Chicken  19866894293466_3
catcacacggtgaacaagagtaatagtaaagaaacccgcaatgaataacccacctccagtagagaagctcagggtccttagcattatggcttttattttaagcagataagctatttggtcttgtgggacctgtaggaaacagtctgctagtgattctctgtatctgttctttctgtatggtaaattattaaggaacaacaaggtctagatatactagtacatactaattcacctaaaacaactggaatatgtgtcagctatagtacctgttttaacatatgactcccacacgctgtacastaggccacaggtaatcccaaccccatttaaatcacagtacaccgcatccagatagaaccaggaaaattgcaagctgcaattactatattctattaagaagggaaagtctgtgcatttactgtttttccagcttctctatcctttctgtactagaacatctaataactacaccaataaattactgtgatctgacagttaggcattgttcagtttgttgctgaggctgcagagctggcgtttcagcctttgtatgatatcttatgaggccctgaagcatcgagccgctgttgttccaggcta

SEQ ID NO: 48374 - DNA, 600 bp, Chicken  19866894293466_4
cagttggcaccaaaacccaagttgtaaagcgattcccgtagccaagccagaggaatgagctgggtgtggagctccctgtgcagtgggattctcagctgatgtcacattcagctgctgtgcactgagttacagctaggataaaggacagcaaaagctgccaaattctctaacagccttggttttatgcagtaacttctttttaattaagaaaaagccttgtgaaatcagaacagatgtagtaaacccattgtaaattaaaaacaaaaacaaccaaccgctaattcttattgtacctatttratgagcggacctcaggaccgttcacactgaagtcaacaacggaccagggaacaagttcagttatagaaagtacatacttctgatgggtctggggtttttttacttcagaaaatgtaagatagtcaccaacgggccatggctggaagtgcctcctgttaccctgtgggacatctccataattcccagttcagatgcagatgatgaagaatcagtagcactgtgggcaatcagtgacaaaggagacgtgctctgcaggcttggagtgacacagcaaaacccagctgtaaggctccctggtta

SEQ ID NO: 48375 - DNA, 599 bp, Chicken  19866894293473_1
  misc_feature (1)..(1): n is any nucleotide
ncctgtaaatctagttaagattaaactctgaaatcactcagacatggagaggccaaagtccctttctggtgcaccctgagagagcaggatggtgcttctgctcccacagaggattctttttgtctccttactctggagaaagcccacgaggctgaatcttacacaacacatttgacaaatgaggctgtggtgagattgtggctttagtgaacagatgcggtgacacagggtgggaaagtccccagaactcccaccaagaggaaaagggatggaatttaccagcgaccaagctgaaggagsaggatggaacggtgagaaaggagctggttccaggttagtcacctatgactgctgaggttaggaaggactgagttagcaggcagtatttttttttccctttctttttgaggtcttcaggttccctgggtcaaaggcagaagcagaggaatgccactgcagggtgtaaatcaaaaggaggagaaacaatcatttgctctcatcgaagtgggaagtgcaagaacgtgaatgcaggaagcaaacaaagttggtaacacctcttggcagtgaggtgtgcttgttctgaaaacgaacgctttctg

SEQ ID NO: 48376 - DNA, 600 bp, Chicken  19866894293474_1
aactgtgctattacccagcaagctaaataatcattcccagcttgaccttgactgtgacttttcaaattaaatattacatttatgaataagcatagtattacttgagcatacactgtgaatttaaaagaatcatagattacatttgtaaagtacctttgcttaatcctcctgagagtagtcttaaaatccttaaaatcagttgtgtgttcacacatggatacacacacacgtgtgagtaggtgtagaaaatattgttgaaaggcacaatcatgtctacaattattacaattttttttagtyagaagataacgccaaagaagaggaaatctgcagctcatatgataagaaagtaagttttattgcactactttattctacttcagtcataaagctttcaattagaattttgcacctatatggggttaaatacacgatacgcagttttgcttgctaatgaaaaatgtgactgtgtatatttcatgtcaaacattattttagagcaatttaattaataaaataagtcacttctctcaagcatattggcttttgctctgaaaatacactgtgcctatatgatagttctaatatacatactgctcc

SEQ ID NO: 48377 - DNA, 600 bp, Chicken  19866894293477_1
acgcagctcatcacttggcctttccttaatgccactgctgcttactcaacgtgggaaaaggatggaaagtaatcacaagtttcacaatggaacttgaaggtggaaggaatcctccagctccaacaaggaatgtaaaggttgcacttaggaggtttgcaccaaataaaagggctatttcacaaaacgtggctttttaaaatgagctttctgcacccaacctcaaaccattaaacagcacaacgaagcccccattactgagcacctgctaaagcaatcagtcacttaaaacaataactctcstggcagcgcaactgagagaacgatgataacagaaagaaacggttggcccagcatgaggatgggaagaggcagcggaatgaccacacagtgcccaccctcagcaccaacgctcacctctgcagagcaaagggaaacttgtccatgcaacgtctcaacctcaccagcgtgcccagatcttcttctatggagctcaggcgcttcgtcacctggaaggcttttccaaatcagttcagaagaagagggaagttcatcagcccattgcatcacactttggacagaacaggccttggctgcagcaga

SEQ ID NO: 48378 - DNA, 599 bp, Chicken  19866894293478_1
  misc_feature (1)..(137): n is any nucleotide
nnnnnnnnnnnnnnnnnnnnnnnnnnnnnnnnnnnnnnnnnnnnnnnnnnnnnnnnnnnnnnnnnnnnnnnnnnnnnnnnnnnnnnnnnnnnnnnnnnnnnnnnnnnnnnnnnnnnnnnnnnnnnnnnnnnnnnnnntttaaaaataatagtaatttaaaaaatatcatttaattgttctgttctcatgattctaaaacgctatgatgtgaatatataaatatttcagttttggttaggaatgatgcccaattatacatgtaaagatgctttggacagtatggttgagcatatatatgtytgtttttttttattatagagcccatgaattattagaaagtcctgtcacaccacattggagtctgctgtatccatagaaatgctccatgtcctgatcagaagcagcacaagctcagtgtgaaataaaagacaacaactgtgaataatgatatggctgcggtagaagcccaggcataaacagcacataaatgtaaatcgggggtcgcagtctggaggtacaaacaaggcagtcgggaagcaaaggcttgatttttcaggcttaaaaacagccatgaaaagcayggtgaatttattaaaatc

SEQ ID NO: 48379 - DNA, 600 bp, Chicken  19866894293478_2
ggttgagcatatatatgtytgtttttttttattatagagcccatgaattattagaaagtcctgtcacaccacattggagtctgctgtatccatagaaatgctccatgtcctgatcagaagcagcacaagctcagtgtgaaataaaagacaacaactgtgaataatgatatggctgcggtagaagcccaggcataaacagcacataaatgtaaatcgggggtcgcagtctggaggtacaaacaaggcagtcgggaagcaaaggcttgatttttcaggcttaaaaacagccatgaaaagcayggtgaatttattaaaatcraaagtacgtctatgtcttttttccttttaatcatttgctttttaattcagtcatgtaatggcttgtttgtatctgttctcagttattaaaagacttctatctgtagaggttttaacagcccaagggcttgccttaaatatgtacttaatactaaataaaattgaagcagaatatctacagtccttcatttttgtacctaatatgtacaaagcaccacttaagtaaaagaaagctaggggctgaagggcagttatgggttcaattgctcatgttacactcag

SEQ ID NO: 48380 - DNA, 600 bp, Chicken  19866894293478_3
tgtttttttttattatagagcccatgaattattagaaagtcctgtcacaccacattggagtctgctgtatccatagaaatgctccatgtcctgatcagaagcagcacaagctcagtgtgaaataaaagacaacaactgtgaataatgatatggctgcggtagaagcccaggcataaacagcacataaatgtaaatcgggggtcgcagtctggaggtacaaacaaggcagtcgggaagcaaaggcttgatttttcaggcttaaaaacagccatgaaaagcayggtgaatttattaaaatcraaagtacgtctatgtcttttttccttttaatcatttgctttttaattcagtcatgtaatggcttgtttgtatctgttctcagttattaaaagacttctatctgtagaggttttaacagcccaagggcttgccttaaatatgtacttaatactaaataaaattgaagcagaatatctacagtccttcatttttgtacctaatatgtacaaagcaccacttaagtaaaagaaagctaggggctgaagggcagttatgggttcaattgctcatgttacactcagttttacattgatatcaaca

SEQ ID NO: 48381 - DNA, 600 bp, Chicken  19866894293479_1
gttcactgcaaacaagagcaacagaagatttagtgatgttacagcgcaagagacaggtaagtaaagctgaactcaaaggttgggattttagttttgatatttaagaatgtgttagtacaaggaaaactgaaggcaatgcccagtctaaatctcccctcttttagtctgaaaccatttccctttgttctatcacagcaggccctcctaaagggtctgtccccttctttcttataacccccctctcgacactgaaaggacccccctttagacacttcaaatgatgacttgtgcatcatcagygtgtagcatgaaacctgaaggaacctatgtggatatgctragtgtagctggtgaagtgtaggactttagtagatgtaatgcaaggatgatgtcagctgactgagttctccagcagctggagctccagcaactcttacaccagggaagtcagatccaaagcrtacctgcrtcacagttgctgtgcattcagcatgcctcccttcctgacactgtgtatcttgctgtttactgaattgccagcatacagaacaggacaaaatgctgactgaactcattcatgcgttctaggcagtttgctta

SEQ ID NO: 48382 - DNA, 600 bp, Chicken  19866894293479_2
acagcgcaagagacaggtaagtaaagctgaactcaaaggttgggattttagttttgatatttaagaatgtgttagtacaaggaaaactgaaggcaatgcccagtctaaatctcccctcttttagtctgaaaccatttccctttgttctatcacagcaggccctcctaaagggtctgtccccttctttcttataacccccctctcgacactgaaaggacccccctttagacacttcaaatgatgacttgtgcatcatcagygtgtagcatgaaacctgaaggaacctatgtggatatgctragtgtagctggtgaagtgtaggactttagtagatgtaatgcaaggatgatgtcagctgactgagttctccagcagctggagctccagcaactcttacaccagggaagtcagatccaaagcrtacctgcrtcacagttgctgtgcattcagcatgcctcccttcctgacactgtgtatcttgctgtttactgaattgccagcatacagaacaggacaaaatgctgactgaactcattcatgcgttctaggcagtttgcttaaacttagtaggcagaactttatgagaacttcacgagtgca

SEQ ID NO: 48383 - DNA, 594 bp, Chicken  19866894293479_3
tagtctgaaaccatttccctttgttctatcacagcaggccctcctaaagggtctgtccccttctttcttataacccccctctcgacactgaaaggacccccctttagacacttcaaatgatgacttgtgcatcatcagygtgtagcatgaaacctgaaggaacctatgtggatatgctragtgtagctggtgaagtgtaggactttagtagatgtaatgcaaggatgatgtcagctgactgagttctccagcagctggagctccagcaactcttacaccagggaagtcagatccaaagcrtacctgcrtcacagttgctgtgcattcagcatgcctcccttcctgacactgtgtatcttgctgtttactgaattgccagcatacagaacaggacaaaatgctgactgaactcattcatgcgttctaggcagtttgcttaaacttagtaggcagaactttatgagaacttcacgagtgcatgaactttcagtttgagttcagataatgtatgtggacacttcgtaatagttacgtaacacttccaggagatgaggcaaaaatagagctgagcaaaaaaccaaacctacccaggga

SEQ ID NO: 48384 - DNA, 586 bp, Chicken  19866894293479_4
aaccatttccctttgttctatcacagcaggccctcctaaagggtctgtccccttctttcttataacccccctctcgacactgaaaggacccccctttagacacttcaaatgatgacttgtgcatcatcagygtgtagcatgaaacctgaaggaacctatgtggatatgctragtgtagctggtgaagtgtaggactttagtagatgtaatgcaaggatgatgtcagctgactgagttctccagcagctggagctccagcaactcttacaccagggaagtcagatccaaagcrtacctgcrtcacagttgctgtgcattcagcatgcctcccttcctgacactgtgtatcttgctgtttactgaattgccagcatacagaacaggacaaaatgctgactgaactcattcatgcgttctaggcagtttgcttaaacttagtaggcagaactttatgagaacttcacgagtgcatgaactttcagtttgagttcagataatgtatgtggacacttcgtaatagttacgtaacacttccaggagatgaggcaaaaatagagctgagcaaaaaaccaaacctacccaggga

SEQ ID NO: 48385 - DNA, 600 bp, Chicken  19866894293480_1
tcctagatcctagttaagctgagatcatcagtatctataaagaattctaaaatagagaaagtactgaagatagagcatgctctggagatacaacacttctgtgttgtactagtaggatggcaggtacactgcaggaagcttccccggaactaagacaccttcatccttctactctttcctgctttgcctcaacagaggcctctgaaaagtcttctcatggccctctttggcagtgttgacttgaggggaagcacacctcacataagaaccagggcttttcagagcttttttttttttttwaamaattccagccatttcagtattttagcacaagttgtctgaggggggaagattttatccagcacaatgactcatgtgggttacaaccagcatatccttcatgtgggccagaaaagccatgtgttttcttcattgacaacagcttgtcagcacaactgatgccttggttaccaatctcagcacaaaggcacagagggaacgggccagaaactgaaactgcagaggcctgtttgtgtggatctgggatgcgatgtgtgtccttggtgaccagatccagagcataaatctccaaggaagtca

SEQ ID NO: 48386 - DNA, 600 bp, Chicken  19866894293480_2
tagatcctagttaagctgagatcatcagtatctataaagaattctaaaatagagaaagtactgaagatagagcatgctctggagatacaacacttctgtgttgtactagtaggatggcaggtacactgcaggaagcttccccggaactaagacaccttcatccttctactctttcctgctttgcctcaacagaggcctctgaaaagtcttctcatggccctctttggcagtgttgacttgaggggaagcacacctcacataagaaccagggcttttcagagcttttttttttttttwaamaattccagccatttcagtattttagcacaagttgtctgaggggggaagattttatccagcacaatgactcatgtgggttacaaccagcatatccttcatgtgggccagaaaagccatgtgttttcttcattgacaacagcttgtcagcacaactgatgccttggttaccaatctcagcacaaaggcacagagggaacgggccagaaactgaaactgcagaggcctgtttgtgtggatctgggatgcgatgtgtgtccttggtgaccagatccagagcataaatctccaaggaagtcacac

SEQ ID NO: 48387 - DNA, 600 bp, Chicken  19866894293482_1
ccaaatagctgagtgatagaaagaagtgatgagcattttgtcagaaatgaatcagggaaagagttttacttacttctagagatactgcaaatctctaatgaggctgctaatttttttaagacagaatgaatactgttggctttggggaacactaaggaatattcatagataccagctttgaggggaaatctaaaaaataattttgattattggttttgttttgatttttataatattgtctctagcaatgcaatgatcacagcttgtagcacggtcatgattcatgttaccttagctaartcagcagcagaaacatcgagctaactctactgaagagttttgattaactgtttttgaatgaatgtttgtaggtttaatggtttaatatattacccaactgtttgaaacaaacctattactgataatttttgcctytttctcaagagcagcaaaaatagatgacatttacgtacaactcaagtgttccaataaactgtcctaagtgtaagtatgaattcattttatctgtggtttgaattttattagctaaggcataggcacacattttgttttgccagctctgaaaaaaagccaataaac

SEQ ID NO: 48388 - DNA, 600 bp, Chicken  19866894293482_2
ttggctttggggaacactaaggaatattcatagataccagctttgaggggaaatctaaaaaataattttgattattggttttgttttgatttttataatattgtctctagcaatgcaatgatcacagcttgtagcacggtcatgattcatgttaccttagctaartcagcagcagaaacatcgagctaactctactgaagagttttgattaactgtttttgaatgaatgtttgtaggtttaatggtttaatatattacccaactgtttgaaacaaacctattactgataatttttgcctytttctcaagagcagcaaaaatagatgacatttacgtacaactcaagtgttccaataaactgtcctaagtgtaagtatgaattcattttatctgtggtttgaattttattagctaaggcataggcacacattttgttttgccagctctgaaaaaaagccaataaactgtggctgaggagtaaataggacaattgggacataactacaccagcaacggctagtcagtatgccctaaaaaaaataaaaggcagaataacttttaattcagtatcaatgattatcagatatctagtaggcagga

SEQ ID NO: 48389 - DNA, 600 bp, Chicken  19866894293483_1
agcttatgagtgtagactcataactgtaggtatactaccatacctacagtttttttcctcacattaatgaatgcagtgttgagcacagtcaaataaacattttcttttccaacacgatgctccaagaattttagtcttcattgtatgacgctacttcagagcaactgtattccccatagagaatagcagaattagcaaacgactgatttttgcctttaatcaatgaaacgcttgccttttcacgtccattatcagacagctgaaaaagtcattgtgctgtagtttcttttttttcccccytttttttttttttttttttaagtgaagaaagttgccacaaccaccaccgaagccatttggaagctaactcgcattctttcaaaacatgggcctcaattctgtcagacaatgtaacaaaacaaaaatgtttggaagatgattaaaaaaaagtctcctgataagaaatacactgcaggcttgataacacctcagccgttcaatgttcttttatgttactcgcagatatttgtatcaattttatggagagcttaagaatatttacaagctttgaattccttagggaagaaactgtaatggaaa

SEQ ID NO: 48390 - DNA, 468 bp, Chicken  19866894293484_1
agcacctctgcaggtccataagagccctagaaaacactctttctcagcttccaagaattgctgccttagcttaaagcatcacttcaagtttctcagtgggaaatgagattccagagactgaggtaatatcagctacccagccagtggtcaaatagaggaagaaattccatctacaagagtatgtgaattctcacaggagttggggtcatgcccaatcaccacttccctgaaaatttcctctatccttccagataacagcatctacaatgctcacatttctcctgcatctaattttagatyctcctcagatccttacattcaagcacttctaagtggggtatgttcaacttacagtataaaaatgcagataaacagcaccgatccagaggactgtgttaagactcccttgtcctccaaaattcactacccccagcagttctgcacattatttacgctcttctattcttg

SEQ ID NO: 48391 - DNA, 599 bp, Chicken  19866894293485_1
  misc_feature (1)..(128): n is any nucleotide
nnnnnnnnnnnnnnnnnnnnnnnnnnnnnnnnnnnnnnnnnnnnnnnnnnnnnnnnnnnnnnnnnnnnnnnnnnnnnnnnnnnnnnnnnnnnnnnnnnnnnnnnnnnnnnnnnnnnnnnnnnnnnnnntatccctttgttcctgcaagatgaaatctctctgcctctaaaaatctgatttaaaagcagtattctcatttttgctattttctgttgatttactcctttgtagctgtcataaatcacataaccctggttacatgccctgtctttccccttctcaggcttacagtttttcctwtgagccttttttcttccttttcaactttcttcacttttcaaccatgtgtatgtgttctgatcactgaagctgagttcacctacattctctggtttccctgtttcagacatcagtaatccagtccttggtagctcttctaaggagtccatcctgttgtaagagttttgctctaacatattcatactttcccaggacgaattacatagctatttagttttgaatgaagttaccaggtgagaagtgtgcagtgatcactgaaagacaaaaacctgactgtttccaggtcaggaatgtgtaag

SEQ ID NO: 48392 - DNA, 599 bp, Chicken  19866894293495_1
  misc_feature (1)..(3): n is any nucleotide
nnncagaagattacaatatgttttaccaagatgcactttcaaattttcagccctcaggaaaaagtaagttcagaactagccagaaactagccagacaccaagtttgcttcctgattttttgcaagtgcatcgccaagagaaacgaaaaaaataaccctagtgcaggaatacgatgaatgctgcaacccagaggtcatttataatacctattaaactgcacataaggtttgcattggcacagtcattttctttgccatcctttcttcctccccattactcccaaattcttagtccctgagraaagcctcgttcaaggtcttctaacagtgggtcttggaagggacatactctcacaracaagctgttctgtcacagaaacatacactgtgccatacaacgatgtacccacactggctccagcctgtcgcctacagcaaygtcattatacatcatcttacagacatcaaacagatttgaatcaagatagtgtctgtaaacataccgaattattaatttggagattgaattcttacagtacttgatggaaaagcatgtttctccaagctatccttctctctacttggatttactatatctat

SEQ ID NO: 48393 - DNA, 600 bp, Chicken  19866894293495_2
ggaaaaagtaagttcagaactagccagaaactagccagacaccaagtttgcttcctgattttttgcaagtgcatcgccaagagaaacgaaaaaaataaccctagtgcaggaatacgatgaatgctgcaacccagaggtcatttataatacctattaaactgcacataaggtttgcattggcacagtcattttctttgccatcctttcttcctccccattactcccaaattcttagtccctgagraaagcctcgttcaaggtcttctaacagtgggtcttggaagggacatactctcacaracaagctgttctgtcacagaaacatacactgtgccatacaacgatgtacccacactggctccagcctgtcgcctacagcaaygtcattatacatcatcttacagacatcaaacagatttgaatcaagatagtgtctgtaaacataccgaattattaatttggagattgaattcttacagtacttgatggaaaagcatgtttctccaagctatccttctctctacttggatttactatatctattctawgcatcattggcctcacttcatgcagccattctttgtgattgatatcacacca

SEQ ID NO: 48394 - DNA, 600 bp, Chicken  19866894293495_3
gaaacgaaaaaaataaccctagtgcaggaatacgatgaatgctgcaacccagaggtcatttataatacctattaaactgcacataaggtttgcattggcacagtcattttctttgccatcctttcttcctccccattactcccaaattcttagtccctgagraaagcctcgttcaaggtcttctaacagtgggtcttggaagggacatactctcacaracaagctgttctgtcacagaaacatacactgtgccatacaacgatgtacccacactggctccagcctgtcgcctacagcaaygtcattatacatcatcttacagacatcaaacagatttgaatcaagatagtgtctgtaaacataccgaattattaatttggagattgaattcttacagtacttgatggaaaagcatgtttctccaagctatccttctctctacttggatttactatatctattctawgcatcattggcctcacttcatgcagccattctttgtgattgatatcacaccatacagattcggtcttaaaataggtcttcattcccatagacaaatgaagatcttttaacagcaacaaattttaagtcacagtg

SEQ ID NO: 48395 - DNA, 600 bp, Chicken  19866894293495_4
cctcgttcaaggtcttctaacagtgggtcttggaagggacatactctcacaracaagctgttctgtcacagaaacatacactgtgccatacaacgatgtacccacactggctccagcctgtcgcctacagcaaygtcattatacatcatcttacagacatcaaacagatttgaatcaagatagtgtctgtaaacataccgaattattaatttggagattgaattcttacagtacttgatggaaaagcatgtttctccaagctatccttctctctacttggatttactatatctattctawgcatcattggcctcacttcatgcagccattctttgtgattgatatcacaccatacagattcggtcttaaaataggtcttcattcccatagacaaatgaagatcttttaacagcaacaaattttaagtcacagtggtctgagctgtatttaaaccaacgatttctcactggagatttaagatgtaaatcaaatgtgatgcgctaacttcatgtaatggcaaagctgtgcaactcacatttggcaagatgcctagaatacagataactggttttctttaaaaaaaaaaaagttttttaaaat

SEQ ID NO: 48396 - DNA, 600 bp, Chicken  19866894293497_1
agttcaaagattccagcagcaggaaagcttactgaagctataatgaaaaccagactgtaattcgacaccaaaacccagaatgtagttctatagttccgcagttggtattttggaaaactgtctgcagtgaaaataattaaattcatacagaaccaaacccccccatctcgagggataaaataagaggaaagcaagggatttgaattgcagttccaagtcaatacagctgcaaagaggctgttattgtgaagccactcttccagcagaaaagagtcatccaagcagaagggattcctaagrgtgagttcattttttgcctgcattaattaagagatgctgaaactttgccttgctactataaaggcacctttatcataggaactgtacgatgttagaacacatgaattccaaaagacaaatgagctgcaggtcagtgggcacaaggacccagtctacatcaatggctgccaatctccccacatccctccaataggctgcagtgccacaccagaaagatttgtgtcatttgtatttgctaggctaggttacagtttrtattttaaatacttaaggaastatagcatagccaacttacaaaat

SEQ ID NO: 48397 - DNA, 600 bp, Chicken  19866894293497_2
tcttccagcagaaaagagtcatccaagcagaagggattcctaagrgtgagttcattttttgcctgcattaattaagagatgctgaaactttgccttgctactataaaggcacctttatcataggaactgtacgatgttagaacacatgaattccaaaagacaaatgagctgcaggtcagtgggcacaaggacccagtctacatcaatggctgccaatctccccacatccctccaataggctgcagtgccacaccagaaagatttgtgtcatttgtatttgctaggctaggttacagtttrtattttaaatacttaaggaastatagcatagccaacttacaaaatacatttaggtcagaaatgtcaagtttgaaaagatagcactattgctgcacttacctgaagaacataatccagagctatgtgccgaaaacatttccgtgttgcagtcaaaatattggttgcttcctctacttcatgttgcttattcctttgaacttgggcattttttactagagcattctctttttcttcactaactttttcaaactgcttcttcgcatctttaaatttcttaatatctctgcaacaaaggaaaga

SEQ ID NO: 48398 - DNA, 600 bp, Chicken  19866894293497_3
tccaagcagaagggattcctaagrgtgagttcattttttgcctgcattaattaagagatgctgaaactttgccttgctactataaaggcacctttatcataggaactgtacgatgttagaacacatgaattccaaaagacaaatgagctgcaggtcagtgggcacaaggacccagtctacatcaatggctgccaatctccccacatccctccaataggctgcagtgccacaccagaaagatttgtgtcatttgtatttgctaggctaggttacagtttrtattttaaatacttaaggaastatagcatagccaacttacaaaatacatttaggtcagaaatgtcaagtttgaaaagatagcactattgctgcacttacctgaagaacataatccagagctatgtgccgaaaacatttccgtgttgcagtcaaaatattggttgcttcctctacttcatgttgcttattcctttgaacttgggcattttttactagagcattctctttttcttcactaactttttcaaactgcttcttcgcatctttaaatttcttaatatctctgcaacaaaggaaagatagatggcaaatgaattccaa

SEQ ID NO: 48399 - DNA, 587 bp, Chicken  19866894293500_1
taaataactgcatgaggtagataaagagttggagctgtgccaaggtaaaagttgtaaaactggattgattttttgctacagcttgctaagggctccccagagccaggatgcaatgctcaaatataataattgatagcctgaaaaaatatttctgataagtgcgcaactgtaacacggagacctgcctgagatgaagcaagcctttgtgtcccagctaacctgagcggtggggtgacccagatctgcagctccctaccctgattacagccgcatccttcagccagagagaaaatgggcccrggttctgaacacggcattttgttaaatgctgttgtggaaaagtaattacccgacagccagaccagtgcgtgcaaagagggagagctccgggggcggagggaattcacattcattaatagcacccggcggtcccaaagggcagaggagttagtgctaatctaacctcttttcagccttcaccttggtggagtgaccacctcaagcgctgtgtatgtgtgtataaattgctcgggattcaattgaacgcattaagttttaaaagggatgtaagtgcaaattttcaatag

SEQ ID NO: 48400 - DNA, 600 bp, Chicken  19866894293512_1
ctctgcaattacccgctctagtttaagctcccctcccccggtatatgtgagaatacacactgtgacaataaaatttaattttgcaagcctgaaaactgattatgaaagcaattccaatcttttctctatttgcctagataactggacagaaacattttcatctagaaaaactttattactacaattaatcttgacaaaggttagtgagatgagaagcaaatgcaaagcaactttcatgtgtttctctgtagatagcatacatacaggttaaacattttcaaaatatgactctaatgatcwacaaggcagaatccaaattaaaaccttaagagccaagaatcatcttgacatctcactaacaatgtwtgattgtataaaaaacgaattcttcatgaaaccagaaataattactagtcaagatttttccttrgaattaacaaagtggttgagattggaaggcaccaycagagatcacgtggtctggcctccttgctcaataaggttgcccagacattagtttttctttaataccaacagtttctgcataataaatatttttttttcccttttagtaccataaagtagaattatgtaactctg

SEQ ID NO: 48401 - DNA, 600 bp, Chicken  19866894293512_2
aataaaatttaattttgcaagcctgaaaactgattatgaaagcaattccaatcttttctctatttgcctagataactggacagaaacattttcatctagaaaaactttattactacaattaatcttgacaaaggttagtgagatgagaagcaaatgcaaagcaactttcatgtgtttctctgtagatagcatacatacaggttaaacattttcaaaatatgactctaatgatcwacaaggcagaatccaaattaaaaccttaagagccaagaatcatcttgacatctcactaacaatgtwtgattgtataaaaaacgaattcttcatgaaaccagaaataattactagtcaagatttttccttrgaattaacaaagtggttgagattggaaggcaccaycagagatcacgtggtctggcctccttgctcaataaggttgcccagacattagtttttctttaataccaacagtttctgcataataaatatttttttttcccttttagtaccataaagtagaattatgtaactctgaaaaaattattacctgcctaaagaaatatatcaagcagacttctaggtttccttggaggcttgcag

SEQ ID NO: 48402 - DNA, 600 bp, Chicken  19866894293512_3
tgcctagataactggacagaaacattttcatctagaaaaactttattactacaattaatcttgacaaaggttagtgagatgagaagcaaatgcaaagcaactttcatgtgtttctctgtagatagcatacatacaggttaaacattttcaaaatatgactctaatgatcwacaaggcagaatccaaattaaaaccttaagagccaagaatcatcttgacatctcactaacaatgtwtgattgtataaaaaacgaattcttcatgaaaccagaaataattactagtcaagatttttccttrgaattaacaaagtggttgagattggaaggcaccaycagagatcacgtggtctggcctccttgctcaataaggttgcccagacattagtttttctttaataccaacagtttctgcataataaatatttttttttcccttttagtaccataaagtagaattatgtaactctgaaaaaattattacctgcctaaagaaatatatcaagcagacttctaggtttccttggaggcttgcaggactgccagatcacaaaccctaaccaatttgttggtcccaacaaactcagaaactatcataata

SEQ ID NO: 48403 - DNA, 600 bp, Chicken  19866894293512_4
aaaaactttattactacaattaatcttgacaaaggttagtgagatgagaagcaaatgcaaagcaactttcatgtgtttctctgtagatagcatacatacaggttaaacattttcaaaatatgactctaatgatcwacaaggcagaatccaaattaaaaccttaagagccaagaatcatcttgacatctcactaacaatgtwtgattgtataaaaaacgaattcttcatgaaaccagaaataattactagtcaagatttttccttrgaattaacaaagtggttgagattggaaggcaccaycagagatcacgtggtctggcctccttgctcaataaggttgcccagacattagtttttctttaataccaacagtttctgcataataaatatttttttttcccttttagtaccataaagtagaattatgtaactctgaaaaaattattacctgcctaaagaaatatatcaagcagacttctaggtttccttggaggcttgcaggactgccagatcacaaaccctaaccaatttgttggtcccaacaaactcagaaactatcataatagtaaaatcggaagattttttgtaagctaatcaata

SEQ ID NO: 48404 - DNA, 600 bp, Chicken  19866894293514_1
tcacctgtcaccagtgagaagagaccagccccactctggctgtaagcacctttcagatactggaagagagcaataaaagatgtggcactgagatgtggcactgagagatgtggttggtgagtgtggtgggaatgggttaatggttggactaggtgatcttaaaggacttttccaaccttaatgattctatgaaataaggggaagggtgcttgcctagttcttgttcttccccacatatcccatgaaggcaggctactgagctaaataaacccttattttaaagaaggatggccactcacrttattttatgccagattatgacagctttattcttctccaccagttcaggaacagacgatggggaaaaggaatggagggacaaagacgggcagaaaaactcctttccttctgggatttgatgtggtaggaaatggtaaaggacagtacagtggagagagacaaaggcagatgtaaaaatatgtctgagtcacatggcataccttcggagggccagagagaaagggttctttggaggctgcaagagagtgaaggtactgcgtgcagtggccagcgccgctgacaccattcccatagacacgg

SEQ ID NO: 48405 - DNA, 600 bp, Chicken  19866894293518_1
atctggccctcacataatgtgagcggttgatgtttcaaaaggtaaaatatgtatgtactagaaagaaggacatgctgaatcttctgtgtatgccttgttaaaagttagtggctttgattaaagtgaattcagtgtctgcttgacaggcaagattgacagaacaggaaaccagtgtcttccattagccccagagcagataaaagcaaagacagacagatgtagctccctgtactcagaaaacatttcctttaggactgagcaagctgttagcttccagaagctttcgctccttgatatgaragtgctgaacatcagaccactcatacattaatggctgtttatcacagcatggggttttatgtcattgttttgttttgttttgtttgctggtaggtggcrtttaagaaaagatgtaagaaatacgagtagatagaaagccttcccttgtgccctccttctgtctggtactcagcatgttaaaacttgcattgctagacttagcatctacccttccagaaatacatgggactgttcactatttgaaacatatctgttttgtaagcacatgaatttaaaacattagagaatattactttaact

SEQ ID NO: 48406 - DNA, 600 bp, Chicken  19866894293518_2
aaaagttagtggctttgattaaagtgaattcagtgtctgcttgacaggcaagattgacagaacaggaaaccagtgtcttccattagccccagagcagataaaagcaaagacagacagatgtagctccctgtactcagaaaacatttcctttaggactgagcaagctgttagcttccagaagctttcgctccttgatatgaragtgctgaacatcagaccactcatacattaatggctgtttatcacagcatggggttttatgtcattgttttgttttgttttgtttgctggtaggtggcrtttaagaaaagatgtaagaaatacgagtagatagaaagccttcccttgtgccctccttctgtctggtactcagcatgttaaaacttgcattgctagacttagcatctacccttccagaaatacatgggactgttcactatttgaaacatatctgttttgtaagcacatgaatttaaaacattagagaatattactttaactatagcaatcacaatcagactgacactggtttatagaatactcagcattttaataggattttatttcctggtcactattactcacttctaaaggcatcaa

SEQ ID NO: 48407 - DNA, 600 bp, Chicken  19866894293519_1
acaacaagggtcatatcaaagggctatatgaaaagccagaatgattaacgagtgaaggaatatgtgctgctgaacagggctgtagctgccaagtaccttctctgaagggctggtagcagtgatgggatttgcatggtttataaacaggagtggcagggaacaaatgtgtcatgattcatcagctattaccaccagatttctttggtgtgatgacaaatgtacataagtctcatttttgttttccttgggataaagctccaagaaaaagtcattgatgatatccatgttcccatgtttctwgaagtgatggaacaactacagttaaaaaccaatccttactctgatgtacaaaacatggagacagcttctctcaactgaaatgggaatatttttggtgggatcatgctgtagtgttgggagtacttttggagacataacagttctttctgtttcatattgctgagattgataataaattcaaggaatagaggagaaacaatttccttttatttttaaacttctagttctctgcagcctgggctggaatgtatgggtggaggacatccctgcatttccttgcaaaaaagggaggaatgatgt

SEQ ID NO: 48408 - DNA, 600 bp, Chicken  19866894293525_1
gaagcattgatgaacttctcaagtactggcaacccttccagctacccagggtctgatttcagtaagaacagcaggcactcctctcccactctgaggcaagatcttagctagccaggccccgctgagctcagtgggactgctctacatggtagacctgtgagttatctgccagctgcagagactgcagagggtggcggagcaccgcccagccatgtaacaggctcagcagcagagatggatgaatgttctctgggcctcagagttgcatgtcaccttgtgcagttctctgcaacatcaaaygtagaatttaatggtattgaggtgaaaatcctaaatttaataacaataacatcttttctatattcctacgtctgttttaaataagtgcctatttctcttcatgctttatttctgctttcttctgtcagtgtggaaaagacaaaaataagaaaatgaaatggarctatccctacttacagcctcatttgaataaaccacagtgaatcttgtcattcctggtggtatgagactgacaacatgaagacaacaacagcrtgattgtgcttatcacctgggcaatgctgcaaagcactgtaatct

SEQ ID NO: 48409 - DNA, 534 bp, Chicken  19866894293525_2
atctgccagctgcagagactgcagagggtggcggagcaccgcccagccatgtaacaggctcagcagcagagatggatgaatgttctctgggcctcagagttgcatgtcaccttgtgcagttctctgcaacatcaaaygtagaatttaatggtattgaggtgaaaatcctaaatttaataacaataacatcttttctatattcctacgtctgttttaaataagtgcctatttctcttcatgctttatttctgctttcttctgtcagtgtggaaaagacaaaaataagaaaatgaaatggarctatccctacttacagcctcatttgaataaaccacagtgaatcttgtcattcctggtggtatgagactgacaacatgaagacaacaacagcrtgattgtgcttatcacctgggcaatgctgcaaagcactgtaatctgtattcctgccagaaactttttctgggttatgactcatacagagccctgcttttccactcctgtgcagcctgctctgacaaacaagagatttacagg

SEQ ID NO: 48410 - DNA, 442 bp, Chicken  19866894293525_3
ctcagagttgcatgtcaccttgtgcagttctctgcaacatcaaaygtagaatttaatggtattgaggtgaaaatcctaaatttaataacaataacatcttttctatattcctacgtctgttttaaataagtgcctatttctcttcatgctttatttctgctttcttctgtcagtgtggaaaagacaaaaataagaaaatgaaatggarctatccctacttacagcctcatttgaataaaccacagtgaatcttgtcattcctggtggtatgagactgacaacatgaagacaacaacagcrtgattgtgcttatcacctgggcaatgctgcaaagcactgtaatctgtattcctgccagaaactttttctgggttatgactcatacagagccctgcttttccactcctgtgcagcctgctctgacaaacaagagatttacagg

SEQ ID NO: 48411 - DNA, 599 bp, Chicken  19866894293527_1
  misc_feature (1)..(40): n is any nucleotide
nnnnnnnnnnnnnnnnnnnnnnnnnnnnnnnnnnnnnnnnaccttttatctgacgcagggcctgctgtgttaccaggaagtcctactatgggaagagaccttcatggtggctgtcatacaaagcccttcttccttatgccatgacacccaccatgaaaactcaaaccagcacatcacggtgcatggatgtacgtatacagagatgagtttgggcagaaattgcttttcagagcttcagctccccaacagagcagagcaatctggtgagcttgcagcaaacaaatcgcacggggaaggtgkggagacaggaaaactgagctggcagacagcggtggaacccttggctaaagctgtgtgttcagcatcagagagggctgctgcatcctgcctccccgccccagctagataaggcactaatttctcattaatttgatttttgctttggaacccacttctggtgcgtgctgcttgctgacaacagccttttgttaggcaggggaaagaacaccrcacgttagccagaaaaactgtgaatccacttttcatttaccaccatcattccttccagcctggctttaccagcctctgagaagtgattt

SEQ ID NO: 48412 - DNA, 600 bp, Chicken  19866894293527_2
gggcagaaattgcttttcagagcttcagctccccaacagagcagagcaatctggtgagcttgcagcaaacaaatcgcacggggaaggtgkggagacaggaaaactgagctggcagacagcggtggaacccttggctaaagctgtgtgttcagcatcagagagggctgctgcatcctgcctccccgccccagctagataaggcactaatttctcattaatttgatttttgctttggaacccacttctggtgcgtgctgcttgctgacaacagccttttgttaggcaggggaaagaacaccrcacgttagccagaaaaactgtgaatccacttttcatttaccaccatcattccttccagcctggctttaccagcctctgagaagtgatttttctctctgaatgcataattggttatttatacacaaaacagagcgtttgctcgggatacctgatctagagaactgtcctaccagatgggagtgccagccaacatctgatctccatataatttataaggtattaaattacaaaataatgaatcttttcagttagtgttttggcacatgatgacagggttaggttttatgtgagaatattgac

SEQ ID NO: 48413 - DNA, 599 bp, Chicken  19866894293528_1
  misc_feature (1)..(10): n is any nucleotide
nnnnnnnnnnattatgtgacttttaatctgactcatctggaaatccaagatcatacaatcatacctttcatcagtatctgtacttatatggatcaatatttccacctttaccccttgaaatctcctagccaatgtcatcctggaatggagatttttgaggaaatgagaagagcatctttcatgaaaagaggtagttaggtagaaagaaacccttgctagtaatgtgtgactgagggacttcttcagttcaccaaatctgagaaattagcatggccccactaaagttacagaaacaatcakagaagcagcagttgcaattagtccccaggagctgaacttgagacatgaggagagacagaagaaaacacattgtttggcacaatacatttcacattacatcagtgagttgcaatttttcacgctacagaaagttatctaaataactatgtaggaaagcatacccccttcattgtttcttcttttcattttgataacagaatcaaggcaccatggtcaatgtgagatctgagagagcttccatagcaggacctagaggttaagacagtttcctaaacaatatctttttaaaaccctattaa

SEQ ID NO: 48414 - DNA, 600 bp, Chicken  19866894293528_2
agcatacccccttcattgtttcttcttttcattttgataacagaatcaaggcaccatggtcaatgtgagatctgagagagcttccatagcaggacctagaggttaagacagtttcctaaacaatatctttttaaaaccctattaacttcctctcttgagtttcctcctttcaaacacatttgatctctttgattgttttgggattgttttgttttgtttttatttatttattcatttaaaatgtggagctatgaaatacttgaactacagcaagaactttgttatatatttcacatgtgmtgctttcttttcctttctttcaaaagttaggattctgcccagccatgtggcttgttacttttttattctgctttacagaaaatttactgaattacctgttaaagaaaagtcactgggagtaacatcatcttttccttctctaggaaactgactgttatagacttactaacatgactaaagcagtcttctcttgtgggtttgttcatttctccagtctagagtgacttctacatacttaataccatggacaacaagagtgcagatgaatcagaggaacagcagtctgcaattcatctgcaa

SEQ ID NO: 48415 - DNA, 600 bp, Chicken  19866894293530_1
tcagctccctcaagcatcttgtgtgtagcaagctctacccggaacaggtaatgcaatccagattcaaggtcagccatgtacagcttcgatctgaaacacacatatataacattatgacagggctctttcactcattttctcaccagtcatgaaggtaaaattgatatatagtaggtgtcattaaaacctctacatttggcactccacaatgattgcagtatatcctacagcacacatgggaagatacagcagttgcttcagctactgggaatggtgagtgtcaagttcattgagacccaytgcactctcctgaagtagttctgtatcactctgttctgagatcagacacatgaagcaaaaccacacctatgaatttttcctttctattaaactaagctttttgtttcccagccagcctcaccctgcaatgaaattacaaaccactggcagcaaggaagtagaaattacagcttctctccagaatctgacacaaacagtaaaattacatgctactaaagaagggagactcttgcttaacatacactgatggtacacagagcagaagtgcaagcaagactggcaaaaatcattattggaaag

SEQ ID NO: 48416 - DNA, 600 bp, Chicken  19866894293537_1
ccttctgcatcccaggaacacagaagtctaggtactgtacattcactaaggctctttgtttttgcaaattgcgtttatgatggatatccataaggcaaacaatatctaaaggaatggtaacaagtatatttccagcatacaaacaggcttcctttttccctctcacagtacagttacgaacttgtagcaccctcgttacatttagattctagaaaaggtgatttttttttttcctagaagtttgcaggaagggaaaaggaggaaaaatatttggctggtggtggtgggatcaaaaatgtygttaaacatctcgtttttgcagcatttctcagagactggatttaaactgaaaccagactgaaatacgtggatgcccatggaatgttgagctgaagctggtctcccagcctgcagtgcaacacctgctgtttaaaacccaatctccgtaccacatgactttaaaaacacaatcatgttcagagatgcgatacaaataaaactacagtttttgcacatcgtctcttgaatatctcactgccaaataaaaatccaaatcaagtcaaataaatagatgcatattttgttaaggtaacttccaca

SEQ ID NO: 48417 - DNA, 586 bp, Chicken  19866894293540_1
actgaagccctgaaaaagacccaggcatctgtgcctggcagggttaattgcagtgcatatcatcctgaccaacactgtgcctcccttttcatttccctctacccagcaacatctctgaaagtacatcagaaaatacgacgtggtcattcacatgctgtgctccggttatctttgatttgcttaagcctctttgacctcttgatgcctcatggctgtgtccaaataggttttgcatggtgaaccattacagaaaggctttggctcatgcagctccttccaacttttctgagccaggatggmggcactcatattgccctccacggggtgataacacattaaaaaccctcttttgccatctcatttattacctgaaattgcgttgctctgaaacattagaagatccagcatccaccgagataggctaattttaatgattaactgaggaactgttaaattttacttcagtgctccactgtcattatggaattagtattaacggccatgtactgtgagagctgtaatgaggccagccagaagtgacagcgcaagggagctgcagctccataaatataaacttagcacatat

SEQ ID NO: 48418 - DNA, 600 bp, Chicken  19866894293541_1
tttgttaatgagaagtgaaacatatcttggcaaatacaatatacgtgatacatatatgcatacatacatattttaatagctaatactggtgtcgttaataagcaaaaatggattcatatatatggcaggtaataatcgaagtggatgccatttaataaatgtaacttaaaatattttaattatataaaagcaataggtaaataaaagcaattacatttaattttgctttcagcccgtgagcattttctgtaagctttaatagaggtgagagctcgtgcagaaggctaatggtagagtcgrtattagcattattcattagcgtgtctaagtagtacttattctgagatatttctctggaagacgaaaatgttcttggtaagggtacttggatcctgataaccctaattcataataatatccccctcattcagaaaattaaagtttacagagtcctcagcagtttgaaaatctttctactatttagaatcacgatcgtgtttactaaggacaagctaagaagtgatagctcacgttatagtaagtggaacctcgtaaccgtttcttaaactctgtcctcgacaggcatagtaacactgagac

SEQ ID NO: 48419 - DNA, 600 bp, Chicken  19866894293542_1
ctaataattgcattcgttttaaagaattgacgtacatttgtccaaatttgcacaaatttggaatgcaatgggaatgagaggaagagtaaaaaatcccatcagagcttttgaagactttaattattcacataagcagccagataatgactgcagtcattcggaataaaaataaaatcaaaatccagacctccctgggcaagtggacagctcttaaatgactaatcagatacaatgacaagttagttaaaagaatattgactgaatcatacttctatttaggaactctgataatgagagagsragaagatgagatagaaagattttccaagtattctgactgcactgacacaaaccaaagcagattgcttcctctaaggaggtttcagctgttactgctcttcttaaaggggttgtgtcacccggatttattattaatgtggacataagcttgtcaagactcttggctttatgttaagacgcctcactggagacttaaggtgccggtttggtataatagataacttcaaggagatgcttgacttctacagccgatcaaacagaaataatgaatcgagattgccagtgttggtaccacagtat

SEQ ID NO: 48420 - DNA, 600 bp, Chicken  19866894293542_2
taataattgcattcgttttaaagaattgacgtacatttgtccaaatttgcacaaatttggaatgcaatgggaatgagaggaagagtaaaaaatcccatcagagcttttgaagactttaattattcacataagcagccagataatgactgcagtcattcggaataaaaataaaatcaaaatccagacctccctgggcaagtggacagctcttaaatgactaatcagatacaatgacaagttagttaaaagaatattgactgaatcatacttctatttaggaactctgataatgagagagsragaagatgagatagaaagattttccaagtattctgactgcactgacacaaaccaaagcagattgcttcctctaaggaggtttcagctgttactgctcttcttaaaggggttgtgtcacccggatttattattaatgtggacataagcttgtcaagactcttggctttatgttaagacgcctcactggagacttaaggtgccggtttggtataatagataacttcaaggagatgcttgacttctacagccgatcaaacagaaataatgaatcgagattgccagtgttggtaccacagtatg

SEQ ID NO: 48421 - DNA, 600 bp, Chicken  19866894293544_1
catttctgcagagtcagataaataatcctttttcaactgtaaagtccagtgtcttgtttcatttgcattcatctgtgggagggaaaggcaaataagatttatcctctaccagccagacagtgatcacttctgcaattttttgctgcttctaaggatttttttctttttcttttctaggaggtcatgtttaaaaaaggggcaaaaataaggaattttgatccgctctttcaatcagctgaaaggaaacattacagttggtacaacttaaatctggtataactgtaaatagtccctgcacaygctttcatggagtgttgctgacaatttctaaaaagcatgtctcacagaggctgaagaaagtccacggtctgtggcactgctcttcttttccaaaagtttatgatctgaaccagtttctcagtttgcatagaatgagagagcccaaggtagaaaagagtgacagcagatggttttatgctatcaatagaaaatttaatgcccagataaggctgcagactattaaatactgtttttcaaaaccatagccagttctgatatattataatgctaatattttattcatgaatttcagccaactga

SEQ ID NO: 48422 - DNA, 600 bp, Chicken  19866894293545_1
gtgcctcattgccagcttgaggggttgtggaatttgtggtgcttcagagaagtcccctgctaacgtgaaggggtgctgcttcaagtcgtgccttagcaggagggaacatcttgcccattggctccccctgctcagcgcagcagcttctcgtgtggaaaatgaatgcaagtaattaatttaattaaagtatttttagcattttcaatgaaattagcagctggaaaggcgactgggacctgtggggagcacactgttcagaaactcttctagaaaaggtatcctaaattactgtttagctcrtgatgtacagtgttgctgtagtggtagagtggcacaatctcctcagctccgaggcatcgtcgccttacagggagtgtgagctttggggtggctgctcttaactgtgaagctgcttttatcttttgtaaggtgataattcctcaggctgagagaggtggcagtctttttttgaggcaggttatgaagttctctataaatatagctattgtgtcatttaaaacataagcgtgtgcatgacttcagtgttactgcgtccctattcttggtgtcgggggtagtgtagccagtggtgacttccat

SEQ ID NO: 48423 - DNA, 600 bp, Chicken  19866894293548_1
tttgctgactaggtcatagctgtaataataaccatgaccacagaggcttttccaacgatacttacgtaatgtcctcatagcttacaactctcctaacctaactctgtaaagagcccaggatgatcagctgcagcttagaaaaaaaaatgatctgcaagtctccaaatttcccaggttttctaacagaaattgttttattctagaaaatcttatccagaccagataatggaaaaaacgtaacatgcccataggaggtttcaagtctaactgatgcaagtgtacaacatgacaactaatggyacatgctatcatgcttygctttgttgatttcccatcttccatttctcatggaaggattgcytcaaggttttactacaaagacccccatgcctaactgagctaattttctgctcaaggtatgctggcacatatccaaatggtatagtagcctaaactgtgtccttctcttagtaagccattatacataggcacagagcagtcagctttcctctaatttcctttcactgcaatgtttaccttgatgttctcctacttgttttgagatcaggttgaactgtttcgctgctgtagttacaatct

SEQ ID NO: 48424 - DNA, 600 bp, Chicken  19866894293548_2
agctgtaataataaccatgaccacagaggcttttccaacgatacttacgtaatgtcctcatagcttacaactctcctaacctaactctgtaaagagcccaggatgatcagctgcagcttagaaaaaaaaatgatctgcaagtctccaaatttcccaggttttctaacagaaattgttttattctagaaaatcttatccagaccagataatggaaaaaacgtaacatgcccataggaggtttcaagtctaactgatgcaagtgtacaacatgacaactaatggyacatgctatcatgcttygctttgttgatttcccatcttccatttctcatggaaggattgcytcaaggttttactacaaagacccccatgcctaactgagctaattttctgctcaaggtatgctggcacatatccaaatggtatagtagcctaaactgtgtccttctcttagtaagccattatacataggcacagagcagtcagctttcctctaatttcctttcactgcaatgtttaccttgatgttctcctacttgttttgagatcaggttgaactgtttcgctgctgtagttacaatcttagttacaaagatgcgt

SEQ ID NO: 48425 - DNA, 600 bp, Chicken  19866894293548_3
ttacgtaatgtcctcatagcttacaactctcctaacctaactctgtaaagagcccaggatgatcagctgcagcttagaaaaaaaaatgatctgcaagtctccaaatttcccaggttttctaacagaaattgttttattctagaaaatcttatccagaccagataatggaaaaaacgtaacatgcccataggaggtttcaagtctaactgatgcaagtgtacaacatgacaactaatggyacatgctatcatgcttygctttgttgatttcccatcttccatttctcatggaaggattgcytcaaggttttactacaaagacccccatgcctaactgagctaattttctgctcaaggtatgctggcacatatccaaatggtatagtagcctaaactgtgtccttctcttagtaagccattatacataggcacagagcagtcagctttcctctaatttcctttcactgcaatgtttaccttgatgttctcctacttgttttgagatcaggttgaactgtttcgctgctgtagttacaatcttagttacaaagatgcgtacaaatatttgttaatgcctctttgaatgtggacagctctggat

SEQ ID NO: 48426 - DNA, 600 bp, Chicken  19866894293549_1
gggaagtgtaaaggtcattaagttcactccttttcagaaagcacagactgacatatggcggaataaaagcatttggtcatcagtattgcagagtgaaactaaaggcctggagaagccctaaatacagacacctgcatgttaacatccatgtctcaacaagcattcagaaagatgatgaaggtgcgcttcagtcagacatcatctttattattaaataacatcaaacccaaaagtcaaatttgtcatatgctcccaaagtcttgtgataccacaaaggagtaacctgcatggaagcattgraattatttgaagcctcaagctgtaagaaattcaattttcttttaatttttaatttatttatttttaaggaataaggatgaaaagcctactttttattaaaaggaagctcacagtttctcacatatatgtgtcactgagcctggggcattaaaaagcccaaatgctgcaagagttgagaaaactgcatttcagtatcacttaattaaaacatgaatcttacctgctgcaaggactgggaatatcaaatgacaaaccaaggatggagggggaagggatatgcaccagagtgagaagtaacag

SEQ ID NO: 48427 - DNA, 599 bp, Chicken  19866894293552_1
  misc_feature (1)..(63): n is any nucleotide
nnnnnnnnnnnnnnnnnnnnnnnnnnnnnnnnnnnnnnnnnnnnnnnnnnnnnnnnnnnnnnntctttgacagactgtctaaacttcttgtatacaatagtacagtcatttttatatttacctatgatacatttttgaagcaattgggcctggggcctattgtcctttttaataaaacctgtgtaatttggaacacttccaggtaagtaattaaatttataacttttttataaatatacaaagctttataattcagaagaaaactggaagcctgtaaagtcagtctggctaacagatatrgtgcttttttatttgcagtgtactgtagaaaagtccatgttcttataaagctagctgttagtaaagatttttttagtaataaagaagagcaatacttttctacaccytgttttcataatgttgttcaaggaggcagaactgcatatgtacaaggaaatygctgaagagaagatgaagaaaagcaaactgcctatctatctcattggagctataatttttaagttaaggtactcttcagcaatgatgtcttcttttaaaactcatagtaaatctgagtatgctgatttatttccaatcca

SEQ ID NO: 48428 - DNA, 600 bp, Chicken  19866894293552_2
atttttatatttacctatgatacatttttgaagcaattgggcctggggcctattgtcctttttaataaaacctgtgtaatttggaacacttccaggtaagtaattaaatttataacttttttataaatatacaaagctttataattcagaagaaaactggaagcctgtaaagtcagtctggctaacagatatrgtgcttttttatttgcagtgtactgtagaaaagtccatgttcttataaagctagctgttagtaaagatttttttagtaataaagaagagcaatacttttctacaccytgttttcataatgttgttcaaggaggcagaactgcatatgtacaaggaaatygctgaagagaagatgaagaaaagcaaactgcctatctatctcattggagctataatttttaagttaaggtactcttcagcaatgatgtcttcttttaaaactcatagtaaatctgagtatgctgatttatttccaatccacaggaaccaaaatgaatctggagcgtcccaactttaaccatcagcagcagaataaggagatttcactatgcagacaaatctttcttcgtactttttttcagtggatca

SEQ ID NO: 48429 - DNA, 600 bp, Chicken  19866894293552_3
ttgtcctttttaataaaacctgtgtaatttggaacacttccaggtaagtaattaaatttataacttttttataaatatacaaagctttataattcagaagaaaactggaagcctgtaaagtcagtctggctaacagatatrgtgcttttttatttgcagtgtactgtagaaaagtccatgttcttataaagctagctgttagtaaagatttttttagtaataaagaagagcaatacttttctacaccytgttttcataatgttgttcaaggaggcagaactgcatatgtacaaggaaatygctgaagagaagatgaagaaaagcaaactgcctatctatctcattggagctataatttttaagttaaggtactcttcagcaatgatgtcttcttttaaaactcatagtaaatctgagtatgctgatttatttccaatccacaggaaccaaaatgaatctggagcgtcccaactttaaccatcagcagcagaataaggagatttcactatgcagacaaatctttcttcgtactttttttcagtggatcagatctttaatagagacctctgttagagcactagaaaacctaagacaaagaat

SEQ ID NO: 48430 - DNA, 600 bp, Chicken  19866894293555_1
ctgatagtttgcaagttctagtttcatttcccctgtgccagcgtagcaaacactccattagtcagcactctattagagcgcggaaggatcagggactcccccagcaccacctctgagcaacaacataacatgaaattgttgctctaagacctacattctttcttcatccttgcttagtacaccggtcaaactagtaattatgctgttagccctgatttgctcatttgaatttctttcatatacttcatcactactttgctcacaaggactctccactgatactctcacttttgaagcctycgagcttccattcactttttccttttctttgctggtcacttacgcccaaatatctaggtatccaccgcaagaagataactgaagaattaaaaaggaagaaattgtccacttaatatcactcatgaatgcctcactgctgagcttctcagctttttttcttgatgtgaaattatttggagtggctaaaggagtttaaaaatctgtatgaatattcactctgggcatgaaagctaatacaggaagcttgtgcaagtgatcttatgcccagttaatgtggagcatcatctcactgtacagaat

SEQ ID NO: 48431 - DNA, 600 bp, Chicken  19866894293555_2
agtatttagtcaggcacccagaacattaaaaaaaaaaaaaaagctgtgttcattttccattagaaagatttgttccagaagatttgctgatgcttttgcccagaatcaggcttgcagtaacacccgtacccaaatccacatcctactaaatacctccaagtgacttctacctgaaagtaaagcaaagtcatcagattcaaaggagaacaaggacctacttgtacatcagaaagactacacatcagtgggtagacatgaagcaatctggaaaatactgttggttgtctgccctgttcttaygctcctctgaatgtgcctgaagttggtcacagwtgctagtgggttttcctccagaagttataggctttagccaatctctaaggaagctgaataccctctgcccacaatctccaggcaaagtgcgtgagcaaaagaaaaagaaactgaggataaaacagtgatgggggcaacaaatgaaagattgtgttcataatcataggttagaaatgaaaaatcctatttggatctggaaggagacaccaaacagaacaccctttcaaggatctctgacatcaaccaagggactgatggatgttgtgc

SEQ ID NO: 48432 - DNA, 600 bp, Chicken  19866894293555_3
aaaaaaaaagctgtgttcattttccattagaaagatttgttccagaagatttgctgatgcttttgcccagaatcaggcttgcagtaacacccgtacccaaatccacatcctactaaatacctccaagtgacttctacctgaaagtaaagcaaagtcatcagattcaaaggagaacaaggacctacttgtacatcagaaagactacacatcagtgggtagacatgaagcaatctggaaaatactgttggttgtctgccctgttcttaygctcctctgaatgtgcctgaagttggtcacagwtgctagtgggttttcctccagaagttataggctttagccaatctctaaggaagctgaataccctctgcccacaatctccaggcaaagtgcgtgagcaaaagaaaaagaaactgaggataaaacagtgatgggggcaacaaatgaaagattgtgttcataatcataggttagaaatgaaaaatcctatttggatctggaaggagacaccaaacagaacaccctttcaaggatctctgacatcaaccaagggactgatggatgttgtgcagcagcactctgccaagagacatgacagatgag

SEQ ID NO: 48433 - DNA, 600 bp, Chicken  19866894293556_1
agctctttgctgtcctgttgttaattgctaaagtgatgaggcctctggtgtaatatccagtatggctaactgtgatgtttcatagcactataacattataaaaagtgaggacaatgtgctcatcaggtacatagtcttggcattgtggctaccacaactctaatcaaaacaccaggctctatgcagggtgtgcgttagtttacacagaccctgtttgtgctggtgacttgctctacttttagtacaagacactcttttaagtaaacaccaaaagaaagtagctctacaaaaaaagccaakaccgcaacttggccctaagattggaagtgggaaaagagagagcagctgatgctctatcrttgagttgttatgagctaggtatcacttttactaaggatctgccaagatatgtcaatatccactagccattcattctgaaaaaactgtcccatgaaatgagaatggcgtcgagcctctgccatgccttttctgccagccagtgcatagagccattgctcttaaagacatgatcaggtttttatttttgcccttggttctgctatatgttgcactcacaaatgtagcaatgaagctgtggtt

SEQ ID NO: 48434 - DNA, 600 bp, Chicken  19866894293556_2
gtatggctaactgtgatgtttcatagcactataacattataaaaagtgaggacaatgtgctcatcaggtacatagtcttggcattgtggctaccacaactctaatcaaaacaccaggctctatgcagggtgtgcgttagtttacacagaccctgtttgtgctggtgacttgctctacttttagtacaagacactcttttaagtaaacaccaaaagaaagtagctctacaaaaaaagccaakaccgcaacttggccctaagattggaagtgggaaaagagagagcagctgatgctctatcrttgagttgttatgagctaggtatcacttttactaaggatctgccaagatatgtcaatatccactagccattcattctgaaaaaactgtcccatgaaatgagaatggcgtcgagcctctgccatgccttttctgccagccagtgcatagagccattgctcttaaagacatgatcaggtttttatttttgcccttggttctgctatatgttgcactcacaaatgtagcaatgaagctgtggtttcccaccattatccaagtatttcagacctctgcatgcctctttgcctgacttttctctc

SEQ ID NO: 48435 - DNA, 600 bp, Chicken  19866894293559_1
tgtaaagggttaacttcagtctggcaggttttatgctagatcaggcacagtctgtccacactgccctaacttcatagcagatcaggtaacagctgacataaaagcataacactggcacaaggtttgcattgtgtgctctggctaatgcaagagaaatgcaagtatgtgcccacacctaatccagatcactggagggcagtctgacagtgcacagacctggattagcaatcctagaaactggatactgcctttctggggcagggagcctcacggctgagtgtaggctatgtggagaagcaytttctcrytggctttcctttctgtagctttctgtaagttcatcttggtctgctgagtgttgatctgaggtgccgtatttcatgaaatgggttgcagaataggcactgggactgtgatttagatctggataacaaaatcctcagcaaagtttaggaggtttaaatgaagttccagttcaagccttttgcaagctttaaataccttctagtttgaggacggtgataatcagaaggtcagaatgtgcatcaattatcattaaaccacaagactcttcttcataactgccctccagcttacagc

SEQ ID NO: 48436 - DNA, 600 bp, Chicken  19866894293559_2
ggttaacttcagtctggcaggttttatgctagatcaggcacagtctgtccacactgccctaacttcatagcagatcaggtaacagctgacataaaagcataacactggcacaaggtttgcattgtgtgctctggctaatgcaagagaaatgcaagtatgtgcccacacctaatccagatcactggagggcagtctgacagtgcacagacctggattagcaatcctagaaactggatactgcctttctggggcagggagcctcacggctgagtgtaggctatgtggagaagcaytttctcrytggctttcctttctgtagctttctgtaagttcatcttggtctgctgagtgttgatctgaggtgccgtatttcatgaaatgggttgcagaataggcactgggactgtgatttagatctggataacaaaatcctcagcaaagtttaggaggtttaaatgaagttccagttcaagccttttgcaagctttaaataccttctagtttgaggacggtgataatcagaaggtcagaatgtgcatcaattatcattaaaccacaagactcttcttcataactgccctccagcttacagctgattct

SEQ ID NO: 48437 - DNA, 600 bp, Chicken  19866894293559_3
gttaacttcagtctggcaggttttatgctagatcaggcacagtctgtccacactgccctaacttcatagcagatcaggtaacagctgacataaaagcataacactggcacaaggtttgcattgtgtgctctggctaatgcaagagaaatgcaagtatgtgcccacacctaatccagatcactggagggcagtctgacagtgcacagacctggattagcaatcctagaaactggatactgcctttctggggcagggagcctcacggctgagtgtaggctatgtggagaagcaytttctcrytggctttcctttctgtagctttctgtaagttcatcttggtctgctgagtgttgatctgaggtgccgtatttcatgaaatgggttgcagaataggcactgggactgtgatttagatctggataacaaaatcctcagcaaagtttaggaggtttaaatgaagttccagttcaagccttttgcaagctttaaataccttctagtttgaggacggtgataatcagaaggtcagaatgtgcatcaattatcattaaaccacaagactcttcttcataactgccctccagcttacagctgattctg

SEQ ID NO: 48438 - DNA, 600 bp, Chicken  19866894293561_1
cttccaatgcactcaaaggaactgcagttctctactcagcattatgaatctattaaaaaaacctccaagtggaaatgctgtctcatcatcttagctcattttgagttctgaaaataaaacattaaggtaatactggatgcaacagcactccaaaaagcttctccacttcaatgcacatacgtcgagagggcacaatggaattcatccctgggtactcaaggagctggctggtgtcatcacaagatctctcaacttttttttttttaaatggtcttgggaatccggaaagattccgttgaygggaaagcagtaagcrttgtcccagcttccatgaagaaaaatgacactagtaattagtcctgtcagcttcccaacagttcttgaggaaattatggagaagattatttgggggagttattgaaaarcaactgtaaaagaatgcaactgttcatcatcaccaacccatatkcattaagggaaagtccagcttgactaactttatttcctattacaaggttcacctggactggatttttcttatgaaaatgtcataagaaatggtgtcaaatgccctacagatttgtgtgttttcctttttct

SEQ ID NO: 48439 - DNA, 600 bp, Chicken  19866894293561_10
actttatttcctattacaaggttcacctggactggatttttcttatgaaaatgtcataagaaatggtgtcaaatgccctacagatttgtgtgttttcctttttctggcactccagctagcagtacagcacttaagttccccctgatayccatcaagtgtttaattaaacctgccctcaacayactttcaaaccaatttttttraaacaactttctcctggcatctttctgaatatcacattaggctctctaacttctgtcttagtttcagctgtcttcagagtgtttggtatgatgttaygtttcagttctaggaraacaacactgattacacaacaatgttcatagtttctgctaagcattgtatgaaaccaaggccatcctccatgaaggaccagtggagctgggagggaacagaattaggacagctgactttaactgaccaaagggatgttccatatcgtaagacactgttcaraagtttaagggggtaggatttcatctctctcccttcccctgcttggggagctagctgggcttccatcaacaggcggtgagctactgcttgtatatcattatgctacatacattcatatgtact

SEQ ID NO: 48440 - DNA, 600 bp, Chicken  19866894293561_11
caaggttcacctggactggatttttcttatgaaaatgtcataagaaatggtgtcaaatgccctacagatttgtgtgttttcctttttctggcactccagctagcagtacagcacttaagttccccctgatayccatcaagtgtttaattaaacctgccctcaacayactttcaaaccaatttttttraaacaactttctcctggcatctttctgaatatcacattaggctctctaacttctgtcttagtttcagctgtcttcagagtgtttggtatgatgttaygtttcagttctaggaraacaacactgattacacaacaatgttcatagtttctgctaagcattgtatgaaaccaaggccatcctccatgaaggaccagtggagctgggagggaacagaattaggacagctgactttaactgaccaaagggatgttccatatcgtaagacactgttcaraagtttaagggggtaggatttcatctctctcccttcccctgcttggggagctagctgggcttccatcaacaggcggtgagctactgcttgtatatcattatgctacatacattcatatgtactcacaactattatcttt

SEQ ID NO: 48441 - DNA, 442 bp, Chicken  19866894293561_12
aacayactttcaaaccaatttttttraaacaactttctcctggcatctttctgaatatcacattaggctctctaacttctgtcttagtttcagctgtcttcagagtgtttggtatgatgttaygtttcagttctaggaraacaacactgattacacaacaatgttcatagtttctgctaagcattgtatgaaaccaaggccatcctccatgaaggaccagtggagctgggagggaacagaattaggacagctgactttaactgaccaaagggatgttccatatcgtaagacactgttcaraagtttaagggggtaggatttcatctctctcccttcccctgcttggggagctagctgggcttccatcaacaggcggtgagctactgcttgtatatcattatgctacatacattcatatgtactcacaactattatctttttc

SEQ ID NO: 48442 - DNA, 600 bp, Chicken  19866894293561_2
aggaactgcagttctctactcagcattatgaatctattaaaaaaacctccaagtggaaatgctgtctcatcatcttagctcattttgagttctgaaaataaaacattaaggtaatactggatgcaacagcactccaaaaagcttctccacttcaatgcacatacgtcgagagggcacaatggaattcatccctgggtactcaaggagctggctggtgtcatcacaagatctctcaacttttttttttttaaatggtcttgggaatccggaaagattccgttgaygggaaagcagtaagcrttgtcccagcttccatgaagaaaaatgacactagtaattagtcctgtcagcttcccaacagttcttgaggaaattatggagaagattatttgggggagttattgaaaarcaactgtaaaagaatgcaactgttcatcatcaccaacccatatkcattaagggaaagtccagcttgactaactttatttcctattacaaggttcacctggactggatttttcttatgaaaatgtcataagaaatggtgtcaaatgccctacagatttgtgtgttttcctttttctggcactccagctagca

SEQ ID NO: 48443 - DNA, 600 bp, Chicken  19866894293561_3
ggtaatactggatgcaacagcactccaaaaagcttctccacttcaatgcacatacgtcgagagggcacaatggaattcatccctgggtactcaaggagctggctggtgtcatcacaagatctctcaacttttttttttttaaatggtcttgggaatccggaaagattccgttgaygggaaagcagtaagcrttgtcccagcttccatgaagaaaaatgacactagtaattagtcctgtcagcttcccaacagttcttgaggaaattatggagaagattatttgggggagttattgaaaarcaactgtaaaagaatgcaactgttcatcatcaccaacccatatkcattaagggaaagtccagcttgactaactttatttcctattacaaggttcacctggactggatttttcttatgaaaatgtcataagaaatggtgtcaaatgccctacagatttgtgtgttttcctttttctggcactccagctagcagtacagcacttaagttccccctgatayccatcaagtgtttaattaaacctgccctcaacayactttcaaaccaatttttttraaacaactttctcctggcatctttctg

SEQ ID NO: 48444 - DNA, 600 bp, Chicken  19866894293561_4
aatgcacatacgtcgagagggcacaatggaattcatccctgggtactcaaggagctggctggtgtcatcacaagatctctcaacttttttttttttaaatggtcttgggaatccggaaagattccgttgaygggaaagcagtaagcrttgtcccagcttccatgaagaaaaatgacactagtaattagtcctgtcagcttcccaacagttcttgaggaaattatggagaagattatttgggggagttattgaaaarcaactgtaaaagaatgcaactgttcatcatcaccaacccatatkcattaagggaaagtccagcttgactaactttatttcctattacaaggttcacctggactggatttttcttatgaaaatgtcataagaaatggtgtcaaatgccctacagatttgtgtgttttcctttttctggcactccagctagcagtacagcacttaagttccccctgatayccatcaagtgtttaattaaacctgccctcaacayactttcaaaccaatttttttraaacaactttctcctggcatctttctgaatatcacattaggctctctaacttctgtcttagtttcagctgt

SEQ ID NO: 48445 - DNA, 600 bp, Chicken  19866894293561_5
cggaaagattccgttgaygggaaagcagtaagcrttgtcccagcttccatgaagaaaaatgacactagtaattagtcctgtcagcttcccaacagttcttgaggaaattatggagaagattatttgggggagttattgaaaarcaactgtaaaagaatgcaactgttcatcatcaccaacccatatkcattaagggaaagtccagcttgactaactttatttcctattacaaggttcacctggactggatttttcttatgaaaatgtcataagaaatggtgtcaaatgccctacagattkgtgtgttttcctttttctggcactccagctagcagtacagcacttaagttccccctgatayccatcaagtgtttaattaaacctgccctcaacayactttcaaaccaatttttttraaacaactttctcctggcatctttctgaatatcacattaggctctctaacttctgtcttagtttcagctgtcttcagagtgtttggtatgatgttaygtttcagttctaggaraacaacactgattacacaacaatgttcatagtttctgctaagcattgtatgaaaccaaggccatcctccat

SEQ ID NO: 48446 - DNA, 600 bp, Chicken  19866894293561_6
ggaaagattccgttgaygggaaagcagtaagcrttgtcccagcttccatgaagaaaaatgacactagtaattagtcctgtcagcttcccaacagttcttgaggaaattatggagaagattatttgggggagttattgaaaarcaactgtaaaagaatgcaactgttcatcatcaccaacccatatkcattaagggaaagtccagcttgactaactttatttcctattacaaggttcacctggactggatttttcttatgaaaatgtcataagaaatggtgtcaaatgccctacagatttktgtgttttcctttttctggcactccagctagcagtacagcacttaagttccccctgatayccatcaagtgtttaattaaacctgccctcaacayactttcaaaccaatttttttraaacaactttctcctggcatctttctgaatatcacattaggctctctaacttctgtcttagtttcagctgtcttcagagtgtttggtatgatgttaygtttcagttctaggaraacaacactgattacacaacaatgttcatagtttctgctaagcattgtatgaaaccaaggccatcctccatg

SEQ ID NO: 48447 - DNA, 600 bp, Chicken  19866894293561_7
acactagtaattagtcctgtcagcttcccaacagttcttgaggaaattatggagaagattatttgggggagttattgaaaarcaactgtaaaagaatgcaactgttcatcatcaccaacccatatkcattaagggaaagtccagcttgactaactttatttcctattacaaggttcacctggactggatttttcttatgaaaatgtcataagaaatggtgtcaaatgccctacagatttgtgtgttttcctttttctggcactccagctagcagtacagcacttaagttccccctgatayccatcaagtgtttaattaaacctgccctcaacayactttcaaaccaatttttttraaacaactttctcctggcatctttctgaatatcacattaggctctctaacttctgtcttagtttcagctgtcttcagagtgtttggtatgatgttaygtttcagttctaggaraacaacactgattacacaacaatgttcatagtttctgctaagcattgtatgaaaccaaggccatcctccatgaaggaccagtggagctgggagggaacagaattaggacagctgactttaactgaccaaagg

SEQ ID NO: 48448 - DNA, 600 bp, Chicken  19866894293561_8
ttcttgaggaaattatggagaagattatttgggggagttattgaaaarcaactgtaaaagaatgcaactgttcatcatcaccaacccatatkcattaagggaaagtccagcttgactaactttatttcctattacaaggttcacctggactggatttttcttatgaaaatgtcataagaaatggtgtcaaatgccctacagatttgtgtgttttcctttttctggcactccagctagcagtacagcacttaagttccccctgatayccatcaagtgtttaattaaacctgccctcaacayactttcaaaccaatttttttraaacaactttctcctggcatctttctgaatatcacattaggctctctaacttctgtcttagtttcagctgtcttcagagtgtttggtatgatgttaygtttcagttctaggaraacaacactgattacacaacaatgttcatagtttctgctaagcattgtatgaaaccaaggccatcctccatgaaggaccagtggagctgggagggaacagaattaggacagctgactttaactgaccaaagggatgttccatatcgtaagacactgttcaraagtt

SEQ ID NO: 48449 - DNA, 600 bp, Chicken  19866894293561_9
agattatttgggggagttattgaaaarcaactgtaaaagaatgcaactgttcatcatcaccaacccatatkcattaagggaaagtccagcttgactaactttatttcctattacaaggttcacctggactggatttttcttatgaaaatgtcataagaaatggtgtcaaatgccctacagatttgtgtgttttcctttttctggcactccagctagcagtacagcacttaagttccccctgatayccatcaagtgtttaattaaacctgccctcaacayactttcaaaccaatttttttraaacaactttctcctggcatctttctgaatatcacattaggctctctaacttctgtcttagtttcagctgtcttcagagtgtttggtatgatgttaygtttcagttctaggaraacaacactgattacacaacaatgttcatagtttctgctaagcattgtatgaaaccaaggccatcctccatgaaggaccagtggagctgggagggaacagaattaggacagctgactttaactgaccaaagggatgttccatatcgtaagacactgttcaraagtttaagggggtaggatttcatct

SEQ ID NO: 48450 - DNA, 600 bp, Chicken  19866894293565_1
acactctgtgcagctctgtgtccagctggttgggagcagctgtgcaacgtgcccacgctgtgcccacctgatccttcacacccacggctcagctgagaagtaggagcttgagacacactgacccctctaacacacagcaccacaaacatgctttttcatatttcagctttataaactgaagaactgcctcctgtcatcgcttgttatgcaggagctattcccttcctaaaccccattccgccgatgaaacgatccacaacaggaagcagccctcccccacacacaacatcccataaaccrgggaaagccatcggtgcagtgttttaacctggacatggcargagaagggcactttctgcttggcagcgcagtcagcgtcgccgtgcgaccagctgagcaaaccaatgacacattttaaggcaaaaaaaaaaagaaagagagagatggggggaaaaaaagaaaaggaaaaacaaaatgttcattgtggaacataccccctaagcagttggatcatcttaatcttcaagcttctgtaatacaactgttgggaggctctaagtctgtgcacaataaagtgctttattcggagaaccgtatgac

SEQ ID NO: 48451 - DNA, 600 bp, Chicken  19866894293565_2
gtgcaacgtgcccacgctgtgcccacctgatccttcacacccacggctcagctgagaagtaggagcttgagacacactgacccctctaacacacagcaccacaaacatgctttttcatatttcagctttataaactgaagaactgcctcctgtcatcgcttgttatgcaggagctattcccttcctaaaccccattccgccgatgaaacgatccacaacaggaagcagccctcccccacacacaacatcccataaaccrgggaaagccatcggtgcagtgttttaacctggacatggcargagaagggcactttctgcttggcagcgcagtcagcgtcgccgtgcgaccagctgagcaaaccaatgacacattttaaggcaaaaaaaaaaagaaagagagagatggggggaaaaaaagaaaaggaaaaacaaaatgttcattgtggaacataccccctaagcagttggatcatcttaatcttcaagcttctgtaatacaactgttgggaggctctaagtctgtgcacaataaagtgctttattcggagaaccgtatgactccatcagtcattccagcacatgtttggcacgaattgaaag

SEQ ID NO: 48452 - DNA, 600 bp, Chicken  19866894293565_3
cctctaacacacagcaccacaaacatgctttttcatatttcagctttataaactgaagaactgcctcctgtcatcgcttgttatgcaggagctattcccttcctaaaccccattccgccgatgaaacgatccacaacaggaagcagccctcccccacacacaacatcccataaaccrgggaaagccatcggtgcagtgttttaacctggacatggcargagaagggcactttctgcttggcagcgcagtcagcgtcgccgtgcgaccagctgagcaaaccaatgacacattttaaggcaraaaaaaaaagaaagagagagatggggggaaaaaaagaaaaggaaaaacaaaatgttcattgtggaacataccccctaagcagttggatcatcttaatcttcaagcttctgtaatacaactgttgggaggctctaagtctgtgcacaataaagtgctttattcggagaaccgtatgactccatcagtcattccagcacatgtttggcacgaattgaaagtgaaaagcatagctaagtcaaatatttcagaactgaacttgtctttctaacacacatggtttatatattggtgtaatatcta

SEQ ID NO: 48453 - DNA, 600 bp, Chicken  19866894293571_1
ccccttgcaaccaagccgtgccaaaggtctccctgagaaaaactccaagcatcaagcacagctcacagcagctgctcttacctcctggccaggagctgtgacctggtccctgctggagacacgaggctgatctgcaggtcaccgcggcgcgggtgcgcgatgctgagccgcaccaccacgtgctccaggtacagcacgtgctgctcgcgctgctcgctgcaggcactgctcagagtgctggcgcgcagcacgtggtccgggcggatgtacctgccgggatgcaatggtaaccaatgaacsctgatgcaaatcttgagtcctcacgctgtgtgcatggataatgtttgctcctcattgggaaaaaaaaatccctcttttacaggcaggaagggttggggcatcaagctcccattgatgggaactgggtaccatcccactgatgggagctggcacccaaatacacttcagctctgcctagagatggatggaatgagggcttaatgttcatgtttgggagtatctgggagcatttcccttggcgccctatcggcgctctgcttccccatttcttctcagttgtgtttaaacccagactcctac

SEQ ID NO: 48454 - DNA, 600 bp, Chicken  19866894293574_1
cctacactgatactcccttgtgtaaggtttaacatcaatgttagaaatatgtgatggagaataacctctctagtttgagacagaacatatgtaataaattcaagctgcagaaagagtactgatcaaacagcagaaatgccctttgatttctggagatttgtctgctgagcaaattggttggggtcatctaaaagaactttaaataatattttctactttgatgtgtattctttttgcagctgatttttaggacaattttttcttgataaacatgtagtcaaaggaaccaagaatgaatartactaagtcacagaaattccatattatgattgtgttttacaagtgtagcttttattacttayactttttacctttccatattatgggcacattgaatgtgctttcagtggggtatgcctgctgttttggatcacattcatatctggtgtcattctgctagttattgcacaagggattagtttgctcctttgcgctgtacatagcttcaatatagcacaagctcaggggtggggggagcagatgtggaatggctaaaaaagttcaattccttatttctatgaacaaacatcacataaagtc

SEQ ID NO: 48455 - DNA, 600 bp, Chicken  19866894293574_2
aacctctctagtttgagacagaacatatgtaataaattcaagctgcagaaagagtactgatcaaacagcagaaatgccctttgatttctggagatttgtctgctgagcaaattggttggggtcatctaaaagaactttaaataatattttctactttgatgtgtattctttttgcagctgatttttaggacaattttttcttgataaacatgtagtcaaaggaaccaagaatgaatartactaagtcacagaaattccatattatgattgtgttttacaagtgtagcttttattacttayactttttacctttccatattatgggcacattgaatgtgctttcagtggggtatgcctgctgttttggatcacattcatatctggtgtcattctgctagttattgcacaagggattagtttgctcctttgcgctgtacatagcttcaatatagcacaagctcaggggtggggggagcagatgtggaatggctaaaaaagttcaattccttatttctatgaacaaacatcacataaagtcaccatacacaatgcatagcatattgattcatttagttcttccttaattttcctctttggaca

SEQ ID NO: 48456 - DNA, 599 bp, Chicken  19866894293585_1
  misc_feature (1)..(131): n is any nucleotide
nnnnnnnnnnnnnnnnnnnnnnnnnnnnnnnnnnnnnnnnnnnnnnnnnnnnnnnnnnnnnnnnnnnnnnnnnnnnnnnnnnnnnnnnnnnnnnnnnnnnnnnnnnnnnnnnnnnnnnnnnnnnnnnnnnnaaataaaataaaataaaatctgtaagaataccaaagcagcaagagccaatttactgaacagagaaaccaaccctggtaaattgactcctctttctgtgacacatacagttgataacacttcttgctttgctgtgaagtggacacaaggaagtgtagagttttgtacccrgtgaggaataaccaatgcatctgtacaggttaggagatgaactgctgttaaggagctctgcaaagaaggaccttggggtcctggtgggcaaaaggttggccaggagccacgtggccaagaaggtcaatgggaccctggggtgcactaaaaagagcacggtcagaaggttgagggtggtgatcctcccactctcctgtgccctggtgaggccacacttagaataccgtgtccagttctgggcaccttagtttaaaaaaagacagggatctcctaggagtccagcggagggccacaaagat

SEQ ID NO: 48457 - DNA, 600 bp, Chicken  19866894293589_1
tcagtggtaaatgttttttagtccgagatgatagtgtctccagtcttgtttgaagtgtaagaaatgcatcattgaacataacatagtatttttggaacgtgcctctgtttgaatacactcgcgggctgtgactacactttgatggcttttcccccagagactgtgtgttgtgataaccaggtgtgactggttggttaaatgggtccacaccgtctgccccccacgtgggcacacatccagcagtcgttacgttccttggagcactaggaaagagagtctgtctggagttggaactgctcraatatctcagataatgagttgaataaaatgttttctggatttttttttttatttttgattaatcttttgtatgataacactatgggctggaggcagggatgggraaagcaggccctaagagtaagcargcttctcctgcagctgtctctcagagctgtgaagaaaaagggtggttcagggagcatggtaggtgtgcagtctgtgtgggaagctcgctgggggatggctgagtgttgtaggagctgttaggcagggtcacagagttgtaggggttggaagggacctctcttagaggtctgt

SEQ ID NO: 48458 - DNA, 600 bp, Chicken  19866894293589_2
ctgtttgaatacactcgcgggctgtgactacactttgatggcttttcccccagagactgtgtgttgtgataaccaggtgtgactggttggttaaatgggtccacaccgtctgccccccacgtgggcacacatccagcagtcgttacgttccttggagcactaggaaagagagtctgtctggagttggaactgctcraatatctcagataatgagttgaataaaatgttttctggatttttttttttatttttgattaatcttttgtatgataacactatgggctggaggcagggatgggraaagcaggccctaagagtaagcargcttctcctgcagctgtctctcagagctgtgaagaaaaagggtggttcagggagcatggtaggtgtgcagtctgtgtgggaagctcgctgggggatggctgagtgttgtaggagctgttaggcagggtcacagagttgtaggggttggaagggacctctcttagaggtctgtggtacagttccctgcagcaggtgacagcttgggtgtccggccacgtcctgagcatccctgggcagcctgttgcagcgctgcctcactccacagcaaaactcgtg

SEQ ID NO: 48459 - DNA, 600 bp, Chicken  19866894293589_3
tgactacactttgatggcttttcccccagagactgtgtgttgtgataaccaggtgtgactggttggttaaatgggtccacaccgtctgccccccacgtgggcacacatccagcagtcgttacgttccttggagcactaggaaagagagtctgtctggagttggaactgctcraatatctcagataatgagttgaataaaatgttttctggatttttttttttatttttgattaatcttttgtatgataacactatgggctggaggcagggatgggraaagcaggccctaagagtaagcargcttctcctgcagctgtctctcagagctgtgaagaaaaagggtggttcagggagcatggtaggtgtgcagtctgtgtgggaagctcgctgggggatggctgagtgttgtaggagctgttaggcagggtcacagagttgtaggggttggaagggacctctcttagaggtctgtggtacagttccctgcagcaggtgacagcttgggtgtccggccacgtcctgagcatccctgggcagcctgttgcagcgctgcctcactccacagcaaaactcgtgttactgtgggactgctgtgttcca

SEQ ID NO: 48460 - DNA, 600 bp, Chicken  19866894293590_1
aactgtaatcaaatgaagtcaatcagaactggtgacacatactactaaaatgactccaaattccttcttctgtgttgcttcaaatttattctgacaaaacttaatcacgtgaagcagaactacgttaaaaagtagcgtagaaatctagaactcaggtgtcaaaccaggaatcatttgtcattaccccaaaagagcaatgctctgagcaacagcatttcagatgtaaaggaacaagtcgtcaggcattctctcagaactttgcacttatttatacacacagcagcacattaagatgtgcaygttgaatgatacaaagttgaaagwtacttagtttggattcctagatcctattatagcagagggttgttcagtagcacttcacaccaacaaattacaccatcatgattccaaaagagccactccaaatttctgtgacactgcaacttggaaaaccttgtcatctttactacttatcctagttaaagataatttgccatagagacatgagagacagcttaaaacttcagacaagttctatttcttaatctcagtttccatgatctcagaaccaacactgggccatttcagaagtttctttta

SEQ ID NO: 48461 - DNA, 600 bp, Chicken  19866894293590_2
agaactggtgacacatactactaaaatgactccaaattccttcttctgtgttgcttcaaatttattctgacaaaacttaatcacgtgaagcagaactacgttaaaaagtagcgtagaaatctagaactcaggtgtcaaaccaggaatcatttgtcattaccccaaaagagcaatgctctgagcaacagcatttcagatgtaaaggaacaagtcgtcaggcattctctcagaactttgcacttatttatacacacagcagcacattaagatgtgcaygttgaatgatacaaagttgaaagwtacttagtttggattcctagatcctattatagcagagggttgttcagtagcacttcacaccaacaaattacaccatcatgattccaaaagagccactccaaatttctgtgacactgcaacttggaaaaccttgtcatctttactacttatcctagttaaagataatttgccatagagacatgagagacagcttaaaacttcagacaagttctatttcttaatctcagtttccatgatctcagaaccaacactgggccatttcagaagtttcttttatgttatgtaatcaggtcgtattgc

SEQ ID NO: 48462 - DNA, 600 bp, Chicken  19866894293599_1
tatttttaaacaaatgcatctgtcatctatttaaaagtcactcctggataaattagatgaacctaacagatatacaaccttttccatatgtctattactagggatctcaaaggtctgaaaaagggagaggcaattcctaacaggtgtttcctttctgtaatatatcttactggaagcagacaggtgggatatgaccaattgaacttacaatggacatggcaatttcactatgttctttcatatgcaaatagagtcatactaagttgtgacatccagtgcaagctatttgttttctttttwttttttttttttttttttgccagtattctggtgtgaaaaaataggtgcttctattgttgactatttgaattgatgttatataagaaaactcattttgaacacagatgaacttacataaaaaaatatgtgtagagaaaaggaggcttacgattctgagaattataatcttctcctaaagaaatggagtagacttgcagatattattgaatgcatttcaaaaactgaacacttaggatgtgttatacaaaatctctggaatccaccagcaaaaataattaatcaacaattaagaccccttag

SEQ ID NO: 48463 - DNA, 600 bp, Chicken  19866894293600_1
aaagcaacataaaggtgatgtgattttctctatccagttttgtgcactgtttgtgacaacttggggaatcaaaatacaacttctgaatagcacttgacaatctaaaactgttacaaatttattgaaccatagcacaccacaatgaattgatatagatttcctagtgaaatttacctagcagagaccttatcatacagctgccagtgtcaggcctctgagagcactaacaagccttaatggccctgttcagcctcacctgggacctccacccacaccatgagaccaggagccttggcctcrgccacacaatttctgagtcccactgcaggagtactgggttctggtataacctcagctatgcctgtttctaaccttgctgctccttatgccagacgtcaacctgcaaaytggcttccagactggatgttggccctgcctcatcactatatgcctgatcctcacctatggattgacctcctggcttaatttcagacctgctttgtcactatactggatcattataagtggacctggcttttacctctttattttgatagttctcatgttggtccccatcccttctcatcaactcctattttc

SEQ ID NO: 48464 - DNA, 558 bp, Chicken  19866894293600_2
tgttacaaatttattgaaccatagcacaccacaatgaattgatatagatttcctagtgaaatttacctagcagagaccttatcatacagctgccagtgtcaggcctctgagagcactaacaagccttaatggccctgttcagcctcacctgggacctccacccacaccatgagaccaggagccttggcctcrgccacacaatttctgagtcccactgcaggagtactgggttctggtataacctcagctatgcctgtttctaaccttgctgctccttatgccagacgtcaacctgcaaaytggcttccagactggatgttggccctgcctcatcactatatgcctgatcctcacctatggattgacctcctggcttaatttcagacctgctttgtcactatactggatcattataagtggacctggcttttacctctttattttgatagttctcatgttggtccccatcccttctcatcaactcctattttctggagtcagttttatttcccagaagaagcatttgctctgcttttcttcatccagtctatctacaca

SEQ ID NO: 48465 - DNA, 600 bp, Chicken  19866894293603_1
gttttacacattctgtgataccttttgatgtttttccttctgtgctttataccgtgcagtttctgtgagctctgcatattgcaattgaattatggatattaattttcccagttcctgatgtgagaaaacaataatgcagtcacttgcaaagaacatttgtcataaactctcatgctgctcatttccatatacactcctagaagtgtgtatgcgtatatggaaataaaagaaaaacaggagtttctgttgtactcgagatggcttttgtgtccttcatttagaggaaacttgtacttacartgtgtggagtggtacaattgctttagcaccttacgttttctaccctgaattatttttattgcaatgcatcagattaactgtagtaatgaaataaatgatgaatactatacatccatacacacacatctataaagcatgacagctctattgtatagggtargcatgctgatacatttgtagtattatttttgttctttctytgtgcaagatggaaataaatctgtctgacttctgtgccagtatagctgcactcagattgagttrtgccacttctgtattcaggaacaggttgcccagaga

SEQ ID NO: 48466 - DNA, 600 bp, Chicken  19866894293603_2
cataaactctcatgctgctcatttccatatacactcctagaagtgtgtatgcgtatatggaaataaaagaaaaacaggagtttctgttgtactcgagatggcttttgtgtccttcatttagaggaaacttgtacttacartgtgtggagtggtacaattgctttagcaccttacgttttctaccctgaattatttttattgcaatgcatcagattaactgtagtaatgaaataaatgatgaatactatacatccatacacacacatctataaagcatgacagctctattgtatagggtargcatgctgatacatttgtagtattatttttgttctttctytgtgcaagatggaaataaatctgtctgacttctgtgccagtatagctgcactcagattgagttrtgccacttctgtattcaggaacaggttgcccagagaggtggtggatgccccatccctggagacttcaaggcaaagctggatcaggccctaggcaacctgatagagctgtacatgtccctgttcattgcaggggagttagaacagatgacctttaaaggtccttccaactctaaggattctgtgattctattattga

SEQ ID NO: 48467 - DNA, 600 bp, Chicken  19866894293603_3
aagtgtgtatgcgtatatggaaataaaagaaaaacaggagtttctgttgtactcgagatggcttttgtgtccttcatttagaggaaacttgtacttacartgtgtggagtggtacaattgctttagcaccttacgttttctaccctgaattatttttattgcaatgcatcagattaactgtagtaatgaaataaatgatgaatactatacatccatacacacacatctataaagcatgacagctctattgtatagggtargcatgctgatacatttgtagtattatttttgttctttctytgtgcaagatggaaataaatctgtctgacttctgtgccagtatagctgcactcagattgagttrtgccacttctgtattcaggaacaggttgcccagagaggtggtggatgccccatccctggagacttcaaggcaaagctggatcaggccctaggcaacctgatagagctgtacatgtccctgttcattgcaggggagttagaacagatgacctttaaaggtccttccaactctaaggattctgtgattctattattgacataattcaggggcacaagctttgtacctcagcaagcact

SEQ ID NO: 48468 - DNA, 600 bp, Chicken  19866894293603_4
ttgtgtccttcatttagaggaaacttgtacttacartgtgtggagtggtacaattgctttagcaccttacgttttctaccctgaattatttttattgcaatgcatcagattaactgtagtaatgaaataaatgatgaatactatacatccatacacacacatctataaagcatgacagctctattgtatagggtargcatgctgatacatttgtagtattatttttgttctttctytgtgcaagatggaaataaatctgtctgacttctgtgccagtatagctgcactcagattgagttrtgccacttctgtattcaggaacaggttgcccagagaggtggtggatgccccatccctggagacttcaaggcaaagctggatcaggccctaggcaacctgatagagctgtacatgtccctgttcattgcaggggagttagaacagatgacctttaaaggtccttccaactctaaggattctgtgattctattattgacataattcaggggcacaagctttgtacctcagcaagcactttagtttacttgagtctgaagattctaaatgtttaacgtcattggttggatcagagaaatgaca

SEQ ID NO: 48469 - DNA, 600 bp, Chicken  19866894293605_1
cgtccctatgaattcttccagctcacggagcgatctgcgggcagagggcacagcacagaaggacttggtggccgggggggacgatggcactgtgacatatggaggatgctgtgggagcagagcctgctcgttcccacgcagcgtgccctgctccgtgaccccagatggggcgacgtgcacctctgtggctaccagattgcaccgacagcccatgagggcgatgcttcagacaaaggacacgtcctgcagcaggggaacagttggcattgggtcacagtaacacttcgccctccaggacawcagctcggcaccgaagtccatccggaactcagcaccagtcccgcagcagtgccaccacgttggcaccacgggtgggytccagaagcagagcacagctctgtgtcacagcttcccaggaagcgcctccgtcgcaacaacaaatacttgttttcaccgagcaaacaaaaagcggcattatccgcggcagccccragcgtcccttagaaactgctgcgggcaggaaaggtcagctggggctccattcctcacccctctgcrtcgctctgtttgtgcaaccgctgactcctacgtgctgctcca

SEQ ID NO: 48470 - DNA, 600 bp, Chicken  19866894293605_2
gggacgatggcactgtgacatatggaggatgctgtgggagcagagcctgctcgttcccacgcagcgtgccctgctccgtgaccccagatggggcgacgtgcacctctgtggctaccagattgcaccgacagcccatgagggcgatgcttcagacaaaggacacgtcctgcagcaggggaacagttggcattgggtcacagtaacacttcgccctccaggacawcagctcggcaccgaagtccatccggaactcagcaccagtcccgcagcagtgccaccacgttggcaccacgggtgggytccagaagcagagcacagctctgtgtcacagcttcccaggaagcgcctccgtcgcaacaacaaatacttgttttcaccgagcaaacaaaaagcggcattatccgcggcagccccragcgtcccttagaaactgctgcgggcaggaaaggtcagctggggctccattcctcacccctctgcrtcgctctgtttgtgcaaccgctgactcctacgtgctgctccacgccgacattctgaaaccgcgtyggtgcacaccgcgtggctctgcgctccccgtccccacggcgcggctgaagctca

SEQ ID NO: 48471 - DNA, 600 bp, Chicken  19866894293605_3
cagattgcaccgacagcccatgagggcgatgcttcagacaaaggacacgtcctgcagcaggggaacagttggcattgggtcacagtaacacttcgccctccaggacawcagctcggcaccgaagtccatccggaactcagcaccagtcccgcagcagtgccaccacgttggcaccacgggtgggytccagaagcagagcacagctctgtgtcacagcttcccaggaagcgcctccgtcgcaacaacaaatacttgttttcaccgagcaaacaaaaagcggcattatccgcggcagccccragcgtcccttagaaactgctgcgggcaggaaaggtcagctggggctccattcctcacccctctgcrtcgctctgtttgtgcaaccgctgactcctacgtgctgctccacgccgacattctgaaaccgcgtyggtgcacaccgcgtggctctgcgctccccgtccccacggcgcggctgaagctcagggcaggagtggccgccacagcgcaacacctcccctcgcmaaatgctttttgcattttacaggcggttaacgccaaaagcctcggggcgacccggcacctcctctctggaggtga

SEQ ID NO: 48472 - DNA, 600 bp, Chicken  19866894293605_4
agttggcattgggtcacagtaacacttcgccctccaggacawcagctcggcaccgaagtccatccggaactcagcaccagtcccgcagcagtgccaccacgttggcaccacgggtgggytccagaagcagagcacagctctgtgtcacagcttcccaggaagcgcctccgtcgcaacaacaaatacttgttttcaccgagcaaacaaaaagcggcattatccgcggcagccccragcgtcccttagaaactgctgcgggcaggaaaggtcagctggggctccattcctcacccctctgcrtcgctctgtttgtgcaaccgctgactcctacgtgctgctccacgccgacattctgaaaccgcgtyggtgcacaccgcgtggctctgcgctccccgtccccacggcgcggctgaagctcagggcaggagtggccgccacagcgcaacacctcccctcgcmaaatgctttttgcattttacaggcggttaacgccaaaagcctcggggcgacccggcacctcctctctggaggtgaagacgcagcaaaactggggactggaactgagaactcccggagcgaacaccgcaaacaacagcaaaa

SEQ ID NO: 48473 - DNA, 600 bp, Chicken  19866894293605_5
ggaactcagcaccagtcccgcagcagtgccaccacgttggcaccacgggtgggytccagaagcagagcacagctctgtgtcacagcttcccaggaagcgcctccgtcgcaacaacaaatacttgttttcaccgagcaaacaaaaagcggcattatccgcggcagccccragcgtcccttagaaactgctgcgggcaggaaaggtcagctggggctccattcctcacccctctgcrtcgctctgtttgtgcaaccgctgactcctacgtgctgctccacgccgacattctgaaaccgcgtyggtgcacaccgcgtggctctgcgctccccgtccccacggcgcggctgaagctcagggcaggagtggccgccacagcgcaacacctcccctcgcmaaatgctttttgcattttacaggcggttaacgccaaaagcctcggggcgacccggcacctcctctctggaggtgaagacgcagcaaaactggggactggaactgagaactcccggagcgaacaccgcaaacaacagcaaaaccaaaccgagctccccaaagcacagatgatggcacgggagacggaccgagcagccccccgtgccc

SEQ ID NO: 48474 - DNA, 600 bp, Chicken  19866894293605_6
aagcgcctccgtcgcaacaacaaatacttgttttcaccgagcaaacaaaaagcggcattatccgcggcagccccragcgtcccttagaaactgctgcgggcaggaaaggtcagctggggctccattcctcacccctctgcrtcgctctgtttgtgcaaccgctgactcctacgtgctgctccacgccgacattctgaaaccgcgtyggtgcacaccgcgtggctctgcgctccccgtccccacggcgcggctgaagctcagggcaggagtggccgccacagcgcaacacctcccctcgcmaaatgctttttgcattttacaggcggttaacgccaaaagcctcggggcgacccggcacctcctctctggaggtgaagacgcagcaaaactggggactggaactgagaactcccggagcgaacaccgcaaacaacagcaaaaccaaaccgagctccccaaagcacagatgatggcacgggagacggaccgagcagccccccgtgcccacgcgtcgccatcagccttcccccccgctgcatgcctgaccccgtttcgctcctcctgcagcacgagggaggggcacgacccgacgtgctgcga

SEQ ID NO: 48475 - DNA, 579 bp, Chicken  19866894293615_1
aatggagaatcgggtaagtgccaaagaggtttttttactatatgatgctgttttgcaaggtttgaaaatatatttatgttctgtgagatgaaataataaaacttgaaatctgtaggctttggaaatcaactttgcaaaactgtgcaatacagtaaatcagatggcacttacctgacccttggctggagctgagcccctatagcatcccactgcgaatgtcaagccagaagtatcatacatgttaggatacctctaggaatgcaaatctggaatcagtgactttgagggatctgagaaggsgaagaaaggaaattttcagtttactttacagaaagcctttgctgcagctacttgagcagtaggcaatcaagactttaataattgtagtttcgcacaaaatctaaatacctagtttttctgaaagcacttcatgggtgagctagagagctcagaatgattttgatttttctatcaagggatctggggttttgttctttctttttgcttttcctgggttttggtgggattttttaatatattttatatatatatatatatagggaactaggtttaaagggg

SEQ ID NO: 48476 - DNA, 599 bp, Chicken  19866894293617_1
  misc_feature (1)..(142): n is any nucleotide
nnnnnnnnnnnnnnnnnnnnnnnnnnnnnnnnnnnnnnnnnnnnnnnnnnnnnnnnnnnnnnnnnnnnnnnnnnnnnnnnnnnnnnnnnnnnnnnnnnnnnnnnnnnnnnnnnnnnnnnnnnnnnnnnnnnnnnnnnnnnnntggttaataggagaatgtgatcaaggtgcttttggtgcattaccagtaataaaaaacaaaaatgagcgacctccaagtagatgagagtcaaatcctgccagtagtttgcatctcacaagggtgtaaagcccaatgtggttgttgccttccaaaagggyttacaggtattgttgatgctagttttaggcacttgtcttttatgggtctgtgtaataatccttgcattatgctattacagcctaatcaggtccctatcgtgctgccaagactgatcagatagcatcagtgcactgaggaattttcatgctgaacgtattatgaaagacacagatttataccgtgatagctgcgaaccacttcagcccatcaccagagcttcgtgctccacaactcacattaagagtggtaatgcagtgtctggttcacatcccatgtacatggtgctgtagaccaatga

SEQ ID NO: 48477 - DNA, 600 bp, Chicken  19866894293617_2
ttttatgggtctgtgtaataatccttgcattatgctattacagcctaatcaggtccctatcgtgctgccaagactgatcagatagcatcagtgcactgaggaattttcatgctgaacgtattatgaaagacacagatttataccgtgatagctgcgaaccacttcagcccatcaccagagcttcgtgctccacaactcacattaagagtggtaatgcagtgtctggttcacatcccatgtacatggtgctgtagaccaatgagacaatgccaggctcagccaacaggagccggtggcacraagccgggctccaaccaagactgggacataggtgagagagcatctctgcagattcagcaggcacattcccttccccttttattgaaaaattacttttagaaatgtgaaactgacaacgctacggtaactctggttgctgtagtttaattttaaagtaattaaagtagccgtcctgatgggctgagaggcaaaatgctcttttttccacaacttttctgagccaggaggctggggacatgtgccttccagctaatcctcctgcactgtgctttgtgaccggagtgttttaaatacagcctc

SEQ ID NO: 48478 - DNA, 540 bp, Chicken  19866894293621_1
attcttactacattttatttctatttgagtcttaactacacaaagggagagtcctttctcctgacccaaccagtgacctaatcagcatgaggtcactcagggacttgtgagatcttctgcagtgaaatgtgttgtagacttgaacatgcactgacataaacttactggacaaaatgcagacagtaattctgaaatcatgaggacatcacagaattcataaaacttccaggatgaaattttctccatgcctggatttcggttattttttccagctgtaatactaaaatatctactgctaamcttaagcacctaggaagcaaatgygatgaaagcctgacttcagccaaaccaacacaagcaaaggttaatgcagttcaagtacgtataagcttatcttgacagttttaactagttaaaatgatgtaacttaatgaacactgataatccatagcactttcagagaagatcagcatgagcagctcagcaatgcagaactgcttgcaacctcacttttaagactggggtgcattaaaaagagca

SEQ ID NO: 48479 - DNA, 516 bp, Chicken  19866894293621_2
ttgagtcttaactacacaaagggagagtcctttctcctgacccaaccagtgacctaatcagcatgaggtcactcagggacttgtgagatcttctgcagtgaaatgtgttgtagacttgaacatgcactgacataaacttactggacaaaatgcagacagtaattctgaaatcatgaggacatcacagaattcataaaacttccaggatgaaattttctccatgcctggatttcggttattttttccagctgtaatactaaaatatctactgctaamcttaagcacctaggaagcaaatgygatgaaagcctgacttcagccaaaccaacacaagcaaaggttaatgcagttcaagtacgtataagcttatcttgacagttttaactagttaaaatgatgtaacttaatgaacactgataatccatagcactttcagagaagatcagcatgagcagctcagcaatgcagaactgcttgcaacctcacttttaagactggggtgcattaaaaagagca

SEQ ID NO: 48480 - DNA, 600 bp, Chicken  19866894293622_1
tttgagaatcaatactgacatacagaattgaggaagaagaaataatctgtaaagataccaagaggtttctgagtgtcatcagaaccctggctctgaaaagcagaatgaaggaatcaaaagatatttctctgagaatcccagggaaggtaatttaataaaagggctgatttgtttgttgccaaaaaggccttgaaggtggggctgggaatttatattgcttttattattattttttccccccaagaccaacatgtaaactagagaagtgaatctgctgtgattagcaatatctgatcaggrtatgagcctgtttgcaataataaattacaacatctcatgtgtttcactactgttctagccaagttaaatcttttgttttattggatcagtgtttctggtcatttgtttcctgctctggtttaatattgagaaaatatctgcagagacagaaacttcagtgctagaaaagagataattgctgcaccattaaaaaaaaaatcctwtctgtgaggaaaaaaaaaaaaagaaaaaaagaaaaacctaaagaactaaagcactaaagctgaactcactatcttcattacctgaaaagataaagtg

SEQ ID NO: 48481 - DNA, 600 bp, Chicken  19866894293622_2
gggaatttatattgcttttattattattttttccccccaagaccaacatgtaaactagagaagtgaatctgctgtgattagcaatatctgatcaggrtatgagcctgtttgcaataataaattacaacatctcatgtgtttcactactgttctagccaagttaaatcttttgttttattggatcagtgtttctggtcatttgtttcctgctctggtttaatattgagaaaatatctgcagagacagaaacttcagtgctagaaaagagataattgctgcaccattaaaaaaaaaatcctwtctgtgaggaaaaaaaaaaaaagaaaaaaagaaaaacctaaagaactaaagcactaaagctgaactcactatcttcattacctgaaaagataaagtgcactgaaacagaaattctttgagttcacaatcattacacttggatgcttatacgagagtaggataaggaaaaagaacaatcaatggtcaattgactttatttccttttgtagaattataatttgcatgactgttacatgtttccaaggttatctgagcagaacacatacagcccatctgacacgtagtccataaagtaggctg

SEQ ID NO: 48482 - DNA, 600 bp, Chicken  19866894293626_1
aaaaccatttcctcttgtcctgtcactacatgcccttataaaaagtccctccccagctttcctgcaggtactggaagcccactacaaggtctccctggagccttctcttctccaggctgaagagccccagctatgtcagcctgtcctcatagggaaggttctccatctctctgatcacctttgtagcccttctctggacctgctccagcaactccatgtccttgtcttgggggccctagaactggatgcagtagttcatgtggagactcaagagaacagagcagaggggcagaatcacckcccttgatctgcttgtcatgcttctcttgatgcaactcaggttrtgattggccttctgggctgcaagaacacactgctgcgtcctgttgaatctttcatcaactgatactcccagatccttctcctcagggctgctatcaagccattctctgcccaacctgtatctgtgtttgggattgccccgaccgaggtgaagggctttgcacgtggccttgtttaacttcatgaggatggcatgggcctcatacattcattgtataatgtgaaagtgaaaggaaaacttatttggagacatatggt

SEQ ID NO: 48483 - DNA, 600 bp, Chicken  19866894293626_2
gtccctccccagctttcctgcaggtactggaagcccactacaaggtctccctggagccttctcttctccaggctgaagagccccagctatgtcagcctgtcctcatagggaaggttctccatctctctgatcacctttgtagcccttctctggacctgctccagcaactccatgtccttgtcttgggggccctagaactggatgcagtagttcatgtggagactcaagagaacagagcagaggggcagaatcacckcccttgatctgcttgtcatgcttctcttgatgcaactcaggttrtgattggccttctgggctgcaagaacacactgctgcgtcctgttgaatctttcatcaactgatactcccagatccttctcctcagggctgctatcaagccattctctgcccaacctgtatctgtgtttgggattgccccgaccgaggtgaagggctttgcacgtggccttgtttaacttcatgaggatggcatgggcctcatacattcattgtataatgtgaaagtgaaaggaaaacttatttggagacatatggttgatagtttttatatagtagactttagcagaagtacagtacaac

SEQ ID NO: 48484 - DNA, 599 bp, Chicken  19866894293634_1
  misc_feature (1)..(5): n is any nucleotide
nnnnnaaatagagaagtacctattgaatatgcagaactaccacatgctccttattcctctttaagcccacagagattataagcaactgaaaggacattttggcctggaaaaaggcaatgaactgtgatacactatgctcgtgagggatctggaggagatggacaagggaacgcgcattaaccaaatcaccttgccttgctaatgctgcttgctgagtgtgcaggctttggtgggacccgaagggcgacattagggcagttagtgtgagggaataaaacccacagccacagatgacagagytccataataagcattctccaggagagctgtgatttaaaccttattgaaagcattagcaagtggttggaaaaatcaagacagcacatactgcagtggatttcgtgacatttctattgcagagttgagaaccaggcaccgaaggattcagtgtatcataaactgtaaacatgaaatacagcaggggagccgcagcctcaaaacacagaacaaccctcccgacgagcattcagtcacactttcgaactcacagaaaatagatctcctcttcagccacggcttacggacgcaaggagagatca

SEQ ID NO: 48485 - DNA, 480 bp, Chicken  19866894293635_1
gcagattctctgggtctgtgggcaaggaccggggggagggagaggggcaggtgaagcaggtcagggccattaaagcctgtcagagccccaagggccttctgcttcaaactgacacctcaactgaggtactatcactaactcatgtcctgtgggacattcaaaactcattagttgttaagaacttttttaccttctgatgttcaaagacttcctagagatgaaactgccattccagagttgttatattcactggaaaaagtgctagagaacagttttgtcactctcatatatacacatttyaattggacacactacatccactcaaaaccaagactgtttacctttaaagagaaatggaaaatgcaaattgctattctgtacatgtgtaactgagtatgtgcagaattatcagtttaagaaaatcatctgcagtgtagtttcactgcaacaacaacaacaaaaaaaaaccgtcaagtcaag

SEQ ID NO: 48486 - DNA, 544 bp, Chicken  19866894293658_1
cctaacctaacctaaccctaacctaaccctaatccaaccctaatgctaacctaacctaaccctaacctaacctaaccctaatctaacactaacttatccctaaccctaacctaaccctaacccaaccctaacgctaacctaacctaaccctaacctaaccctaacctaacctaaccctaaccctaatctaacactaacttatccctaaccctaaccctaacccaaccctaatgctaacctaacctaaccctaaccctaacctaacctaaccctaacctaaccctaacttaacctaacccraacactccctggcacagaggagccatcccgtccgttccttgccggcagcaagaggagcttcgtggcagcagcggtgcgcgccagctttgcgggcaggacggtgggtgatgggggcacagtgggtgctgctggcacatggcgaggggtgacagcgtccccaacacagctctgcactcgagtgatgccccccgacgccaagcccacatgaacgaagtgttcttcttccctctgcgggtaggcgccc

SEQ ID NO: 48487 - DNA, 600 bp, Chicken  19866894293661_1
cattatgtattgcagtaacacttccatcttaacaaaaatatttccagttttagatattatgtttcccactgtaaaactattactttacaggaaaacaggcagttttcataaaagttgcttcagaaagaaataaggtttcatttccagttggaaccttctgacaattataacttaagtattaagtgtatcccatataataagcccagaagtctttgcgacaaaataaaacaccttgatttgtttcaaaccactctactggtaggaagttattccagcgcagaacatctggaagatgtggaygctgatttctaacataatcaaagctgartatcatcctgtctgtaagccaacagctcatttgttggggggctggcccttcaggcactgcagcccttcmgcttgtgcagtactccactgttccaaatacgaacatacctggtttagtaaactattctttctgaagactagttatgaggaaacttcttgtctttcagaagtccactgacattccagctgaacagctgttccactaaatagagaagtgccaacttaacagactctaacaatttacgtggtgtaactctaaaagaaacaaagcca

SEQ ID NO: 48488 - DNA, 600 bp, Chicken  19866894293661_2
ttaacaaaaatatttccagttttagatattatgtttcccactgtaaaactattactttacaggaaaacaggcagttttcataaaagttgcttcagaaagaaataaggtttcatttccagttggaaccttctgacaattataacttaagtattaagtgtatcccatataataagcccagaagtctttgcgacaaaataaaacaccttgatttgtttcaaaccactctactggtaggaagttattccagcgcagaacatctggaagatgtggaygctgatttctaacataatcaaagctgartatcatcctgtctgtaagccaacagctcatttgttggggggctggcccttcaggcactgcagcccttcmgcttgtgcagtactccactgttccaaatacgaacatacctggtttagtaaactattctttctgaagactagttatgaggaaacttcttgtctttcagaagtccactgacattccagctgaacagctgttccactaaatagagaagtgccaacttaacagactctaacaatttacgtggtgtaactctaaaagaaacaaagccaacaaaaccaatttcaacttttttatttt

SEQ ID NO: 48489 - DNA, 600 bp, Chicken  19866894293661_3
ggcagttttcataaaagttgcttcagaaagaaataaggtttcatttccagttggaaccttctgacaattataacttaagtattaagtgtatcccatataataagcccagaagtctttgcgacaaaataaaacaccttgatttgtttcaaaccactctactggtaggaagttattccagcgcagaacatctggaagatgtggaygctgatttctaacataatcaaagctgartatcatcctgtctgtaagccaacagctcatttgttggggggctggcccttcaggcactgcagcccttcmgcttgtgcagtactccactgttccaaatacgaacatacctggtttagtaaactattctttctgaagactagttatgaggaaacttcttgtctttcagaagtccactgacattccagctgaacagctgttccactaaatagagaagtgccaacttaacagactctaacaatttacgtggtgtaactctaaaagaaacaaagccaacaaaaccaatttcaacttttttattttaagtaatacacggacattaattgtgtagaaaatcaaaatgtatacaaacttgtacaaaattcaaaacat

SEQ ID NO: 48490 - DNA, 600 bp, Chicken  19866894293674_1
gttggcagccctgcccacagcaggggggttgtagatgatctctgaggtccttttgaacccaggccatcctatggttctatgaaaagtgtagttactgtcctgctcacgtgcaggcagagctgttctcccccatgggagtagaggttctctgcaaacagggttcttgcagcggtgacactgcacaatgtaattcacctcaaaggggtcacagatccccattgggcagtgcgccgttattgcagggtcagagggccaaccggcactgcacagctctggaaatcacagcacagctttccctgmtgggagctccagcagctccagtgcacacctgagcgggtcttggagagcccaggcagtgctcagcagtgtgctgtgtgccagcagctctctgtacagcctcactgctggagtgtgctacaatccgtgtgtgttgtactgaagaccctgtcccgacaggagaccaataagcatcccatttgatgcaatcattgccattttcctaatccttcaagaatcattttccatgtaaatgagtgagcaggtctgtgcagaaagaagtccctggtaaaggatgaaactgacaacatgagggcaaaaaaa

SEQ ID NO: 48491 - DNA, 484 bp, Chicken  19866894293674_2
gaccaataagcatcccatttgatgcaatcattgccattttcctaatccttcaagaatcattttccatgtaaatgagtgagcaggtctgtgcagaaagaagtccctggtaaaggatgaaactgacaacatgagggcaaaaaaaaatgtcttgtatatatatatatataaatatatgcatgtataaatatatgcatgttgatgtatatacagtgtctatatacctatgtctgtatgtctgtgtgtttgggtgcccacctgagagtcccttcttccccatacccgctccagggcaccacgcaygagctgatacacggggaaatccagctagacagatggaaaacaaattcccaggaaggctttcagaccccrggatgggttcccaatgatgctgtgggatgggcacccttggagatgcctggggtcagctggactcgtcctcagcatcctccccctgacagacagctttgagcaggtgttggagctg

SEQ ID NO: 48492 - DNA, 415 bp, Chicken  19866894293674_3
aaatgagtgagcaggtctgtgcagaaagaagtccctggtaaaggatgaaactgacaacatgagggcaaaaaaaaatgtcttgtatatatatatatataaatatatgcatgtataaatatatgcatgttgatgtatatacagtgtctatatacctatgtctgtatgtctgtgtgtttgggtgcccacctgagagtcccttcttccccatacccgctccagggcaccacgcaygagctgatacacggggaaatccagctagacagatggaaaacaaattcccaggaaggctttcagaccccrggatgggttcccaatgatgctgtgggatgggcacccttggagatgcctggggtcagctggactcgtcctcagcatcctccccctgacagacagctttgagcaggtgttggagctg

SEQ ID NO: 48493 - DNA, 600 bp, Chicken  19866894293678_1
gcccacaaactggtgttcatcggggacacgctcacgaggcaactgacatctcaggacatacgcaacagggtgcgcaactccagcgaccagctgtgcgaactgctgaagagcatcgtgatggctaccaagatggcggccttgcactacccacacacagcagcactgcaggagatggtgaaccgagtgacagagctgtcctaccacgcacagctgttcaaactctcgctcgtccagatggcgtccttatgaaacaaagctgaacccgacccgtgaacggcgaaatatcaaagaaactggagygtttttatgtaaacatcaccatttacgttgtgtagatattttatatggaatgcattaaatacattcttacgagttagagcatcaaatgaaatcagggatctgggaaaatatctggctctgtattatgttcctactatacagttatgtataccctccatatatgtatatgttgctacactctttaaaacatcattaagcaccttaaaaagtatgcgtcgggtaagcagtgcatatcttttgtatatactgctatttcttcagtatatttaactggatgctgcactcatcttgattcattcc

SEQ ID NO: 48494 - DNA, 488 bp, Chicken  19866894293678_2
cctttcccttgttagaaattactaggttaatttcattaactcttcttgctgttattttgttatatatagaggatacaatcattgagtagtatacatgtacagctgcaacaagcaacagtcaaagcgtatagtatttgggagaaaagcattttaaggccatacaaggccatgtaagaagcagaaccttctacgaaggaaggaattgtatatttttgttatttgatggcatttaaacttcgctgtttctaataatcgtacaagataagtttccaaaagagtcttagcaacatgaatttacaygtttaccttgtatatccttgcatcggcaattaaatgtaaccctcgtgctcactgtggactctgttatcctgagaaaactcactgggctcacctgtgaggtggcaggtgagcaacacctcaaaataccaatccctccaaaagcattagggtaagcattgtcattcatatgggaagaagataactgaatt

SEQ ID NO: 48495 - DNA, 600 bp, Chicken  19866894293685_1
gtatctaccaggtgccagctgtaagcaaagaaacaatctaatacacaattatttcgttgtgtgtgctgtaaaaagatggattttactgtaacacaaccttagttcatggatttactggattttgtttagctcaacattttcaatatctaaacgggaaatcaggtattttcccaaagcttcattaaattttgtggttctttatggtcagaataacaatgaggacactttgacaatgcatcagttacacagacctgtacaaaaatctacctggacttctgaaaggcctttggcatggtcccmcatcacatccttatctctgtggagagatgtgtgagatggatttgaagggtggacacttcatttgatgcagccctgggtgtggttgtttttctgggctgcaagtgcacactgctgatttgtgttgagtttttcatcaactaacaccctcagtgtttctcctctggactgctctaagtgcattctgcactctgcttgcatttctgctcgggattgctctgacccatgtgaatatctttgcacatggccttcttgatcttcacgagattctcacagacctacatctgtagcttgtcagggtct

SEQ ID NO: 48496 - DNA, 600 bp, Chicken  19866894293692_1
ggctccaggctctgtgccaagggctgtgcactcacaccgtgacccagctgcttactgggggggagcccagcaaagcctcaccctgggctgcgtgcaagctcctcagaaacaaaacctgatggggagggctccctgcccctatcccaagccctctaagctcaggtgggatttacatagtttttctctctggttccactcctgggtcccagtgggtggcttctgtccccccccaacaagcacagggacacccctgcaccgcacagccctgcccaggatccctggcactgaggaaagctgacrtccccttgcttgcagggccctgtcccgttgagacgtcgggcaccaggtcgcacttcaccttgaccgactgccccgaggaggggacctggagtgcagtgttgcagcagcaggatggggccacactctgtgtatcgctctgctcccccagcagtgcccgcgtgggccgctaccgcctgacgctggaggcctccacggggtaccagggctccagcttccacctcggggacttcgttctgctcttcaatgcctggcacccaggtgaggctctcaccttcccgacaccagagaggtcccagggct

SEQ ID NO: 48497 - DNA, 600 bp, Chicken  19866894293694_1
cccttagtgatcttcctagccctccactggacattcttaattccttgtctccccttccagaggctcagaggagaattctggagagcccagaactggacacagtactccacatgtggcctcaccagggcagagtagagggggaggagaacctcccttgacttgctggccaagctctatttaacacatcccaggacattgtccttggctacaagagcacactgctgggtcttggtcaacctgttatccaccaggacacctgggcctgcagaactcctttcctgcaggttaatccccaacctwtactgatgcttgcaattattgctcaccaggtgcaggtgctctttttgaacctcatcagatttctttccacccaggtctccagcctgtccaggtctcactgaatgccagcatagcattctcgtgtgtcagctgttcctcccaactttctatcattagcaaacttgctgggggtacactatcccttcatctaggccattgatgatcatgttagacaagactggacccaatactggtgttcctcaagcagtcagtaactccaagcttccaactagactgtgctgctgatcacaaccttttgaa

SEQ ID NO: 48498 - DNA, 600 bp, Chicken  19866894293698_1
actcctgtccttactgggatgtctgtccccctctcccccctccccatctcctcctcacctgctgcttgtggccgctggtgtgcacagcttcagcacgctgtgcccacggcagttctgtccttgtcctcctaagcaggcactgctgggacagaacagccactgggcagaggccagctgatttgtgccatgcgggacctcttctgccccagcctcatctggagcggcagtttctccctagcagctcctgcaataggggttgctctttcccagcacccttctactgtgtctgtgtcccctccratggggctcataccacaaagagccagctcccagtgacatcagagacatgtcctccacacagctgagctctgggctgcctcagtacccatgagcagacatggcttttgccagaaccacagaaatgtacatctttgctaaccctccttctttagcaataatgtattttagcttccccggatgcaatgatctagctacagaagcacaagatttaaaaatactgacttcatagttgatttcctttgctcattttactcccaggaatgcctctggatccagtttttatgtttgcaagtgtgagag

SEQ ID NO: 48499 - DNA, 599 bp, Chicken  19866894293703_1
  misc_feature (1)..(58): n is any nucleotide
nnnnnnnnnnnnnnnnnnnnnnnnnnnnnnnnnnnnnnnnnnnnnnnnnnnnnnnnnncaccatttggtcatctcagaaagcactgcaatgtcttagcatgtatttagttacaaggaaatgtttctaggcaaacatattatagtcttgaatggaaatttgatgaacagtagtacaacacaaacactgcaaataattttcttctaccaagcccatttctgtgcagcaggactgtgctagatgtttgtgaaaaaagaataaatagatgctgacttagattctattcctggggagtcattctyggcagtcagaagcgatatttctgcctttcccatcttctgctcttgatgctgatgatcatgttcatgccatgcttataaacaaaggaagaattggaggtgcaacaactagggggatttctcacgggagttttgtaaacatcaagaaggcaacaatcatgttgccaaaccatcggttgccaaacggccttaatggtggtcaagtggtttgaagcagcaataagacagagagtaacttgaaaacagaaagggattttcaaatattttgctataattccagcaagatagtattggcttactag

SEQ ID NO: 48500 - DNA, 600 bp, Chicken  19866894293708_1
agcccacacaaggtcagagcaaatcgagcctgcatttgcccaaaggcttgtgaaggaacctcctctgacaaaatacggagactggtacttcaccattaatctctacaagacaaccccccagatcagatcaaaatagctttgttgacttgaggttttgagcatttagccccacagatacattccattggtttcggtgatgtttaagtatgctttcttgaactgaggcctcttcccctcctagttaaaagacagtaccctacatataaacttttactactagatgtttttggctttacatgrttttatataaaaactgycaaatatgagaggcactggtgcctgttgacattaagcagatacaggtacattccccacttagaatttagctgtctctcagagacctacrctgcacaagaatgttttttactctctgaaaaaaccactggcaaaactcagctgatcaattggtaagcattggtatgttttcttatttttttctactgctttattctttatagtctaggatttctggatgttatggttgccaacataaccttgaaaacagagcaatggcagaactaatgcaataacatctgcttg

SEQ ID NO: 48501 - DNA, 600 bp, Chicken  19866894293708_2
agcaaatcgagcctgcatttgcccaaaggcttgtgaaggaacctcctctgacaaaatacggagactggtacttcaccattaatctctacaagacaaccccccagatcagatcaaaatagctttgttgacttgaggttttgagcatttagccccacagatacattccattggtttcggtgatgtttaagtatgctttcttgaactgaggcctcttcccctcctagttaaaagacagtaccctacatataaacttttactactagatgtttttggctttacatgrttttatataaaaactgycaaatatgagaggcactggtgcctgttgacattaagcagatacaggtacattccccacttagaatttagctgtctctcagagacctacrctgcacaagaatgttttttactctctgaaaaaaccactggcaaaactcagctgatcaattggtaagcattggtatgttttcttatttttttctactgctttattctttatagtctaggatttctggatgttatggttgccaacataaccttgaaaacagagcaatggcagaactaatgcaataacatctgcttgagatgcagcgtgaaaaa

SEQ ID NO: 48502 - DNA, 600 bp, Chicken  19866894293708_3
aagacaaccccccagatcagatcaaaatagctttgttgacttgaggttttgagcatttagccccacagatacattccattggtttcggtgatgtttaagtatgctttcttgaactgaggcctcttcccctcctagttaaaagacagtaccctacatataaacttttactactagatgtttttggctttacatgrttttatataaaaactgycaaatatgagaggcactggtgcctgttgacattaagcagatacaggtacattccccacttagaatttagctgtctctcagagacctacrctgcacaagaatgttttttactctctgaaaaaaccactggcaaaactcagctgatcaattggtaagcattggtatgttttcttatttttttctactgctttattctttatagtctaggatttctggatgttatggttgccaacataaccttgaaaacagagcaatggcagaactaatgcaataacatctgcttgagatgcagcgtgaaaaatcagctcagaggtattagctgccctattcagacacaaatgctaaccatgatgacattttaagagccactcactaaagcrcgtaaggcag

SEQ ID NO: 48503 - DNA, 600 bp, Chicken  19866894293708_4
gagacctacrctgcacaagaatgttttttactctctgaaaaaaccactggcaaaactcagctgatcaattggtaagcattggtatgttttcttatttttttctactgctttattctttatagtctaggatttctggatgttatggttgccaacataaccttgaaaacagagcaatggcagaactaatgcaataacatctgcttgagatgcagcgtgaaaaatcagctcagaggtattagctgccctattcagacacaaatgctaaccatgatgacattttaagagccactcactaaagcrcgtaaggcagaaataaaagcctactgtgaatatctggacaattaatcaggagagacaactcattttgcgacgcaaactgggaccaggagaaaacatcaccttatgttacccccaaagccagaaagtagccacatgcacaagaactcaaggaaagagttcagctcttctccaactgtagttaaactcaagaagataagtgtgcaattgagcaatgccagataataatcagaggacacatttgttttgaaactcaataacaagaagctaaatacaaggcttcccaaagaacttgcttatata

SEQ ID NO: 48504 - DNA, 599 bp, Chicken  19866894293713_1
  misc_feature (1)..(113): n is any nucleotide
nnnnnnnnnnnnnnnnnnnnnnnnnnnnnnnnnnnnnnnnnnnnnnnnnnnnnnnnnnnnnnnnnnnnnnnnnnnnnnnnnnnnnnnnnnnnnnnnnnnnnnnnnnnnnnnnncgaccccaccacctccctgggcagcctgtgctagtgcattatcactccttatgagaagaaacatttcctatatccaacccaaacttcccctggcacaacttaaagccattacctcttgtcttatcactatttacatgagataagaggccaactcccacctcactaccatctcctttcaggcagttgyagagagcaataaggtcttccctgagccttctcttctccagatcgagcaatcccagttcccttagccactccccataagacccatgttccagacccttcacagcttagttgcccttctctggacatgctccactgtcttgtagtggggggcacaaaactgaatacaatgcttgaggtgaggccttaccagtgccaagttaacagggatgatcacctccctgcttctgctggctgcactatttctgatgtaagccaggatgccagtgaccttcttggccacctgggcacactgcctgctca

SEQ ID NO: 48505 - DNA, 345 bp, Chicken  19866894293713_2
cttgaggtgaggccttaccagtgccaagttaacagggatgatcacctccctgcttctgctggctgcactatttctgatgtaagccaggatgccagtgaccttcttggccacctgggcacactgcctgctcacattcagccaccagtcaactaataaccccagatccttttcctctgtgcagctttccagccaaaaatatagatagatagatagatatggtgaagcagaacatacctatagcagtataggaaaataagaaaatgaacagtctgcaaaatcatcagttcatagaatgaactkcatgtgcattagacatgatgttacctgaaggccactgactgcagt

SEQ ID NO: 48506 - DNA, 600 bp, Chicken  19866894293716_1
atgtaaagtccaatataccttactagtcctacaggaggatcaaacaagtggtttgcacaatttcaagtgcattgttataactaatcacctttctgctaacttaattacttcagcagaaatcatttctgttttgtccttttcaagaggcatactactcctggaacatctgcacacacaataatgtatttagaaagtgctcaagcaaggcttgattagaactgcaggaataatatatgctcctatctaaattcagtctaaatcctattttatgaattcttttataatgcaatgtaataaatkccagtacagggaatgtcacagctgcaggtgaaaaagcctgcagcatgtatacaggcctctcaatcactcaaagagatgagacaaaacacagaagagtagggaaagaaaaaawaataataattaaaaaaaaggcatccagaatgctgcaaggaaagacaatgcaacagtcttactttacaaatcaggtcttgcttaaggatctggaggaatgatatataccattctgacagaaatccttcaggtgatgtcgtgtgctcccagcacatcgcagagaaaaaaataaatcwctctggactaaaa

SEQ ID NO: 48507 - DNA, 600 bp, Chicken  19866894293716_2
gcagaaatcatttctgttttgtccttttcaagaggcatactactcctggaacatctgcacacacaataatgtatttagaaagtgctcaagcaaggcttgattagaactgcaggaataatatatgctcctatctaaattcagtctaaatcctattttatgaattcttttataatgcaatgtaataaatkccagtacagggaatgtcacagctgcaggtgaaaaagcctgcagcatgtatacaggcctctcaatcactcaaagagatgagacaaaacacagaagagtagggaaagaaaaaawaataataattaaaaaaaaggcatccagaatgctgcaaggaaagacaatgcaacagtcttactttacaaatcaggtcttgcttaaggatctggaggaatgatatataccattctgacagaaatccttcaggtgatgtcgtgtgctcccagcacatcgcagagaaaaaaataaatcwctctggactaaaaatgctacttttaggacttagacatctgtgtgtgaaaatttggaagaggtagaaagggtgaaaaagaagcactgaagaaacacaaattgatatgtgcatgaactatgatgctt

SEQ ID NO: 48508 - DNA, 600 bp, Chicken  19866894293716_3
aatgtaataaatkccagtacagggaatgtcacagctgcaggtgaaaaagcctgcagcatgtatacaggcctctcaatcactcaaagagatgagacaaaacacagaagagtagggaaagaaaaaawaataataattaaaaaaaaggcatccagaatgctgcaaggaaagacaatgcaacagtcttactttacaaatcaggtcttgcttaaggatctggaggaatgatatataccattctgacagaaatccttcaggtgatgtcgtgtgctcccagcacatcgcagagaaaaaaataaatcwctctggactaaaaatgctacttttaggacttagacatctgtgtgtgaaaatttggaagaggtagaaagggtgaaaaagaagcactgaagaaacacaaattgatatgtgcatgaactatgatgcttctatgcygatgaaaaaaactttctgtgagatattgcataaaggtgtcactcccagtgaatccaccaaacatcacggtggtatatatgaaattaatatgagaatattaatgactttatggctcaggttaatttatgaagaaacagatgcactactccaagcaatagccactggaga

SEQ ID NO: 48509 - DNA, 600 bp, Chicken  19866894293716_4
attaaaaaaaaggcatccagaatgctgcaaggaaagacaatgcaacagtcttactttacaaatcaggtcttgcttaaggatctggaggaatgatatataccattctgacagaaatccttcaggtgatgtcgtgtgctcccagcacatcgcagagaaaaaaataaatcwctctggactaaaaatgctacttttaggacttagacatctgtgtgtgaaaatttggaagaggtagaaagggtgaaaaagaagcactgaagaaacacaaattgatatgtgcatgaactatgatgcttctatgcygatgaaaaaaactttctgtgagatattgcataaaggtgtcactcccagtgaatccaccaaacatcacggtggtatatatgaaattaatatgagaatattaatgactttatggctcaggttaatttatgaagaaacagatgcactactccaagcaatagccactggagatcttgtccaaaggcaagtcatgatctgcccttcttatttaatagacaacatgcatttctgtatttaacagggacatttgaaattgttcggcaagattctttctttttctggtgcgtctgtagatagagtcaa

SEQ ID NO: 48510 - DNA, 600 bp, Chicken  19866894293717_1
aagggagcgggctgctgggccatgtgtggtgccctctgacttctgacccatcacagctgcgggtgtcggtgccaccccatgcgctgaagctgccggatgaacccatcacccgctggggcgagtattggtgcgacgtgacggtgagtgcacggcgtcccacagcctccccgttccctgccccatagtgtgggaggtgtggggagagcccgtggccccatagcaatgccagagaggaacccacagtcccggtgagggggctgggggggaacatttggggtttttcacagaaaaaaaaaaaamaaaacaacaaattctgtccctgtgacctacatacacacagagccgcccctctgtgccatcagccgttgtccctcagtctctgagggccccatatctgtgtcagcgctgtggggctcattaggatcctgctaattggaagtgaggtgctaactggggggtgagggtggggatggcgatggggaaggggctgcacttccatcgctgtgtgcgtccccgtgctcccactgtacgcagcgggtctgggggctgggtcctgccccacagcagggttcaaagggtggggatgccccacatctgtgg

SEQ ID NO: 48511 - DNA, 599 bp, Chicken  19866894293718_1
  misc_feature (1)..(161): n is any nucleotide
nnnnnnnnnnnnnnnnnnnnnnnnnnnnnnnnnnnnnnnnnnnnnnnnnnnnnnnnnnnnnnnnnnnnnnnnnnnnnnnnnnnnnnnnnnnnnnnnnnnnnnnnnnnnnnnnnnnnnnnnnnnnnnnnnnnnnnnnnnnnnnnnnnnnnnnnnnnnnnnnnccttccttcattaccagtgaagatgtgaaatgtataaaaataagttttataagtgagaaaagctaataaacccctaccgctcttttatatcctgtattttagacgaacacaataggaaaaaaatggaaaataaataatwgggtctgtagtaatagcaacagctgtcacctgcattttttgtctctgttggatattaaaagtgtctaagtagaattgattaaacttttctttagaactgttctggaaaggaagcaggtatgacatatttcatycaacagataacagattttraacactgaggccacaattatataggtcctgtggtcctatgaaatagagaggagatagtgaaactgtgctagtgtttgccatactggagctgtatgagccacccawgttcactgaaagattactgttcagcatgtggtttacaggggt

SEQ ID NO: 48512 - DNA, 599 bp, Chicken  19866894293718_2
  misc_feature (1)..(28): n is any nucleotide
nnnnnnnnnnnnnnnnnnnnnnnnnnnnccttccttcattaccagtgaagatgtgaaatgtataaaaataagttttataagtgagaaaagctaataaacccctaccgctcttttatatcctgtattttagacgaacacaataggaaaaaaatggaaaataaataatwgggtctgtagtaatagcaacagctgtcacctgcattttttgtctctgttggatattaaaagtgtctaagtagaattgattaaacttttctttagaactgttctggaaaggaagcaggtatgacatatttcatycaacagataacagattttraacactgaggccacaattatataggtcctgtggtcctatgaaatagagaggagatagtgaaactgtgctagtgtttgccatactggagctgtatgagccacccawgttcactgaaagattactgttcagcatgtggtttacaggggtatatttgtgaattttttagtttaacaacagaagagagatcacactgattatttctgcacacagaaatattatcagtcttctatcccatagcatctttttggaatacagtgtttttgacrttgtctaaatatta

SEQ ID NO: 48513 - DNA, 599 bp, Chicken  19866894293718_3
  misc_feature (1)..(9): n is any nucleotide
nnnnnnnnnccttccttcattaccagtgaagatgtgaaatgtataaaaataagttttataagtgagaaaagctaataaacccctaccgctcttttatatcctgtattttagacgaacacaataggaaaaaaatggaaaataaataatwgggtctgtagtaatagcaacagctgtcacctgcattttttgtctctgttggatattaaaagtgtctaagtagaattgattaaacttttctttagaactgttctggaaaggaagcaggtatgacatatttcatycaacagataacagattttraacactgaggccacaattatataggtcctgtggtcctatgaaatagagaggagatagtgaaactgtgctagtgtttgccatactggagctgtatgagccacccawgttcactgaaagattactgttcagcatgtggtttacaggggtatatttgtgaattttttagtttaacaacagaagagagatcacactgattatttctgcacacagaaatattatcagtcttctatcccatagcatctttttggaatacagtgtttttgacrttgtctaaatattaagttagaaggcgcaagaag

SEQ ID NO: 48514 - DNA, 600 bp, Chicken  19866894293718_4
ttttagacgaacacaataggaaaaaaatggaaaataaataatwgggtctgtagtaatagcaacagctgtcacctgcattttttgtctctgttggatattaaaagtgtctaagtagaattgattaaacttttctttagaactgttctggaaaggaagcaggtatgacatatttcatycaacagataacagattttraacactgaggccacaattatataggtcctgtggtcctatgaaatagagaggagatagtgaaactgtgctagtgtttgccatactggagctgtatgagccacccawgttcactgaaagattactgttcagcatgtggtttacaggggtatatttgtgaattttttagtttaacaacagaagagagatcacactgattatttctgcacacagaaatattatcagtcttctatcccatagcatctttttggaatacagtgtttttgacrttgtctaaatattaagttagaaggcgcaagaagtcttcgtattactgaaaatcaagataggggcaatggaaaaaaagggacaaacatgttgttctgtgcatatcraacaggtatatatccactagtcatttatgcacaa

SEQ ID NO: 48515 - DNA, 600 bp, Chicken  19866894293718_5
atgacatatttcatycaacagataacagattttraacactgaggccacaattatataggtcctgtggtcctatgaaatagagaggagatagtgaaactgtgctagtgtttgccatactggagctgtatgagccacccawgttcactgaaagattactgttcagcatgtggtttacaggggtatatttgtgaattttttagtttaacaacagaagagagatcacactgattatttctgcacacagaaatattatcagtcttctatcccatagcatctttttggaatacagtgtttttgacrttgtctaaatattaagttagaaggcgcaagaagtcttcgtattactgaaaatcaagataggggcaatggaaaaaaagggacaaacatgttgttctgtgcatatcraacaggtatatatccactagtcatttatgcacaaagagactgtgcttcttagatgcctaaacagagrtctaacaatttaagtttcaggaatcacatgaaactttttggccattaactgagatgttaaattactaagcaagatatatgtgcagtcagggaccaagcaaattcaagtcacaatgagtttttaaaagg

SEQ ID NO: 48516 - DNA, 576 bp, Chicken  19866894293718_6
tgtttgccatactggagctgtatgagccacccawgttcactgaaagattactgttcagcatgtggtttacaggggtatatttgtgaattttttagtttaacaacagaagagagatcacactgattatttctgcacacagaaatattatcagtcttctatcccatagcatctttttggaatacagtgtttttgacrttgtctaaatattaagttagaaggcgcaagaagtcttcgtattactgaaaatcaagataggggcaatggaaaaaaagggacaaacatgttgttctgtgcatatcraacaggtatatatccactagtcatttatgcacaaagagactgtgcttcttagatgcctaaacagagrtctaacaatttaagtttcaggaatcacatgaaactttttggccattaactgagatgttaaattactaagcaagatatatgtgcagtcagggaccaagcaaattcaagtcacaatgagtttttaaaaggctttctattatctgaagagaaccatttgtaaaagtttatcatttttaatgctctttgcaaaatacagagtccctgcaatgc

SEQ ID NO: 48517 - DNA, 509 bp, Chicken  19866894293718_7
tacaggggtatatttgtgaattttttagtttaacaacagaagagagatcacactgattatttctgcacacagaaatattatcagtcttctatcccatagcatctttttggaatacagtgtttttgacrttgtctaaatattaagttagaaggcgcaagaagtcttcgtattactgaaaatcaagataggggcaatggaaaaaaagggacaaacatgttgttctgtgcatatcraacaggtatatatccactagtcatttatgcacaaagagactgtgcttcttagatgcctaaacagagrtctaacaatttaagtttcaggaatcacatgaaactttttggccattaactgagatgttaaattactaagcaagatatatgtgcagtcagggaccaagcaaattcaagtcacaatgagtttttaaaaggctttctattatctgaagagaaccatttgtaaaagtttatcatttttaatgctctttgcaaaatacagagtccctgcaatgc

SEQ ID NO: 48518 - DNA, 599 bp, Chicken  19866894293719_1
  misc_feature (1)..(124): n is any nucleotide
nnnnnnnnnnnnnnnnnnnnnnnnnnnnnnnnnnnnnnnnnnnnnnnnnnnnnnnnnnnnnnnnnnnnnnnnnnnnnnnnnnnnnnnnnnnnnnnnnnnnnnnnnnnnnnnnnnnnnnnnnnnnaattggaattgtgaaggggtatcccaatcaacatcttgatgtttaattaatcactgctttttctctatacaatctgtcaatgctaatattgaaaagcgataatgtatgtatatgtacacatatacacacatggacagatatgactaccttgcataacataccagtatcagaacatyatttgtgtacgtgacaactttcagagacatcacatctaagcataaaaactctgaaatcctttctccccatgcaacaaatgaagcaaagaaaaataacgagagatgtaatacaacatcgttcattagccactagttgattgcaatgctagttagaaagctacaggactagatggtcctgagatatataagaactctatctaaaacctttgcctatagtcaagactagtacatttttgtcttctgcaatttcaaaaaattcccacaaactgcaccaaatgcttgacagtaagtgaccttta

SEQ ID NO: 48519 - DNA, 563 bp, Chicken  19866894293724_1
tgctgatcttgatgaatgggtcatttgtgctctgagttttctctgaaatgaggaggagagtacacagccccagtgctgataagacatgctgttattctgtgttctgtagccatttctccaggaagccgttgcttcatttgcattgcttttttaaccttatatgctcagtgggcccaggcgaggcttctttcttcttgaattaaatgtaatcaggctgagcagtgaggaagaaatgatgaacgaggacatcattttggaaaacacatatctcctgactgcttatctcaatgacataagagrgggctcagcatatcatgctggagaataatagctcagagggctagacctggccagaaactatttattatttagagcattgctgttgtaatttataaaggttaatcattaaaactttaattctcttggaggaaaatggctgaggagttctgacatttgtcaaagttgcagaggaaagggaccgggggcaacggaaggagcaaccttgagggacgggttggtgccagtggtgtgcacatttggtgtcattggggatggaaaaacaa

SEQ ID NO: 48520 - DNA, 600 bp, Chicken  19866894293727_1
gtatgaggttgagtatgttcttagagaataatgaattcacttttatctgtagagtaactggtttctatattgtcattgctattatttacttctgtggtaagttatgaagtttgatgttgtatgacatatgcctgattgcctagcataaacagttacataccagaatcacatgtcatatgtacagtagatgtggttatcttagagtatctttgttttctcagttactcatttgaataaatacagagaaatgttagaggatgtaatctccttatggtctatatgtgctggatagattcctcrtagatgtattgatctcacttgaagtagaatacagcctcaaaagcctataacgtcttgcagaaagagtgctcaagtggttggttgacctatgttaaagggtaataagtcaccattcaaagtgcaagcattacacagctatcacctgttagcagtactctttaacctacttgactaaagttataggaagcagttactgttcatcacagatgaaagtgacccagtactttgagtgatcgaggttattgcattggaatttctctctttcagtgtctggaagttatacagtatttgctcttgagg

SEQ ID NO: 48521 - DNA, 600 bp, Chicken  19866894293728_1
aggcaacacgagtaacattagagtcataaaactccaaagttctatataaatcctttcagtagagacacttcacaaaggaacaagcagatctattattttaacctctttttaaatcttttttattagatttctttttttaaaaacctatttttaaatctgcaaccaaactaaaagagagacaaacatttctgatggatccatggtaataactgtgagtaagcagattatttcttgttttatgctacatgataacatcgtatcagctaaagtatttggatcatttaaacttcaaatatctgyatttttcaatgcaataacattagtgctaacacctgccttgacattcaaattgtttttaaaaaaataaaaccagagtctatgagctactaagacattaccaagccctaaggaagcaaaattctgatgctcctgggtaatccacctgtgttctattgtgttctatactgagtataggacctaagaatgaatttgacctctttgccagttttaacttttcttttaaatatccattaacaggatatattttaatctggtttatgttaaagtagatttctcatagcgaggcattgctaaaattac

SEQ ID NO: 48522 - DNA, 397 bp, Chicken  19866894293731_1
gtgagtgcacagcagccataactgggctggtttttctgttcttcagttgcataaaatagccagtgttaccttgctgatggttgtgctgaagtgaaaggttttcttcagcagatggcaggcactgcagtgggagctgtggtgctccgtgcttgtggtaaggtgaggagtggcggttcctcactgctggcgatggggatggggcacagtgggagtggcagggtgtggctctcaggtgttacctacagctagcattggtggaagctagcagagaaattctattgggaaaatgagggaattttktgagtaaaagatgagaactggggagttagacctgaacatgagaagtaaggaaaacctctccacagggaaataaggcaggagggctgaaatcctgctg

SEQ ID NO: 48523 - DNA, 600 bp, Chicken  19866894293736_1
gagttactgtttgtattgtttaaaattatgctattacagtatctgtgtatgcaagaattgtggaataatagagaaaaatacttgatatagcagtgaggagagtgagtttagatctgtttcagggtggaatcaatatgctttcaaaaaggaagcatggacctttgggattcaaatgttcattaaaatggcagtccagatagccagataacattgttttacaactgcactgtattgtatttaaatattaacagtgggactcaaagttgtggaatttaaactactaatatttgtgcatattcyttaatgttgacaaaaatcacttcctcaagaggttattcaaatacttagctctttatgaaaccacagtttgacaggaactcagattcagaaatggcattcccgataggtactttcagtcacaccctctcttaaaattaggtttttccyttgagagaaagatttgagaatgaccccctagtcatcctggaatttcagcaatgctcaattaacaaaagcctaaaactttccagagcagttgatcattgagtcatcctggctgtacacgctgataaaaatctcaggctgttctttcatttattt

SEQ ID NO: 48524 - DNA, 600 bp, Chicken  19866894293736_2
ggaagcatggacctttgggattcaaatgttcattaaaatggcagtccagatagccagataacattgttttacaactgcactgtattgtatttaaatattaacagtgggactcaaagttgtggaatttaaactactaatatttgtgcatattcyttaatgttgacaaaaatcacttcctcaagaggttattcaaatacttagctctttatgaaaccacagtttgacaggaactcagattcagaaatggcattcccgataggtactttcagtcacaccctctcttaaaattaggtttttccyttgagagaaagatttgagaatgaccccctagtcatcctggaatttcagcaatgctcaattaacaaaagcctaaaactttccagagcagttgatcattgagtcatcctggctgtacacgctgataaaaatctcaggctgttctttcatttatttgtctctccatttatctgtctgccttggtagatacaaacaacagaattaaaaaatattatataatactgaagttttcctctgagggacaaatcacctctgggcaaagcgtaaccatggaaaattccaggcaacaaaggatgttttctt

SEQ ID NO: 48525 - DNA, 600 bp, Chicken  19866894293741_1
aattcagcatcagctccctcttcctttactcaccatggcccaccttctgtattttgctcttgctgcactaaaagacaaagaatgctaaaaaagcaattagtgctacagggtatgtgttcatggtatcacgggctcacagaaaacccaagtaggacccccagtgtaactctgggtttaaaggcaaggacgttgatagttgttttcaaatacagtctttttaatggagaaacagaatgtctgacatgagcgttaggaagggaattaaatacaaagcaggacagatagagtgactgtcagttwtttaaaagactcctcacatggtttacaaatacacttatgaatagcatataaggatatggagacaggtgtgtgggtgtttatacatatatataaatggtaccgaggaactgggttgtaggactatcttatagaccatgtggatcctcccatacagcacacaattatttatttccctttctgcagtgtcagcaatcgtcctttggtgcaaaagtgagatgtgccagccctgttgttaacgtaagaggaccaagcatatagtaactaactggaaccgtaaaatccaggtgctgcagactagac

SEQ ID NO: 48526 - DNA, 600 bp, Chicken  19866894293741_2
gaggaccaagcatatagtaactaactggaaccgtaaaatccaggtgctgcagactagacacaagtgtgtattgcatgcatctggttctacaggtaaagcactgaatcctatttcaggtagccaggtgaaagccattttcatcataaaacccagccaagaaaacacaattttatatcttctacagcagcttctatccaacccattgaatcctttactcagtctagctcttcagcacatccagattgagctgtggtccatcttaaacattagcagaagatgcaagatcacatctattagacktactgctcttgttataggctgttttgtttgtgaatcttaatttcttacaggtcatcctcagtaagcaaacatcccctcactacaactttactgacagtggaattaactcttgttttaacagctttaactcttgttcccttgtttacacgcagtgaagttctgtctcttattataggattggatatcctccatcagaccccgtgtctcattctttccagttacctgtcttccacagcagccaacagcacaaggttaagggaagcatacagaaaacagaattatcaaatcatatcacttctc

SEQ ID NO: 48527 - DNA, 600 bp, Chicken  19866894293746_1
gtgttctcttgctctactgagatttccattactgagtgatagggaaagaagcagctggacagacgacaaaagacaatcatccttttagcaccaatccaagaaacatattaggttctgccacttgattgctataaagatagccacagaccaaatcctcccaactaagttggataaaaagaaaaatgagccatcaaaaggaaaactgagttcagtcgtagtgtctgtcggttcaaagcctacagacctatttacagcaataaataacagccattagcagagagtcaaaccatatcaattagrtgtttactgtgcacttctgtagcaaaaatgcttaatatagataaataataaagtgaatgcatgtttgacatyttttggtccattttctttgaaatatgcacttaaacgttaatattagattctataaacaagtataacaaaaaaggtacccgcgacaaagatgaaagaacatgaaaggcctggagttgacagtataagtatcatatctgataaagcataacagttatagaaacataaaacttgttgaaaacatcataattatagctggttagagatcaaagagatatgtgcagtaaaagc

SEQ ID NO: 48528 - DNA, 600 bp, Chicken  19866894293746_2
acaatcatccttttagcaccaatccaagaaacatattaggttctgccacttgattgctataaagatagccacagaccaaatcctcccaactaagttggataaaaagaaaaatgagccatcaaaaggaaaactgagttcagtcgtagtgtctgtcggttcaaagcctacagacctatttacagcaataaataacagccattagcagagagtcaaaccatatcaattagrtgtttactgtgcacttctgtagcaaaaatgcttaatatagataaataataaagtgaatgcatgtttgacatyttttggtccattttctttgaaatatgcacttaaacgttaatattagattctataaacaagtataacaaaaaaggtacccgcgacaaagatgaaagaacatgaaaggcctggagttgacagtataagtatcatatctgataaagcataacagttatagaaacataaaacttgttgaaaacatcataattatagctggttagagatcaaagagatatgtgcagtaaaagcaaacataagcaatcagataagacactaaaatataactgctgtaaatatgaatgatagctataggataatatt

SEQ ID NO: 48529 - DNA, 600 bp, Chicken  19866894293746_3
taacaaaaaaggtacccgcgacaaagatgaaagaacatgaaaggcctggagttgacagtataagtatcatatctgataaagcataacagttatagaaacataaaacttgttgaaaacatcataattatagctggttagagatcaaagagatatgtgcagtaaaagcaaacataagcaatcagataagacactaaaatataactgctgtaaatatgaatgatagctataggataatatttagctgacattattgaattaaaaataaacatttttacagcactgatcttttttatttatttrctttctttatgatacagaagtatgatactttatatattaaagaaagaaaaaaaaaaaaaccacacacagggcacctgcaaagcaagatgttcctattaggctgcaatgttcatcaactacaggtttgttcttggttagatatcctctaggacagaatttaccagatgctccacaataacagatatcttcacctacacaaaatctacatcaaaaggtctcaattgtcttctgataaactttagaaatcattccaaagaaaaaatgaacagcacccaagaagtatctatttatatccactaa

SEQ ID NO: 48530 - DNA, 600 bp, Chicken  19866894293747_1
ctgaaataaataggctgttggcgggagctttatatctcctgcgtctgcagccctgatcaggaatataaagaagaaaataaaagcctgaaaagtacacgctgtcagatgtacaacagctcctccacaccccccagctgtacgtgtgtgctcctgcagggcttgcggcctcctgaaatccagtgcctctcagtgcttgtggcacaacaggtccctgccctacacagagcctgcggtgctgcttctaacagcgagctccagcgcttctcaggaagccgatcttcaccatttctggcctcccartgtgccagaaaagcctccaaagaactgagcctctgacgtggcatcttgcatcacgctgatgtggcgacacaataggtracagagacaggaggaaaggagagcagcaatgcaacggggccgcggggacctgatctgtgcttcagtgaaagccacgcggggaatttccacccgtttcaccaccaccacctgagcaatggagctaatgttacaattaattctccagcgacctgctgctgccaggtgacagctcccagccgtgctgcctgaagcacagcctttgcagcacacggaggctctgca

SEQ ID NO: 48531 - DNA, 600 bp, Chicken  19866894293747_2
aaaagcctgaaaagtacacgctgtcagatgtacaacagctcctccacaccccccagctgtacgtgtgtgctcctgcagggcttgcggcctcctgaaatccagtgcctctcagtgcttgtggcacaacaggtccctgccctacacagagcctgcggtgctgcttctaacagcgagctccagcgcttctcaggaagccgatcttcaccatttctggcctcccartgtgccagaaaagcctccaaagaactgagcctctgacgtggcatcttgcatcacgctgatgtggcgacacaataggtracagagacaggaggaaaggagagcagcaatgcaacggggccgcggggacctgatctgtgcttcagtgaaagccacgcggggaatttccacccgtttcaccaccaccacctgagcaatggagctaatgttacaattaattctccagcgacctgctgctgccaggtgacagctcccagccgtgctgcctgaagcacagcctttgcagcacacggaggctctgcaaggcaggcctgggagaaatgctcgtgctctgcttgccttctgtgggtacaccgaggaccacgtcaccatgcaaacaga

SEQ ID NO: 48532 - DNA, 600 bp, Chicken  19866894293754_1
ccccaacaagttggaaaattaccatttcggagtcactgtaacaggcctggccgagccgggccgcaggccctgcctcggggtgaggaggtaggtcagaggagaggaggaactcaaaattgccatcgtaatcatcttcctccgtatccccctccccatcagcaaaagtacctctagtcaagaaatcggagcgcgtccgcgccatgcgggctttctttttatgggtcggtctgggaacctgcttgaccaaatgataaaacataacaacagaaagaaaagtttgtaaaacgaaaatgtaaaaayaaaaaggagattctactgaagcttggcaacacagcgcagctcaagtatggtctggggarcactgcactccacagaggacacacattattacacgtagtgcagagacgaccagcaaaaacaaaagccaagacagcayggagaaagtgggacaataatggatgttacttaaatggacattaaaccaaacaagacaagactacgtgctacagtgtttgccatcaggactgcgagatccttgtcatccagagcaattcagagctgctgcacttaatgctatgggggcttttttgccatgagaaa

SEQ ID NO: 48533 - DNA, 600 bp, Chicken  19866894293754_2
gccgcaggccctgcctcggggtgaggaggtaggtcagaggagaggaggaactcaaaattgccatcgtaatcatcttcctccgtatccccctccccatcagcaaaagtacctctagtcaagaaatcggagcgcgtccgcgccatgcgggctttctttttatgggtcggtctgggaacctgcttgaccaaatgataaaacataacaacagaaagaaaagtttgtaaaacgaaaatgtaaaaayaaaaaggagattctactgaagcttggcaacacagcgcagctcaagtatggtctggggarcactgcactccacagaggacacacattattacacgtagtgcagagacgaccagcaaaaacaaaagccaagacagcayggagaaagtgggacaataatggatgttacttaaatggacattaaaccaaacaagacaagactacgtgctacagtgtttgccatcaggactgcgagatccttgtcatccagagcaattcagagctgctgcacttaatgctatgggggcttttttgccatgagaaagtgtgaaaattgccttcgtgtgacatccccatccccaagaacagcagtccttgtgcttt

SEQ ID NO: 48534 - DNA, 600 bp, Chicken  19866894293754_3
ctccgtatccccctccccatcagcaaaagtacctctagtcaagaaatcggagcgcgtccgcgccatgcgggctttctttttatgggtcggtctgggaacctgcttgaccaaatgataaaacataacaacagaaagaaaagtttgtaaaacgaaaatgtaaaaayaaaaaggagattctactgaagcttggcaacacagcgcagctcaagtatggtctggggarcactgcactccacagaggacacacattattacacgtagtgcagagacgaccagcaaaaacaaaagccaagacagcayggagaaagtgggacaataatggatgttacttaaatggacattaaaccaaacaagacaagactacgtgctacagtgtttgccatcaggactgcgagatccttgtcatccagagcaattcagagctgctgcacttaatgctatgggggcttttttgccatgagaaagtgtgaaaattgccttcgtgtgacatccccatccccaagaacagcagtccttgtgctttacatttgagggaaaactggcaaaataagcgtttgggagttttcttccccttttcaattgtaagagaaaataagaaag

SEQ ID NO: 48535 - DNA, 600 bp, Chicken  19866894293766_1
cttttatttcagctcctcgggtctccattatcagcagaaaaccatggcagccacttctgaagatacctatccatggtgtctaccaaaacaaccaaaagtcacacagatgcctcagagggacgtacagctgtgcccaggtcaggagctacttgactcacctgcagtcacagcctctgagctgaggtggtggctcatacagccacagacagagcattggatcccagctggcatgtttgccaccaaggtcaagcaggatgtactcactcctaagcaccactgccaagtctccagggtttgccwaccttcattctacagcacctcccgtgggagaggtgaggcaggtccctctgaggaagaagagaagagcatgtccttgccatcttccatgaaggaagatcatgccatccagctgagccagcctctcctgggaaggccctgagatgggtcatgacgtcaacacgagtcaatggcatgcactgtcagcatcctggctgtgtgaagcttctcagacgcagccacaaagctggctgagagccatatctgagagaaatatgccttttacagttgaagcaacagtagttttccccactgggaaaggaa

SEQ ID NO: 48536 - DNA, 569 bp, Chicken  19866894293769_1
tttgtgtcctgtgtgaggagatatcaggcgtgtgcaaacaagcttcttttttttttatgctctctcagttggtggatattcttgagatccaaaagccaaaatggagtgactcatcttccgttcacaaagcatagtcttaaagtaacctgagtgttaacacttggtttggtgagttaactcatttctttaaactttgtaaacccagcaattattggtaactcctggttctctgtaggtcctcttgcagatttccttcacatagttattgtgtatcaattttggctaattccttttcctacsttcattttacaaagtggtgggattttgtaaagccttcttccaaaacttagcattggcacaactagatgccaaattatttctgcaaaacctgactttctgggtgcagtttatctgcactgaaggttttagagactctcaggatgctgcagctcagtcagcatctggaaggagatccaggagctttgcagggtgcaagatcagttagcagagatcttgctgtctgcaggtgtcaggcagaaagcaaggagcagccagcactcctctgcctg

SEQ ID NO: 48537 - DNA, 600 bp, Chicken  19866894293771_1
tccaaagccttctcttctccaggctctctcagcctgtccttgtaggggacgtgctccagccctctgacccttttcatggtcctcctctggacctgctccagcagcctgatgtctttcttttgtttgggatcccagaactggatgcagtacttcaggtggggtctcatgagtgcagagtaaaggggcagaatcacctcccttggcctattcgtcatgcttctttagatagatcccaggatacagttggccttctgggctgcaggcacacattgccagcccatgttgagtctttcatcaacygacactccaagtacttttcctcagggctrctytcaagccattcatcacctacatctgtatttgccattgggagtatgtgttgatcatcctttctctgaatatccttaaaattactgatgtttcatggtgttttttatcttccagtgtcaggatcatcttcttgaatcctccaactctcacaatgttgttagctgttttccttctcatacctctcatggcttttgcatagactttagcagactttctcatactgtagcagtaattagatacataaaacttagacaagttcatacagcaagg

SEQ ID NO: 48538 - DNA, 600 bp, Chicken  19866894293771_2
cagcctgtccttgtaggggacgtgctccagccctctgacccttttcatggtcctcctctggacctgctccagcagcctgatgtctttcttttgtttgggatcccagaactggatgcagtacttcaggtggggtctcatgagtgcagagtaaaggggcagaatcacctcccttggcctattcgtcatgcttctttagatagatcccaggatacagttggccttctgggctgcaggcacacattgccagcccatgttgagtctttcatcaacygacactccaagtacttttcctcagggctrctytcaagccattcatcacctacatctgtatttgccattgggagtatgtgttgatcatcctttctctgaatatccttaaaattactgatgtttcatggtgttttttatcttccagtgtcaggatcatcttcttgaatcctccaactctcacaatgttgttagctgttttccttctcatacctctcatggcttttgcatagactttagcagactttctcatactgtagcagtaattagatacataaaacttagacaagttcatacagcaaggacaaccaaatggacaaattccagaggttt

SEQ ID NO: 48539 - DNA, 600 bp, Chicken  19866894293771_3
cctgtccttgtaggggacgtgctccagccctctgacccttttcatggtcctcctctggacctgctccagcagcctgatgtctttcttttgtttgggatcccagaactggatgcagtacttcaggtggggtctcatgagtgcagagtaaaggggcagaatcacctcccttggcctattcgtcatgcttctttagatagatcccaggatacagttggccttctgggctgcaggcacacattgccagcccatgttgagtctttcatcaacygacactccaagtacttttcctcagggctrctytcaagccattcatcacctacatctgtatttgccattgggagtatgtgttgatcatcctttctctgaatatccttaaaattactgatgtttcatggtgttttttatcttccagtgtcaggatcatcttcttgaatcctccaactctcacaatgttgttagctgttttccttctcatacctctcatggcttttgcatagactttagcagactttctcatactgtagcagtaattagatacataaaacttagacaagttcatacagcaaggacaaccaaatggacaaattccagaggttttgc

SEQ ID NO: 48540 - DNA, 600 bp, Chicken  19866894293777_1
gcagtcttccaatgtgaaagataacagggtctcatgcttgttgcactgatcttgctcctagtctctagctattaccagcatccttctaaattaggcctctggttcttccaataaagtctccctaattttcttccctatctggaggctgagggagaggcaatgctttgacctaacctagcagtgatgcaaagttgtaatgctgttgtgctactgaactggctactgctgctcacattctgcttacaactaaaggcaagatggcttctgaaaaccaaaacatctggaaatagtttgaaaacrtctggattattctgttgtaaatctaaggtctttgcagatacatggagtattgttggtggggagggggagaaaccaattgagcaaatattctaagagggtaatgctgtcaaccaatttggcctcagaatttaccttttgtagcattcttggaggattgaacagagggagcgaacttgcatcgtgtaatttgttcctcagccaaacagtagtgaaaaggagataacagtctaagaccatcttatcctccaggaatgctctgtaaatctataacatactgctaaaaaggtaaatttttgaatc

SEQ ID NO: 48541 - DNA, 600 bp, Chicken  19866894293781_1
cccttccagtgggttcctaagcacagggtaatgtctgcctttttatgctgaagggaggaaaagaatctgtcagcttagtcttcctcagcagtaccatagacctgggagtgctttcccaaagtcaccagagccaaaagggtctgacagcagcctgatctctgaagtccttcagatgaataggagaacatgggaaagtgctgtttaattgcaatgcttcccattctgcgtgtctccaggctgtgattttttgccctaatgctaatggctcggagaggccaggcatgagaggtttttctagaygagagtcaccaagagatggctgaccaagaggaagctgtcacatctcagaagctcctgggcccatgagatttttttttctcagcattcattcctccagcagtctgggaactgtgaacatataacacaacccacacttgggaaaaaaaataataaggacaaagcttctcattttaagactatcctaaaaaggtgtgtacaaagtaatgacaagtgccaagtaggcaatgctaactgttgctggtgctgacaatttcagcatttttaacatgccatcttgacatcttgaaaattaagtctctg

SEQ ID NO: 48542 - DNA, 600 bp, Chicken  19866894293788_1
ccatgcccactaaatcatatccctaaatgcatcatctccatgtttcttgaataccttcagggactgtgacttcaccacagcctgttccagtgcctcaccactctttctgagaatttttttttcctaatatccaatctgaacttcctttcctaatatccaatctgcaccaacctggtgcaactttagagccattacctctcatcctactgctagttgcctggaagaagatgccaactcccagtctccattcaggtagttgtagagagcagtaagatctcccctgaatcttctcttctcccwgctcccgtacaatctgatttccctcagccgctccccataagttttattatccagatccctcactagctttgttgcccatctctggatacaccccaggtccttgatgtctttcttgtagtgaggggctcaaaactaaacgctacactcaagctgtggccttgccagtgctgagtacagaggtacaatcacctttctagtcctgctgactacactatttctgatacaagccatgatgctattgtccttcttggctacctgggcacactgctggctcatgctcagctgtcagctaacatcctc

SEQ ID NO: 48543 - DNA, 600 bp, Chicken  19866894293789_1
ctgaaaacagaattcaagaaaccctatccataaagagaatgaaacactatggacagcggctctgcttcttcccccacattgtttactaaacggctccccctgatttatgcagcactgtttcagataatcttttgcactttggacccttatctgttcagatacaaatcaaatacagaagctctatctggttactgtgttactaatatctccctatgaagctgaatgatttgatgttaaaggtgtcacagccagtatgtgacactacacctcaacaacactatgtgaaatagttggaaacaytgaagcaaaataaatgctttaaacagcatgctccttgctggatgctaagtaaggttaaacatgaattcaatttaaaatgaaacacaatcgacctcagcatactgtatttaatgctacaggtaagagctttcagtataacatatattttagtattataaaagcactcagtgactggatacagcagtgtttgatgctgcctggattgcatctttttagaattagttacatcactgaaaataaccaatactaggaagacgtcatatgaatttattctagtgctggccaaacaagaaagctaat

SEQ ID NO: 48544 - DNA, 600 bp, Chicken  19866894293791_1
acccctgtgtgattgcagtgctgtttaatgagaaaccagggggaactgagaacacgggattggaagaatcctgcagtttgtccttctaccatgaaaaaacatgtgggacgacttagaaatctgacgcttccatcctaatttggtttacactttcaagaatttttgctttgtaaatcttccttttaacatatgttatgttttccatctgtcttctcagatgtctgagatgcagagagaacctaattcttttatttggagtgctgtcttcagtggagagatgtctcaacaaatgctattgcrtagagtcagggtgtgaatcaaaaggaatctgaaactttattatcagtgctaattgagccactgggagctcagaatcgaaatctttaagccagacacgcacgcactcttcaaaatctccaccgagaagggtcttgcctatgatttgggtaggtccggtccctttgatttgtggtaatgtccatatccacgtgcatacacgatcgcttctccgagggtatccctacagctggctggaaaggcagtaggagctgctggcagtggggcaggcctcccagtgccacagcacggcaggctgcagcc

SEQ ID NO: 48545 - DNA, 600 bp, Chicken  19866894293791_2
gatcgcttctccgagggtatccctacagctggctggaaaggcagtaggagctgctggcagtggggcaggcctcccagtgccacagcacggcaggctgcagccctgcctgcccgtgttgcagctggagagcacgggctgctctctcgccctgcccgtctgcggtgagtgctgtgctgggtgttgctgtgcaggtggcacggcttctgcgtcctctccggcgtggctgtatctaatggggcaaagaaagctggaagtctcacgtgtcagtctgctttgcggtggccgcgaggttatttcctragtttcgtgggctcctttagggaagcagtaatgagagtgattcggagcagcctccgctcgctggaatcagtgctttgcagtaagacagatctgagcagatgccggttttgtattcagtcagttgtagttggaagctttcctaagagtcaaatgtattctaaaaagaaagaagtttcaagtgcctgcgtgctgttggtgccttctgtgccttcggtgcgttttgcgacgtgtgcttttgcacagcctgactgcagttgctgacagactgcccttatcgttcggtcccagaagtagggaggg

SEQ ID NO: 48546 - DNA, 600 bp, Chicken  19866894293800_1
tgatcaaacgttttccttttgtataccaagtaagtgatgtcatagatcactgttttagcttaggactctctttcttaatgccttgcattgccggaaaggttcactggaaggaggcatccatgccacacaaagaagtggtattttatgtgtctctctggtctattccgtgcagattttctctccctgtttctgtaagattgtagtttgcagaccacgtttctgcatataaatctgaaggatttgtccactggggatccctcctggctcctctatctcacaccaactggttgcatggatctrtgtaagcctggagcactagcaaggtgttctacaatgaatggacccagagaactgccagctgtgctgcaaatcactgcttcccatgagcacatctggggccagatgttgtaagccagcacagctgcttgctttgctctcagtggacattgttcatgtgtgccagcaaagcagctggccttggggctttatctgggagctggccctcattcgggagaactggagcaaaatcccaatgtggacgaggtctaaaagcaattactgtcttggcacattaccaaggttgatctttgaaggtgaaaa

SEQ ID NO: 48547 - DNA, 600 bp, Chicken  19866894293800_2
gaggtctaaaagcaattactgtcttggcacattaccaaggttgatctttgaaggtgaaaatcaagtgcagcatgtcagcttgggcagccttaaaggagctgtttttctcctaaatgatgttacaggtattttattaaaactcataaagctcgtgccccagtgttcttcatcttcagagctggtgttactgcagtttcattattcaacccatcaggcagcaatggtttcataaatgaatacggttgcatgccggggtggtagcattactgaataaactggattttcatccagccatgaccrcttggattataacgtttagaatgcatcgcttcagtaacttctcttaagcaaagatcatagcacaacttgagcttttaaaaccacaggagggacagaggaaacattttaaagggtttcaagttgcatgtacagattaagggaaatccaagtgggagaggttaatagagtaatgcctttgttagcaataaatgtgagagcaggaaaacaatccttcgtgtttctgagatctggcgtttatcctcatacaaggcttcttctcagagtgctgttaacagctgaacccaacgagtctcagagttc

SEQ ID NO: 48548 - DNA, 600 bp, Chicken  19866894293800_3
aaccacaggagggacagaggaaacattttaaagggtttcaagttgcatgtacagattaagggaaatccaagtgggagaggttaatagagtaatgcctttgttagcaataaatgtgagagcaggaaaacaatccttcgtgtttctgagatctggcgtttatcctcatacaaggcttcttctcagagtgctgttaacagctgaacccaacgagtctcagagttcagcagagtgtccagatgcttcgtggcgtaacaaaaccctaaggtcagaacttgggctgttcagaggattgagatcttygagatagacattataaactcaagttcttaatgcctccsaagtcataatctgaattgtggtcacgtacttttatgtccacagcctgttgctagcttttaattattgctacgctgactcagagaatagatgaaaaattcttggaaaattatccatcaaaataccatttcttcccttttcttcttcccttcccttttctcctacctttccctccccattttgccttcccttctctccccttttctyttccccttcccctgccttcgttttttcccctccccctctttttcttttgctagtggc

SEQ ID NO: 48549 - DNA, 600 bp, Chicken  19866894293800_4
caagttgcatgtacagattaagggaaatccaagtgggagaggttaatagagtaatgcctttgttagcaataaatgtgagagcaggaaaacaatccttcgtgtttctgagatctggcgtttatcctcatacaaggcttcttctcagagtgctgttaacagctgaacccaacgagtctcagagttcagcagagtgtccagatgcttcgtggcgtaacaaaaccctaaggtcagaacttgggctgttcagaggattgagatcttygagatagacattataaactcaagttcttaatgcctccsaagtcataatctgaattgtggtcacgtacttttatgtccacagcctgttgctagcttttaattattgctacgctgactcagagaatagatgaaaaattcttggaaaattatccatcaaaataccatttcttcccttttcttcttcccttcccttttctcctacctttccctccccattttgccttcccttctctccccttttctyttccccttcccctgccttcgttttttcccctccccctctttttcttttgctagtggcaggagtgcccttgtccaacttgacgtagctggaaggaa

SEQ ID NO: 48550 - DNA, 495 bp, Chicken  19866894293800_5
gtggcgtaacaaaaccctaaggtcagaacttgggctgttcagaggattgagatcttygagatagacattataaactcaagttcttaatgcctccsaagtcataatctgaattgtggtcacgtacttttatgtccacagcctgttgctagcttttaattattgctacgctgactcagagaatagatgaaaaattcttggaaaattatccatcaaaataccatttcttcccttttcttcttcccttcccttttctcctacctttccctccccattttgccttcccttctctccccttttctyttccccttcccctgccttcgttttttcccctccccctctttttcttttgctagtggcaggagtgcccttgtccaacttgacgtagctggaaggaaaaactcaatttctctcttattttctctctttttcatcttgattggctttgggttcagtttggagggagagtttttagttacaatactcagctagttctct

SEQ ID NO: 48551 - DNA, 562 bp, Chicken  19866894293803_1
tctcttctcaagggagaaagaaagtgccttgctgaccatacccttccaactggaatcctgttaatgtgatcaaaggctgcaaagctcccctgtcattggcaagatgcgctagatctgttggagtgatgctgaatggctccagcctgacaatatgcttatctccctgggctgtgcagtctggtgcctgcagtggtactaagcttgcttaggtagaactggagataaaaaaaatggtgggggcaggagccagacctctgttgtctctgagagctgtggcaggcaacatttcttgtgttgtgyacaggggctgttcacatcaagtgttttgcttgactgcctggtcttaatgctgtctttgctcttggattgtgctgttacttgcagggcaccaagctgtggataatcatggagtacctgggaggaggttcagccttggatttggtaagtatgtggtaagctctgggtcctgacatatcttggctgaagccttgatttgtgaaatgcccgtaaggcagatgctgacttgctgtgtgatgtctttttgacagccctgtgcctgaag

SEQ ID NO: 48552 - DNA, 600 bp, Chicken  19866894293808_1
ccactttcacacaacatttcctgtcctgtgcagaaagcatcactcagcctgaaagcccatggtgtgagctgagcactgctctgcaatgccttcctgagaaaccgcgctggacgctggagcgaatgctcttcccagccaggtctggtcggctttcaagaggtttagttttaattgttggccaaaacccatcagcctcaccccgctgctggaccaacacggatttagagacaggctttgtcatggttgcggtgtgccccaatagccgggcactctcccattggcctctcatatccaatgtgrtacatcaccaccatccatcctggccttgcccaccccatcctggggctggggttgctgtggggtagaaggaagcatgagaaaaattcctctgtgctcatgcaagatgtctgtagtgggagtgggaccattgggggggggtctcctggggggcttcaaccgcagcatcctccttggctcctccatttctgaaaatgctttagattttattctcttatttattcccttattttttttttttttaagagagtgggacagtcaatgcgtctgcagtctgggggtattttccataacataaacata

SEQ ID NO: 48553 - DNA, 600 bp, Chicken  19866894293809_1
gtatgtgcttttagcctggaaggccaactgcatcctctgctgcatcaagaacaggggtggccagcagggaaagggaggtgattgtctctgtgctcttccctgcgcctactgtgtcccggccttacacacatcaaaaacaatagaaacatggcaacaacatgaagattcttaaagctatgctactcagggagcaaaacccttcaccttaggcaaggcaggatagctaacaatgcccattctgcaccttgcaaaagagctgtgtttgaatcactaaacttgctcaaaatgtgtataaatgtygtgacctgttttcctgttggaaatgagaggtcactgaatcatctcccacaggctgcagggggaatgtttatactcactgtctttctggtgccaccgtactgcatgcaaaaccacaccacagtagtgaaacatgaactcatgctcggagtgctgcactgtcccctgcagtaatggcagcaaggtgcgcccatcgattaccctggtgaagagggctgagatcatcagactgttcaggaattgcgccctgcctgcagtgtgagcagtactcactctctatagataatgcactaggatttcaaa

SEQ ID NO: 48554 - DNA, 600 bp, Chicken  19866894293809_2
gtgaaacatgaactcatgctcggagtgctgcactgtcccctgcagtaatggcagcaaggtgcgcccatcgattaccctggtgaagagggctgagatcatcagactgttcaggaattgcgccctgcctgcagtgtgagcagtactcactctctatagataatgcactaggatttcaaatgtcatttctaaaataaactactgtttagcttattacctctgacagttttaattgtccggatgggtggtggccagtgattagtagtaactagcagtttgtgcaattgcagctacttcacacawactgggtagataagctaacatccctgtaaatttcctggggctaagtgataaccatagagaagggaagttcactggttttggcttcctgaaattgagatcactgatagactctgtcaaaatggtgacaattaactgactgtcagttggtttagttgtgcaacacaagaacttttatgttctttctcagaatgctttagtcacccagcctttcactagttcttagagagactaacataggctctacctattgctcgctgtccaggaacctacttctccattactggcatccagatgcaggac

SEQ ID NO: 48555 - DNA, 600 bp, Chicken  19866894293810_1
gtagttctctgatcttggtctttccaagtacattgtacccacattgtacccagtgtttgtgagaaccttgagaagctgatgactaatagagaaaatttcactcaactggagtagatttcagaaagattgaagaggcagatggtacagtttttactagaaaagctgttgattaatgttcattcttatatgctgtaatcagctttagatacagaatgtaatacaggaatttacaaattaatgtgttttcaaatttttatgtatttgaaaatgctttgatcctacacaaagtttttctgtttyttcagaatttattttttctagtaccactaggggttgctcagctccttccctccaatgaatagtttcaagctataactatttacacttgaagcatttggactttctttaaatatcatgttttggaatctgatcagaaaaatagtcaagaaagctgttgtcagttttctaacatctgaggtttggatgtctaatactgggatggggctgctgtgctcatgtgttatgactttctgcaaactgaagcagtatttataatactcttcctaatgttactgccatgagtggtcttcagcggccttg

SEQ ID NO: 48556 - DNA, 599 bp, Chicken  19866894293811_1
  misc_feature (1)..(167): n is any nucleotide
nnnnnnnnnnnnnnnnnnnnnnnnnnnnnnnnnnnnnnnnnnnnnnnnnnnnnnnnnnnnnnnnnnnnnnnnnnnnnnnnnnnnnnnnnnnnnnnnnnnnnnnnnnnnnnnnnnnnnnnnnnnnnnnnnnnnnnnnnnnnnnnnnnnnnnnnnnnnnnnnnnnnnnnccccgccttagtgcctcatgcacccaggagggtttatcaaccagcacagacaggagctgtgcaagtacctccctggacatctccagaaagtttctgtgcccacagccacggccagtggaaggacttgttgcargagcaggatgggaggagtgtgcatgctaaggctgtgcccttctcctcccagcagtgctcatctggggacgcaacagctgaccttcatacttacctcacaagacctgtcagctgctatccttgtacttggaaaacggatgaagagggctgtgcaggtacrtatgygagytctccatgctgttgataattctgcagaaacygatcttacaattattggtagcatcaaggaaatccatcaaatgagcaccctgttaaagcaccaagcaatttgtattccgagttgtctcagtgtctgcgtgc

SEQ ID NO: 48557 - DNA, 599 bp, Chicken  19866894293811_2
  misc_feature (1)..(8): n is any nucleotide
nnnnnnnnccccgccttagtgcctcatgcacccaggagggtttatcaaccagcacagacaggagctgtgcaagtacctccctggacatctccagaaagtttctgtgcccacagccacggccagtggaaggacttgttgcargagcaggatgggaggagtgtgcatgctaaggctgtgcccttctcctcccagcagtgctcatctggggacgcaacagctgaccttcatacttacctcacaagacctgtcagctgctatccttgtacttggaaaacggatgaagagggctgtgcaggtacrtatgygagytctccatgctgttgataattctgcagaaacygatcttacaattattggtagcatcaaggaaatccatcaaatgagcaccctgttaaagcaccaagcaatttgtattccgagttgtctcagtgtctgcgtgcatctcactgtgaaagaaagttttttgtgtgcttattagctgggtgtcccctcccccatctgcctatgtctggcagggggcaaggatgggtctggaacctcacacgtgtctcagccatcccactgacattactcacagggatgtgggtgagggcacycca

SEQ ID NO: 48558 - DNA, 599 bp, Chicken  19866894293811_3
  misc_feature (1)..(3): n is any nucleotide
nnnccccgccttagtgcctcatgcacccaggagggtttatcaaccagcacagacaggagctgtgcaagtacctccctggacatctccagaaagtttctgtgcccacagccacggccagtggaaggacttgttgcargagcaggatgggaggagtgtgcatgctaaggctgtgcccttctcctcccagcagtgctcatctggggacgcaacagctgaccttcatacttacctcacaagacctgtcagctgctatccttgtacttggaaaacggatgaagagggctgtgcaggtacrtatgygagytctccatgctgttgataattctgcagaaacygatcttacaattattggtagcatcaaggaaatccatcaaatgagcaccctgttaaagcaccaagcaatttgtattccgagttgtctcagtgtctgcgtgcatctcactgtgaaagaaagttttttgtgtgcttattagctgggtgtcccctcccccatctgcctatgtctggcagggggcaaggatgggtctggaacctcacacgtgtctcagccatcccactgacattactcacagggatgtgggtgagggcacyccatgggc

SEQ ID NO: 48559 - DNA, 600 bp, Chicken  19866894293811_4
cccgccttagtgcctcatgcacccaggagggtttatcaaccagcacagacaggagctgtgcaagtacctccctggacatctccagaaagtttctgtgcccacagccacggccagtggaaggacttgttgcargagcaggatgggaggagtgtgcatgctaaggctgtgcccttctcctcccagcagtgctcatctggggacgcaacagctgaccttcatacttacctcacaagacctgtcagctgctatccttgtacttggaaaacggatgaagagggctgtgcaggtacrtatgygagytctccatgctgttgataattctgcagaaacygatcttacaattattggtagcatcaaggaaatccatcaaatgagcaccctgttaaagcaccaagcaatttgtattccgagttgtctcagtgtctgcgtgcatctcactgtgaaagaaagttttttgtgtgcttattagctgggtgtcccctcccccatctgcctatgtctggcagggggcaaggatgggtctggaacctcacacgtgtctcagccatcccactgacattactcacagggatgtgggtgagggcacyccatgggctgggg

SEQ ID NO: 48560 - DNA, 600 bp, Chicken  19866894293811_5
tttatcaaccagcacagacaggagctgtgcaagtacctccctggacatctccagaaagtttctgtgcccacagccacggccagtggaaggacttgttgcargagcaggatgggaggagtgtgcatgctaaggctgtgcccttctcctcccagcagtgctcatctggggacgcaacagctgaccttcatacttacctcacaagacctgtcagctgctatccttgtacttggaaaacggatgaagagggctgtgcaggtacrtatgygagytctccatgctgttgataattctgcagaaacygatcttacaattattggtagcatcaaggaaatccatcaaatgagcaccctgttaaagcaccaagcaatttgtattccgagttgtctcagtgtctgcgtgcatctcactgtgaaagaaagttttttgtgtgcttattagctgggtgtcccctcccccatctgcctatgtctggcagggggcaaggatgggtctggaacctcacacgtgtctcagccatcccactgacattactcacagggatgtgggtgagggcacyccatgggctggggaggacaggaggggcagttgacacaacagaga

SEQ ID NO: 48561 - DNA, 480 bp, Chicken  19866894293811_6
tacrtatgygagytctccatgctgttgataattctgcagaaacygatcttacaattattggtagcatcaaggaaatccatcaaatgagcaccctgttaaagcaccaagcaatttgtattccgagttgtctcagtgtctgcgtgcatctcactgtgaaagaaagttttttgtgtgcttattagctgggtgtcccctcccccatctgcctatgtctggcagggggcaaggatgggtctggaacctcacacgtgtctcagccatcccactgacattactcacagggatgtgggtgagggcacyccatgggctggggaggacaggaggggcagttgacacaacagagaagggcaaaataaaaccaaacacaatagaagaagttttattggtttgcatcctacaggaatagttacagaaagggtgtaggattaatctgtcaaagaaaacacggaatagctacgctttcactaaaagcaccaacca

SEQ ID NO: 48562 - DNA, 600 bp, Chicken  19866894293813_1
ggtaagtttttaaggaagtccttccggtcctcttcgtgcaagataccatagacacttgtattaaccaaatcttcctgtttatattgcaaatactgtgtgacattttctgacacaaatactatgttcccatcacgattgacaacgaacaggaaaccgtccaatgcctaaatagcaacatagcatatgagactgcataattctgaacataatttagtttaaaaactttgcaggttctaaatgccaagtcataatacatgcatttattttcaaaagtagaaatgagttttcacacttttctgyacagaaaatggaatgtgttaaggaatgatttcaayatccaaaatctgtctgttcatttgttattcaattgagatttgtcacagtgataaccaaccttcttgttttactctttctttatctggtaacaagagaatgaatcgataacattatttctatagctggcaaattgaaataagaagaaatttagtagaatgtgtgatgaaaatactgtatcttcttaaatgaaagaaaaattcagcttttttttttttaagtttcaaaaatgctttttaatgcacttcatgggattgattttttagg

SEQ ID NO: 48563 - DNA, 600 bp, Chicken  19866894293813_2
gtgcaagataccatagacacttgtattaaccaaatcttcctgtttatattgcaaatactgtgtgacattttctgacacaaatactatgttcccatcacgattgacaacgaacaggaaaccgtccaatgcctaaatagcaacatagcatatgagactgcataattctgaacataatttagtttaaaaactttgcaggttctaaatgccaagtcataatacatgcatttattttcaaaagtagaaatgagttttcacacttttctgyacagaaaatggaatgtgttaaggaatgatttcaayatccaaaatctgtctgttcatttgttattcaattgagatttgtcacagtgataaccaaccttcttgttttactctttctttatctggtaacaagagaatgaatcgataacattatttctatagctggcaaattgaaataagaagaaatttagtagaatgtgtgatgaaaatactgtatcttcttaaatgaaagaaaaattcagcttttttttttttaagtttcaaaaatgctttttaatgcacttcatgggattgattttttaggcataaggaaaaagtatctgctatgtacctttcttt

SEQ ID NO: 48564 - DNA, 600 bp, Chicken  19866894293814_1
cccccacttcagagaataatcattccataatcagaccctaaccaggctatatttatgaatttgtaagttctgccattatggtgtctgatatttttgcaaaaagagaaaaaaaatgaccatacaacttctataaacaggcactctgttgactgcacgggtgagtactcacctgctgcttggttttgcccttccccattcctcttgcattgcggctctttccagcagttggggcacagtttcacaagagaaagaaagcaagagggcatgaagcatttacaggcactgctttgagcgcaagarcagcactgtgaaagtgatgtgtaaccacgagcagtcatgcacagaccaggcatataattgccacagaatggccgaattcagaatgagaaacgggaggtccagcgaggagaaagaacaacaaaatgtgtctcacatcatagcatagtccatctcacaataagcattcctcttgttaagaaaaygaaaggtttattttaaaattgtccaagatttattgagcagattaagtgtgccacacctaggtatggtatcacctaggtatgttagtaaatggggaacacacaaagtggttatgcattg

SEQ ID NO: 48565 - DNA, 535 bp, Chicken  19866894293814_2
ttgcccttccccattcctcttgcattgcggctctttccagcagttggggcacagtttcacaagagaaagaaagcaagagggcatgaagcatttacaggcactgctttgagcgcaagarcagcactgtgaaagtgatgtgtaaccacgagcagtcatgcacagaccaggcatataattgccacagaatggccgaattcagaatgagaaacgggaggtccagcgaggagaaagaacaacaaaatgtgtctcacatcatagcatagtccatctcacaataagcattcctcttgttaagaaaaygaaaggtttattttaaaattgtccaagatttattgagcagattaagtgtgccacacctaggtatggtatcacctaggtatgttagtaaatggggaacacacaaagtggttatgcattgccagtccaacrtgacagctacacacactcattgyatgggagagctctgtgcattgtgcatgaatccacctgccctcacctcaagccacccttgcagctcactgccaacagagaccag

SEQ ID NO: 48566 - DNA, 406 bp, Chicken  19866894293814_3
aagtgatgtgtaaccacgagcagtcatgcacagaccaggcatataattgccacagaatggccgaattcagaatgagaaacgggaggtccagcgaggagaaagaacaacaaaatgtgtctcacatcatagcatagtccatctcacaataagcattcctcttgttaagaaaaygaaaggtttattttaaaattgtccaagatttattgagcagattaagtgtgccacacctaggtatggtatcacctaggtatgttagtaaatggggaacacacaaagtggttatgcattgccagtccaacrtgacagctacacacactcattgyatgggagagctctgtgcattgtgcatgaatccacctgccctcacctcaagccacccttgcagctcactgccaacagagaccag

SEQ ID NO: 48567 - DNA, 383 bp, Chicken  19866894293814_4
tcatgcacagaccaggcatataattgccacagaatggccgaattcagaatgagaaacgggaggtccagcgaggagaaagaacaacaaaatgtgtctcacatcatagcatagtccatctcacaataagcattcctcttgttaagaaaaygaaaggtttattttaaaattgtccaagatttattgagcagattaagtgtgccacacctaggtatggtatcacctaggtatgttagtaaatggggaacacacaaagtggttatgcattgccagtccaacrtgacagctacacacactcattgyatgggagagctctgtgcattgtgcatgaatccacctgccctcacctcaagccacccttgcagctcactgccaacagagaccag

SEQ ID NO: 48568 - DNA, 599 bp, Chicken  19866894293824_1
  misc_feature (1)..(97): n is any nucleotide
nnnnnnnnnnnnnnnnnnnnnnnnnnnnnnnnnnnnnnnnnnnnnnnnnnnnnnnnnnnnnnnnnnnnnnnnnnnnnnnnnnnnnnnnnnnnnnnnnctttctctgtgcaggaatgcaagtataggctaatgtgcttattttggacactacattagcaatgtaagcaatgaaatgcttatgtagcaaggtaatgatttccaaagttgtacacgggcacagttctgtgggaatgagtggcagtgagaacaaaggagaggagaaactgctccatagagcacaagagaagattgagagaagarcaaatctggatgttagaaataaaaggaacataagaactgtgcttttttttcgccttttgagtagaacttcagtacagtggtatttaaaagygcttcaactaccactgattaaccataaaaactgatggattcagtcatactcgcttccattacctcagtaaggtccagtcaccacttctgcccacacacgcagcctggcagctccctgctctgggtctctcaccatgacaaactgcttttctcctcgcagtccaagcgcagcgccgcagcagggagcactcccgctctgccagcgccct

SEQ ID NO: 48569 - DNA, 599 bp, Chicken  19866894293824_2
  misc_feature (1)..(6): n is any nucleotide
nnnnnnctttctctgtgcaggaatgcaagtataggctaatgtgcttattttggacactacattagcaatgtaagcaatgaaatgcttatgtagcaaggtaatgatttccaaagttgtacacgggcacagttctgtgggaatgagtggcagtgagaacaaaggagaggagaaactgctccatagagcacaagagaagattgagagaagarcaaatctggatgttagaaataaaaggaacataagaactgtgcttttttttcgccttttgagtagaacttcagtacagtggtatttaaaagygcttcaactaccactgattaaccataaaaactgatggattcagtcatactcgcttccattacctcagtaaggtccagtcaccacttctgcccacacacgcagcctggcagctccctgctctgggtctctcaccatgacaaactgcttttctcctcgcagtccaagcgcagcgccgcagcagggagcactcccgctctgccagcgccctcagcatcagcggggggggatgagaaatcagaaccctccgagggggtgaatcagcacctgtcctactacagcagcggaggcttctttaccac

SEQ ID NO: 48570 - DNA, 600 bp, Chicken  19866894293827_1
tttctctgctttgtccttcgccttggtataacactgtcaatatgatgctcttcagagtttccattctcaccttctcttaagttgggttcactggaagttaccagaaaatcacaacagagctatttctcatttacattatgaagaaataatacattatataattgttattatatatatatataatataaaaacataattgttattattttcctacaggctatagcacattctctgaaagcctttatttttcctgcaccagaatctgcagtgatgcatggaacacctgggaaagcagtcacrcaccatttttattcatgaggtctctgaaaacaaggaataaatatctagaaattggctagaagccttcctgtgaagctccctgagagatccaaggaaagttatgcattcagattcccttccttcatttaaaatgtctcaaatgttttccctttggatcacagcacaggatctatttttggagaaatttcagaacaattctggcacactctgactgccacgagaagaattaccatccctctgaccaatacagcactgcacttaggacagcttaggacagacatagacacgataccagctgga

SEQ ID NO: 48571 - DNA, 600 bp, Chicken  19866894293827_2
gtgaagctccctgagagatccaaggaaagttatgcattcagattcccttccttcatttaaaatgtctcaaatgttttccctttggatcacagcacaggatctatttttggagaaatttcagaacaattctggcacactctgactgccacgagaagaattaccatccctctgaccaatacagcactgcacttaggacagcttaggacagacatagacacgataccagctggaatcaggcaaaggacagaaagggagagggatgagccaaaataccaggggaaggaacctagtcaaaatgcrtttgttaaatgactgttttgacctaaaastgccttagaacaaaatttgtgtttattcttttcatttcacataaaaaggcgtaactttgcaacagaatcccaaaacactcacagaggatattgcagatgctaaatttatatcaattaaaggattacatactaggcaggctcattacatagatcatcaagggttactaaagagcacatctggctcagggtgtcttacctttccatgagccaaaaatagcagagattgggaaagggttcagggaggatatcatatacttcctcagttctttgc

SEQ ID NO: 48572 - DNA, 600 bp, Chicken  19866894293827_3
ttatgcattcagattcccttccttcatttaaaatgtctcaaatgttttccctttggatcacagcacaggatctatttttggagaaatttcagaacaattctggcacactctgactgccacgagaagaattaccatccctctgaccaatacagcactgcacttaggacagcttaggacagacatagacacgataccagctggaatcaggcaaaggacagaaagggagagggatgagccaaaataccaggggaaggaacctagtcaaaatgcrtttgttaaatgactgttttgacctaaaastgccttagaacaaaatttgtgtttattcttttcatttcacataaaaaggcgtaactttgcaacagaatcccaaaacactcacagaggatattgcagatgctaaatttatatcaattaaaggattacatactaggcaggctcattacatagatcatcaagggttactaaagagcacatctggctcagggtgtcttacctttccatgagccaaaaatagcagagattgggaaagggttcagggaggatatcatatacttcctcagttctttgctaaatatccacatatgagcattgcttctg

SEQ ID NO: 48573 - DNA, 600 bp, Chicken  19866894293834_1
tgtcctttctttggctggctccgttcccctttctgacaccaccagacaagagcaagcatgcagctccaatttagaaatgtcaacgtggtttaggttagggaatgtttataataattatgaattgcctttacggtttgtttgctttccatagcaattgcaagaagacagcagctgacagctgtgaaaatttctagtgttgttcccttagtgtagaaaaacgtggatctaattagcgtgtaccagcagcactgtattattaaattaataaaattagaaagctatttgcacctgtgctaatgyaacaccatttatcctgaagcacgttaagccattaagtgcttcagatctctaatgacactgctctacaaacaggcgagcagaagggggagagccagagccttccccaagttcccartcaaaggagagaaactcttccctagtcaaagcaataggaattagggctgcttggtgcatgccatttctagcagatcaaccatgacttttgctgtcaaaaaatcctttacaaacccaccaagattccttttgccccttaagcaatagcagaatagaggtgcctgttgagctgatackctatgttag

SEQ ID NO: 48574 - DNA, 600 bp, Chicken  19866894293834_2
tatgaattgcctttacggtttgtttgctttccatagcaattgcaagaagacagcagctgacagctgtgaaaatttctagtgttgttcccttagtgtagaaaaacgtggatctaattagcgtgtaccagcagcactgtattattaaattaataaaattagaaagctatttgcacctgtgctaatgyaacaccatttatcctgaagcacgttaagccattaagtgcttcagatctctaatgacactgctctacaaacaggcgagcagaagggggagagccagagccttccccaagttcccartcaaaggagagaaactcttccctagtcaaagcaataggaattagggctgcttggtgcatgccatttctagcagatcaaccatgacttttgctgtcaaaaaatcctttacaaacccaccaagattccttttgccccttaagcaatagcagaatagaggtgcctgttgagctgatackctatgttagacttggctgttgtggggtgattatggttgatattttttgaggaagttcaccgaccataaggaagcatgttggagtctaagctataccacatccacacaaaatatttgctgtggtt

SEQ ID NO: 48575 - DNA, 600 bp, Chicken  19866894293834_3
tgctaatgyaacaccatttatcctgaagcacgttaagccattaagtgcttcagatctctaatgacactgctctacaaacaggcgagcagaagggggagagccagagccttccccaagttcccartcaaaggagagaaactcttccctagtcaaagcaataggaattagggctgcttggtgcatgccatttctagcagatcaaccatgacttttgctgtcaaaaaatcctttacaaacccaccaagattccttttgccccttaagcaatagcagaatagaggtgcctgttgagctgatackctatgttagacttggctgttgtggggtgattatggttgatattttttgaggaagttcaccgaccataaggaagcatgttggagtctaagctataccacatccacacaaaatatttgctgtggttgaatttgtgcaacatgaaacctgagactttctgttaatttatatttattttcagcattgttgatagtaggagacagcaacatccctccttaaagattgtgtaccactcttggaagcacaaaggcaacaaacttcggtcagggtgacaccatttattcttgttattactcctcggat

SEQ ID NO: 48576 - DNA, 600 bp, Chicken  19866894293836_1
aggaaggcttgtatcttttagttgtttatttagagaggtatgttaaggctcagcattgtgcctcttggcttatgttggctctgctcatatatggtattaacccttaaagttcttatgatttgtcttctgaactttatcagtctgatttttagtctccattgaagactctaataaactgccacaaccaagaactactcaggacatcttacagtatctactgtgggaacatgctaccttggactcctaaaggagacggttctggaggcatggcagggaatatttgcactttgtagggaatcrttctccagtacagaaaccgaaatgagaaagtccagtagaaattagctaaaagtatagctcttcctctagtttccgtgctcaatggaaggagattgcgctactgaagattggattggtagattagagaaacagtgattagggaaaagacaggggaatatagtcagagaaggaaaatgcatagcataaggtggaggtagcacaagtagtggaaaggatgaacagagaaaagcaaaaataactggaaacagggaacatgcaaggaaaacaacacagaaataacttcctttttcaaaattaaac

SEQ ID NO: 48577 - DNA, 599 bp, Chicken  19866894293841_1
  misc_feature (1)..(29): n is any nucleotide
nnnnnnnnnnnnnnnnnnnnnnnnnnnnnatctggccctatggacttctacacattcagcctcatgaggtggtctcggacttgctccgctcttagactgggagggattttgttcccctcacctccacctagaagttcagggacaccagaggtatgcgaatcctgagtgattgtgaagaacaaggaaaagaactcattaagcacctcagccttctccatgtttgaggggcaagggtagaggcctcctggttgcaccttgtgcaattgagtctgatctctgggagaaggcactctccttccwctgtctcttttactccaagagggagagatggaatcgtgtcatggaatgttgcctctgtcacagaaagatgtgccaaagcctctggaggctgaggaaccattgttctgtttagcatcttctaggcacagcagtgaatggacatcgatatgttgccratacaatttcacattgctgtggacaacacctgcctgctaatacaagaggcaatttgatgcaacaaagccataattcagttcagtgtggtctacatagtgtaacgaagtgtggagctggagctggagccatgtattacctttcca

SEQ ID NO: 48578 - DNA, 600 bp, Chicken  19866894293841_2
cgaatcctgagtgattgtgaagaacaaggaaaagaactcattaagcacctcagccttctccatgtttgaggggcaagggtagaggcctcctggttgcaccttgtgcaattgagtctgatctctgggagaaggcactctccttccwctgtctcttttactccaagagggagagatggaatcgtgtcatggaatgttgcctctgtcacagaaagatgtgccaaagcctctggaggctgaggaaccattgttctgtttagcatcttctaggcacagcagtgaatggacatcgatatgttgccratacaatttcacattgctgtggacaacacctgcctgctaatacaagaggcaatttgatgcaacaaagccataattcagttcagtgtggtctacatagtgtaacgaagtgtggagctggagctggagccatgtattacctttccaaggctggcggtgggaagaaaacagggcttgcgctgtgggcatcctcgtcctgagcagcacatctgtaagctgggctggggaaagaatctgagctaaaagctgccctcttatggccttttatagtcactaaacggagttcttctaggtggttggaga

SEQ ID NO: 48579 - DNA, 599 bp, Chicken  19866894293850_1
  misc_feature (1)..(243): n is any nucleotide
nnnnnnnnnnnnnnnnnnnnnnnnnnnnnnnnnnnnnnnnnnnnnnnnnnnnnnnnnnnnnnnnnnnnnnnnnnnnnnnnnnnnnnnnnnnnnnnnnnnnnnnnnnnnnnnnnnnnnnnnnnnnnnnnnnnnnnnnnnnnnnnnnnnnnnnnnnnnnnnnnnnnnnnnnnnnnnnnnnnnnnnnnnnnnnnnnnnnnnnnnnnnnnnnnnnnnnnnnnnnnnnnnnnnnnnnnnnnnnnnnnngtttgggtatcacattaggacacagagagacaaccactgaagagggccccacccatraagtggtgtaaggattctattaaagctgctcttcgaatgcttggaaatttctctacagtcagtgcagtggtaaatgagtaccaatactttctgcttttgaaattaggaatagcacctattccccctcgtaagtctgttttggcactgggaaatcactgcacagtgcctggacacaattattttaggtatgaattaatacgtgagctgcaaaacacacctgaaacttctgtctttggcaaagacagggtctgtgttcctgttgtcttttgtcagaaagcagaaacgtgtttggatattct

SEQ ID NO: 48580 - DNA, 429 bp, Chicken  19866894293855_1
acaagcatatacctatttttttcccccttaaagactgtattttacaggaggaaaaaggtgcaaaacttcttgcgaagagcctcatcagtaaatgatttctgaagactgttttatgtagttgttaaagcagaagtcagctctgctaggttgtaagaaagtgtgctctgaggacagggggaaatggtttcatactgaaacaagaaagatttagactggatattaggaaagaagttgcttaaggtagggggctagtgaggcactggctcaggttgcccagagaggtggggtgggtgccccatycctgaacacactcaaggtcaggctggatggggcttcaagcatctggtccagctgtaggtgtccctgttcattacagggtagttggagtagatggcctttatgggcccttccaactcaaatgattctatg

SEQ ID NO: 48581 - DNA, 600 bp, Chicken  19866894293858_1
gagggagaaaagcataaacaccccaccataactaattagacttatgtctctcagcacccagatcaattttcttggacatgcttttccccaaccttttatgcttagataagactgtgtcatcctctgcctttagaaagcacctagcaggttgtgcttgtcaacctcagtcaatactaaatcaccagcaatgccatttctgctgcctgtgaaggacatttcaaagcaggaagcagcctgctcagagctgctgcaaggaagcagggttgttcctgaaaggcactgccatcccatgcacatacsctgagcacyctctgctcccaaaggaaacgtggtttcggagatgataggagtaagggcaaagggtgaagggaggaggctaggaaatggcacagcatcctgaaggaaagtttgtacacctctttttctctttaaagcagaccacccaaaaaatgcatcagagattcatgccaaccttaatgctgcagcctccctgcaaaatcagtagccgtagctttgaggtcccacacgcaaataggctgtttcccttgggattaccaaacttactgtgccacatctctgactggcataaatcctcagcca

SEQ ID NO: 48582 - DNA, 600 bp, Chicken  19866894293858_2
aagcataaacaccccaccataactaattagacttatgtctctcagcacccagatcaattttcttggacatgcttttccccaaccttttatgcttagataagactgtgtcatcctctgcctttagaaagcacctagcaggttgtgcttgtcaacctcagtcaatactaaatcaccagcaatgccatttctgctgcctgtgaaggacatttcaaagcaggaagcagcctgctcagagctgctgcaaggaagcagggttgttcctgaaaggcactgccatcccatgcacatacsctgagcacyctctgctcccaaaggaaacgtggtttcggagatgataggagtaagggcaaagggtgaagggaggaggctaggaaatggcacagcatcctgaaggaaagtttgtacacctctttttctctttaaagcagaccacccaaaaaatgcatcagagattcatgccaaccttaatgctgcagcctccctgcaaaatcagtagccgtagctttgaggtcccacacgcaaataggctgtttcccttgggattaccaaacttactgtgccacatctctgactggcataaatcctcagccagttggggtc

SEQ ID NO: 48583 - DNA, 599 bp, Chicken  19866894293862_1
  misc_feature (1)..(56): n is any nucleotide
nnnnnnnnnnnnnnnnnnnnnnnnnnnnnnnnnnnnnnnnnnnnnnnnnnnnnnnntgtgcataaataattaattattcatcggagaaagaactaggagaaagtgtcctgcatcccaagtgcattcctgaactactgtattatggagaaattctcccctttctcttgatcactaggtcttatttcagctccataaagcagagcagtgtcaacagaagtaaatgaaatggctctatcccaaataactgtacgatgcactgaggaagacacctccaaagaatgtgaaaagtctgctttcaarcttcccatcttttcatttaaaactgtgctttgaacacttaggaagatgtagatacacgagtacatgagtatagagtttccctgtgtggaggtctcttatttactcctggggaataaatagtttaaattacagatttactgagctaggraaaataaaaatatctgtgtgaaggactgtcttttatcacagaactgaaatctttatttattacagaagggtttcgaagaaagtgagagkgaaaaaataatacacacagacttgctcctgcctccagggatatcaccgacctccgyctattg

SEQ ID NO: 48584 - DNA, 600 bp, Chicken  19866894293862_2
aattctcccctttctcttgatcactaggtcttatttcagctccataaagcagagcagtgtcaacagaagtaaatgaaatggctctatcccaaataactgtacgatgcactgaggaagacacctccaaagaatgtgaaaagtctgctttcaarcttcccatcttttcatttaaaactgtgctttgaacacttaggaagatgtagatacacgagtacatgagtatagagtttccctgtgtggaggtctcttatttactcctggggaataaatagtttaaattacagatttactgagctaggraaaataaaaatatctgtgtgaaggactgtcttttatcacagaactgaaatctttatttattacagaagggtttcgaagaaagtgagagkgaaaaaataatacacacagacttgctcctgcctccagggatatcaccgacctccgyctattgatttttttttagaagtgactattccaggttgagaagagtaacaaaataatggggcatgagtgagtcagagtgatactgtyttaaataygggtatttcatattccttctgtgtctccyagtgtcttagtacactatttaaaaggctatac

SEQ ID NO: 48585 - DNA, 600 bp, Chicken  19866894293862_3
caaataactgtacgatgcactgaggaagacacctccaaagaatgtgaaaagtctgctttcaarcttcccatcttttcatttaaaactgtgctttgaacacttaggaagatgtagatacacgagtacatgagtatagagtttccctgtgtggaggtctcttatttactcctggggaataaatagtttaaattacagatttactgagctaggraaaataaaaatatctgtgtgaaggactgtcttttatcacagaactgaaatctttatttattacagaagggtttcgaagaaagtgagagkgaaaaaataatacacacagacttgctcctgcctccagggatatcaccgacctccgyctattgatttttttttagaagtgactattccaggttgagaagagtaacaaaataatggggcatgagtgagtcagagtgatactgtyttaaataygggtatttcatattccttctgtgtctccyagtgtcttagtacactatttaaaaggctatacatcctctttgttagaagataccaatgggtagaagatatcaggtaattttcatatgaatgctagtcagtgaaatatagacatactagatg

SEQ ID NO: 48586 - DNA, 600 bp, Chicken  19866894293862_4
tttcaarcttcccatcttttcatttaaaactgtgctttgaacacttaggaagatgtagatacacgagtacatgagtatagagtttccctgtgtggaggtctcttatttactcctggggaataaatagtttaaattacagatttactgagctaggraaaataaaaatatctgtgtgaaggactgtcttttatcacagaactgaaatctttatttattacagaagggtttcgaagaaagtgagagkgaaaaaataatacacacagacttgctcctgcctccagggatatcaccgacctccgyctattgatttttttttagaagtgactattccaggttgagaagagtaacaaaataatggggcatgagtgagtcagagtgatactgtyttaaataygggtatttcatattccttctgtgtctccyagtgtcttagtacactatttaaaaggctatacatcctctttgttagaagataccaatgggtagaagatatcaggtaattttcatatgaatgctagtcagtgaaatatagacatactagatgtgtaccaatatgctgcatttgagaagsttttttgagaaaaatcgggcatatcgggc

SEQ ID NO: 48587 - DNA, 600 bp, Chicken  19866894293862_5
cctgtgtggaggtctcttatttactcctggggaataaatagtttaaattacagatttactgagctaggraaaataaaaatatctgtgtgaaggactgtcttttatcacagaactgaaatctttatttattacagaagggtttcgaagaaagtgagagkgaaaaaataatacacacagacttgctcctgcctccagggatatcaccgacctccgyctattgatttttttttagaagtgactattccaggttgagaagagtaacaaaataatggggcatgagtgagtcagagtgatactgtyttaaataygggtatttcatattccttctgtgtctccyagtgtcttagtacactatttaaaaggctatacatcctctttgttagaagataccaatgggtagaagatatcaggtaattttcatatgaatgctagtcagtgaaatatagacatactagatgtgtaccaatatgctgcatttgagaagsttttttgagaaaaatcgggcatatcgggcataaaagcctgatcatattaatgttgctgtgaaaaccagctccttcagagcatgagccacttagaatcacagaatcatacaattat

SEQ ID NO: 48588 - DNA, 600 bp, Chicken  19866894293862_6
gaggtctcttatttactcctggggaataaatagtttaaattacagatttactgagctaggraaaataaaaatatctgtgtgaaggactgtcttttatcacagaactgaaatctttatttattacagaagggtttcgaagaaagtgagagkgaaaaaataatacacacagacttgctcctgcctccagggatatcaccgacctccgyctattgatttttttttagaagtgactattccaggttgagaagagtaacaaaataatggggcatgagtgagtcagagtgatactgtyttaaataygggtatttcatattccttctgtgtctccyagtgtcttagtacactatttaaaaggctatacatcctctttgttagaagataccaatgggtagaagatatcaggtaattttcatatgaatgctagtcagtgaaatatagacatactagatgtgtaccaatatgctgcatttgagaagsttttttgagaaaaatcgggcatatcgggcataaaagcctgatcatattaatgttgctgtgaaaaccagctccttcagagcatgagccacttagaatcacagaatcatacaattattkgaattg

SEQ ID NO: 48589 - DNA, 600 bp, Chicken  19866894293862_7
atagtttaaattacagatttactgagctaggraaaataaaaatatctgtgtgaaggactgtcttttatcacagaactgaaatctttatttattacagaagggtttcgaagaaagtgagagkgaaaaaataatacacacagacttgctcctgcctccagggatatcaccgacctccgyctattgatttttttttagaagtgactattccaggttgagaagagtaacaaaataatggggcatgagtgagtcagagtgatactgtyttaaataygggtatttcatattccttctgtgtctccyagtgtcttagtacactatttaaaaggctatacatcctctttgttagaagataccaatgggtagaagatatcaggtaattttcatatgaatgctagtcagtgaaatatagacatactagatgtgtaccaatatgctgcatttgagaagsttttttgagaaaaatcgggcatatcgggcataaaagcctgatcatattaatgttgctgtgaaaaccagctccttcagagcatgagccacttagaatcacagaatcatacaattattkgaattggtagagatccttaaaaggtcatctggtcc

SEQ ID NO: 48590 - DNA, 600 bp, Chicken  19866894293862_8
ctgcctccagggatatcaccgacctccgyctattgatttttttttagaagtgactattccaggttgagaagagtaacaaaataatggggcatgagtgagtcagagtgatactgtyttaaataygggtatttcatattccttctgtgtctccyagtgtcttagtacactatttaaaaggctatacatcctctttgttagaagataccaatgggtagaagatatcaggtaattttcatatgaatgctagtcagtgaaatatagacatactagatgtgtaccaatatgctgcatttgagaagsttttttgagaaaaatcgggcatatcgggcataaaagcctgatcatattaatgttgctgtgaaaaccagctccttcagagcatgagccacttagaatcacagaatcatacaattattkgaattggtagagatccttaaaaggtcatctggtccaattcccctacaatgaacagtcacctacagctagatcagggtgctcagagtcccatccggcctgaccttgacagtcactaaggacaaggcgtcctccacatctctgggaaagagcaggaggaatggaaactattggccatagatcctt

SEQ ID NO: 48591 - DNA, 600 bp, Chicken  19866894293862_9
aaataygggtatttcatattccttctgtgtctccyagtgtcttagtacactatttaaaaggctatacatcctctttgttagaagataccaatgggtagaagatatcaggtaattttcatatgaatgctagtcagtgaaatatagacatactagatgtgtaccaatatgctgcatttgagaagsttttttgagaaaaatcgggcatatcgggcataaaagcctgatcatattaatgttgctgtgaaaaccagctccttcagagcatgagccacttagaatcacagaatcatacaattattkgaattggtagagatccttaaaaggtcatctggtccaattcccctacaatgaacagtcacctacagctagatcagggtgctcagagtcccatccggcctgaccttgacagtcactaaggacaaggcgtcctccacatctctgggaaagagcaggaggaatggaaactattggccatagatcctttgtatctcaagatttaccaggttgccttgctttgtcttctgtacttgcctgggtgaaataaggagacactacatttttgtggtcaaggcagcttacatgtttttctagccttgagga

SEQ ID NO: 48592 - DNA, 368 bp, Chicken  19866894293863_1
ctattcttaacagcatctcctttcccatacatataagaaacccttctcgaggcggggtgctgcccggcacacagcagccgcgtgccacgccgggcgccgagcctcgctgcaccgacctggatggcagcggcaccgcccggcaatgcagagttgccatggcaactgcccatttttattactgccaggatggtgccagacccccggggaggagcggtgctgcccggccctccccaggccatgtcactgctggttaagtcatcgccgtctgcgcacttcatttccttgctaaggagcaggacrggagctttgtgcagccccagcgctgcgtctgcacgtggtgggatgtttcccacatcccgcgactcgcc

SEQ ID NO: 48593 - DNA, 600 bp, Chicken  19866894293864_1
taggtgatgaataataacaggtcaccatctgtgcattgaacttctatgatgcagctctgagcattacgtaattcagtgtttaaaaagcattcctggaaaacaatgaattcactccctgacctgctcagataactttttgtttcttagcagcctgtgcctatctctgatacacagtcagcagcagcctcagaaacaaagtcaaatactgaataaagcaataaggtgcaaagggtgaatttatgaaagtacatgagcagttttctttttccactaaaagaaattcctactttttctaatctycaagaccaaaaccagttgctgttcctggcactttctgaagttctagctttgggtctccagccattgatctgcacaagtttcaataacctttacttctgcttaataattcaacaaagattggctgctcgtaatctctaatttgaaaggaaagcttaaaacttgcattttattaacactttattaacaaagagggagaaatttctcctctttgaccctactggggactttgctttaaagacagaaagtcagagaaactttgcaggctgaagttcggctcattgcaggcctaagggtagagac

SEQ ID NO: 48594 - DNA, 600 bp, Chicken  19866894293874_1
gagagaagaaagaatagagttcatttcttgtcaagtgagacatgtgggaacaactctttcacggggcttaaataatatgttgtaagaatgaaaatatgtataacacatgcccttttaaatccgtaacttggctactgtgcagctctctatttcatttttttcttgtgagatgaacagtggcgctgcagtgtatttttggaagcatgagttgatctgaattaaatgaagatctgagtcagtttgacactggctgccttaagcagtttgtctctccaactgggtcagcgcacgtcagcgctstggtgttagctaatccaatttgaagccttgggcctttaaagtaaggaaggttgtcgtttgtcattccttccttgttctaggggaatgtcccaaagactaacctgtttccaggtctttctgcaactgctactcgcctgtgctagtgaatctcctgggaggactgcatgagtgtgctgctgcttcctgccaccacagcactgtctgcatcagttacaccagtgctagggaacggtctaagcattccccaggatgcagttctggttccgtttgaattactaggaggcttgggacagaatttct

SEQ ID NO: 48595 - DNA, 600 bp, Chicken  19866894293877_1
ttagaagtagttaagtggccactctggtacctgactttaactctctctcttatctccaaagcctctgttcatagttagatgtcatcttatggatagattgccacaatgggaagcaagagtggcaacactgttttcttcttgtttcatagcatactcagaacctcacaggcaccattaaatccattaatgattaactatatcacagattaagcctgacaagataaaaatcaaataagtaatacatgctgaagtggcatgctatgccaaaacctatttcatcaagcactatgacagaaacckcatactatttttttctcttagtgttactgatttcattaggagacaaggagtggcatcttctatgcttctaaacctcagcagcaatgtgttacagacaaaacacttctgtcactgagacccayctccacatggactcataagagccactctgtattttaccagacatgatagctagtgactaggcagttaatgccagatttctcactcctgttttgtcccagacaaaacatcagtggcagcaagtcatgggcttccaactgggctgcatgcagatctcaatccttgctgtacatccctctg

SEQ ID NO: 48596 - DNA, 600 bp, Chicken  19866894293877_2
caacactgttttcttcttgtttcatagcatactcagaacctcacaggcaccattaaatccattaatgattaactatatcacagattaagcctgacaagataaaaatcaaataagtaatacatgctgaagtggcatgctatgccaaaacctatttcatcaagcactatgacagaaacckcatactatttttttctcttagtgttactgatttcattaggagacaaggagtggcatcttctatgcttctaaacctcagcagcaatgtgttacagacaaaacacttctgtcactgagacccayctccacatggactcataagagccactctgtattttaccagacatgatagctagtgactaggcagttaatgccagatttctcactcctgttttgtcccagacaaaacatcagtggcagcaagtcatgggcttccaactgggctgcatgcagatctcaatccttgctgtacatccctctgtccctgtagagagctcctgagggaaaacatggttgctggtgggtgagcgggcaccaatctgtcctctgtggaaagctgtctgctcctggcagcacagggaaccaatggacaacagcaaagac

SEQ ID NO: 48597 - DNA, 599 bp, Chicken  19866894293881_1
  misc_feature (1)..(93): n is any nucleotide
nnnnnnnnnnnnnnnnnnnnnnnnnnnnnnnnnnnnnnnnnnnnnnnnnnnnnnnnnnnnnnnnnnnnnnnnnnnnnnnnnnnnnnnnnnnnnaatttgacgagctgtgtcttaatctcactgtcaggtgtacaaatattaaaataacctcctctctctcttagtaattggagcgagacaggcagctcttaggaaatcaaacacattatgaattgtttttcattcaagttaagaagaaataaatattttttcatcttgagaacttcctgataattctaagcctttataattaaaaaaaawtctgaattgcccatttcaaaacaggggtagctaaagatttaaaattgttcacttagtccaagatttggcaagactactgccaaagatcacataagtacagacacatacacacacaaaagccaataagctcatttttatgcaggtcaaagagcataaatccatacagacagcagctgttgtctgaatgtcagctgactccttcaaatctaaatcacagattaaggagaaatccaaatctggactttgtataatcagctcaactgtttttctagccataaattccagcataaagtgaaaaa

SEQ ID NO: 48598 - DNA, 600 bp, Chicken  19866894293883_1
agagcaataaggtctcccctgagcctcctcttctccagactgaacaatcccagctccttcagccgctcctcataaggcctgtgctccaggccttctttcttaatactttctgaaacctgaaggcaggggaaaggtaatttctatctctattattttccagcctcactgatgcaagacagggcaagaagaaggtggtcccagtatccttactttttgcctctaacataatttatgattgtgcctctgtatggactgtggcttttcttggcataaaacggagtgaaaccaatccccttgcarcattgtatgctsagctgcttcagatagctccatgaagctgaggagagtttcttcatttgctgcttgcaaaagataaaagtgcaagctgcagataaaaggacgctttgtcagactcggggagataacccaaaataagccacagcaaagtcataccagctctcaatggctcccagcctctctttaaattaatgtttaggtttcatacaaggtgacaataaagatcctcaactgcatagctacgctaccaagcacagctcaatgatctgcttgaggaacttcccaggatttctccaggttctg

SEQ ID NO: 48599 - DNA, 600 bp, Chicken  19866894293883_2
tctcccctgagcctcctcttctccagactgaacaatcccagctccttcagccgctcctcataaggcctgtgctccaggccttctttcttaatactttctgaaacctgaaggcaggggaaaggtaatttctatctctattattttccagcctcactgatgcaagacagggcaagaagaaggtggtcccagtatccttactttttgcctctaacataatttatgattgtgcctctgtatggactgtggcttttcttggcataaaacggagtgaaaccaatccccttgcarcattgtatgctsagctgcttcagatagctccatgaagctgaggagagtttcttcatttgctgcttgcaaaagataaaagtgcaagctgcagataaaaggacgctttgtcagactcggggagataacccaaaataagccacagcaaagtcataccagctctcaatggctcccagcctctctttaaattaatgtttaggtttcatacaaggtgacaataaagatcctcaactgcatagctacgctaccaagcacagctcaatgatctgcttgaggaacttcccaggatttctccaggttctggaacaataatta

SEQ ID NO: 48600 - DNA, 599 bp, Chicken  19866894293888_1
  misc_feature (1)..(52): n is any nucleotide
nnnnnnnnnnnnnnnnnnnnnnnnnnnnnnnnnnnnnnnnnnnnnnnnnnnnatttgtagacttgttaatggcttatccgcagttccacaaagaataaaacagaaagcttcttacagctcagactgagtcccaccaccagatcactttgttttttcattagcaggtgaaccacagaccacagagatattgaaaatcatactacagaaattacagctttcacttaaaagtaagtttttcatctactgcaaataaaaatagtaactgcattattcaaaacagttatagcaattcttcaaacygtaatatagcaaacctcattctgagcccttttattcataaaatctatcayctgagagcttattaaaataacatagggaaaaaaaaaaagaaaaaagaaaaacaggcataatttacactcctttccttwtcacttttccccaacatcagcacaatttacaaatgttttctgtcagctatttcacttcatgtttgttctccactgtcatcatgcactttgttttcatcagtctctctgcccttctctggctgtattaacttgatttttctagctccaacatcctaccagagacgtgtccca

SEQ ID NO: 48601 - DNA, 599 bp, Chicken  19866894293888_2
  misc_feature (1)..(2): n is any nucleotide
nnatttgtagacttgttaatggcttatccgcagttccacaaagaataaaacagaaagcttcttacagctcagactgagtcccaccaccagatcactttgttttttcattagcaggtgaaccacagaccacagagatattgaaaatcatactacagaaattacagctttcacttaaaagtaagtttttcatctactgcaaataaaaatagtaactgcattattcaaaacagttatagcaattcttcaaacygtaatatagcaaacctcattctgagcccttttattcataaaatctatcayctgagagcttattaaaataacatagggaaaaaaaaaaagaaaaaagaaaaacaggcataatttacactcctttccttwtcacttttccccaacatcagcacaatttacaaatgttttctgtcagctatttcacttcatgtttgttctccactgtcatcatgcactttgttttcatcagtctctctgcccttctctggctgtattaacttgatttttctagctccaacatcctaccagagacgtgtcccaaatacttgttacatttgttcacatgtatttcttaagcattatcagcatgt

SEQ ID NO: 48602 - DNA, 600 bp, Chicken  19866894293888_3
cgcagttccacaaagaataaaacagaaagcttcttacagctcagactgagtcccaccaccagatcactttgttttttcattagcaggtgaaccacagaccacagagatattgaaaatcatactacagaaattacagctttcacttaaaagtaagtttttcatctactgcaaataaaaatagtaactgcattattcaaaacagttatagcaattcttcaaacygtaatatagcaaacctcattctgagcccttttattcataaaatctatcayctgagagcttattaaaataacatagggyaaaaaaaaaagaaaaaagaaaaacaggcataatttacactcctttccttwtcacttttccccaacatcagcacaatttacaaatgttttctgtcagctatttcacttcatgtttgttctccactgtcatcatgcactttgttttcatcagtctctctgcccttctctggctgtattaacttgatttttctagctccaacatcctaccagagacgtgtcccaaatacttgttacatttgttcacatgtatttcttaagcattatcagcatgttgggttgaagcctggatagcccatagaag

SEQ ID NO: 48603 - DNA, 600 bp, Chicken  19866894293888_4
tcccaccaccagatcactttgttttttcattagcaggtgaaccacagaccacagagatattgaaaatcatactacagaaattacagctttcacttaaaagtaagtttttcatctactgcaaataaaaatagtaactgcattattcaaaacagttatagcaattcttcaaacygtaatatagcaaacctcattctgagcccttttattcataaaatctatcayctgagagcttattaaaataacatagggaaaaaaaaaaagaaaaaagaaaaacaggcataatttacactcctttccttwtcacttttccccaacatcagcacaatttacaaatgttttctgtcagctatttcacttcatgtttgttctccactgtcatcatgcactttgttttcatcagtctctctgcccttctctggctgtattaacttgatttttctagctccaacatcctaccagagacgtgtcccaaatacttgttacatttgttcacatgtatttcttaagcattatcagcatgttgggttgaagcctggatagcccatagaagatttaccaagcattttctctgcttcctatcyaaaatcatcgatgccctgt

SEQ ID NO: 48604 - DNA, 600 bp, Chicken  19866894293888_5
atttacactcctttccttwtcacttttccccaacatcagcacaatttacaaatgttttctgtcagctatttcacttcatgtttgttctccactgtcatcatgcactttgttttcatcagtctctctgcccttctctggctgtattaacttgatttttctagctccaacatcctaccagagacgtgtcccaaatacttgttacatttgttcacatgtatttcttaagcattatcagcatgttgggttgaagcctggatagcccatagaagatttaccaagcattttctctgcttcctatcyaaaatcatcgatgccctgtttctggtcataaagattttaaggaaattcctttttgattaaaaaataatgtgaaaactttccttaagtgcagtttttcagacttcaaagcattaagagaaactgaggcaaagtgttcctgccatctttctaccttcaacaagtttagttaagcagcttctcctatgtatacactcagcaaggcttcaaattcattaatctggytgaagagttaaaagctgctggacagcaatacacagagctggggagactgaagtcttttttgtcctctatcaatgcaat

SEQ ID NO: 48605 - DNA, 600 bp, Chicken  19866894293888_6
taagcattatcagcatgttgggttgaagcctggatagcccatagaagatttaccaagcattttctctgcttcctatcyaaaatcatcgatgccctgtttctggtcataaagattttaaggaaattcctttttgattaaaaaataatgtgaaaactttccttaagtgcagtttttcagacttcaaagcattaagagaaactgaggcaaagtgttcctgccatctttctaccttcaacaagtttagttaagcagcttctcctatgtatacactcagcaaggcttcaaattcattaatctggytgaagagttaaaagctgctggacagcaatacacagagctggggagactgaagtcttttttgtcctctatcaatgcaatgccacatccatgctgaatgcttttacttccctttctgcctgcactcccctgcccccacccagtgctgtcattagtagtgaaacatctttatttttcacaagttaattcttaaaagcattgataaaatagagagggatttagtaggactgaaaacgtccctaaactggactcaactctggatgtgaggagtatgacaaaccccaaagcagaatctgttcatgt

SEQ ID NO: 48606 - DNA, 600 bp, Chicken  19866894293901_1
aatgagttgatgtcctgagcgctcaaatgtgaagtgactgaaggcctgcaaagaacacagatgtctgagaaaactcacccgtgaactaccaaaaccagcaacacttcctgtgactgctcagaaattgccaatgagaacagatacctgttctagtgaaacagacctagtaggaacatcatgatgtaaacagtaagagacgaagaggataacacagttttgtccctccataagcctggagtcgcacagattacacttgggtataaattctggctgactggctcatgtgaaatcatgcaagtmaatcaagcaggattttgcccctgatcttaacctggagggcataaccaaaaacactagcagttcctcataaattgttttactgatcattgccactcaggctgcaacaaaatacccaatctcctatgcagtggctaactaaattcaacattatttgttggggaagaagtaattgcttcccagggtccaaatgtggatgaaaattgcagacatctgctgaacgcaaagaagtacctgttgcctctgtgacactgcttctccaacctggcctgactcaaagacgggctaacagggataggggtg

SEQ ID NO: 48607 - DNA, 600 bp, Chicken  19866894293901_2
ggatgaaaattgcagacatctgctgaacgcaaagaagtacctgttgcctctgtgacactgcttctccaacctggcctgactcaaagacgggctaacagggataggggtgaagagcagcatgagaacatgctttattgctctttccagtacaggaaattctgtttcccatacagtcttctccttcagagctgctaggcagagggaataaccagcagccagcagagccagtgcagtatcacctctgcataaacattctggcagtgccaaagctctgcaactctcggacactgcttctgccaycaygaaaagccccaccacattatgcaaaaagaaaacatgagcatcccctggaattctccttcttcaactgtgcccactgggaggccctccagaacagctgatctggctctacattcacatatcaracagtgaaatgtacatttgtatgctttaaatgctgtgttccaagaatgaggtataaaaagccctttggcagaaagctgagccattaggatcttctgggaaggcctccaaaaaagcactgccaggcctgggggaggtgactggcggtgataaacaaacactttcactgcagcaaat

SEQ ID NO: 48608 - DNA, 600 bp, Chicken  19866894293901_3
tgaaaattgcagacatctgctgaacgcaaagaagtacctgttgcctctgtgacactgcttctccaacctggcctgactcaaagacgggctaacagggataggggtgaagagcagcatgagaacatgctttattgctctttccagtacaggaaattctgtttcccatacagtcttctccttcagagctgctaggcagagggaataaccagcagccagcagagccagtgcagtatcacctctgcataaacattctggcagtgccaaagctctgcaactctcggacactgcttctgccaycaygaaaagccccaccacattatgcaaaaagaaaacatgagcatcccctggaattctccttcttcaactgtgcccactgggaggccctccagaacagctgatctggctctacattcacatatcaracagtgaaatgtacatttgtatgctttaaatgctgtgttccaagaatgaggtataaaaagccctttggcagaaagctgagccattaggatcttctgggaaggcctccaaaaaagcactgccaggcctgggggaggtgactggcggtgataaacaaacactttcactgcagcaaatctc

SEQ ID NO: 48609 - DNA, 600 bp, Chicken  19866894293901_4
catgctttattgctctttccagtacaggaaattctgtttcccatacagtcttctccttcagagctgctaggcagagggaataaccagcagccagcagagccagtgcagtatcacctctgcataaacattctggcagtgccaaagctctgcaactctcggacactgcttctgccaycaygaaaagccccaccacattatgcaaaaagaaaacatgagcatcccctggaattctccttcttcaactgtgcccactgggaggccctccagaacagctgatctggctctacattcacatatcaracagtgaaatgtacatttgtatgctttaaatgctgtgttccaagaatgaggtataaaaagccctttggcagaaagctgagccattaggatcttctgggaaggcctccaaaaaagcactgccaggcctgggggaggtgactggcggtgataaacaaacactttcactgcagcaaatctcacagaacactttgttcccaaactgtgaaaacacagcactgaacataaatgtcctgcttacrttgagcatcacataaataccttaaagacagggaaaaatgaaactaacctaactctcaactc

SEQ ID NO: 48610 - DNA, 600 bp, Chicken  19866894293901_5
caactgtgcccactgggaggccctccagaacagctgatctggctctacattcacatatcaracagtgaaatgtacatttgtatgctttaaatgctgtgttccaagaatgaggtataaaaagccctttggcagaaagctgagccattaggatcttctgggaaggcctccaaaaaagcactgccaggcctgggggaggtgactggcggtgataaacaaacactttcactgcagcaaatctcacagaacactttgttcccaaactgtgaaaacacagcactgaacataaatgtcctgcttacrttgagcatcacataaataccttaaagacagggaaaaatgaaactaacctaactctcaactccccataaaacactaatttgatatgctgatcagtttgcattctttgcaaagtattttaaaagctctgtgagctacaagaattccaatcatttgaaatttatagctgtgtttttataagcaatctcagattcacctactcagacactgcagctgataacacatattcttaaacacaaatgcagacgatctttatttggatgaattagatacctgccacctcctcctgtgtattactctgag

SEQ ID NO: 48611 - DNA, 487 bp, Chicken  19866894293902_1
actggaaaaggtacaaagtgatgaacaaataagaagcttcccagtatttcttatcataggcataaacgtttaattctatgatcgacagacacgtctccaatttatctttaaattaggcattattaaaagccagtataattttgtattaggtttcagactttctggaagtttgctacaatacacccgaatgtaagatacatgcaaaaaccattttttttctccttctttaaataaaaaatgactgttgtgctggagaatgctaagcgacatgcacaaaacagcagatctcccagatgtgastacggaaaattggtcttgattacatcattctgtaagaaattcctcttcacaaagggaaagcattttaacacattataaaagttcatattaatcttcaaaataagttttaaatagaaagtgttgaattaccttcgtcctaatggagctgaaagtaattgcagagcagaagaaagctgtacttcttttt

SEQ ID NO: 48612 - DNA, 600 bp, Chicken  19866894293905_1
accagagcagtgtgtcccataaatcacagcactgacaactttagcagggaaaatgattcctgcatcttcatgtccaggatggctgaagtggttcagagccttccaggcagagtgatgtggtctctgcagagtggctcacagtagtgcttcaggccgtgtggtctgtgatagtcttgtgcactactgtgtagggggcagatgctatgggctgggcttcgggacatggtttagtgggcatgatgactagttgatctgagtagtcttttccaacctaaacgattctgtgattctaagctcacrcaggttttcttccctaggattccagctgaggcactttcccactttccctaagggctaaacagtgggaaagtcaggaaagaggctcaaagggcatagttgagtgctgtaactgtgtgataaaggctttggccagcaacacttcattctgcagggtcaggttccctgctcaccttgcagatcacctgggatcctggctgttctctgactgtatttgtgggtaggctgcatcagagggcacatgcacagaggacagcatctgagtggattagggctgtttcaatccatttgttttcaaacatg

SEQ ID NO: 48613 - DNA, 410 bp, Chicken  19866894293905_2
gactgtatttgtgggtaggctgcatcagagggcacatgcacagaggacagcatctgagtggattagggctgtttcaatccatttgttttcaaacatgctctgtttggtttgggccatgtgggggtttgtttgataaaggaagaaccattctaattgaattctctgggtcaatggcagttcacccaggggggagggcaagggctttgccagggacccactattggacaggatgctgcaagaacttggcctttcatcctggcaagaacccaggggtcaagtctgccagcgggcctcacacarcagagggatgcccaccgcccactcccagctctgtcaagactttcacctggtgcaagaggataatgtgagtgtggggttgtgctgatgggccaggttgttggtgaggagtg

SEQ ID NO: 48614 - DNA, 599 bp, Chicken  19866894293906_1
  misc_feature (1)..(28): n is any nucleotide
nnnnnnnnnnnnnnnnnnnnnnnnnnnncattttaacaaaaacactgagaatttgcaatatcctttcttgtttgtgtactctgactcctccaagcaatcctttgtgctggacatcatgagctgttaacagatacagatgatgattgaaattcatatagactggggcccaggcacaatgctctgagacatgggagaagcaaaagcagtaaagcaaaatgtttgctactcaaaaagagaaaaaggcaagaatcgtgaaattgcttgagttgaaagggacctttaaaggtcatctagtctaaytcccctgcaatgaacaggaacacctgcagctccatcaggtgctcagagccccatccagactgactctgaatgtccccagggatggggcgtccaccacatttctgggcagcctgttccagtgcctcagcacccttactgtaaaaaacctcttccttatatccagtctaaatcttctgtcttttagttagaaataattttcccttgacttgacagggctgagagtagctctgcggagaaggactttgggggtcctggtggatgacaagctggacatgagccagcagtgtgcgcttgcagcc

SEQ ID NO: 48615 - DNA, 600 bp, Chicken  19866894293907_1
ttgttcaagctcatctctagctgcacacttctatcatctgttgtgctttactattctcttggacatatggctaggacgataggaaagaatcattaagtggtgagtgagttttattctgttttgagaaaggtgaaaaaaaaaagagaaaaaaaacaaaaaagaaaacaaacaaacaaaaaaacctcaatgatcagttactatttaggacaaaggatctatctgtcatgaattattaataacagccaccatgagcaggttttgtattatttgtagagatcatgccatggtgagaatgctaamgtaggatctgtacacaccatctcacagatcctatatgggtcatttcctatctttctccttgtcctagagcaagtggagataacttctttatttgtaccttcaggtgttttattcaggcagtactcacaacttgttggcatttcatcctgttttgattaaaaaacctagaggagcgatatctaaacggtaaggaaaatcaaaygaagaatctatgtttagtgcaactctccaataaggagtaggattgctgccaagagcaatattattccaaaagagcatatttattatctccattgaggt

SEQ ID NO: 48616 - DNA, 598 bp, Chicken  19866894293907_2
taggacaaaggatctatctgtcatgaattattaataacagccaccatgagcaggttttgtattatttgtagagatcatgccatggtgagaatgctaamgtaggatctgtacacaccatctcacagatcctatatgggtcatttcctatctttctccttgtcctagagcaagtggagataacttctttatttgtaccttcaggtgttttattcaggcagtactcacaacttgttggcatttcatcctgttttgattaaaaaacctagaggagcgatatctaaacggtaaggaaaatcaaaygaagaatctatgtttagtgcaactctccaataaggagtaggattgctgccaagagcaatattattccaaaagagcatatttattatctccattgaggttctgtttagtaatatgatgtgacagagagatgatgcattgcatctcatgctgaatcctcatgttataaaagcgcaatgagggagccctagctatttgttcctgagagcaaacacttctctagcataaggctgctttcactcacccacttgcaacgttgcagaagagagagatcaatacaaagcacagtaaagaagcacag

SEQ ID NO: 48617 - DNA, 599 bp, Chicken  19866894293919_1
  misc_feature (1)..(81): n is any nucleotide
nnnnnnnnnnnnnnnnnnnnnnnnnnnnnnnnnnnnnnnnnnnnnnnnnnnnnnnnnnnnnnnnnnnnnnnnnnnnnnnnnatatacacccagaagggcactaaagtcaacagtgtgttttgctatacatcaacgtgggagcaaagctgtcttgaatgcatgaatcagggagaagtgggtgggtgatcttgggagcatttggaagactcttgttaaaattccacctccagcatgatggattacttcttgatttctgacaaagcactgtagaaagtacttaaactgtcccttgcaaggacractttgcatttcaagtgcaaatcatcatccttgcaagaagccaagctgtgcaacatcactggtgcttccagagcactaagatgaaaaaagattcccaggttccaccacgatcatggactccaccccaktttcatgtaaggcaagctaaaacactgtgctcttaatatgaatacactggtattaattttgratgacaaatactcacaagtttatctgcagatgttttttccttcattaccatgaactatctttaagtgtgctgtttttttccccatcgtctcattgctagagtacaggat

SEQ ID NO: 48618 - DNA, 600 bp, Chicken  19866894293919_2
atcaacgtgggagcaaagctgtcttgaatgcatgaatcagggagaagtgggtgggtgatcttgggagcatttggaagactcttgttaaaattccacctccagcatgatggattacttcttgatttctgacaaagcactgtagaaagtacttaaactgtcccttgcaaggacractttgcatttcaagtgcaaatcatcatccttgcaagaagccaagctgtgcaacatcactggtgcttccagagcactaagatgaaaaaagattcccaggttccaccacgatcatggactccaccccaktttcatgtaaggcaagctaaaacactgtgctcttaatatgaatacactggtattaattttgratgacaaatactcacaagtttatctgcagatgttttttccttcattaccatgaactatctttaagtgtgctgtttttttccccatcgtctcattgctagagtacaggatttctcatggcctaaggtgggtttttttggtgggtatcctttgttaaaatgctggcagcactatactgctgtgaataagattactgcctatgctctgacacttatctcatctgtcactgtctcttctaaa

SEQ ID NO: 48619 - DNA, 600 bp, Chicken  19866894293919_3
gggagcatttggaagactcttgttaaaattccacctccagcatgatggattacttcttgatttctgacaaagcactgtagaaagtacttaaactgtcccttgcaaggacractttgcatttcaagtgcaaatcatcatccttgcaagaagccaagctgtgcaacatcactggtgcttccagagcactaagatgaaaaaagattcccaggttccaccacgatcatggactccaccccaktttcatgtaaggcaagctaaaacactgtgctcttaatatgaatacactggtattaattttgratgacaaatactcacaagtttatctgcagatgttttttccttcattaccatgaactatctttaagtgtgctgtttttttccccatcgtctcattgctagagtacaggatttctcatggcctaaggtgggtttttttggtgggtatcctttgttaaaatgctggcagcactatactgctgtgaataagattactgcctatgctctgacacttatctcatctgtcactgtctcttctaaacttatcccatctgtcaatgtctttctaacaaaaccctgcacagcaaaaaagcccaaagatat

SEQ ID NO: 48620 - DNA, 600 bp, Chicken  19866894293922_1
attcagatcgctgacaaaaccagcaaagggagaaacgctgatctaccgccctgggtatagaccatgcaggatctgtggtgcatcaacactgctgatcaccaagtccagagcatcacactttgatctggcaaaacttgtgctccagaaaaaccacaggctatgcaatttcatgtaaacaaaggtgatccatgcacccaaaaacccactgcaccctaattttgcatctcatttctctgctccttgtacttggctgcactgaccacaagtgcagctaagtagccaaataaacttgtgaagacrtgaggctagagagctggcaaagcaaatttcatgtgaaggaaagactgtgaaagggatagctaaattccactacagcattctacaaattcttggtgacatagatttaacctatgccaacctccagaacaaaacactagaaataaattgagtaccaactgtacgtgggtccacagatcatcttggttggcatttgaaaaggcaaattctttcaggtatgactgcaggaaaacaaacagacacatcagaattcacaaaggttcaatgaaaaacatcagcaaggcagacagtaatttgtacact

SEQ ID NO: 48621 - DNA, 600 bp, Chicken  19866894293924_1
agatttcatagaatcacagaatcatagaatggcctgggttgaaaaggaccacgatgatcatcttgtttcaaccccctgctatgtgcagggttgccagccaccagcccaggctgcccagagccacatccagcctggccttgaatgcctgcagggatggggcatccacagcctccttgggcaacctgttcagtgcgtcactaccttcggggtgaaaaacttcctcctattatctaacctacacctcccctgtctcagcttaaaaccattcccccttgtcctttctctgcatctcttatagaragagatcaccagggaatttccccctagcagcaagrcctggctcagccagagcacagcgctctcctacagccagcacgtgttacacttggactacaacccatcctaccctaaaattacggcttttgtcagctggtgatatcaatcttctctctaatttctttcagagcggagcgagctaaatcctagatgctaacagctgattttttttcccttatactgcaggccaccgactcggattatgaagacgagctgccaaagcattcctttgtgaaccattacatgagcgatcccacgtactac

SEQ ID NO: 48622 - DNA, 600 bp, Chicken  19866894293924_2
gggttgaaaaggaccacgatgatcatcttgtttcaaccccctgctatgtgcagggttgccagccaccagcccaggctgcccagagccacatccagcctggccttgaatgcctgcagggatggggcatccacagcctccttgggcaacctgttcagtgcgtcactaccttcggggtgaaaaacttcctcctattatctaacctacacctcccctgtctcagcttaaaaccattcccccttgtcctttctctgcatctcttatagaragagatcaccagggaatttccccctagcagcaagrcctggctcagccagagcacagcgctctcctacagccagcacgtgttacacttggactacaacccatcctaccctaaaattacggcttttgtcagctggtgatatcaatcttctctctaatttctttcagagcggagcgagctaaatcctagatgctaacagctgattttttttcccttatactgcaggccaccgactcggattatgaagacgagctgccaaagcattcctttgtgaaccattacatgagcgatcccacgtactacaactcctggaagcggcagcagaaaggggtgaagca

SEQ ID NO: 48623 - DNA, 600 bp, Chicken  19866894293932_1
atctatgtctctcctgtactgaggactccacatctggatgcagtgctccaggtgaggcctcaccaatgcagagcagagggcaggatcacctctctcaccctgctggccatgcttcttttgatgcagctcaggatacagttggctttctgggctgtgagggcacattgctagcctacatctagcttgccatccaccagtaccaccatgtcctttcctgcagggctgcactccatccttacatcccccagctcgtactgaagttgacgtgatccaggtgcaagaccttacacttggctttgytgaacctcctgaatttctcctgggcccattctcgagcttgtctaggtckctctggatggcagggcaaggaaagagacaacsatatgaaggaggcaaccacaaactaacttagggaagaggaaggaatggggcagctaatttaaaaattttccacaactcaagagagagcattatagtgaaaagtcactgttggttacattgagttttgttgcaactgataggtctaacggatgctccactttaaagagagtgtgataagtgaaaattcctaccagaaaaagaaaaaagacaaaaagaaag

SEQ ID NO: 48624 - DNA, 600 bp, Chicken  19866894293932_2
aggtgaggcctcaccaatgcagagcagagggcaggatcacctctctcaccctgctggccatgcttcttttgatgcagctcaggatacagttggctttctgggctgtgagggcacattgctagcctacatctagcttgccatccaccagtaccaccatgtcctttcctgcagggctgcactccatccttacatcccccagctcgtactgaagttgacgtgatccaggtgcaagaccttacacttggctttgytgaacctcctgaatttctcctgggcccattctcgagcttgtctaggtckctctggatggcagggcaaggaaagagacaacsatatgaaggaggcaaccacaaactaacttagggaagaggaaggaatggggcagctaatttaaaaattttccacaactcaagagagagcattatagtgaaaagtcactgttggttacattgagttttgttgcaactgataggtctaacggatgctccactttaaagagagtgtgataagtgaaaattcctaccagaaaaagaaaaaagacaaaaagaaagcatactcaagataaaacctctgggcagagttgtttggcaaggagagcaa

SEQ ID NO: 48625 - DNA, 600 bp, Chicken  19866894293932_3
aggatcacctctctcaccctgctggccatgcttcttttgatgcagctcaggatacagttggctttctgggctgtgagggcacattgctagcctacatctagcttgccatccaccagtaccaccatgtcctttcctgcagggctgcactccatccttacatcccccagctcgtactgaagttgacgtgatccaggtgcaagaccttacacttggctttgytgaacctcctgaatttctcctgggcccattctcgagcttgtctaggtckctctggatggcagggcaaggaaagagacaacsatatgaaggaggcaaccacaaactaacttagggaagaggaaggaatggggcagctaatttaaaaattttccacaactcaagagagagcattatagtgaaaagtcactgttggttacattgagttttgttgcaactgataggtctaacggatgctccactttaaagagagtgtgataagtgaaaattcctaccagaaaaagaaaaaagacaaaaagaaagcatactcaagataaaacctctgggcagagttgtttggcaaggagagcaagtgagtgagagagtatgcacacgagtgaagat

SEQ ID NO: 48626 - DNA, 600 bp, Chicken  19866894293933_1
tattttcagtatgcaacaaacacatatttaaatatatttatgaatacaattacatagattataaaagtatcataaaaacataaattcaaaagatagctatgcctgtaaatatttacattcacttcttcaatgaagactgcttactcttgtattaaaaacgaacaaaacaaaaaacactaggaaaaggaaaacaaacaaaacaacctcttctcatgacaaaaatgaaccaaacacaggaactgaacatgagaaacagtagcagctccttcaaatccaagaataattgttacagcttaaatsaagcaagcaccagaaaagttactacttaagggtttaagctttcaaaaataacaacaaaaactacatgaaaatactctcttgcatgcagaacaaaggcaatattatatgcaagactcttcttacctgaagaaagactcgcttaggcttcggattagctgcatcagaactgtaaggaaagaagattccactacaaacgagaatcagagtgactacaaacacagcagttaaagttattagcgtcgtttttgtacttttgacaaggtaaatgaagttaatctagagaacaaaaagacagctcag

SEQ ID NO: 48627 - DNA, 587 bp, Chicken  19866894293943_1
caaaaagtataaagaatgtgaagcaactaacagctggaggaggaagacagccacctatggtatgagccactgccactgctgaatgtgctcagactatcacagagggcaggcagcatggaaacctgaaacaaggagaagggaagagtgaaggagagagaagaggaaaaacaaatcccagctatctttacgtgttttgaagattttaaaattacgcccatgctgacagtttggagacagatgcagctgtgcaacctcagctgctggctgccttttaccgtggcagcccacagagggaaaagrggtcaggaggatgagcaccagttttcattcacgatcttcacacaaatttgatgcctgtcacttaaaacaagaataccaaactctggtttggttccgctctcaaaccagtttttatttcttctcatttaattctcattcgtaaggaaaagcagaatcagagttttggatgtggcatctccgatagcgattcattctgctgggagactgccgcaggaatagatgccactacaggttaaggcactgaacccaaagcacttttggcaatctctttcctaaccgcccttcca

SEQ ID NO: 48628 - DNA, 600 bp, Chicken  19866894293944_1
acacagtcatttcctctggtctgctcaagtgtaggcttgattacgcgattataaatatactcacattagtgtggcgttctcctgtatgaaagtgagaagtcagcactgtgatggcagctgtttcagaaatgagttctgtcacatattgcagctttgaatgtcttcacagaaaacagtagtgaaatatgagaaaaccttgtggagtttgctgatacttagctcttagagccctgcaaacaaatggactaattggatttttgatcagaaatccttcatatccatgttagagttttctgcttwtaaatacttacttgggtagtgggaggagagagaaatcccaaatattgctacctttctatgcaattcattaaagcatgtagaaagaaaataatgattaattactgtttttttttttcttcctgtcttctgtttttctcccattttgtttttactgcttaggtgctgccaccctcctggaaatatggggtctgaaaacccaagtccgcagaaccctggctgtaagattatgacctttcgtcccactctcgaggagtttcgggagttcgggaaatacgttgcttacattgaatcacaaggagc

SEQ ID NO: 48629 - DNA, 600 bp, Chicken  19866894293946_1
agcagcaaaaaagacttcctggagcgccttcctttgaacatttcttttagcccgcacaggccaattcaatcataagctgccgtacacttcccctcctttgcattcctctgctgtcacgtgcttgctaacaaagtagggaaaagggcacgggccggaggagcatgcgctggattttcaatttgacttgccaatgtcagtaaggcagcgcccacatccaccggcttgtgaacgctgaaacaataacttctcgtagctccaggcgtttgggtcagcaaatgcagaataacctttcccagcagsgagccataaacaagagctaagcagtttggccaaccttactgaaaggaaaagagagaaacgaacgcatatgttcgccatcagccttgagtggctattttcatccttygagygttattttcgtagtgttaacgtatcttcaacacacgtctgctccttaccaaaatcaaacagcgttaaaggagaaagctgcctgctcctttttcttatctggtttcagttcaattgggacatgctgtaacagccaccaacgcttctccttctccctcttcgtacctcagcttgagccaatcaaagcttacc

SEQ ID NO: 48630 - DNA, 600 bp, Chicken  19866894293946_2
tctgctgtcacgtgcttgctaacaaagtagggaaaagggcacgggccggaggagcatgcgctggattttcaatttgacttgccaatgtcagtaaggcagcgcccacatccaccggcttgtgaacgctgaaacaataacttctcgtagctccaggcgtttgggtcagcaaatgcagaataacctttcccagcagsgagccataaacaagagctaagcagtttggccaaccttactgaaaggaaaagagagaaacgaacgcatatgttcgccatcagccttgagtggctattttcatccttygagygttattttcgtagtgttaacgtatcttcaacacacgtctgctccttaccaaaatcaaacagcgttaaaggagaaagctgcctgctcctttttcttatctggtttcagttcaattgggacatgctgtaacagccaccaacgcttctccttctccctcttcgtacctcagcttgagccaatcaaagcttaccacaattttcctgttgttacaaacaaaatgctggtaggttggaagtaagctcttcagctgggaaaacacacatcaagccctgagagacctcacggtccaaaaatgct

SEQ ID NO: 48631 - DNA, 600 bp, Chicken  19866894293946_3
ctgtcacgtgcttgctaacaaagtagggaaaagggcacgggccggaggagcatgcgctggattttcaatttgacttgccaatgtcagtaaggcagcgcccacatccaccggcttgtgaacgctgaaacaataacttctcgtagctccaggcgtttgggtcagcaaatgcagaataacctttcccagcagsgagccataaacaagagctaagcagtttggccaaccttactgaaaggaaaagagagaaacgaacgcatatgttcgccatcagccttgagtggctattttcatccttygagygttattttcgtagtgttaacgtatcttcaacacacgtctgctccttaccaaaatcaaacagcgttaaaggagaaagctgcctgctcctttttcttatctggtttcagttcaattgggacatgctgtaacagccaccaacgcttctccttctccctcttcgtacctcagcttgagccaatcaaagcttaccacaattttcctgttgttacaaacaaaatgctggtaggttggaagtaagctcttcagctgggaaaacacacatcaagccctgagagacctcacggtccaaaaatgctatga

SEQ ID NO: 48632 - DNA, 600 bp, Chicken  19866894293946_4
gttaacgtatcttcaacacacgtctgctccttaccaaaatcaaacagcgttaaaggagaaagctgcctgctcctttttcttatctggtttcagttcaattgggacatgctgtaacagccaccaacgcttctccttctccctcttcgtacctcagcttgagccaatcaaagcttaccacaattttcctgttgttacaaacaaaatgctggtaggttggaagtaagctcttcagctgggaaaacacacatcaagccctgagagacctcacggtccaaaaatgctatgactgaaaatctgtaytgccatctgctacacacaaagcctcttcattgtgctattgctgcrccttcaggatactgatgctacaattaccaaagtttaactttttagcttctgctgcccatagactcaatgatttcagggtgcagacaccaaagagtccacttcatattacagcctacacgttctgtacccatgaaggagatgaggtctcttatttaaacgtagttttcacctccatcgctcctcttcctgcagatgaagcaaattaacaaacacaggggtaagatggagagaaatcttattcacatggcccagaac

SEQ ID NO: 48633 - DNA, 600 bp, Chicken  19866894293946_5
agcgttaaaggagaaagctgcctgctcctttttcttatctggtttcagttcaattgggacatgctgtaacagccaccaacgcttctccttctccctcttcgtacctcagcttgagccaatcaaagcttaccacaattttcctgttgttacaaacaaaatgctggtaggttggaagtaagctcttcagctgggaaaacacacatcaagccctgagagacctcacggtccaaaaatgctatgactgaaaatctgtaytgccatctgctacacacaaagcctcttcattgtgctattgctgcrccttcaggatactgatgctacaattaccaaagtttaactttttagcttctgctgcccatagactcaatgatttcagggtgcagacaccaaagagtccacttcatattacagcctacacgttctgtacccatgaaggagatgaggtctcttatttaaacgtagttttcacctccatcgctcctcttcctgcagatgaagcaaattaacaaacacaggggtaagatggagagaaatcttattcacatggcccagaactgccaaaatctgggttaaaaacttaattctatgactcttgcttgc

SEQ ID NO: 48634 - DNA, 555 bp, Chicken  19866894293950_1
aatgctgttactcatcttcatctctgccagtagctagcagtaagttgctttttcaacttaactgcatccttcctttcaatcttctctaactgaagaagaaaaacacaacagtggctgggaggtgaatgtattatttcattctgtagcaaatctcccatggagaagagttcaattgctacgcccttagacagagattactaagtccgtcaagatttcaattctcccaggggacagacagtttcatactaaatttttttgtgcaaggccaagaaagcaaagggcttgatcttagttcaggcrtctaggtattactgtaaaattaaaaacaaaataatctaaaaatctcactttcacccctggcacacgtccattcagaggatgctgctattggtagaagttcctaaaataagtaacagctgcaacctacgctcactgaggggggtgaagttggcttgggttttttttgacagccagtcagaaaaagccatcaaaacgtgcagatgaaagagctacaccactctatgctgtttactggaccagctgctgtttccatgt

SEQ ID NO: 48635 - DNA, 600 bp, Chicken  19866894293962_1
tgttcagaagataaaaaaataaatcaggttaaggtcccactgtggtagcagaggaagtgagctgtggaatggtgctgggaaggatgaaggtatgggggaacctctggcatgctggagaggagagacctgagagcccattcctccattgctttcatgaactggatcttctccgttcttcccctccccagatttttaagcctagcatccacagccacattcctgtgcagaatcctgaagtgatgcctcaactccttgagagctctctcaccccacagagccctccttgctacccacgtgcaytctccccatgaggagccagagttcagctccaagggctgagacaacctcacccttcccagctgcttgaatgtggctgggagaggtctttctgttgctcgtttccaccagatttgaaacaaatgtgctataattcttcctgatggttgtttatgctagagaaaaataataggcatgccttatctacccccttttctccatgttcagtcctgtgtggagccaggatttgggctctgtgatccttatgcatcccttccaactcragatactccatcattctacgctaggaaggcgctaggaaca

SEQ ID NO: 48636 - DNA, 436 bp, Chicken  19866894293962_2
tctctcaccccacagagccctccttgctacccacgtgcaytctccccatgaggagccagagttcagctccaagggctgagacaacctcacccttcccagctgcttgaatgtggctgggagaggtctttctgttgctcgtttccaccagatttgaaacaaatgtgctataattcttcctgatggttgtttatgctagagaaaaataataggcatgccttatctacccccttttctccatgttcagtcctgtgtggagccaggatttgggctctgtgatccttatgcatcccttccaactcragatactccatcattctacgctaggaaggcgctaggaacaccacaccggctgtatctctttgggggataagcagagctggcgtctggcttgcaaaacgctcacggatcctttggggaagaaggctgaacataaatg

SEQ ID NO: 48637 - DNA, 446 bp, Chicken  19866894293965_1
agaaagatcattctctctgggctgctattctttttgtcaggcagataggtgacaattgagaaagtcagcccaatatatgggtgaactgctcatttctgaccccagccaaatactacctgatataaaacagaactatttgctttgcatctctggttttcctgcttcatcacctcctgcttggctgtgatgtggacacagtgaacctgtaactgattggcttttctcctcttctaactccatttcctaaggagtgtacttctcatctaatgctctgtatgattgctacctcattaattcccrcatcttctcttattaattactcacaattcatatgaaagatatttacaactcttttttattctgagaacccttctctgtgtcttctgtcaccacttcctcatcttttctcagctgtaatagtttctagctttccttcattactcttc

SEQ ID NO: 48638 - DNA, 600 bp, Chicken  19866894293966_1
aaataagaaagagtcctttatctcactgagatgcacatcatgttcttgcagcatcagaaagagaaatgggcaagactactgcttggggattgctaccacaggtacgttcttgccatggcacatgatggcaaagctcctaacaaggtcagatctaagcattcatttccatatggaattcatctgtccacgcatcttactttcttgcactaaaccttccactattgtcatgaagtgtaaaaactcctctcactgagaggagtggcacaacagaagaagaaacatgttcgaagatttcactcygctacaaaatgagggctgataaatgccctgataagttaattacctcactcatttccttcaacaaggtccccaggagtcacacacagctccatttgccattctgcctaaccctatgtatgtatttgtaagagcatgatagccaagatgctaygcagctactgctcctataggaatgcaaaaatctcttcagccttcacatatcacccaggctctgcttggagcagtcagcaactgaaagcctgggaggagggcttttattttttaagtaattatcacgctgaaatacaggaaattgtttca

SEQ ID NO: 48639 - DNA, 600 bp, Chicken  19866894293966_2
ctaagcattcatttccatatggaattcatctgtccacgcatcttactttcttgcactaaaccttccactattgtcatgaagtgtaaaaactcctctcactgagaggagtggcacaacagaagaagaaacatgttcgaagatttcactcygctacaaaatgagggctgataaatgccctgataagttaattacctcactcatttccttcaacaaggtccccaggagtcacacacagctccatttgccattctgcctaaccctatgtatgtatttgtaagagcatgatagccaagatgctaygcagctactgctcctataggaatgcaaaaatctcttcagccttcacatatcacccaggctctgcttggagcagtcagcaactgaaagcctgggaggagggcttttattttttaagtaattatcacgctgaaatacaggaaattgtttcacacatgactttccttcacagtaatggaagaaggttccttacaactttgagtcacaatggtaacaggattccaatactatcccacaaatcagcacaaagggttaaatttacaccagcattcaccaggactcaaagaggacagaatcctccca

SEQ ID NO: 48640 - DNA, 600 bp, Chicken  19866894293970_1
gaacactctggcattgtgtctgtcaggaacacgcagccaggcaggactgagccaagtactcagagctttccacccgtggtcacagacagtgcgagaaacacactgtgaatttcagaccaagctccagctgcaggaggaggagacgccccatttacctaccatcagaaatgcgccttccacaaccgcaccattcattggcttcccctctcttccagccccacgcagctctgcctcttctttcatagtgcagtgcaatacattcacctgaagcagtttaaaagtagatggcctccaaaaacrgaattaagcatttctctaaaaattgtgtggttattgccttaaaatagctctctgcttggagacgacttgtgcttttcaaggcaagcattgacaactgtcagcaagcaaactttcatctttgtcaccagtatcccacgttgttttgtcagcagagtctaatggcaattaaaagcaaacaagccaaatgtctaatcaccctaccctgaaaacaggctctttgaaattgattgtgtagaagagctggcagtaaagaaatggatggttgagttctgcctttgtctacccttgctaacttaacca

SEQ ID NO: 48641 - DNA, 600 bp, Chicken  19866894293971_1
cacttctttttaaaggctttgcagaatcggatactaaatgatttacaatgcagttgctgttgataagcacacagaaaacactactcaatacataacagtgtactgggctgggaaaataaatcaaatcaaatcaaatcaaatattggaagatataatcaaagcagtacccaaaaaaggctctcatctgagcagtcatgcaaggggctaaaaaaagcacattgaaatccttggtaagaggcatgtggagcctgctcactgcagcatccttattgcacataactaccacaaccagctacatgyctccagcagtaatgggcagctacaggcagctacaaggctytgcttttaaaccttcagtggtaatgggtaggaacttgcaagtggaaagggtcatgacaacagtagcatatttcacattaaatttctctgcatttctgtggcagaaggaggaggaagatgtatgtcatcttgaaacatatttcctttccatttaccaccatattcttttctatttttagacctgaatggagctgcaaagctaatataacacaaaactatcataactaattagatcagtggtggtatttgggactgaacacg

SEQ ID NO: 48642 - DNA, 600 bp, Chicken  19866894293971_2
atttacaatgcagttgctgttgataagcacacagaaaacactactcaatacataacagtgtactgggctgggaaaataaatcaaatcaaatcaaatcaaatattggaagatataatcaaagcagtacccaaaaaaggctctcatctgagcagtcatgcaaggggctaaaaaaagcacattgaaatccttggtaagaggcatgtggagcctgctcactgcagcatccttattgcacataactaccacaaccagctacatgyctccagcagtaatgggcagctacaggcagctacaaggctytgcttttaaaccttcagtggtaatgggtaggaacttgcaagtggaaagggtcatgacaacagtagcatatttcacattaaatttctctgcatttctgtggcagaaggaggaggaagatgtatgtcatcttgaaacatatttcctttccatttaccaccatattcttttctatttttagacctgaatggagctgcaaagctaatataacacaaaactatcataactaattagatcagtggtggtatttgggactgaacacggtaattagcattcaatacagctgcatatagtctagtatgt

SEQ ID NO: 48643 - DNA, 600 bp, Chicken  19866894293974_1
gaagggaatcttctaacaaagattttctcagaaggatgtcccaagttgatgattacaaaagtttttactgacaggaagtggttattctgacaaagcttatgggctttcagtttcaacacagctgtcagccttacacataaagtcccataacatgcgcttgttttaggtttaaaaaatggcaagtgaagcatttgtttggaatgtggtttttagtgaggcagtaaaccaacttactgttcaactctcataagctacttgagcagtaaacgacttgctgcacagtaaagagttcacagcagraaaacatgtcacatcagtgggtagggggaaagtagaaagatttcccttgtgcacataatcctagcgtgagatgcagtgggacaaaggccattaacaagatcacaacagaaaaatttccagatctcaagcataaagacatttatattcacagtttgagaaggcatataaggtaatccctgaagaaaaaaatccctccaatcatgatttctatcatcttgcaaacaaaaaaacaagatgcacccagtatttaaggatgctaaaatggatacactttgaaagcaggttgaaattacagggagg

SEQ ID NO: 48644 - DNA, 600 bp, Chicken  19866894293982_1
ttttcttgctgttgactctgacttaatcaaacagcacgccttgattgggtttccatcagccctgtgagattaactgtcccctggaatcgaggtggcgaaacatgctctgtacacattatttgtactgcccaaaataactgaaagagaaggcagtttttcttcctggccagggaagtgggtgaaaatgaacctgtacaaaaataaatctggagcagctctgacctaaatttcaaactgaacatgattctttctctcccttttagaagtttgagcttcactctctgcctttactattcttaytccttcccccacagaacctactaacagcctttctatcattaccagtatctttcattcaacctaaaagcctatgctgcaaagaatgtgttctttagctctaagcagtacactccggagaggtcattgaccatgcaagatgtcagcaagagccttaaagagagtacactaagcctatctgggtagacaaataaccctccatctcacagcctgtagccctggggagagggaaggagaagctgagaagtgtggatgaatagtcatcttggactgtattgccctgggagcagaaaggttaaattt

SEQ ID NO: 48645 - DNA, 600 bp, Chicken  19866894293982_2
agctaacaaccttttgtgttccagccacatttagggaaagactgggatatggctagaatgcatgactccaagagtttcctcctttcaaacagaagttctctgaactctgacatgggttgtgaaagtcatgttttgtacggtatttctactttgtgcaggagcctgcagagcatattctgagaacattctcccatttatgttggtaaaccatccacagagctctggctgaaaagtgaccgacaaagcgttggtccttctcacagactggagtactgttaggcttcgttcagatctgtttcrkggaattcccttctctccactcagtcttgcaaaatgtgatgaacttctactgatatggtgaacttytccaatcrtttgctgaagrgcacagcagctgactgaggtgtgaagtgaggccagctggttgttgagtttccatgctgcactctgaagggccacgaggaatggcaagaacaattttttgccccccttcagcaaaccagaacctctcacagyatctggctccgtgatggcagcagcctccaaatattgcccacctttagcaactagctgtggggcttggagttaatagctgaatga

SEQ ID NO: 48646 - DNA, 600 bp, Chicken  19866894293982_3
gctaacaaccttttgtgttccagccacatttagggaaagactgggatatggctagaatgcatgactccaagagtttcctcctttcaaacagaagttctctgaactctgacatgggttgtgaaagtcatgttttgtacggtatttctactttgtgcaggagcctgcagagcatattctgagaacattctcccatttatgttggtaaaccatccacagagctctggctgaaaagtgaccgacaaagcgttggtccttctcacagactggagtactgttaggcttcgttcagatctgtttcrkggaattcccttctctccactcagtcttgcaaaatgtgatgaacttctactgatatggtgaacttytccaatcrtttgctgaagrgcacagcagctgactgaggtgtgaagtgaggccagctggttgttgagtttccatgctgcactctgaagggccacgaggaatggcaagaacaattttttgccccccttcagcaaaccagaacctctcacagyatctggctccgtgatggcagcagcctccaaatattgcccacctttagcaactagctgtggggcttggagttaatagctgaatgac

SEQ ID NO: 48647 - DNA, 600 bp, Chicken  19866894293982_4
tccaagagtttcctcctttcaaacagaagttctctgaactctgacatgggttgtgaaagtcatgttttgtacggtatttctactttgtgcaggagcctgcagagcatattctgagaacattctcccatttatgttggtaaaccatccacagagctctggctgaaaagtgaccgacaaagcgttggtccttctcacagactggagtactgttaggcttcgttcagatctgtttcrkggaattcccttctctccactcagtcttgcaaaatgtgatgaacttctactgatatggtgaacttytccaatcrtttgctgaagrgcacagcagctgactgaggtgtgaagtgaggccagctggttgttgagtttccatgctgcactctgaagggccacgaggaatggcaagaacaattttttgccccccttcagcaaaccagaacctctcacagyatctggctccgtgatggcagcagcctccaaatattgcccacctttagcaactagctgtggggcttggagttaatagctgaatgacactttttcagtaagatagactaaatagctctacgtggagacaaatctgcacagaggaacacttgc

SEQ ID NO: 48648 - DNA, 600 bp, Chicken  19866894293982_5
tttcctcctttcaaacagaagttctctgaactctgacatgggttgtgaaagtcatgttttgtacggtatttctactttgtgcaggagcctgcagagcatattctgagaacattctcccatttatgttggtaaaccatccacagagctctggctgaaaagtgaccgacaaagcgttggtccttctcacagactggagtactgttaggcttcgttcagatctgtttcrkggaattcccttctctccactcagtcttgcaaaatgtgatgaacttctactgatatggtgaacttytccaatcrtttgctgaagrgcacagcagctgactgaggtgtgaagtgaggccagctggttgttgagtttccatgctgcactctgaagggccacgaggaatggcaagaacaattttttgccccccttcagcaaaccagaacctctcacagyatctggctccgtgatggcagcagcctccaaatattgcccacctttagcaactagctgtggggcttggagttaatagctgaatgacactttttcagtaagatagactaaatagctctacgtggagacaaatctgcacagaggaacacttgcatttacag

SEQ ID NO: 48649 - DNA, 600 bp, Chicken  19866894293982_6
caaacagaagttctctgaactctgacatgggttgtgaaagtcatgttttgtacggtatttctactttgtgcaggagcctgcagagcatattctgagaacattctcccatttatgttggtaaaccatccacagagctctggctgaaaagtgaccgacaaagcgttggtccttctcacagactggagtactgttaggcttcgttcagatctgtttcrkggaattcccttctctccactcagtcttgcaaaatgtgatgaacttctactgatatggtgaacttytccaatcrtttgctgaagrgcacagcagctgactgaggtgtgaagtgaggccagctggttgttgagtttccatgctgcactctgaagggccacgaggaatggcaagaacaattttttgccccccttcagcaaaccagaacctctcacagyatctggctccgtgatggcagcagcctccaaatattgcccacctttagcaactagctgtggggcttggagttaatagctgaatgacactttttcagtaagatagactaaatagctctacgtggagacaaatctgcacagaggaacacttgcatttacagmagtgaaaagc

SEQ ID NO: 48650 - DNA, 600 bp, Chicken  19866894293982_7
gagctctggctgaaaagtgaccgacaaagcgttggtccttctcacagactggagtactgttaggcttcgttcagatctgtttcrkggaattcccttctctccactcagtcttgcaaaatgtgatgaacttctactgatatggtgaacttytccaatcrtttgctgaagrgcacagcagctgactgaggtgtgaagtgaggccagctggttgttgagtttccatgctgcactctgaagggccacgaggaatggcaagaacaattttttgccccccttcagcaaaccagaacctctcacagyatctggctccgtgatggcagcagcctccaaatattgcccacctttagcaactagctgtggggcttggagttaatagctgaatgacactttttcagtaagatagactaaatagctctacgtggagacaaatctgcacagaggaacacttgcatttacagmagtgaaaagcacctcaaagcgagctcaactccacagtgttaattagccctgtgtcagcatcctgttatggtcagacccagcaatggctatctcagtttgccagtaaattcctagcactattttatattagggacatgcagc

SEQ ID NO: 48651 - DNA, 600 bp, Chicken  19866894293982_8
ttgctgaagrgcacagcagctgactgaggtgtgaagtgaggccagctggttgttgagtttccatgctgcactctgaagggccacgaggaatggcaagaacaattttttgccccccttcagcaaaccagaacctctcacagyatctggctccgtgatggcagcagcctccaaatattgcccacctttagcaactagctgtggggcttggagttaatagctgaatgacactttttcagtaagatagactaaatagctctacgtggagacaaatctgcacagaggaacacttgcatttacagmagtgaaaagcacctcaaagcgagctcaactccacagtgttaattagccctgtgtcagcatcctgttatggtcagacccagcaatggctatctcagtttgccagtaaattcctagcactattttatattagggacatgcagctagggggtgcttgctatttgctcaccttacttcccctgcttgctaattcctctgtatgtttctaaaagagccataagttgacaaggtgactgattttccttgttttgttccataaaatatctaggacaagtctggactctacagaaacggtaagggtcc

SEQ ID NO: 48652 - DNA, 600 bp, Chicken  19866894293988_1
caggggccgcgcagtacagaggagcagtaaaggaacggacatttccattctctcctgccagtgcttggctgctggtgatccttctgcacaggcagggttggggagagtctccaggccatcctgcaggagcttccagtgcactatgtgagtgcatgaggggtgaaaagggacagcactggcttagttctgcactgagcacctaaggagatgtccttccctgcaatacatgcagtatctgttgcattatccctctggctttgtaattcctagggactggctgtgcccaaggccctggctctrrgtaccccagatctgacacacacatacttggacttctttccttcwaacctctgcaaagggaaaaatctcctgtgagccacaggcactgcacaggaggttacctctgccatactactgacatgcaggattgatgcaagttagaaagccatagcagaggcagagcagacagggaagttgtttggttagaagacagatcctggatttgcacctcaaaccctggtcttatcggctctggtcttttcctcccttcttggtcactctccagacccaagaagaaagcccatgcagctcctgctctgg

SEQ ID NO: 48653 - DNA, 600 bp, Chicken  19866894293988_2
aggggccgcgcagtacagaggagcagtaaaggaacggacatttccattctctcctgccagtgcttggctgctggtgatccttctgcacaggcagggttggggagagtctccaggccatcctgcaggagcttccagtgcactatgtgagtgcatgaggggtgaaaagggacagcactggcttagttctgcactgagcacctaaggagatgtccttccctgcaatacatgcagtatctgttgcattatccctctggctttgtaattcctagggactggctgtgcccaaggccctggctctrrgtaccccagatctgacacacacatacttggacttctttccttcwaacctctgcaaagggaaaaatctcctgtgagccacaggcactgcacaggaggttacctctgccatactactgacatgcaggattgatgcaagttagaaagccatagcagaggcagagcagacagggaagttgtttggttagaagacagatcctggatttgcacctcaaaccctggtcttatcggctctggtcttttcctcccttcttggtcactctccagacccaagaagaaagcccatgcagctcctgctctgga

SEQ ID NO: 48654 - DNA, 600 bp, Chicken  19866894293988_3
cattctctcctgccagtgcttggctgctggtgatccttctgcacaggcagggttggggagagtctccaggccatcctgcaggagcttccagtgcactatgtgagtgcatgaggggtgaaaagggacagcactggcttagttctgcactgagcacctaaggagatgtccttccctgcaatacatgcagtatctgttgcattatccctctggctttgtaattcctagggactggctgtgcccaaggccctggctctrrgtaccccagatctgacacacacatacttggacttctttccttcwaacctctgcaaagggaaaaatctcctgtgagccacaggcactgcacaggaggttacctctgccatactactgacatgcaggattgatgcaagttagaaagccatagcagaggcagagcagacagggaagttgtttggttagaagacagatcctggatttgcacctcaaaccctggtcttatcggctctggtcttttcctcccttcttggtcactctccagacccaagaagaaagcccatgcagctcctgctctggagagaccacagggctggtgctggaagatgcttcatatctgtggaa

SEQ ID NO: 48655 - DNA, 600 bp, Chicken  19866894293989_1
aagcctggcacagacaacacactgatacaatggcagtttgtacattcagatataagtgactgagcctcaggttacacatggaggatgtgtgtttccagttttcaaaataaacaccagtatcaatgcacattgcgtgaaacagttgttactgtgtacgggtaattctctgcaatacctctgtgctcaaattcttaatccttacattgtttcaaagacagattttgcaagaattccagctgttcggctgaatattttaggaagagtgtgttgtttctatttctgttgggattgcagctagaygtgccccctccttgcactgtatatggccaagatcttctttctgttattcctttatttatacaaatratttaccagttggaattgtgttattttttacccacctcgcacttgtgaattcttccaaacttcagaaaagaatgggaaaatctgggagtacaggactaacccacagcatcatgtttcacttttctggcaggaactaacagtttgtttaaatctttttatgttctattttttattattttcacatgaaaatctcttgaaattgatcttcagtagaaatgtattaggataaattat

SEQ ID NO: 48656 - DNA, 600 bp, Chicken  19866894293989_2
tcaggttacacatggaggatgtgtgtttccagttttcaaaataaacaccagtatcaatgcacattgcgtgaaacagttgttactgtgtacgggtaattctctgcaatacctctgtgctcaaattcttaatccttacattgtttcaaagacagattttgcaagaattccagctgttcggctgaatattttaggaagagtgtgttgtttctatttctgttgggattgcagctagaygtgccccctccttgcactgtatatggccaagatcttctttctgttattcctttatttatacaaatratttaccagttggaattgtgttattttttacccacctcgcacttgtgaattcttccaaacttcagaaaagaatgggaaaatctgggagtacaggactaacccacagcatcatgtttcacttttctggcaggaactaacagtttgtttaaatctttttatgttctattttttattattttcacatgaaaatctcttgaaattgatcttcagtagaaatgtattaggataaattatgctctgatgaagcaaaataaaatgaagtgggaatccatcctatatccaccccattgcatccaattt

SEQ ID NO: 48657 - DNA, 508 bp, Chicken  19866894293996_1
cgcatctttagcatagttggatgttcctttcagaatgactgatagtagggcgcatggccctttagtcaggcatgtttacatgacagcaaataagcaacgggtattttatctttaattcctgaattcaagtttgctagcaaaatctgaaatagagcaaaatccagacatgttgcatatctatttcattagcaaagactaaaaattctgatgcgccttcaaggaagctgaaaatagaggatttaccaaatagaatatgaaaaggactaatgtgctaaatgcattgttcattatatcttttcktttgatattaaattcattttatgtaatgctatcccaagctttcagtagttctgaactttttattgggaaaatgtggtgtacctggcagtagtggtaacagaatctggagtatcttgatgtaatgtccttatagtgatctccaggacaaatcccgatggggcgctacgagctgggtactgcctgcaaacgccctctcagccaaacacga

SEQ ID NO: 48658 - DNA, 600 bp, Chicken  19866894293997_1
gggaaagcattccagccccagcagctcgctgcgtttctgggagggaacggagcagcgcagccaagcaggaggtgcagctccatccttcatggcttggggtgcgtaaagaggaaccgcacaccaggaaacgcagccatcacatccccaaaccacgcggcctctgctcggtgctgggggctgtggcactgccctggctgtcctcctgctcggaacggaatgagtgatgaaatccggagtgtctgtgcggaagctgaaggagaaaaggaggggccaaaagcaacgccggctgtgagcgacgcygcagcgtggagcccggcagctcggggagctcttccctttgtgctgctgggaggttattcctggccgtgagctgagcccggttcttctgcactgaaagcgttatgcaaggctgtgatggagggctgcgtcccaggaggagccgctttgcaactttgcaagggttcttttggggacagcgtctcctctggggatgctgagggagcccagcccatcccttggcatgcctgcacatcctgcagggctttgcaaggcagctccctcaaagaggggaatgaacgcagtgtgggccgggaattaaca

SEQ ID NO: 48659 - DNA, 515 bp, Chicken  19866894293997_2
ggaattaacagcgtggctttaattgcagctcggtgcctcctgttgtccatctctcccagctatcccagcagtgcaggagcttcctgcaaaaccacagcagtgttccgccccgtgagcagcgtctgggctggcaatggggctcagtgcaggggcatcccagacgttgctgcctcctttttgctgctggccggggggcgcttctttccttccttgggggcgcagcactgatgtgtgacccatgtgcgtcctgcaggcgtgagctgcttctgcttcccctcatcccacacggaaggggaggcygctgccgagcgcttcccttcgcacccgagcggtattttaaggctgtgtaggagaaggagggggtgagggacagacgcagcagcgccgttccaacttccccagctacaagcaggcagctcccagcactggctgtgctgccggaggtggagcagcatcagctggagctgctgggagtgctgcagccagactttgtcccagaaccgtcacagcgcaat

SEQ ID NO: 48660 - DNA, 599 bp, Chicken  19866894294001_1
  misc_feature (1)..(6): n is any nucleotide
nnnnnnagctcctgagtggcttctcctctgagaaatggggttgggagtcaggacacgcgggcacacgcgtgtgcttggaaacataggtacttgcagaggcaagcaagaagggtggacacatgtaagcacatgcagggatgcacacgcactcattacacgccaccattacacatggctggtgtgcgccccatgcagcaggcaatggctgtcctccagccccaggtccttacgcccctcagggtgcaaagctcagcctttctctgagcttttcccatagctgttggcaactgcagcctgcawacagggaggacgctacctggactgctgggcacatgcagcacgtgtctccaaggggcgctgatcagtgtctgcagccagaagcagtgaagcagccactagctttgctacctgggctgcctggggcagagtatgcctcttgaggaagcaagcagtttaatttccacatcagctgcatgaaaggaaatatttgccattttctacatcttgcagatctatacagaggagcagtcagaaaattgctggaggataaaaaataattcactttaagcgtgtcattccagggggatccggatgaatca

SEQ ID NO: 48661 - DNA, 599 bp, Chicken  19866894294003_1
  misc_feature (1)..(177): n is any nucleotide
nnnnnnnnnnnnnnnnnnnnnnnnnnnnnnnnnnnnnnnnnnnnnnnnnnnnnnnnnnnnnnnnnnnnnnnnnnnnnnnnnnnnnnnnnnnnnnnnnnnnnnnnnnnnnnnnnnnnnnnnnnnnnnnnnnnnnnnnnnnnnnnnnnnnnnnnnnnnnnnnnnnnnnnnnnnnnnnnnaaacagttttccagtcctcatcccgcatctgttagggctccaaaggatctctctgcccaaacaacatgttctgtgagcatatacattctagggtaagtctaatctcaaatctcagtcagctcraaggcaaaaatcagcatttaagggaagcaactgagccaggctatgacaggtcagtgagacttggagaaataaggtaaatccctccagtaggagcctcgcaggaatctttgtgcctcaaatcgagcaatggtttccacagaactctttttcctttgctgttgaataacacatacaaacgttcacatctatgctcataacaatgttacaaagttactattcttatccccctatctataatcaagataatgtccaggcaaatctaaaggcttcatatcctgactgacagcagaaaaacacta

SEQ ID NO: 48662 - DNA, 600 bp, Chicken  19866894294003_2
tatctataatcaagataatgtccaggcaaatctaaaggcttcatatcctgactgacagcagaaaaacactaccaccttaaaaagagggaagagaacaagggaaacacagagtcacgcttctcagagattttcccctttccaaaaactttcagctctcacctcctgagccagagatggcttcctgtctgcagtaaccctcagggacctcacttccagcaatgtgcctggactcctctttgagccaaccttttgcaactgtaacatccaacttcaaagaactctgcagtgctatccccctcwtttcttgctttcacttgacctgtcacctttgatgtcacatagtccttgtgtttaagaaaattaacagatcaatcctcattcatcctcctccctgtctgtctgtgctttcctccccactgtcatcacagtacccaggaaagacgtcacatctgcagtagcctttgctctgtagcagtccaagcagtactagtgcttgtaacattttacagaacaactgacaagatgacaaatcaattttgacatgctctgtcaaatactactatccacacctcactgcactgaagttttgtttaagttgtg

SEQ ID NO: 48663 - DNA, 599 bp, Chicken  19866894294004_1
  misc_feature (1)..(34): n is any nucleotide
nnnnnnnnnnnnnnnnnnnnnnnnnnnnnnnnnngcattgatttctatgtttttaattctttcgagtgggaaaaatatcctggcaacacaaatatggatgtcaaactttggatgccagccactgttctataactgtgctattttaagcagtaatatgtattattgggtataataacttatatttttaaggtctaatcctggaagtttctactctgaagagctccagacttctaatacaagtgtctgaggttacacatttgaatgtgaattggtagcagacagcgccctgacaaggagagrttccagtctcagtgacacttcacgcctcctagaaatattaggcaaaaaatgaatgagaggcaagtgctccagaatgcaaatgtaaacccttcctatcccagctcagagaaacatagaaggcatggctattgcatcgagtctagctacaaaaggaggcttccataacacacacagcagagtgacatggcatgttttgaacagtgtatattatagccccccagcttttgcccatcattgattaacayaacaggtcccacagtcacacctagcagacagggccagggattccttgttctcac

SEQ ID NO: 48664 - DNA, 600 bp, Chicken  19866894294004_2
gaggttacacatttgaatgtgaattggtagcagacagcgccctgacaaggagagrttccagtctcagtgacacttcacgcctcctagaaatattaggcaaaaaatgaatgagaggcaagtgctccagaatgcaaatgtaaacccttcctatcccagctcagagaaacatagaaggcatggctattgcatcgagtctagctacaaaaggaggcttccataacacacacagcagagtgacatggcatgttttgaacagtgtatattatagccccccagcttttgcccatcattgattaacayaacaggtcccacagtcacacctagcagacagggccagggattccttgttctcacatctgtagaagctactagagagaaaagatgcacaagtgtgtcctctcacagagaacatacctgtgtccactcctttcaatgcacaacaggaattcttctaaagtgcagaattcctcacacaaggcaaactaaccaaatggctaagggatgaattacatcagctgagtgcagcatgagcccagccatctgccaatggcaaactgaagtctgcaagcaccaaatatgctgtccctcccagtagtgcaa

SEQ ID NO: 48665 - DNA, 599 bp, Chicken  19866894294007_1
  misc_feature (1)..(124): n is any nucleotide
nnnnnnnnnnnnnnnnnnnnnnnnnnnnnnnnnnnnnnnnnnnnnnnnnnnnnnnnnnnnnnnnnnnnnnnnnnnnnnnnnnnnnnnnnnnnnnnnnnnnnnnnnnnnnnnnnnnnnnnnnnnnccttggacctgacgacgccgagcgccgccgccgccatctggtcaccctttgagcgtgctgccaaccccctgcaagccttcggcggctcgcagagacgcaacagcggcacggccacaccacgccattcacccaccttgccagacagcgccggaggggctttggagcaccccttggcrcgccgcatccagagcaaccccgtcagcaccttgtcctggctgcccacccagggctcgctctcctccttctccaccagcacgggctactcttcctcatcatcactgcccggcagcgtctcggccgcctcgggctcacccaccgactccagcagctccgatgggcatcgcaagagctcccgcgagtgcatggtgtgctttgagagcgaggtgatcgccgccctggtgccctgcggccacaacctcttctgcatggagtgtgccatgcgcatctgcggcaaggccgagcccgagtgccccgc

SEQ ID NO: 48666 - DNA, 600 bp, Chicken  19866894294007_2
cgagcagccccactcccctcccctccaacacaactttttaaggacttgaagcggttggggtcaacgcagccgttggggtcaacgcagccgttggggtcaacgcaaccgttggggtcaacgcagtcgttggggtcaatgcagccattgagatcaatgcagccgttggggtcaacgcagccattgaggtcaacgcagccattggggtcaacgcaaccgttggggtcaacgcaaccgttggggtcaacgcacccattggcatcaacgcaaccgttggcatcaacgcaaccgttggcatcaacrcaactgtcggcgtcaaccctgtttatttaaaggatcggactgggggtgcaggggtggggatggagatgctatttctcccactggatggaagccggagggcaggatcacggggagggacccgggcagagcaaaggggttgggagggaacggggaggaaagggggcagacgaagacgacgaggaagagacgcagaaccgcagagaggagcagaacccaatgtttacagaatagctttaactcttagcccggctgtggcggctggggagaggaagcccagctgttcttcaacagtcctttcca

SEQ ID NO: 48667 - DNA, 600 bp, Chicken  19866894294017_1
catagctgagcttttaggaaaatggatgagagaatctttcaagttaggcaagtgtgatatatcaagatgtaccaatccatattagcacctaaaatatcctggtataatttctttatcagtacagtcaggaaattttgagtcctatgggaatggaatccatggataatgttctgtctgcataacattgcagttgcatggatctgcaatgttacgcagaactgcaatgttatgcagactttctgccaacacccagtgaaatgaagaaaatgatctgcataggaataaggtcaagatcctgaygtactgatctcacatttgacagaaaatagaaacaattaaacaagaatcatgggatacagagttctatttaagtgtagaaaattcagaaaatctcaggctgccactctaagatggaagaataaattgtgcagaggtgtcaaatattgtcccaatgttaattacagctgcttcagtggaaagcagatgacagcagcataggaagcccacagctggatgagtgctctcaaagtaactaagtctgagcaggtacatctagtaaggagaacagcagaatgccacatagcagtgagtcaaattgga

SEQ ID NO: 48668 - DNA, 600 bp, Chicken  19866894294021_1
ttaaatgctattttgaatataactactagagctaaaatgtataagtttgaatgttcattaggctgtttttttatttcatatacatgatgtatgaatgttcctaaaaccaagttttagtactgcatgccttctttcattcttcagtgtaagggttcagtatgaaggcatagattagtaaagaaggatccaaacaagcatcataaaactagatgatgctctgaagtattacataactgtctttctttttcattttatgggctaatctgtatatctgtggaattagaatgaccagattctcasgagtgttaaaaaagaaaaaaaaagaaaaaaagaataattgtaaaaaatgtattttcttcttgtgatatgtttactctgactaggatttgtctcacctaaacacatagaacatactgttacacacaatatacagaatatgttctctgaattaatggggttttttgggggggttgattttttacatttagttatggctatgtctgtaatgaaaaattttcaaaaccgcatgaagacaaaatcttaagaaccaggttttgttggtctgactgtgtagatctaccttatgtcacatgatcttac

SEQ ID NO: 48669 - DNA, 599 bp, Chicken  19866894294022_1
  misc_feature (1)..(13): n is any nucleotide
nnnnnnnnnnnnntcaaattctttctttgttgtttacctcacagaactcagtctgaacagtgggggttaaagttgagaagtataggcagagctcaagcttcattgttgtagttgttttttaatggtgaagagttagtaataggtaaaaggaattgttttcagtctgctttgcagggatgcttaggatgaggcaactttaaaacataggaaaatttatctgaagctgagtggttgtttcttatactggcttgattttgaatttcttggtcttataatttactcaggtactttgtaatcacrttactttcatctcatgggttgttgaacaggttggttaaatggagtgcaaaatgyrctgttaccttcttggagaggtacagtggacacctctgttcctacctaggggagttcctcttggtgagttagagctttctgacaaggttcccagtaactgtcattagttcttgtctcccctaagtggaaagctctcatctttctgacaacagagttagagggattgtctgtgaagatggatagtaaattattgactactattaattgcattattattacaagcatacctggggccatcccccatt

SEQ ID NO: 48670 - DNA, 600 bp, Chicken  19866894294022_2
gaacagtgggggttaaagttgagaagtataggcagagctcaagcttcattgttgtagttgttttttaatggtgaagagttagtaataggtaaaaggaattgttttcagtctgctttgcagggatgcttaggatgaggcaactttaaaacataggaaaatttatctgaagctgagtggttgtttcttatactggcttgattttgaatttcttggtcttataatttactcaggtactttgtaatcacrttactttcatctcatgggttgttgaacaggttggttaaatggagtgcaaaatgyrctgttaccttcttggagaggtacagtggacacctctgttcctacctaggggagttcctcttggtgagttagagctttctgacaaggttcccagtaactgtcattagttcttgtctcccctaagtggaaagctctcatctttctgacaacagagttagagggattgtctgtgaagatggatagtaaattattgactactattaattgcattattattacaagcatacctggggccatcccccattagctcatgctgctgtcagtgggatttttaaacttaggtccctgtgactccacctg

SEQ ID NO: 48671 - DNA, 600 bp, Chicken  19866894294022_3
aacagtgggggttaaagttgagaagtataggcagagctcaagcttcattgttgtagttgttttttaatggtgaagagttagtaataggtaaaaggaattgttttcagtctgctttgcagggatgcttaggatgaggcaactttaaaacataggaaaatttatctgaagctgagtggttgtttcttatactggcttgattttgaatttcttggtcttataatttactcaggtactttgtaatcacrttactttcatctcatgggttgttgaacaggttggttaaatggagtgcaaaatgyrctgttaccttcttggagaggtacagtggacacctctgttcctacctaggggagttcctcttggtgagttagagctttctgacaaggttcccagtaactgtcattagttcttgtctcccctaagtggaaagctctcatctttctgacaacagagttagagggattgtctgtgaagatggatagtaaattattgactactattaattgcattattattacaagcatacctggggccatcccccattagctcatgctgctgtcagtgggatttttaaacttaggtccctgtgactccacctga

SEQ ID NO: 48672 - DNA, 600 bp, Chicken  19866894294022_4
agtcagcaaagcacgaggattaatgatggaaaatactagatgaatgagtattataaaagctgccaaagctctgaatcccatatcggttacattttaccttacacatctccttagtgtagtagtaaattattaatgctgaaaactgttttttttttaattcatgaataatttaatatggcactggatgggtgatggggagatagtatgcagcgcaggaacaaaggcagcagttcctactgatccaagattctgtgtgtgctaagtaagataagacctgggatcatcaattgctcttctagwagataagtaagactgagagaagggaaggattttggagccctacaaagtggggtctattctgtgctgctgagtgataccaggagccaaatctgcagagaagtttttaaggagtgatatttaaaggtgaaactgtacaggaagcgtgatagctcttttttgcagaggatggagaagtgcgagtgcactatctaattagagaacttaaaggagagctgcctgagtgctgagccagtgctggccttgygtagccaagggagtttggagatgaaattcagagcaccttaacgctttgattgagaa

SEQ ID NO: 48673 - DNA, 600 bp, Chicken  19866894294022_5
agattctgtgtgtgctaagtaagataagacctgggatcatcaattgctcttctagwagataagtaagactgagagaagggaaggattttggagccctacaaagtggggtctattctgtgctgctgagtgataccaggagccaaatctgcagagaagtttttaaggagtgatatttaaaggtgaaactgtacaggaagcgtgatagctcttttttgcagaggatggagaagtgcgagtgcactatctaattagagaacttaaaggagagctgcctgagtgctgagccagtgctggccttgygtagccaagggagtttggagatgaaattcagagcaccttaacgctttgattgagaatgtgaatagcttgctgtggaaaattctaacttcctgaggagctgaaatgtgcattacatatagccaaggaaccacttccagctctccattgcagggtttgtgtgattgcacaaactgatgtggttcctctgtggattacttttgtctgggcaggatctagaagccagcaggcctgtggagattagttcatcagtgtgatttcttcccatttggaagtccatcttcttttttcacctaggttaca

SEQ ID NO: 48674 - DNA, 541 bp, Chicken  19866894294026_1
ctttgatgacagtgacaggaccagagggagtggcatggagatgagtaaggggagagtaggacggatgttaaatcctgaaggtatttaggcattgtaactggctccccagggcagcggtcacagcaccaagcctgttggagttccaggagtgactggacagtgctctcagatggagggtatgattattaagcagagattgtgtcagtgatcactgtggcttgcttccaactcagggtattctttgattctatgattttattgaagaattgaaaattctgtactgcttcaggcagatgagakgagcaaccyratctagttctaagcattactttgcattgcaggggagttggactaagtggcctataaagtcctctccaacgcaaatgattctatgattctatggtgtctgtgggtatcaagcyctgtcatgttatttttcatccttgcttacattaatgacgggataattcaaagacaatgctagaaataatatccaaatacgtttacattgtcagatcaagtacatcatgaaatgtatagc

SEQ ID NO: 48675 - DNA, 532 bp, Chicken  19866894294026_2
cagtgacaggaccagagggagtggcatggagatgagtaaggggagagtaggacggatgttaaatcctgaaggtatttaggcattgtaactggctccccagggcagcggtcacagcaccaagcctgttggagttccaggagtgactggacagtgctctcagatggagggtatgattattaagcagagattgtgtcagtgatcactgtggcttgcttccaactcagggtattctttgattctatgattttattgaagaattgaaaattctgtactgcttcaggcagatgagakgagcaaccyratctagttctaagcattactttgcattgcaggggagttggactaagtggcctataaagtcctctccaacgcaaatgattctatgattctatggtgtctgtgggtatcaagcyctgtcatgttatttttcatccttgcttacattaatgacgggataattcaaagacaatgctagaaataatatccaaatacgtttacattgtcagatcaagtacatcatgaaatgtatagc

SEQ ID NO: 48676 - DNA, 531 bp, Chicken  19866894294026_3
agtgacaggaccagagggagtggcatggagatgagtaaggggagagtaggacggatgttaaatcctgaaggtatttaggcattgtaactggctccccagggcagcggtcacagcaccaagcctgttggagttccaggagtgactggacagtgctctcagatggagggtatgattattaagcagagattgtgtcagtgatcactgtggcttgcttccaactcagggtattctttgattctatgattttattgaagaattgaaaattctgtactgcttcaggcagatgagakgagcaaccyratctagttctaagcattactttgcattgcaggggagttggactaagtggcctataaagtcctctccaacgcaaatgattctatgattctatggtgtctgtgggtatcaagcyctgtcatgttatttttcatccttgcttacattaatgacgggataattcaaagacaatgctagaaataatatccaaatacgtttacattgtcagatcaagtacatcatgaaatgtatagc

SEQ ID NO: 48677 - DNA, 419 bp, Chicken  19866894294026_4
gcaccaagcctgttggagttccaggagtgactggacagtgctctcagatggagggtatgattattaagcagagattgtgtcagtgatcactgtggcttgcttccaactcagggtattctttgattctatgattttattgaagaattgaaaattctgtactgcttcaggcagatgagakgagcaaccyratctagttctaagcattactttgcattgcaggggagttggactaagtggcctataaagtcctctccaacgcaaatgattctatgattctatggtgtctgtgggtatcaagcyctgtcatgttatttttcatccttgcttacattaatgacgggataattcaaagacaatgctagaaataatatccaaatacgtttacattgtcagatcaagtacatcatgaaatgtatagc

SEQ ID NO: 48678 - DNA, 600 bp, Chicken  19866894294027_1
atgatcatcatggtccttttcaacccaggtcattctatgactctatgaaaacctacccacaagacagtgttagcagtacctggacatttgtcactgcaggggaggggatcttgaggctcagacaggcactgggcacctgtgctgtgtgaagcagccctgctgaaagcctgcagcccagggactgtgccaggatggagatggacacttcagagagcaagctaatgtaataaaggcaaatggcagcaacacatattttgaggttttgaagttgtttaggccagttattaattcccatgctcraaaacagaagtcaaaatagcacagaaatacgtaagtagtgaagtccaactgtagctctccttttgcatgacctctctccatcaaaaccaaacccaacctatggagaacagccactagccagtgacctaccaaggaggtacttcagaaagtaataaaccaaacagtctggggaggtattggattacataaaacttgctcgaaatattaatcagcttctcctactaaaatgaacacttattatataaggaaaaaaaaagttaatagcatccatgtaaaacataaggttcagatttccttcca

SEQ ID NO: 48679 - DNA, 600 bp, Chicken  19866894294034_1
caacatagtgttcctcccttccattccccttaacacccttcaaactgaagcccaggtctataattcagttgacgttttcatacctgcagttggcatctgatcctgagaccactgacagctcactgaggtgtagcctttgtacctctcccttcccaaggacttcaagataattgacttcagtcacaacacttcccattctggccacagttgggtgaagcaaccacttagcgaggtgatcagtagttgaggtaatcttagaatactcccagtggtgcagttccagtgctctccagtctgtascatccctgtacctctcagaccaggccattgatcaaggagaaggaattccactcccagacagggcatggctgccccaactcactgccctccctgcaaagatcaaagcacaaatagcagcttattttgagattgcaaagtggcccaggggctgcaccaccacacwctgtcagtttaagggctgcagaagcaaatctcaaatatctgtgagtctgaagaattacaaggttactttgttttcaatcctaatttttcatagcgcaggcttttctgctggcaggcaatttcatgaagatacggtct

SEQ ID NO: 48680 - DNA, 600 bp, Chicken  19866894294034_2
aagataattgacttcagtcacaacacttcccattctggccacagttgggtgaagcaaccacttagcgaggtgatcagtagttgaggtaatcttagaatactcccagtggtgcagttccagtgctctccagtctgtascatccctgtacctctcagaccaggccattgatcaaggagaaggaattccactcccagacagggcatggctgccccaactcactgccctccctgcaaagatcaaagcacaaatagcagcttattttgagattgcaaagtggcccaggggctgcaccaccacacwctgtcagtttaagggctgcagaagcaaatctcaaatatctgtgagtctgaagaattacaaggttactttgttttcaatcctaatttttcatagcgcaggcttttctgctggcaggcaatttcatgaagatacggtctgataaactgacttcaaacagcgaatcgatcgcgtgatttaaagtaagagcccaaactccacgggcaagtcataaagcaaaaattgcattagaaagagagctgcagtgagccgatctaatgaaggacatcctaatagttttacgttcaaaacagcctttaatga

SEQ ID NO: 48681 - DNA, 600 bp, Chicken  19866894294037_1
gacaaaattctttagaaaagccatataaacggtggcactgacttaagagagatagccaagctttgtgtcttgacaaagtgaatgggcagaaaaatattatgaggagaaggagctctttgtaacagtagtaaataaaaaccaagcctgtacgtactttaccctgccagtatctatgtgaaaaatgtcctttcttttggtgggtctgcaagctggtaatacaaatggaaaatcaacttcatgcacatgcagagaacaaggctaatcctgcaaaatgcttcatgcttacactcctctgtatgrcgtagcacttcactaaaaccacccatctccctgtaccaaaacagaccgcatcaaaccccaactcccagttactggtactcctgcttttctaaaacaccaaccctgcccgtccacttggggaatgcacasaacagatatcccagtagttctacttcctttacaggcagacctgcccatatttctccgtaatagttaagaaatgagctctcaaagccctatttcagtcatagtttcttctcatctagaatgaaaccatgcatgcatacttagcagcaggggttgttatttattgaagagaca

SEQ ID NO: 48682 - DNA, 496 bp, Chicken  19866894294037_2
aaataaaaaccaagcctgtacgtactttaccctgccagtatctatgtgaaaaatgtcctttcttttggtgggtctgcaagctggtaatacaaatggaaaatcaacttcatgcacatgcagagaacaaggctaatcctgcaaaatgcttcatgcttacactcctctgtatgrcgtagcacttcactaaaaccacccatctccctgtaccaaaacagaccgcatcaaaccccaactcccagttactggtactcctgcttttctaaaacaccaaccctgcccgtccacttggggaatgcacasaacagatatcccagtagttctacttcctttacaggcagacctgcccatatttctccgtaatagttaagaaatgagctctcaaagccctatttcagtcatagtttcttctcatctagaatgaaaccatgcatgcatacttagcagcaggggttgttatttattgaagagacaaaaagctattaactatctccaattt

SEQ ID NO: 48683 - DNA, 599 bp, Chicken  19866894294041_1
  misc_feature (1)..(21): n is any nucleotide
nnnnnnnnnnnnnnnnnnnnncagaaagttcatttcttttgtcacctcacgtgttaaataagggcacggacaaattactcactgtcatagctcactggattcgatatttcagaagctaaactaaaatcacctttgttccactgaccccaaaggttgttgattctgtatttaactgtaaataccttacagagcacagcaatgccatttgaaaaactagtgaatgcacaatctttctatttattgttgcattcagaaacctgaaattatcacttttcggcatagggagaaaagacagacttytttttgtctataytgagtttatctgtatctgaacactggtttttctggtctccagtgggaagcagatggcactagatggagcccacccctgtgagacagggctgtaagacccagacagcctgaatgtgagccaatgagctgtgcttgctgcagtgtgtggcagctcccgcagaaaagggtttccaacgttacggacaattactcrtatgaatttcattcaccacaactgcatggtcatcagcataatttgaacagataagtggacaagtgtttaacgtcattgacatagaaggagagcc

SEQ ID NO: 48684 - DNA, 599 bp, Chicken  19866894294041_2
  misc_feature (1)..(8): n is any nucleotide
nnnnnnnncagaaagttcatttcttttgtcacctcacgtgttaaataagggcacggacaaattactcactgtcatagctcactggattcgatatttcagaagctaaactaaaatcacctttgttccactgaccccaaaggttgttgattctgtatttaactgtaaataccttacagagcacagcaatgccatttgaaaaactagtgaatgcacaatctttctatttattgttgcattcagaaacctgaaattatcacttttcggcatagggagaaaagacagacttytttttgtctataytgagtttatctgtatctgaacactggtttttctggtctccagtgggaagcagatggcactagatggagcccacccctgtgagacagggctgtaagacccagacagcctgaatgtgagccaatgagctgtgcttgctgcagtgtgtggcagctcccgcagaaaagggtttccaacgttacggacaattactcrtatgaatttcattcaccacaactgcatggtcatcagcataatttgaacagataagtggacaagtgtttaacgtcattgacatagaaggagagccattattaggatga

SEQ ID NO: 48685 - DNA, 600 bp, Chicken  19866894294041_3
ttgaaaaactagtgaatgcacaatctttctatttattgttgcattcagaaacctgaaattatcacttttcggcatagggagaaaagacagacttytttttgtctataytgagtttatctgtatctgaacactggtttttctggtctccagtgggaagcagatggcactagatggagcccacccctgtgagacagggctgtaagacccagacagcctgaatgtgagccaatgagctgtgcttgctgcagtgtgtggcagctcccgcagaaaagggtttccaacgttacggacaattactcrtatgaatttcattcaccacaactgcatggtcatcagcataatttgaacagataagtggacaagtgtttaacgtcattgacatagaaggagagccattattaggatgaactctgtgtgccacagatcactgcatggcatactgtaggcatttagtctgggacttccagcctgacacaaaggaatttggccaagacactcgacttaatgagcttcactgatgaaaagtgccaagacagcttcagtggcctcagttaatcaaaagtcttaactattgaagggaaataaaaccatccttcaaac

SEQ ID NO: 48686 - DNA, 600 bp, Chicken  19866894294042_1
ggctctgctttaagagcagggagagctcgctgccggctgagccgtcagtgggaggtcaggaggccatggaggggaacacgcacctcctccaggtcatccgtgagatgcactcccagatcgacaagctggagcgggagaaccgggcgctgagagaggagctgcacgcctgcgggctgagtgccgctgtggggggcagcaggagggagatgggcagcctgccctgccccacagaaggatcggacgcatcgcccgcagccccagtggatcaggcaggtactgtgatgttcgtgtgtgactccrgttgggctgttatggatctgcagggagacggaggtgagccgcagcccatctgtctagcagacctgaccacgtgctccggcctccttcagtgcccacatccagacccatrataggggtgtctgtgacacgctgtatggtgcctgcatccctgtgctgggctcagtgcagtgctttgctgttcttgaagygttcagctcagagctcagtttgtctttatttaaggggggggagaagatggagtatttcctcatttgtagcttggttgaagcagaaagagcaaaaatgccatttggtgagaag

SEQ ID NO: 48687 - DNA, 600 bp, Chicken  19866894294042_2
ctcccagatcgacaagctggagcgggagaaccgggcgctgagagaggagctgcacgcctgcgggctgagtgccgctgtggggggcagcaggagggagatgggcagcctgccctgccccacagaaggatcggacgcatcgcccgcagccccagtggatcaggcaggtactgtgatgttcgtgtgtgactccrgttgggctgttatggatctgcagggagacggaggtgagccgcagcccatctgtctagcagacctgaccacgtgctccggcctccttcagtgcccacatccagacccatrataggggtgtctgtgacacgctgtatggtgcctgcatccctgtgctgggctcagtgcagtgctttgctgttcttgaagygttcagctcagagctcagtttgtctttatttaaggggggggagaagatggagtatttcctcatttgtagcttggttgaagcagaaagagcaaaaatgccatttggtgagaagaactgtccagaagtggatgtggtggctgcagggtcaggctggtgggtgctgtctgtagcaccgacaccaccaaaagcattcagtaattcagcttcctggcactgccaca

SEQ ID NO: 48688 - DNA, 588 bp, Chicken  19866894294042_3
gggggcagcaggagggagatgggcagcctgccctgccccacagaaggatcggacgcatcgcccgcagccccagtggatcaggcaggtactgtgatgttcgtgtgtgactccrgttgggctgttatggatctgcagggagacggaggtgagccgcagcccatctgtctagcagacctgaccacgtgctccggcctccttcagtgcccacatccagacccatrataggggtgtctgtgacacgctgtatggtgcctgcatccctgtgctgggctcagtgcagtgctttgctgttcttgaagygttcagctcagagctcagtttgtctttatttaaggggggggagaagatggagtatttcctcatttgtagcttggttgaagcagaaagagcaaaaatgccatttggtgagaagaactgtccagaagtggatgtggtggctgcagggtcaggctggtgggtgctgtctgtagcaccgacaccaccaaaagcattcagtaattcagcttcctggcactgccacagctgccgtcacagtccaagtgctctccagcaacgttcctgaggcagggctttcccactggttgcctg

SEQ ID NO: 48689 - DNA, 600 bp, Chicken  19866894294044_1
ttgttgctactcttgtttatagggaaacttattctgttaataaatctagccattcagataggcaaagaattactacctgtgagttgccggtagatgtgttagggagtttaaattgtaagtatgtactgtatcaagaattcataaatgaattcttccatgaattgcacaacagtattttcacagcatactatggagaggtacacaatatactgtgctggcagaaatagccagcatgcaggtgatcatttataatttaaaaaaaaatactataaatgcatgtaccagagagacatggagatrcaacagaaagtccagtgtagggccaccaagatgatggtgagactggagcaccttcctatgaacaggctgagagagctaggactgttcagcctggagaagaaaggctcaggaggatctcagcaatgtctgtaaatgcctgaagggagtgtacagagaggacagaatcaggttctcatcagtagtgcctcttggcactggacacaaactggagcacagtaggaagcacttctgtgctgcgtgagtgataccactggtacaggctgcccagaggctgtgagatctcctccttggagatcttca

SEQ ID NO: 48690 - DNA, 600 bp, Chicken  19866894294044_2
gagagctaggactgttcagcctggagaagaaaggctcaggaggatctcagcaatgtctgtaaatgcctgaagggagtgtacagagaggacagaatcaggttctcatcagtagtgcctcttggcactggacacaaactggagcacagtaggaagcacttctgtgctgcgtgagtgataccactggtacaggctgcccagaggctgtgagatctcctccttggagatcttcagaaactacgtgagcgtaggcctggacaccctgctctggtgtcactactggaacaggggtgggaccaggtracatccagaagtcctttaaaacctcaggtatgctgtgattctatggaggcacctgacttgaaggcaggagggagmagatcaggatgactgttccctcttcccatacttgtgagtagcaggacagctctctgctctccattttccccctttctttcactttttttctgtttatggctttgacagtgactgtgagaacagatagacaacaatttgcaaagaaagatgtgcaatcaaagcattcattctgtgttattcaacatcctctaacaaggggttacagggatactatatttctttttc

SEQ ID NO: 48691 - DNA, 600 bp, Chicken  19866894294044_3
gtgtacagagaggacagaatcaggttctcatcagtagtgcctcttggcactggacacaaactggagcacagtaggaagcacttctgtgctgcgtgagtgataccactggtacaggctgcccagaggctgtgagatctcctccttggagatcttcagaaactacgtgagcgtaggcctggacaccctgctctggtgtcactactggaacaggggtgggaccaggtracatccagaagtcctttaaaacctcaggtatgctgtgattctatggaggcacctgacttgaaggcaggagggagmagatcaggatgactgttccctcttcccatacttgtgagtagcaggacagctctctgctctccattttccccctttctttcactttttttctgtttatggctttgacagtgactgtgagaacagatagacaacaatttgcaaagaaagatgtgcaatcaaagcattcattctgtgttattcaacatcctctaacaaggggttacagggatactatatttctttttcttcatgaaacggtgtttcctaggagatgaccactttaaacatctctgggttgtcataggaggtgactgtgacgtg

SEQ ID NO: 48692 - DNA, 599 bp, Chicken  19866894294045_1
  misc_feature (1)..(218): n is any nucleotide
nnnnnnnnnnnnnnnnnnnnnnnnnnnnnnnnnnnnnnnnnnnnnnnnnnnnnnnnnnnnnnnnnnnnnnnnnnnnnnnnnnnnnnnnnnnnnnnnnnnnnnnnnnnnnnnnnnnnnnnnnnnnnnnnnnnnnnnnnnnnnnnnnnnnnnnnnnnnnnnnnnnnnnnnnnnnnnnnnnnnnnnnnnnnnnnnnnnnnnnnnnnnnnnnnnnnnnnnnngaatctgaatataaaagatagctatgcatcggctgagaaaacacaatttccactcttatagcttcccagtgttaaatctcargtaaccaggctaatttaaataaatctgttaccagcaattcagtgattcttatagaaaatgcaattgcatttgctgatatgcatgcacaaatgtatttcccacatgttacgtgctcagctcactggtaattttttttcatcgtatcaccgggtcacaaagtattccaaatatgtgagttggtaaacacaaatgtaaacaaaatgtacaggaatgttgygtttccaattcatagagaaagttaaatttcagagcaccarcaatgagaaagatgcttaatacctcctgagaaccacaggagt

SEQ ID NO: 48693 - DNA, 599 bp, Chicken  19866894294045_2
  misc_feature (1)..(1): n is any nucleotide
ngaatctgaatataaaagatagctatgcatcggctgagaaaacacaatttccactcttatagcttcccagtgttaaatctcargtaaccaggctaatttaaataaatctgttaccagcaattcagtgattcttatagaaaatgcaattgcatttgctgatatgcatgcacaaatgtatttcccacatgttacgtgctcagctcactggtaattttttttcatcgtatcaccgggtcacaaagtattccaaatatgtgagttggtaaacacaaatgtaaacaaaatgtacaggaatgttgygtttccaattcatagagaaagttaaatttcagagcaccarcaatgagaaagatgcttaatacctcctgagaaccacaggagttgaaaatggatggaggataagtmtgaaaggtagaaagctttcccttccctcataaactgtcataggtaaatacttgggtataatgctctgcttgttcaccctctccaggcatcagaygmagtaattgtgctggatttgggtctcacagtgacaggcaaaacgcaccagtttgcataacccagcagcctacatccgcagcaggaaacccccaacactc

SEQ ID NO: 48694 - DNA, 600 bp, Chicken  19866894294045_3
aacacaatttccactcttatagcttcccagtgttaaatctcargtaaccaggctaatttaaataaatctgttaccagcaattcagtgattcttatagaaaatgcaattgcatttgctgatatgcatgcacaaatgtatttcccacatgttacgtgctcagctcactggtaattttttttcatcgtatcaccgggtcacaaagtattccaaatatgtgagttggtaaacacaaatgtaaacaaaatgtacaggaatgttgygtttccaattcatagagaaagttaaatttcagagcaccarcaatgagaaagatgcttaatacctcctgagaaccacaggagttgaaaatggatggaggataagtmtgaaaggtagaaagctttcccttccctcataaactgtcataggtaaatacttgggtataatgctctgcttgttcaccctctccaggcatcagaygmagtaattgtgctggatttgggtctcacagtgacaggcaaaacgcaccagtttgcataacccagcagcctacatccgcagcaggaaacccccaacactcagtgctctcggtgctctggtcrctgctcaggagcagcagga

SEQ ID NO: 48695 - DNA, 600 bp, Chicken  19866894294045_4
atctgttaccagcaattcagtgattcttatagaaaatgcaattgcatttgctgatatgcatgcacaaatgtatttcccacatgttacgtgctcagctcactggtaattttttttcatcgtatcaccgggtcacaaagtattccaaatatgtgagttggtaaacacaaatgtaaacaaaatgtacaggaatgttgygtttccaattcatagagaaagttaaatttcagagcaccarcaatgagaaagatgcttaatacctcctgagaaccacaggagttgaaaatggatggaggataagtmtgaaaggtagaaagctttcccttccctcataaactgtcataggtaaatacttgggtataatgctctgcttgttcaccctctccaggcatcagaygmagtaattgtgctggatttgggtctcacagtgacaggcaaaacgcaccagtttgcataacccagcagcctacatccgcagcaggaaacccccaacactcagtgctctcggtgctctggtcrctgctcaggagcagcaggagtcaaggcaaaaatactccaattccttccctgctttcttgtcttcagggagcttaaaaaaaccca

SEQ ID NO: 48696 - DNA, 596 bp, Chicken  19866894294045_5
gctcactggtaattttttttcatcgtatcaccgggtcacaaagtattccaaatatgtgagttggtaaacacaaatgtaaacaaaatgtacaggaatgttgygtttccaattcatagagaaagttaaatttcagagcaccarcaatgagaaagatgcttaatacctcctgagaaccacaggagttgaaaatggatggaggataagtmtgaaaggtagaaagctttcccttccctcataaactgtcataggtaaatacttgggtataatgctctgcttgttcaccctctccaggcatcagaygmagtaattgtgctggatttgggtctcacagtgacaggcaaaacgcaccagtttgcataacccagcagcctacatccgcagcaggaaacccccaacactcagtgctctcggtgctctggtcrctgctcaggagcagcaggagtcaaggcaaaaatactccaattccttccctgctttcttgtcttcagggagcttaaaaaaacccaaacagcaatacaaagaaagcaaatgtaacaagtaagaagaacagacatactttaaatcagctgtttaaatcagaatgccatgtaactaat

SEQ ID NO: 48697 - DNA, 594 bp, Chicken  19866894294045_6
tcactggtaattttttttcatcgtatcaccgggtcacaaagtattccaaatatgtgagttggtaaacacaaatgtaaacaaaatgtacaggaatgttgygtttccaattcatagagaaagttaaatttcagagcaccarcaatgagaaagatgcttaatacctcctgagaaccacaggagttgaaaatggatggaggataagtmtgaaaggtagaaagctttcccttccctcataaactgtcataggtaaatacttgggtataatgctctgcttgttcaccctctccaggcatcagaygmagtaattgtgctggatttgggtctcacagtgacaggcaaaacgcaccagtttgcataacccagcagcctacatccgcagcaggaaacccccaacactcagtgctctcggtgctctggtcrctgctcaggagcagcaggagtcaaggcaaaaatactccaattccttccctgctttcttgtcttcagggagcttaaaaaaacccaaacagcaatacaaagaaagcaaatgtaacaagtaagaagaacagacatactttaaatcagctgtttaaatcagaatgccatgtaactaat

SEQ ID NO: 48698 - DNA, 474 bp, Chicken  19866894294045_7
ttaaatttcagagcaccarcaatgagaaagatgcttaatacctcctgagaaccacaggagttgaaaatggatggaggataagtmtgaaaggtagaaagctttcccttccctcataaactgtcataggtaaatacttgggtataatgctctgcttgttcaccctctccaggcatcagaygmagtaattgtgctggatttgggtctcacagtgacaggcaaaacgcaccagtttgcataacccagcagcctacatccgcagcaggaaacccccaacactcagtgctctcggtgctctggtcrctgctcaggagcagcaggagtcaaggcaaaaatactccaattccttccctgctttcttgtcttcagggagcttaaaaaaacccaaacagcaatacaaagaaagcaaatgtaacaagtaagaagaacagacatactttaaatcagctgtttaaatcagaatgccatgtaactaat

SEQ ID NO: 48699 - DNA, 600 bp, Chicken  19866894294051_1
aagcagtgatggttttaataaaacacaggtcacctgtttcagatggaacagaaaggccccctagggattaattgtatgcaaaccacaaaagaatggccattaattttctcccagctcgtaacatacaattttccactaatataagagctttaataggactacccataacctttatgcattcggtattagtcctggaaattacaattatcttgtgctcaccacagaatgtgtaatcccatcaataggaaaaatgtcatcttatgaaaaagtccccagccaaaagcaatcattactttaccrtgcagcctgttcagctgtggttaatacagagctatgatcaccttgggtgcaggtgagggctcggagagyggacttttattgctctcccagtgcattattgctgcacggaggctggacgcagccttgcgcattgccccatgttgtgtgggttgtgcctctcacccccaggctctgatgtcagaacaggcatttggacggcattgatgctgcatcatccgcatcaccgacagctgtttctatcacctcctgcccagctttgccaggaagaycccaaaccagcatgctgccctgtctccatct

SEQ ID NO: 48700 - DNA, 600 bp, Chicken  19866894294051_2
aattgtatgcaaaccacaaaagaatggccattaattttctcccagctcgtaacatacaattttccactaatataagagctttaataggactacccataacctttatgcattcggtattagtcctggaaattacaattatcttgtgctcaccacagaatgtgtaatcccatcaataggaaaaatgtcatcttatgaaaaagtccccagccaaaagcaatcattactttaccrtgcagcctgttcagctgtggttaatacagagctatgatcaccttgggtgcaggtgagggctcggagagyggacttttattgctctcccagtgcattattgctgcacggaggctggacgcagccttgcgcattgccccatgttgtgtgggttgtgcctctcacccccaggctctgatgtcagaacaggcatttggacggcattgatgctgcatcatccgcatcaccgacagctgtttctatcacctcctgcccagctttgccaggaagaycccaaaccagcatgctgccctgtctccatctcactaggtggagatctttgctcacccactgcaccccgctcctgttttgcagcttgctgttgagatccac

SEQ ID NO: 48701 - DNA, 600 bp, Chicken  19866894294051_3
tccccagccaaaagcaatcattactttaccrtgcagcctgttcagctgtggttaatacagagctatgatcaccttgggtgcaggtgagggctcggagagyggacttttattgctctcccagtgcattattgctgcacggaggctggacgcagccttgcgcattgccccatgttgtgtgggttgtgcctctcacccccaggctctgatgtcagaacaggcatttggacggcattgatgctgcatcatccgcatcaccgacagctgtttctatcacctcctgcccagctttgccaggaagaycccaaaccagcatgctgccctgtctccatctcactaggtggagatctttgctcacccactgcaccccgctcctgttttgcagcttgctgttgagatccaccgagaaattcagctgatgaattttcagatgctgtttcagatctttaattttcctctgggatgcacagctccctgtgccggggacatacgggctgacaggaaatgggtctttttgtggttccacttttagaacattctgtgtcggattgttatcatttattggctgcagagaataaaaacacttgaaagaaggtttgccta

SEQ ID NO: 48702 - DNA, 600 bp, Chicken  19866894294052_1
cagatagggacaaagagaatattttcatgcaaaaatcaggcacaggtacagaggcacagccagacatcatttcaagtgggcacaggaatttaattcaagttattctctcctttattccacatttaacaaagttgaaggatttatccacctctctgacactagtgcagacttcactgggaaacgtttgtatccagtggcaagtaaatattgggctggatttttatgtccacctgaaatggattctgcttctaaacctcagcggtggtagcaaataagttttgtgtcactgtggagctctgygtgagaatttcttaagctgttgtcagtgagaacaaagggattacctctgtttatgcgtccaggtctaattcagagattgccaaacccattttttatttttgcagggctaagttcagaggcagcaagagctgtgtgttggaaaaatgggttgctggctgcaaacgttgccaggctatagcagtgggtattggaacacccagggaaaagcagggcatgcagtgggttcctatgaaaccactggtgcatcctcatgggcgaagggtgcatgacaaaggggatgtcagtgctggcacccactgt

SEQ ID NO: 48703 - DNA, 600 bp, Chicken  19866894294056_1
ttttttatctagagtaggtccttctgttatgatgctttagaattgtttttctgagtttactgctaatataaatgatcgacatcttaatttttcacaattacaacttgaacgtcatcgggactgaaacattgcaatgctttgttaaaagccatacagattatcaatgagcttcattcaagtggtgtgacttctcaaggtagctgggatttgcattgctgcggcgttagtccagcctccagtcataatcccttaaacacgtttggaaagaatcacctgtgatgtcggaggataaattcaagygttgtatttgatttgatctgctgaggttgcagatagggtgcctgttggtgccatctgtgtttgcagattttatgacagtattcgccaggagactatctgtaggccaactaggtttacataggtcagtgaattgcagtgtacgtcagggtcactgtaaacagttgtttctttttttccagagtttgcactgaaccttctttctcaaaaatggaccacctcgctaaagttggtattggtgccgatgcaccagttctatatgctgccaaatgcatttgagagaacctctattttagtggccat

SEQ ID NO: 48704 - DNA, 600 bp, Chicken  19866894294056_2
tgagtagaggtagccagtttgcagaaatgtgcgtgaggtttgtgttgtgcgtgcctgtttattcagacattagttgtgatcatggctgcataaaatcagtgtaattaccttcaaccaatcttcatgccacagtgacccagaccacattccatgacagccctgacagcttgaattagagcttgcttttcaatgcagccagatttggagaacagaaatatccagcctctcttgagtttgcttagtgcaagaatggcacatgttaacatgaaagagtgaaagttcagatgaaaacagcacctyaggaatattcactgatgtttgaccagcctgtgttggcagaattgatctagtttttccgttgtgtgttgttgtacactctgcacagtaaatagacagacagttactttcaggatgttgcacatgtctacacgcactatactgctcagtgtaggcatctgcttccaatctgtgttttgaggagactgctggagaataagagtcctcacttttggcgtaatcgtgcagctctcagctgctcttagactaagtttctttctaaaagcttcttggatatggtcagggagagaactaggtaatatt

SEQ ID NO: 48705 - DNA, 600 bp, Chicken  19866894294057_1
aaaagaaatgtagtcatccagtcgtgcaggtgctacagtgaaacagcattgtttcagtgctgtttcccaaacttgcatctttttgctcaacttaacttttccattgtattcttacttttcatcgtctccttttttaataagcagttttcatctgatgcaccttaacgtcagtttgttctgttgtctttgcactgatcccagcagactgcaaacatgtcatgagatttcatcccacattttatatgtgattttccccagggggagtattttcccctggatgttttcagttgcaatgctgcrgttgcttatattgcttgcttagatttctctgtgtgccctaaggatttgcagtcctatgctaatgtaatacgtaaagtagagtcaccttgacttcacatttgtcagcttatgcaagtgctaaccttttactgcactgcaacagaaatgtcattgctgttcagcctcgagatgacaaataaacagcttcattgtcagcaatggatttaggaggctgcctggctcactggctggtgcagtgggtttgggagcacagctcttgtcaaatactacgcaaaccagaatgtgtgatccttttttttt

SEQ ID NO: 48706 - DNA, 600 bp, Chicken  19866894294060_1
atcccccagacacctgctgattattgtattaaggggtgatgaattgcagagcttaaaaaacctgaaaatcctctgtcttgtatttacagccacgtcggcaaggagtgagtcaaattttggctggggaagatcctgtggagctactggcaaaggcaaagcatagaatcacagaatcataggagttggaagggacccttaaaggccatctggtccaactcccctgcaatgaatagggacacctacagctccatcaggtgctcagagccccatccagactgaccttgagtgtctccagggacrgggaatccaccacctctctggaaagcacctgtcrtgcratcctgtagcatcacagcagcccaagtgctcctcaggctttgccttgggcagtgccacrgccaagctcaccacaggatctatgccttacagacacaggttttcctgttagcagcagttcctgcccattgatgcagagccatcgctgcgagcccctgctctttgtaactggtttgtccccctggtaattagcccatatttaatcattacggaggataaaaggcagggacacattgcagtcatcctcgcaaatcatcttttgtc

SEQ ID NO: 48707 - DNA, 600 bp, Chicken  19866894294060_2
ggtgatgaattgcagagcttaaaaaacctgaaaatcctctgtcttgtatttacagccacgtcggcaaggagtgagtcaaattttggctggggaagatcctgtggagctactggcaaaggcaaagcatagaatcacagaatcataggagttggaagggacccttaaaggccatctggtccaactcccctgcaatgaatagggacacctacagctccatcaggtgctcagagccccatccagactgaccttgagtgtctccagggacrgggaatccaccacctctctggaaagcacctgtcrtgcratcctgtagcatcacagcagcccaagtgctcctcaggctttgccttgggcagtgccacrgccaagctcaccacaggatctatgccttacagacacaggttttcctgttagcagcagttcctgcccattgatgcagagccatcgctgcgagcccctgctctttgtaactggtttgtccccctggtaattagcccatatttaatcattacggaggataaaaggcagggacacattgcagtcatcctcgcaaatcatcttttgtccagatggcccgcaaagtacactgtaaacctcatt

SEQ ID NO: 48708 - DNA, 600 bp, Chicken  19866894294060_3
atgaattgcagagcttaaaaaacctgaaaatcctctgtcttgtatttacagccacgtcggcaaggagtgagtcaaattttggctggggaagatcctgtggagctactggcaaaggcaaagcatagaatcacagaatcataggagttggaagggacccttaaaggccatctggtccaactcccctgcaatgaatagggacacctacagctccatcaggtgctcagagccccatccagactgaccttgagtgtctccagggacrgggaatccaccacctctctggaaagcacctgtcrtgcratcctgtagcatcacagcagcccaagtgctcctcaggctttgccttgggcagtgccacrgccaagctcaccacaggatctatgccttacagacacaggttttcctgttagcagcagttcctgcccattgatgcagagccatcgctgcgagcccctgctctttgtaactggtttgtccccctggtaattagcccatatttaatcattacggaggataaaaggcagggacacattgcagtcatcctcgcaaatcatcttttgtccagatggcccgcaaagtacactgtaaacctcattaaca

SEQ ID NO: 48709 - DNA, 600 bp, Chicken  19866894294060_4
gcaaggagtgagtcaaattttggctggggaagatcctgtggagctactggcaaaggcaaagcatagaatcacagaatcataggagttggaagggacccttaaaggccatctggtccaactcccctgcaatgaatagggacacctacagctccatcaggtgctcagagccccatccagactgaccttgagtgtctccagggacrgggaatccaccacctctctggaaagcacctgtcrtgcratcctgtagcatcacagcagcccaagtgctcctcaggctttgccttgggcagtgccacrgccaagctcaccacaggatctatgccttacagacacaggttttcctgttagcagcagttcctgcccattgatgcagagccatcgctgcgagcccctgctctttgtaactggtttgtccccctggtaattagcccatatttaatcattacggaggataaaaggcagggacacattgcagtcatcctcgcaaatcatcttttgtccagatggcccgcaaagtacactgtaaacctcattaacagattgtgccaattaattaccctgtgtgggaatcacttcgctaactgcgggcagcagctg

SEQ ID NO: 48710 - DNA, 600 bp, Chicken  19866894294065_1
tatgagatttgttacaaccactgtaatacatatctgtagttgcaatttcatattcagcgtacaagtcagacttggtggtggtgcacaaagttcaccccaactgtgatactagaatgctgcctttaattttttagatcaaaggctcaagatggtatctcaatgtatgttcactataatagaagaaatatagcaaaaagacagaatacaaacaagttagctctgacatgtagaatgcttaagacattttggttggagaaaacagcctcatacaaaactgaagctatgcagttaactataaamatgagctacagctcatttaccatccctttatggctctggtaccaaatcagcttcatttaactaataaaaaacctctttgaattatctaaaatttctgaacgctaagttgaactccagccatttctcagtaaaaactgagatattacagatagattatttcatagttaaataaattaatgatgttctgaaaccaaaaccttcttgaagattccactctacatcactgaaatcaatggaaaccttgccagtgatctcatatggatgaaaacaatgacagtctctcccctgatagcatttgag

SEQ ID NO: 48711 - DNA, 600 bp, Chicken  19866894294068_1
tttttttctccacactcttcgtggagtttcaattgttttgtagctgtgctaagtttgagtcctggggacttgaggaaaaataaaggtagaccaaagcagttaataaaactctatccatgatctttccatggtttggcacggtatcttttcaatgtgttagactgacaatacaatctactctgtgagctattactgcaattgaaattctagcatagacaatgctcttttattttctcatgattactttatggttattcttatttactattttctcaccttctcaactggcattgcaaaagwttgggattagtacttttcacttagaattgttcagtttcttttcccattcaagcaaagttaagtttttggcactgtgaattttgtgaaggctgtgtgatgttaatgtgaagtctaatagaatttacttttctttgtgcgtagaaactttccagtttttaactatggtaatacttattagggtagcaataataccagtgaggttaagtacaagctaagtgggtggactccccatattaattttttgaagacagactcttgtgggaaacaaccaaaatgtctcaatatgaatgaatggcagct

SEQ ID NO: 48712 - DNA, 535 bp, Chicken  19866894294068_2
aatgtgaagtctaatagaatttacttttctttgtgcgtagaaactttccagtttttaactatggtaatacttattagggtagcaataataccagtgaggttaagtacaagctaagtgggtggactccccatattaattttttgaagacagactcttgtgggaaacaaccaaaatgtctcaatatgaatgaatggcagctaaatcttattctcttatatttttgtactatgtttcaagtcagtgttagcaaagctaggttacgtgcctatggttggatatcatctctgttttgttcttgaragacagacctctttgatcatgctgtcaatatttcacatgctgtttgaattaatttattatggttagccagtccatctattgagctagaacatataaactattccttgtgttttttacagaaacgaatccataactgatatgagcagaacacatttttgtgtgtactgctcacctacattagaggacactgtagctcagtaaagatatctttcgtatcatgcactttgctaaaaca

SEQ ID NO: 48713 - DNA, 599 bp, Chicken  19866894294072_1
  misc_feature (1)..(42): n is any nucleotide
nnnnnnnnnnnnnnnnnnnnnnnnnnnnnnnnnnnnnnnnnnaaattaaagtcacttgattcccctggaaaaacactgatagaagtcactgcagcaattcctcagtgtgtttctctgtttaatatagtttctgaaatagcattttaggatgttttttacaaaaattgaaggaaggagctgttagctgaacaaaaaataacaaaaaatgtgccaggcagatggtacagagatgtaggatctaatttctgccagacttaaaatgtggccattcagccaccttcagactgcctgtgtgaggaraatgaaaacarctctggaaagctcccacctctccctataaactgtgaacaatttctgagcaaaccagtgaaattttttgttttcttttgacaaagaaaagtcagtgttgttcttagagctgtctaaaatattttgacatggagctgcagtatcctttttactttaaaatttcattttcaattgaaaatccctgcagtttgagaggaagtgggaagtttctgctcatakttttgaagaaacgrgtaatgattttcttgctgaatacaagcaaagatgaacacaaccttttcgattcacag

SEQ ID NO: 48714 - DNA, 599 bp, Chicken  19866894294072_2
  misc_feature (1)..(31): n is any nucleotide
nnnnnnnnnnnnnnnnnnnnnnnnnnnnnnnaaattaaagtcacttgattcccctggaaaaacactgatagaagtcactgcagcaattcctcagtgtgtttctctgtttaatatagtttctgaaatagcattttaggatgttttttacaaaaattgaaggaaggagctgttagctgaacaaaaaataacaaaaaatgtgccaggcagatggtacagagatgtaggatctaatttctgccagacttaaaatgtggccattcagccaccttcagactgcctgtgtgaggaraatgaaaacarctctggaaagctcccacctctccctataaactgtgaacaatttctgagcaaaccagtgaaattttttgttttcttttgacaaagaaaagtcagtgttgttcttagagctgtctaaaatattttgacatggagctgcagtatcctttttactttaaaatttcattttcaattgaaaatccctgcagtttgagaggaagtgggaagtttctgctcatakttttgaagaaacgrgtaatgattttcttgctgaatacaagcaaagatgaacacaaccttttcgattcacagtgcagtttgag

SEQ ID NO: 48715 - DNA, 600 bp, Chicken  19866894294072_3
gatgtaggatctaatttctgccagacttaaaatgtggccattcagccaccttcagactgcctgtgtgaggaraatgaaaacarctctggaaagctcccacctctccctataaactgtgaacaatttctgagcaaaccagtgaaattttttgttttcttttgacaaagaaaagtcagtgttgttcttagagctgtctaaaatattttgacatggagctgcagtatcctttttactttaaaatttcattttcaattgaaaatccctgcagtttgagaggaagtgggaagtttctgctcatakttttgaagaaacgrgtaatgattttcttgctgaatacaagcaaagatgaacacaaccttttcgattcacagtgcagtttgagaaagccatcccagatttccctccagcgttctaccatacctgagatgtgtgcatcctaagttgttcttctcctttatttccttatgtttccttttgtttactttgggtattcctacagctgccctcatatttttcttttcatttgcacttcatttgataaatttcaattctgtgtcagtacttttttaattcttctgaattcctccccgcttccctcat

SEQ ID NO: 48716 - DNA, 600 bp, Chicken  19866894294072_4
tttctgccagacttaaaatgtggccattcagccaccttcagactgcctgtgtgaggaraatgaaaacarctctggaaagctcccacctctccctataaactgtgaacaatttctgagcaaaccagtgaaattttttgttttcttttgacaaagaaaagtcagtgttgttcttagagctgtctaaaatattttgacatggagctgcagtatcctttttactttaaaatttcattttcaattgaaaatccctgcagtttgagaggaagtgggaagtttctgctcatakttttgaagaaacgrgtaatgattttcttgctgaatacaagcaaagatgaacacaaccttttcgattcacagtgcagtttgagaaagccatcccagatttccctccagcgttctaccatacctgagatgtgtgcatcctaagttgttcttctcctttatttccttatgtttccttttgtttactttgggtattcctacagctgccctcatatttttcttttcatttgcacttcatttgataaatttcaattctgtgtcagtacttttttaattcttctgaattcctccccgcttccctcatcattttaaacccct

SEQ ID NO: 48717 - DNA, 600 bp, Chicken  19866894294072_5
gaaattaagctttaaaagactgtatttctgaatactgtagcttgtagctaagactattaccaaaacgtggaagggctattagtcaggggacaagcacgtggtcagctgctggacatcagaaagcactcagctgtctgagtgcatgacaggtagcagtgcatttcagtagcctcctctctccattctctgaagaacactgttcttatcaccgttccccttcttaatttgcagattctctttcttccccactgcattctggcagtcagttttgttgtgtagctgtgaaatatcagacgtgcwttttcatcaaacagtgtcaaggctctgttgatatgccctggaaagctttgacaaatgaagcagagctaaatacccagtgaaaacttgtgccttccgaggtggccataaaagggaatcagtatttcttccaccatcttccggtctggcgaaaagccctcttcaaaaacaaacaaacaaaaaagtatttcaacagtttaaagttttcattttcagtctgtggagtctacaaatgtcgaagtcattgctgactcctctacaagcagtcaccttcgaagtctctgagaaatccctctcctctgg

SEQ ID NO: 48718 - DNA, 600 bp, Chicken  19866894294074_1
tgaaattagaataggtattattaatactaaggaaacacaagaagtatcaagaaaaaagaatatttctgtaagtcttcaatgaataaatcagtcttttataataaaagtatcaagaggcaaagcagcttggccagttcaaattgcaggttagagactgactactgagagaactaagatttacagactaatgattcattgtttgtcatagaatcacagaaatattaattttgaaaaagacctctaatatcatctagtccaacagtccatctaccaccaatatcgctcactaaatcatgtctktaaatgctacatctacccttttcttacacaccttcagggaccgtgagtccaccatcccctgggcagcttgttccaatgtctccaatgtctcaccacccttccagagaataaattattcataatatccagcttgaacctcctctagcacaacttgaggccattccctcttgtcctatcaccgttattacctgggagaagaagctgacccccacatgaccacaacctcctttcaggagttctagagaacaatgaggtcttccctttgcctcctcttctccatcatttgatgattctgaatgt

SEQ ID NO: 48719 - DNA, 600 bp, Chicken  19866894294083_1
tgttttctggggagccatatgacggcatttcagttatcctctttgtgaatatagagatttcctcacagaagtacttgcattttctagctctgcgaggaagcaacctgggtgttcagagttatgggatggaaaaatgtggtgggctgtgactttgcttcttttatggaagagaagtcgcatctctttgccttctttactggccgtgacataggtctacagttgcttatgggacttgggggatatggcaaagccttttctgttgaatttcagtgtaattccaaacagtgtgaacttttcaawtcacttgagaagtgccccagatggtgtgacattctgcttcatgggaagatttgaaagtattccctttgcataatttctggttaactatttcattgcatttgcactgggagaacaccaaagccgtgaactctgttgacattttggcggtgtttgtttaacctcctagtgcacaggctacatttgttgaaaaatattattcttacctttgcaaatcatcggtaattaattcccttggaaatacctaccgctgcacatagccagcttgggagtctgctggcagatcttagtttaacatcaggt

SEQ ID NO: 48720 - DNA, 599 bp, Chicken  19866894294114_1
  misc_feature (1)..(39): n is any nucleotide
nnnnnnnnnnnnnnnnnnnnnnnnnnnnnnnnnnnnnnntattgtcttaattttctgctacaagatctctgtattcatatgtggaatttcttctaatcacagctcaatttccatgtggcagaggagcagtttttcataagcagatgcttgtatttatcacaggtattgcaacctgtagtcaatagaaaagccacacatggttcatgggagaagggtagcatctacttactgcctgattgctgttcctctcaggaacaaaaacaatcagttttacaaaaacatctgctactcctgtcatgwcctatgtcactgcatatgaaactcaactactttttatgtcaatatgcattatcttgatcaaattattcagcagtttttcatgcacaaaagttctgacagttgaacagtacgtgaacaccagcagcagggaagcttgacattggcattattcacttgttgctaattttccccattcccaaatatccttatgatttcagcaatgtgaaaacattctcatcatacgtgcttcatgttctagcacactagtgctatttygtttatttttctaaagcttacttcctctgattattcatccactt

SEQ ID NO: 48721 - DNA, 545 bp, Chicken  19866894294114_2
caaaaacaatcagttttacaaaaacatctgctactcctgtcatgwcctatgtcactgcatatgaaactcaactactttttatgtcaatatgcattatcttgatcaaattattcagcagtttttcatgcacaaaagttctgacagttgaacagtacgtgaacaccagcagcagggaagcttgacattggcattattcacttgttgctaattttccccattcccaaatatccttatgatttcagcaatgtgaaaacattctcatcatacgtgcttcatgttctagcacactagtgctatttygtttatttttctaaagcttacttcctctgattattcatccacttaggcactcatgaaaaactatttctcggagggtagggagagcaatgaggactgcctggacaagaaaccctctaaaatgcacccatacttttcagacaagtggggtctgttaacattcccagtgttttcaagcagcaggacccctctatgggaggtgatctcttaatagatgtactctgagctatgcaatagaaaatattcca

SEQ ID NO: 48722 - DNA, 599 bp, Chicken  19866894294116_1
  misc_feature (1)..(123): n is any nucleotide
nnnnnnnnnnnnnnnnnnnnnnnnnnnnnnnnnnnnnnnnnnnnnnnnnnnnnnnnnnnnnnnnnnnnnnnnnnnnnnnnnnnnnnnnnnnnnnnnnnnnnnnnnnnnnnnnnnnnnnnnnnntgacctgcagtctagcctatggaccctgccaactccagactcaattccttgtttgtaatctttctgaaaactacaggagtacttttaagttgctgttaacattaccacagccaacattgtcctttggaataaggaggtaaaaataaaggttttctttgacctggaattgctgtcccyacctttccttcccatcacaagtggaactgaaaattatatcattaactctaaagcacaggtaacttggacttctgagttactccccagtttgcagtatacttcagtaatgtgttcacttttgggcccttcactacaagaaagacactgtagaggtgctgagtgtctccagagaagggcaamagagctggtgaggatgtctggagcacaagttttatggagagtggcagggcaagaggcaatggctttaagctgtgcaaggggaggttcaggttggatatttggaaaaattgcttcccaaa

SEQ ID NO: 48723 - DNA, 600 bp, Chicken  19866894294116_2
atctttctgaaaactacaggagtacttttaagttgctgttaacattaccacagccaacattgtcctttggaataaggaggtaaaaataaaggttttctttgacctggaattgctgtcccyacctttccttcccatcacaagtggaactgaaaattatatcattaactctaaagcacaggtaacttggacttctgagttactccccagtttgcagtatacttcagtaatgtgttcacttttgggcccttcactacaagaaagacactgtagaggtgctgagtgtctccagagaagggcaamagagctggtgaggatgtctggagcacaagttttatggagagtggcagggcaagaggcaatggctttaagctgtgcaaggggaggttcaggttggatatttggaaaaattgcttcccaaaaagagyggtaatgcattggcacagrctgcccagggaggtgatggagacactgtccctggaggtgttcaagcmctgtagagatgtggcactaagggacatgtcttactgagcatggtggratgggttgaakgttgaaacagatgagcttagtggtcttttccaaccttaatgattctgtgat

SEQ ID NO: 48724 - DNA, 600 bp, Chicken  19866894294116_3
tccttcccatcacaagtggaactgaaaattatatcattaactctaaagcacaggtaacttggacttctgagttactccccagtttgcagtatacttcagtaatgtgttcacttttgggcccttcactacaagaaagacactgtagaggtgctgagtgtctccagagaagggcaamagagctggtgaggatgtctggagcacaagttttatggagagtggcagggcaagaggcaatggctttaagctgtgcaaggggaggttcaggttggatatttggaaaaattgcttcccaaaaagagyggtaatgcattggcacagrctgcccagggaggtgatggagacactgtccctggaggtgttcaagcmctgtagagatgtggcactaagggacatgtcttactgagcatggtggratgggttgaakgttgaaacagatgagcttagtggtcttttccaaccttaatgattctgtgattctatgataaaatgtgcaaagttcttagaaaagaacccaggtaggaactgtgtatagtaaacaagaaagtaaacattctctatgaatgccttcaacaaagaaaaatctgtggtctgaaaacccat

SEQ ID NO: 48725 - DNA, 600 bp, Chicken  19866894294116_4
aactgaaaattatatcattaactctaaagcacaggtaacttggacttctgagttactccccagtttgcagtatacttcagtaatgtgttcacttttgggcccttcactacaagaaagacactgtagaggtgctgagtgtctccagagaagggcaamagagctggtgaggatgtctggagcacaagttttatggagagtggcagggcaagaggcaatggctttaagctgtgcaaggggaggttcaggttggatatttggaaaaattgcttcccaaaaagagyggtaatgcattggcacagrctgcccagggaggtgatggagacactgtccctggaggtgttcaagcmctgtagagatgtggcactaagggacatgtcttactgagcatggtggratgggttgaakgttgaaacagatgagcttagtggtcttttccaaccttaatgattctgtgattctatgataaaatgtgcaaagttcttagaaaagaacccaggtaggaactgtgtatagtaaacaagaaagtaaacattctctatgaatgccttcaacaaagaaaaatctgtggtctgaaaacccataaataactaaaattctcat

SEQ ID NO: 48726 - DNA, 600 bp, Chicken  19866894294116_5
ctgagttactccccagtttgcagtatacttcagtaatgtgttcacttttgggcccttcactacaagaaagacactgtagaggtgctgagtgtctccagagaagggcaamagagctggtgaggatgtctggagcacaagttttatggagagtggcagggcaagaggcaatggctttaagctgtgcaaggggaggttcaggttggatatttggaaaaattgcttcccaaaaagagyggtaatgcattggcacagrctgcccagggaggtgatggagacactgtccctggaggtgttcaagcmctgtagagatgtggcactaagggacatgtcttactgagcatggtggratgggttgaakgttgaaacagatgagcttagtggtcttttccaaccttaatgattctgtgattctatgataaaatgtgcaaagttcttagaaaagaacccaggtaggaactgtgtatagtaaacaagaaagtaaacattctctatgaatgccttcaacaaagaaaaatctgtggtctgaaaacccataaataactaaaattctcatgtcataaagggtgaattgggttaaagtatggggaattgcattgcctt

SEQ ID NO: 48727 - DNA, 582 bp, Chicken  19866894294116_6
ttgggcccttcactacaagaaagacactgtagaggtgctgagtgtctccagagaagggcaamagagctggtgaggatgtctggagcacaagttttatggagagtggcagggcaagaggcaatggctttaagctgtgcaaggggaggttcaggttggatatttggaaaaattgcttcccaaaaagagyggtaatgcattggcacagrctgcccagggaggtgatggagacactgtccctggaggtgttcaagcmctgtagagatgtggcactaagggacatgtcttactgagcatggtggratgggttgaakgttgaaacagatgagcttagtggtcttttccaaccttaatgattctgtgattctatgataaaatgtgcaaagttcttagaaaagaacccaggtaggaactgtgtatagtaaacaagaaagtaaacattctctatgaatgccttcaacaaagaaaaatctgtggtctgaaaacccataaataactaaaattctcatgtcataaagggtgaattgggttaaagtatggggaattgcattgccttctgccactgacccagtcaaagtacttcaa

SEQ ID NO: 48728 - DNA, 571 bp, Chicken  19866894294116_7
actacaagaaagacactgtagaggtgctgagtgtctccagagaagggcaamagagctggtgaggatgtctggagcacaagttttatggagagtggcagggcaagaggcaatggctttaagctgtgcaaggggaggttcaggttggatatttggaaaaattgcttcccaaaaagagyggtaatgcattggcacagrctgcccagggaggtgatggagacactgtccctggaggtgttcaagcmctgtagagatgtggcactaagggacatgtcttactgagcatggtggratgggttgaakgttgaaacagatgagcttagtggtcttttccaaccttaatgattctgtgattctatgataaaatgtgcaaagttcttagaaaagaacccaggtaggaactgtgtatagtaaacaagaaagtaaacattctctatgaatgccttcaacaaagaaaaatctgtggtctgaaaacccataaataactaaaattctcatgtcataaagggtgaattgggttaaagtatggggaattgcattgccttctgccactgacccagtcaaagtacttcaa

SEQ ID NO: 48729 - DNA, 600 bp, Chicken  19866894294120_1
gacctgaaatggcagagatattccacatcctatgatgtcaagctcaacaacataacagaggggagagttttttccgaaaaagttgctcagaaagtgaaaggacctaagtctgcttatacaagttgatgagtcattacttttacaacacttgtttttttcttatgattttccttcatttattaattagtgtttatctcaatccatgagtttttctcattgttgcttttctgcatctttactccattctgctgagggacagaagtgttgggactagtgagtgactgactgcatggggacttrgatgcctcttgagaacaattcaacacaaagagataaactaacctgtgataaattggtaatagagatgaaaaaacacagttgatgaaactaaaatacttgagtttcccaagggaagtctacagaaagcaacacatgcagagccagaagacttgacatcaccaagtatggagctttaatggagcagacagagaggtaatttactgaccagcgttgagaatgtataaaaatatcaatggaagaaacaccaaaatactataaaagattttaaagcttggtggtgacaatgctttgtctgtgagg

SEQ ID NO: 48730 - DNA, 599 bp, Chicken  19866894294127_1
  misc_feature (1)..(18): n is any nucleotide
nnnnnnnnnnnnnnnnnntttgtggaccctctctggacccactccacaactccacatttttctcacataatgggacccagacctggatgcaaaactgcaggtggagcctcatagacacagagaagaaggggacaatcccctccttcttcttcctggacacccttcttttcatgcaggccaggacactgttggccttctgagttggagtgctgtggataagcccttcttttggccagcagagttggaatcatcttgttgcagtgaaagctaaatgcttccagctagacagtcagcagatcycccaggaaagcgggcaggtatgggctctgggcctgcctagtgggaaccctcatatgrttgaacccatggcagaccatagtatatgccatatgaaggccacactgtgaccagcaagctcgtagatgtttttcagtctcacccccacagtgagcaaggcatttcacagtagtgagcacatgaaatgaaaaagagatcaagggtccccagtttcccttatgtgacttcctccttgctgctctgacactgtcagaaaaatggaaactggccagatgaaaactctrggttttctccagtagatg

SEQ ID NO: 48731 - DNA, 600 bp, Chicken  19866894294127_2
ttttctcacataatgggacccagacctggatgcaaaactgcaggtggagcctcatagacacagagaagaaggggacaatcccctccttcttcttcctggacacccttcttttcatgcaggccaggacactgttggccttctgagttggagtgctgtggataagcccttcttttggccagcagagttggaatcatcttgttgcagtgaaagctaaatgcttccagctagacagtcagcagatcycccaggaaagcgggcaggtatgggctctgggcctgcctagtgggaaccctcatatgrttgaacccatggcagaccatagtatatgccatatgaaggccacactgtgaccagcaagctcgtagatgtttttcagtctcacccccacagtgagcaaggcatttcacagtagtgagcacatgaaatgaaaaagagatcaagggtccccagtttcccttatgtgacttcctccttgctgctctgacactgtcagaaaaatggaaactggccagatgaaaactctrggttttctccagtagatgtgctgggcccattcagataggtattgtcatagaaccatagaagcatagaagcatagaa

SEQ ID NO: 48732 - DNA, 390 bp, Chicken  19866894294127_3
ctagacagtcagcagatcycccaggaaagcgggcaggtatgggctctgggcctgcctagtgggaaccctcatatgrttgaacccatggcagaccatagtatatgccatatgaaggccacactgtgaccagcaagctcgtagatgtttttcagtctcacccccacagtgagcaaggcatttcacagtagtgagcacatgaaatgaaaaagagatcaagggtccccagtttcccttatgtgacttcctccttgctgctctgacactgtcagaaaaatggaaactggccagatgaaaactctrggttttctccagtagatgtgctgggcccattcagataggtattgtcatagaaccatagaagcatagaagcatagaatcacagaatcagaa

SEQ ID NO: 48733 - DNA, 600 bp, Chicken  19866894294130_1
agtaagcaaaaccaggcccccagtgcttctcagaattggctccactgatgttatctaccctttgcttctaacatatattacatttgtgtgggcgctgtagcatctcagtcatgtttatgacctcatcttgtctaatgcataaaacatatggtacttgtatggcatccatatgagtagcgtttatgcatacgtatctgtatatgtttctatatttgatccatgtgagagcaaatatcccagcttaaaaaaaaattcataggagaataaacgctaccacatttcagagtaaaggctataccrtgctaattttaaggttttgcacgacacatatgaaactgttaatagtaccttggcactgggaaagtaccaaataaagtaagaggatcaataggtgcatgatatatggcctcaatgatttctggttttgtttttaatactttggtcctgatgcataatgggagaggaggagtcatcatcatcacggaaacaggacaggatggtgattaagatggtggtggggcttttgtttcctgggtatatgtggttgctgaagtgtttgttattgttgtgctcagtgacagtttgttcagattacctgca

SEQ ID NO: 48734 - DNA, 599 bp, Chicken  19866894294135_1
  misc_feature (1)..(249): n is any nucleotide
nnnnnnnnnnnnnnnnnnnnnnnnnnnnnnnnnnnnnnnnnnnnnnnnnnnnnnnnnnnnnnnnnnnnnnnnnnnnnnnnnnnnnnnnnnnnnnnnnnnnnnnnnnnnnnnnnnnnnnnnnnnnnnnnnnnnnnnnnnnnnnnnnnnnnnnnnnnnnnnnnnnnnnnnnnnnnnnnnnnnnnnnnnnnnnnnnnnnnnnnnnnnnnnnnnnnnnnnnnnnnnnnnnnnnnnnnnnnnnnnnnnnnnnnncttagcacacacacaccccagtctgagaaggggatatggggaaggccataygctgatacttggaaccttcaccacagtgccaaaaatacatgaaaaaggaaagcatttggggcattctgttgttgttgctttgttttttaaggggttgggattttttaggttgtttttttttyyyccccccccactaagggaataaaatctgaataccagaattcactgagaatctatatacatcacattgtagttaaacacacaccaatcttaaagtcaagattgactgttcttgcatttgtaaaatggctagagctgggctaaatttcagcctcacgggagactttgggtaacatttg

SEQ ID NO: 48735 - DNA, 599 bp, Chicken  19866894294135_2
  misc_feature (1)..(127): n is any nucleotide
nnnnnnnnnnnnnnnnnnnnnnnnnnnnnnnnnnnnnnnnnnnnnnnnnnnnnnnnnnnnnnnnnnnnnnnnnnnnnnnnnnnnnnnnnnnnnnnnnnnnnnnnnnnnnnnnnnnnnnnnnnnnnnncttagcacacacacaccccagtctgagaaggggatatggggaaggccataygctgatacttggaaccttcaccacagtgccaaaaatacatgaaaaaggaaagcatttggggcattctgttgttgttgctttgttttttaaggggttgggattttttaggttgtttttttttyyyccccccccactaagggaataaaatctgaataccagaattcactgagaatctatatacatcacattgtagttaaacacacaccaatcttaaagtcaagattgactgttcttgcatttgtaaaatggctagagctgggctaaatttcagcctcacgggagactttgggtaacatttgtgttctgtgccttccactttaggtttgtgttttatcgcaaacaggagaaaataatgcgctcaccacagtgccaagaatatccagcaacaacaatgcacaatagatattcttgtaataattca

SEQ ID NO: 48736 - DNA, 599 bp, Chicken  19866894294135_3
  misc_feature (1)..(126): n is any nucleotide
nnnnnnnnnnnnnnnnnnnnnnnnnnnnnnnnnnnnnnnnnnnnnnnnnnnnnnnnnnnnnnnnnnnnnnnnnnnnnnnnnnnnnnnnnnnnnnnnnnnnnnnnnnnnnnnnnnnnnnnnnnnnnncttagcacacacacaccccagtctgagaaggggatatggggaaggccataygctgatacttggaaccttcaccacagtgccaaaaatacatgaaaaaggaaagcatttggggcattctgttgttgttgctttgttttttaaggggttgggattttttaggttgtttttttttyyyccccccccactaagggaataaaatctgaataccagaattcactgagaatctatatacatcacattgtagttaaacacacaccaatcttaaagtcaagattgactgttcttgcatttgtaaaatggctagagctgggctaaatttcagcctcacgggagactttgggtaacatttgtgttctgtgccttccactttaggtttgtgttttatcgcaaacaggagaaaataatgcgctcaccacagtgccaagaatatccagcaacaacaatgcacaatagatattcttgtaataattcaa

SEQ ID NO: 48737 - DNA, 599 bp, Chicken  19866894294135_4
  misc_feature (1)..(125): n is any nucleotide
nnnnnnnnnnnnnnnnnnnnnnnnnnnnnnnnnnnnnnnnnnnnnnnnnnnnnnnnnnnnnnnnnnnnnnnnnnnnnnnnnnnnnnnnnnnnnnnnnnnnnnnnnnnnnnnnnnnnnnnnnnnnncttagcacacacacaccccagtctgagaaggggatatggggaaggccataygctgatacttggaaccttcaccacagtgccaaaaatacatgaaaaaggaaagcatttggggcattctgttgttgttgctttgttttttaaggggttgggattttttaggttgtttttttttyyyccccccccactaagggaataaaatctgaataccagaattcactgagaatctatatacatcacattgtagttaaacacacaccaatcttaaagtcaagattgactgttcttgcatttgtaaaatggctagagctgggctaaatttcagcctcacgggagactttgggtaacatttgtgttctgtgccttccactttaggtttgtgttttatcgcaaacaggagaaaataatgcgctcaccacagtgccaagaatatccagcaacaacaatgcacaatagatattcttgtaataattcaac

SEQ ID NO: 48738 - DNA, 600 bp, Chicken  19866894294142_1
atgagaagttaatgccactttattttccaaactttttctgcagttttttaacaggattggggtgtccaaactgcatcgactatttcacctcacaagggttacagaatatttaccacctgcagaacctatccatagaggtaaatgctttgggaagatctgttcttaccacttgtttctattagctgttgatcttaaaagcaaggacaaaactgttttacaagaaaaaactgtgcaccaacctgttacagaatatgtacttcccatgatttatgtcttccatttatgcatcatttctagtckttcacatttaacagtggttcagttcttggtagcaaccacaatagcctcttcattggttcctccagactgtcagaaatgagatctgatgaactaacagagagaaacaataactcagcacacttgtttagctcttttcagttgtcccagaaagagcagtccccaaaccagaactcaagtagatgtttaacccaaaagggaaaacagacaaggtactcagcaaatgaaacagcacaagttagggaagagctggaatgaaaacaggcatacagtaggttcagtatttgtgctctcatgctttgt

SEQ ID NO: 48739 - DNA, 600 bp, Chicken  19866894294143_1
ttactgagtacaatgtacttaaattaggacttataataaaaggattgtcaagtcccctcgtggatcgctccagaattttctgcctgggtactggcaaatggacaaaattctctaaattcttgcatgtcctggcatgtgtatggctgcctgagtctgttcctcatcatctctactgtattcttggaagttgtatctctatgtcaggcagaaacaggaaacagtgccttcggaagaatgtctaccatatgtcaagctaaggaaagcagtcgggtgcaggggcttgggggtgaatggggagcmggcagyrggatgagaagggattttaattgagcaaagctccctcccaccccaagcgctggcacggcctcccctccccctgttacaaatggaaaactacaaaagaagaggacagacttytctgggctgacaaagaaataccagagcagagccagtgagcagcatccagtgccttaaagcttgctgccctcctacccatgggaggaaccagcttgtaaaaatgaatagctttttgctgcaggaaggatggagaagcaagactcggtgcttttctttctttttttttttcttttttaattaaga

SEQ ID NO: 48740 - DNA, 600 bp, Chicken  19866894294143_2
agtacaatgtacttaaattaggacttataataaaaggattgtcaagtcccctcgtggatcgctccagaattttctgcctgggtactggcaaatggacaaaattctctaaattcttgcatgtcctggcatgtgtatggctgcctgagtctgttcctcatcatctctactgtattcttggaagttgtatctctatgtcaggcagaaacaggaaacagtgccttcggaagaatgtctaccatatgtcaagctaaggaaagcagtcgggtgcaggggcttgggggtgaatggggagcmggcagyrggatgagaagggattttaattgagcaaagctccctcccaccccaagcgctggcacggcctcccctccccctgttacaaatggaaaactacaaaagaagaggacagacttytctgggctgacaaagaaataccagagcagagccagtgagcagcatccagtgccttaaagcttgctgccctcctacccatgggaggaaccagcttgtaaaaatgaatagctttttgctgcaggaaggatggagaagcaagactcggtgcttttctttctttttttttttcttttttaattaagaataaat

SEQ ID NO: 48741 - DNA, 600 bp, Chicken  19866894294143_3
gtacaatgtacttaaattaggacttataataaaaggattgtcaagtcccctcgtggatcgctccagaattttctgcctgggtactggcaaatggacaaaattctctaaattcttgcatgtcctggcatgtgtatggctgcctgagtctgttcctcatcatctctactgtattcttggaagttgtatctctatgtcaggcagaaacaggaaacagtgccttcggaagaatgtctaccatatgtcaagctaaggaaagcagtcgggtgcaggggcttgggggtgaatggggagcmggcagyrggatgagaagggattttaattgagcaaagctccctcccaccccaagcgctggcacggcctcccctccccctgttacaaatggaaaactacaaaagaagaggacagacttytctgggctgacaaagaaataccagagcagagccagtgagcagcatccagtgccttaaagcttgctgccctcctacccatgggaggaaccagcttgtaaaaatgaatagctttttgctgcaggaaggatggagaagcaagactcggtgcttttctttctttttttttttcttttttaattaagaataaata

SEQ ID NO: 48742 - DNA, 600 bp, Chicken  19866894294143_4
tcttgcatgtcctggcatgtgtatggctgcctgagtctgttcctcatcatctctactgtattcttggaagttgtatctctatgtcaggcagaaacaggaaacagtgccttcggaagaatgtctaccatatgtcaagctaaggaaagcagtcgggtgcaggggcttgggggtgaatggggagcmggcagyrggatgagaagggattttaattgagcaaagctccctcccaccccaagcgctggcacggcctcccctccccctgttacaaatggaaaactacaaaagaagaggacagacttytctgggctgacaaagaaataccagagcagagccagtgagcagcatccagtgccttaaagcttgctgccctcctacccatgggaggaaccagcttgtaaaaatgaatagctttttgctgcaggaaggatggagaagcaagactcggtgcttttctttctttttttttttcttttttaattaagaataaataaagtaataattaaacaaaagaatggacgaagataaagatgcaaaattatagatatccatttaaacattttgaatagcttctttttcaaggcttccctaatggagaacatc

SEQ ID NO: 48743 - DNA, 600 bp, Chicken  19866894294146_1
gaaattccagaaatttttcattctgaattatgataaaatttcaaaaatgtctgtgctttcactgttgattttgtttgtttgttgaggaattgtcatattttgtcttagagattgttaaacaaaaatatctaattttagcattttcaaaagttagtccagaatatgttgctcatggctcagtaagaaactttggtaataacttccaaaataattgatctcatataaatctttaaatgacgtctctaaaaaggaaacagattatatatttgcagagcacaaaaatgattaacaattaaattraaactttaagcattatttctgagaaaggcttgctgcagtatttattcacttcagagtaggagctctgatttgacctgatatccttgctacttgccaattgttcatgttagcactcagacatatgcagaccaagtgtcttatgatatcacacactgttgaatacattagggaactcatattttcttcagctgcagtaacaggaacagcatccattccgaaatacatcgacaagtgtgccaaatagctaatctcaaccatgcccctgtaaattaagggaatctggacacacacacacacacc

SEQ ID NO: 48744 - DNA, 600 bp, Chicken  19866894294152_1
ttttaggtcattgctccttgtcctgtcactacacaccaccaaagagcctggccttttccagttgccaccctcctcaatttagatatttacaaacattaatcagatccccctcagtcttcttttccccaggtggaactgaccaaggttactccgcctttcctcatacaggagatgctccaggccctttgtcgtgtttgtggccctccactggaccctttctaggagattcctgtcttgtttgaactggggatcacagagctggacacaacgggctggcattggaagcattacaggcaaatkggtactgccctcaatgcaccacttcttgactagcagccctaacgcaagaccttacacatccaatggtttgtagtgggttcttttacagaaagttagttttcagttgtcaactacgtgaactacaagtaagctacatctctattaggggagaaaaaaaaaataggaagaaaaggaaagatgaaaaaggaaaaygccagtgttattaattatttaagtttggcatttctgtgaaaagtttgactggattgctggttgttaaattcttaataacctcctagactttgctttcaggaaaatagc

SEQ ID NO: 48745 - DNA, 600 bp, Chicken  19866894294152_2
cgcctttcctcatacaggagatgctccaggccctttgtcgtgtttgtggccctccactggaccctttctaggagattcctgtcttgtttgaactggggatcacagagctggacacaacgggctggcattggaagcattacaggcaaatkggtactgccctcaatgcaccacttcttgactagcagccctaacgcaagaccttacacatccaatggtttgtagtgggttcttttacagaaagttagttttcagttgtcaactacgtgaactacaagtaagctacatctctattaggggagkaaaaaaaaataggaagaaaaggaaagatgaaaaaggaaaaygccagtgttattaattatttaagtttggcatttctgtgaaaagtttgactggattgctggttgttaaattcttaataacctcctagactttgctttcaggaaaatagcaaaacacctattttcaaggaatgtaatctagtgtatgaatgtaattaaaattcaactccaaccaatttctctctcaagtcaggaactgaaacacaatcaatattggcacagaaaaatcccacatgagatggtggctgaagattaattttct

SEQ ID NO: 48746 - DNA, 600 bp, Chicken  19866894294152_3
gtttgtggccctccactggaccctttctaggagattcctgtcttgtttgaactggggatcacagagctggacacaacgggctggcattggaagcattacaggcaaatkggtactgccctcaatgcaccacttcttgactagcagccctaacgcaagaccttacacatccaatggtttgtagtgggttcttttacagaaagttagttttcagttgtcaactacgtgaactacaagtaagctacatctctattaggggagaaaaaaaaaataggaagaaaaggaaagatgaaaaaggaaaaygccagtgttattaattatttaagtttggcatttctgtgaaaagtttgactggattgctggttgttaaattcttaataacctcctagactttgctttcaggaaaatagcaaaacacctattttcaaggaatgtaatctagtgtatgaatgtaattaaaattcaactccaaccaatttctctctcaagtcaggaactgaaacacaatcaatattggcacagaaaaatcccacatgagatggtggctgaagattaattttctatctatttaaacctggtcttcacttattgaattacactgtt

SEQ ID NO: 48747 - DNA, 599 bp, Chicken  19866894294154_1
  misc_feature (1)..(230): n is any nucleotide
nnnnnnnnnnnnnnnnnnnnnnnnnnnnnnnnnnnnnnnnnnnnnnnnnnnnnnnnnnnnnnnnnnnnnnnnnnnnnnnnnnnnnnnnnnnnnnnnnnnnnnnnnnnnnnnnnnnnnnnnnnnnnnnnnnnnnnnnnnnnnnnnnnnnnnnnnnnnnnnnnnnnnnnnnnnnnnnnnnnnnnnnnnnnnnnnnnnnnnnnnnnnnnnnnnnnnnnnnnnnnnnnnnnnnnagaagtttgagttctgcagcctgaatcacaagttcagggaggtaacaccagtgcaagactgacactgttmaatgacattcatttggtctaagccagtgctctcctggtgtgtgccctgaaccagagccctgcccagagcacactaagccatggctctggagctgttggctaggttgctgctctgcccaggacactgattcttctgctggtgtgtgttcacttgggttatgatgtggagtgataccagtagcagaagccccaggctggtacagcccatggccaggccttacagcagctcccagatcagatctctttgggcagagcaggcagtgttcgctcctcggttggagaaacacaatcaaggatata

SEQ ID NO: 48748 - DNA, 600 bp, Chicken  19866894294154_2
tgttggctaggttgctgctctgcccaggacactgattcttctgctggtgtgtgttcacttgggttatgatgtggagtgataccagtagcagaagccccaggctggtacagcccatggccaggccttacagcagctcccagatcagatctctttgggcagagcaggcagtgttcgctcctcggttggagaaacacaatcaaggatatactttgcttccctggttgtgtgaatcttcgctgttcaacgtcaatccaagttctgagatgaccatgaaatggacattttagagcagaagttctwacatttttcttctggctctaattctgtggtcacatttactagatgttggcaaaaagggcatctgataagaagcagttgaaagtactggagagctttttggcacaggcaccactgggtgattttggagagaggaatgctggaggctggaactttctttccaggggcaatgctggggacagagggacccttagttctgaggctatatctgcagcaggtgggtaagcttagtgttaccatctctggggctcatggttctgagtcttcttgcctgagagaaaagggcctttgcagcatggaatc

SEQ ID NO: 48749 - DNA, 600 bp, Chicken  19866894294158_1
cctgcagcagctggaaaacctgtccagacgccccggttcacagcggtgcagaaccactcagctccctcactcagcatgctgctgttgtgatcactttttgacctattatatcatttatatcaattttcctccagcattgtttgtagaaatacagatgactttaaatacttttttttcagtgccatgaactggtgactggatctgaaagagacgaggaagaaataatatgcgtatccttcaggctaagggtgacataaatttgctgacttcgtccttttttccttaaccagttcctttttyttgcttcccccactggctatacagggtaaccctaccacagagataccagtgtaattaccgggcaagacaaatcaatgtggattttcagctgcctkggagtcatgtacgtgccctcttttgtagggcagcctttgtacggccagggctggaaagcagaaacatgctctctaataaccccactggagcctccaaaggactaaagggtgcagcagctcattttaccatcgtagtgctggtgatacagcagattcgatatctmccagagctccttctgtagaactgcatactttgggagtttgt

SEQ ID NO: 48750 - DNA, 600 bp, Chicken  19866894294158_2
ttttgacctattatatcatttatatcaattttcctccagcattgtttgtagaaatacagatgactttaaatacttttttttcagtgccatgaactggtgactggatctgaaagagacgaggaagaaataatatgcgtatccttcaggctaagggtgacataaatttgctgacttcgtccttttttccttaaccagttcctttttyttgcttcccccactggctatacagggtaaccctaccacagagataccagtgtaattaccgggcaagacaaatcaatgtggattttcagctgcctkggagtcatgtacgtgccctcttttgtagggcagcctttgtacggccagggctggaaagcagaaacatgctctctaataaccccactggagcctccaaaggactaaagggtgcagcagctcattttaccatcgtagtgctggtgatacagcagattcgatatctmccagagctccttctgtagaactgcatactttgggagtttgtaacatcactgcagaaaatgttgctccactttctgctggggccaatgcaatcaaatcagaakcaaatccctaaagaacttaagataataatctggt

SEQ ID NO: 48751 - DNA, 600 bp, Chicken  19866894294158_3
ttgctgacttcgtccttttttccttaaccagttcctttttyttgcttcccccactggctatacagggtaaccctaccacagagataccagtgtaattaccgggcaagacaaatcaatgtggattttcagctgcctkggagtcatgtacgtgccctcttttgtagggcagcctttgtacggccagggctggaaagcagaaacatgctctctaataaccccactggagcctccaaaggactaaagggtgcagcagctcattttaccatcgtagtgctggtgatacagcagattcgatatctmccagagctccttctgtagaactgcatactttgggagtttgtaacatcactgcagaaaatgttgctccactttctgctggggccaatgcaatcaaatcagaakcaaatccctaaagaacttaagataataatctggtaggtttaaatttatggagaagtcttccttgtgtttaggaaagtgattaaggatttgctccccataagctcatgtttttctgcctgatggcaccagatgtggccctttgtctttcaggatgcaaatgccatgtgtcaggagcatgctgggctgcttttgctttcc

SEQ ID NO: 48752 - DNA, 600 bp, Chicken  19866894294158_4
gcaagacaaatcaatgtggattttcagctgcctkggagtcatgtacgtgccctcttttgtagggcagcctttgtacggccagggctggaaagcagaaacatgctctctaataaccccactggagcctccaaaggactaaagggtgcagcagctcattttaccatcgtagtgctggtgatacagcagattcgatatctmccagagctccttctgtagaactgcatactttgggagtttgtaacatcactgcagaaaatgttgctccactttctgctggggccaatgcaatcaaatcagaakcaaatccctaaagaacttaagataataatctggtaggtttaaatttatggagaagtcttccttgtgtttaggaaagtgattaaggatttgctccccataagctcatgtttttctgcctgatggcaccagatgtggccctttgtctttcaggatgcaaatgccatgtgtcaggagcatgctgggctgcttttgctttccccatgcccagctccaggagcatgagtgccaacagcagcaaaaggagcaggacatgtcagtcctgggctctcagcactcgctcccaggccgagcacctctttt

SEQ ID NO: 48753 - DNA, 600 bp, Chicken  19866894294160_1
gaccttccagctctgccaagcttgttggccattgcccacaggtattccaagacaatgagaatggacttgaaatgtgcactgttgactcctgctgcttgcatcaacatttggtcccaaattccctggcaagccaagcagtggtcagccctaatctatctcagacaactgttatgtctggctatcatgaacagttcacaaatatacttcaggcaggacatgaaattcagtggactgctctttggacaaaacccaagtaaagccctaccagaaagaataggcagaagaaaggaacttacaaamtgtgtaagaaagtgattgattttggccctgcttgagagcactgaagctagaaggtgttgaggaaagtatacggtcactgaagcactaaaaaattagaaactgtgaaaggaatgagtcttgagtaccaagagcaacaagctggcttctcagctgactagcaaattagcagcagaagcgagaggtgtaagaggagcaggagggaagaaaggctgcttaacaacctcagcagcatagccagaaggccaggttcactgctttgaggccatgaacctcttatatttctacccatgacagttaact

SEQ ID NO: 48754 - DNA, 461 bp, Chicken  19866894294164_1
tggccttctgggctgcaagcacacactgctggctcatgctcagcttctcgtccaccaagacccctaaatacttctcctcagggctgctctcaaggagatcttcccccagtttttgtaaatacctgggattgctccagcccagtttcagcaccctgcacttggccttgttgaacctcattaggttttcatgggcccacttctccagcctgtccaggtgcctctgcatggcttcccttccctgcagtgtgtcaactgcaccgctcagcttggtggtgtttgcaaatttgctgggggtgcacycggttttatcatctacgttattgatgaagatgttgaagagcactggtcccaagaccagcccttgggggatgccacttgtggcttgtctccacccagacgtagagccattgattacaatcctttggctgccaccaaataaaggcatacatgttatcctgtag

SEQ ID NO: 48755 - DNA, 600 bp, Chicken  19866894294172_1
caggttcacacctaatttactccgggttcactcacacttgtctccagttttactcacaatttgctccgtgtgtgcccacaccttacttgtgattttacttgcaatttactccaggttttattcacagtttactgaaggtttactcacactttactcctggcttcttcacactttgctcctggttttgctcacacttcacaccaggtttacacacacttcattttgggtttacgcttatgctggagatggagtggtcagctcagccttgctgaatgctgactctctgataatgaggctctrgaaaggagacagaagctctgaataaacaggggtgttttgtacctagccataagattagttctctgctgattttgaagacttgttatggaatttgattgctttctagccaatggattgttagtggaaatgtactgaatatgtgtgtgtcaacagtttaagggctggtctggcccggttccatgactagtggggcggagggacttcgcaaaatctgcgcctcaaggaagtgaaacaggggaccccaaaataattaaaaacagaggcaacgatctgtggagaaacaaactattttactaaata

SEQ ID NO: 48756 - DNA, 600 bp, Chicken  19866894294172_2
ctgcgcctcaaggaagtgaaacaggggaccccaaaataattaaaaacagaggcaacgatctgtggagaaacaaactattttactaaatataggattggattgtaagataacacactataatacagtataaataatatctctagggagagctgtggggagaaggaaatcacctcctgtgctgctcatctgggctgggcttctgagacacagggagctgatataagtgggcagcgctgcagagagacagctgtgcccaggagctgctcctgtgcaccacacagcagggctggggccatgacmatctggagatggggaggagagaaggaagagagcttagatgttgtgtggcacaatagcaggctgagagctcactgcaggtgcatttctcactatcgttgacaaggtaagtcttttgctccaggcaattcatcttctttttcctggagggatcactaattctgggacaccccattagatatctggttgaaggtgctccatgtttctttactgtggagaaagagctgctccagctgagggctttggtgcttcattgtcagagcacagccctgagggctgcgtgtcccaggacggctgcagtct

SEQ ID NO: 48757 - DNA, 588 bp, Chicken  19866894294175_1
agacaaatacagcaagagtcctgcattcactctcatgattcctgtagcattctcctcattcttactcttcagacagagttatccaaataagaccatgccataatagcagagagctgtcttgaaggaacagaactatgaaggcatacaaggaacacaactacttacatatctctacctaccaaacgttaatacacacagccgaaatggggagctcggcctgtttagcactaggctgttggatgacctgttgacagaggaaacaccaagtgaagaggtttattttattttctgtgaagtgtygagataatgcattatcaaatttttctggttcactgataagataacaacacgtaatcacattaaattgactcacgctatggataaagcaacacacttttatttatttgctcgttatctggcttgaccacatttcagtgtcttctaagacagtgaagcagtgaataacaaagcagtaaataacaaacaaaatggataatctcacaaccaaatctacataggaagagtgtcagtaagaaatcaaggaccatttgcctaagcttataaatgacggataaagcttctattttg

SEQ ID NO: 48758 - DNA, 600 bp, Chicken  19866894294181_1
ctgagtgataaatatctttctgattctccagatatcaatagctgtgcaattactattttcagggtttaaaagagaaattaaattgcctttttgttctcagaattattttttttctttttattctgccttctgataatagcattctagctgcatacattcgtttttttcatgtatgaacagtgagatgaagtttaaaaattggtacaactcctgggagtgtttacaaaaatcatattgtctagaaacaaattctcaaagatttattttttctttaattttccctgggacataaaaaaaaawaataataatctggagaaactaaaaatgcacaggtattatgcaaagtacgtactatctgaagaaaataaaatcattctgtaacaactcatcatgttacagtttttacttcttgtacagcctgtttctgcaggagcatatattacacaggagctttccttctctagtctgcttgatcttgatctggcttagggcagctagtagggtagagtttcttccatatgttcctagtttagacagaaatgccaaaaatgtttctaactgtctaagtatcacttcatccagaccatgcttgatgactgt

SEQ ID NO: 48759 - DNA, 599 bp, Chicken  19866894294182_1
  misc_feature (1)..(48): n is any nucleotide
nnnnnnnnnnnnnnnnnnnnnnnnnnnnnnnnnnnnnnnnnnnnnnnntcccctttcgctgcagcatagagcttttatgcctctggtgcttatccttggctcccagaacaagggctgttaaacagctgagctgtgcccctaattagcagaggcatcaagttaacaatgtaaagcctctccatcacttcaagcgtttttgaaattatagaaactgtgaagctggatttttctatattcagtgactgtaccaattgtcatctacatatttgatttcacaaaaggtcttttatcagttcagcycctcgcaggaaagctttagaatgcttctgaaacaattcaacagtagttgtcaaacttctttcagttaagagttgaacagttctgaatctaaagtgtataaatatatttcaagtgctttagagatgcacgaatcacaaaactgtgggtgtattgctggagaaaatgtcacattctgtacagaacagttttataaaaataccatcagctttccatattaaatacagtgaacactagcaatatggcaagggaccttcttggatggagaagttacatgctttccagtcataggaagtcagaga

SEQ ID NO: 48760 - DNA, 468 bp, Chicken  19866894294182_2
aatctaaagtgtataaatatatttcaagtgctttagagatgcacgaatcacaaaactgtgggtgtattgctggagaaaatgtcacattctgtacagaacagttttataaaaataccatcagctttccatattaaatacagtgaacactagcaatatggcaagggaccttcttggatggagaagttacatgctttccagtcataggaagtcagagaaacaacaggacttgcttatctaaatagaaaagttttaactggaaaatgacagggtcagttttatcttacttataacacatacagrctcttgcttattcagaaagctttcaagatatggctaatgctttgaacatgtctgttgctaaattggacaaaatctgcagagagaaatatggcaaccatttgatgccattacacacattttaggtagactgtaatgtctcacttgccaaaaacagaacatttttaaaaa

SEQ ID NO: 48761 - DNA, 600 bp, Chicken  19866894294194_1
atgattttcatgtttaatacaatttccccaaagcagtgatgccatttgtttacagtgtgctgcctgtgttcatggctgcatccctcagatgtgttcccgtatgctggtttcaattcttttgaaaccagatctacgcagaatcatttaaaatactattttgaaggtttgtttctaggtaatacagcatttgaaagttctcttcatggtttggaagaggtgtgtaaatacaggtgggggcttagtgctgagtgcagtctgtcagcttaattaaaagagaggaggtagcaaaggtacttgaayggagtctttgtagatccttttgttgagagaaaaggaagtttcttgttaactcagtctgttcagttctgagaagttataaatagcctgttctrttaacttctgaatacctgtatggaaagatggggggatacaaggaaaatgttcacgtgtgtaataattgtacctcattttccaactgtccaaaaaaaaaccccaacaactcacacaatgttaatttactgccagattataaccagtcttttaattcaggggtacagaatttggtcatttctgtaaatgggaaatttattgaacttggct

SEQ ID NO: 48762 - DNA, 600 bp, Chicken  19866894294194_2
gttcccgtatgctggtttcaattcttttgaaaccagatctacgcagaatcatttaaaatactattttgaaggtttgtttctaggtaatacagcatttgaaagttctcttcatggtttggaagaggtgtgtaaatacaggtgggggcttagtgctgagtgcagtctgtcagcttaattaaaagagaggaggtagcaaaggtacttgaayggagtctttgtagatccttttgttgagagaaaaggaagtttcttgttaactcagtctgttcagttctgagaagttataaatagcctgttctrttaacttctgaatacctgtatggaaagatggggggatacaaggaaaatgttcacgtgtgtaataattgtacctcattttccaactgtccaaaaaaaaaccccaacaactcacacaatgttaatttactgccagattataaccagtcttttaattcaggggtacagaatttggtcatttctgtaaatgggaaatttattgaacttggctcttaaattcagctttaccaaaacacgcctgaatgtggtagtgtggcagccatgcactctgcaaatgatggccttaggactgataggtgttgg

SEQ ID NO: 48763 - DNA, 599 bp, Chicken  19866894294196_1
  misc_feature (1)..(190): n is any nucleotide
nnnnnnnnnnnnnnnnnnnnnnnnnnnnnnnnnnnnnnnnnnnnnnnnnnnnnnnnnnnnnnnnnnnnnnnnnnnnnnnnnnnnnnnnnnnnnnnnnnnnnnnnnnnnnnnnnnnnnnnnnnnnnnnnnnnnnnnnnnnnnnnnnnnnnnnnnnnnnnnnnnnnnnnnnnnnnnnnnnnnnnnnnnnnnnttctaatttacttacgttttaggtttgcctaacaaaaccaaccaaccaaaaacaaacaaacaaaaaaaaaacaccacacaactcaaagctgggctactcagaaacacttytcctgaaattttcctttagaatattgaggaatgtacatccagagcacaaaaatgcacgtgatgacttacctgatggttttgacagcttcttcatctytgtctgtatcaaggtcagayggatccataaaaaagattttgtcctctggagttgaggactcctcagtatcatccagaccccgactaccatcactattcatttcactgctatcaacctccattggcaggtccaaatcctggcctgggctagcaggttctgtgagcaacacaggacgcagatattattttagagcacaattaaa

SEQ ID NO: 48764 - DNA, 599 bp, Chicken  19866894294196_2
  misc_feature (1)..(93): n is any nucleotide
nnnnnnnnnnnnnnnnnnnnnnnnnnnnnnnnnnnnnnnnnnnnnnnnnnnnnnnnnnnnnnnnnnnnnnnnnnnnnnnnnnnnnnnnnnnnnttctaatttacttacgttttaggtttgcctaacaaaaccaaccaaccaaaaacaaacaaacaaaaaaaaaacaccacacaactcaaagctgggctactcagaaacacttytcctgaaattttcctttagaatattgaggaatgtacatccagagcacaaaaatgcacgtgatgacttacctgatggttttgacagcttcttcatctytgtctgtatcaaggtcagayggatccataaaaaagattttgtcctctggagttgaggactcctcagtatcatccagaccccgactaccatcactattcatttcactgctatcaacctccattggcaggtccaaatcctggcctgggctagcaggttctgtgagcaacacaggacgcagatattattttagagcacaattaaaaaacaaaaaaggtaaaaaattgttctccatttcacatttatgcaagtaaatatcacagtgcaatcagaatataaaaaatcctcaagattttgctaaa

SEQ ID NO: 48765 - DNA, 599 bp, Chicken  19866894294196_3
  misc_feature (1)..(73): n is any nucleotide
nnnnnnnnnnnnnnnnnnnnnnnnnnnnnnnnnnnnnnnnnnnnnnnnnnnnnnnnnnnnnnnnnnnnnnnnnttctaatttacttacgttttaggtttgcctaacaaaaccaaccaaccaaaaacaaacaaacaaaaaaaaaacaccacacaactcaaagctgggctactcagaaacacttytcctgaaattttcctttagaatattgaggaatgtacatccagagcacaaaaatgcacgtgatgacttacctgatggttttgacagcttcttcatctytgtctgtatcaaggtcagayggatccataaaaaagattttgtcctctggagttgaggactcctcagtatcatccagaccccgactaccatcactattcatttcactgctatcaacctccattggcaggtccaaatcctggcctgggctagcaggttctgtgagcaacacaggacgcagatattattttagagcacaattaaaaaacaaaaaaggtaaaaaattgttctccatttcacatttatgcaagtaaatatcacagtgcaatcagaatataaaaaatcctcaagattttgctaaatgattcagagtgtgctaatc

SEQ ID NO: 48766 - DNA, 600 bp, Chicken  19866894294201_1
ggatcatctggcagatgtgctcacatgcagaggttaaatccaaacatgaaaattgagcttgtatttaaaatccaggatcctaaagaaaatggaaatagagtgagcctttgattcagttgtaaggctgaacctcttgaaagttatttcaaggatttcctcttacatagttacaataaatacctgctttcaatattcacagtctgtttttgctgctgcgtgcaaggtttctaatcttcttttgtcttttcctgtcaggagtcttcaagcatcttattctgttctgacttgatttctcagatrgaagtatgcatctcatccatgtctgargagcaatataccacctcatctgtcaacagcaagaaatgacaataattacaagaaagtacagactatatcacatgctttactataacttagggacaaacttgaaattcgcagataagtttgagcagattctaacctttgttatgggaagcaaagatctgaagtccaccgaggccaattaggtgattactgacttggagcactttgaatcatctccacaagtagcaccattagcccgagtgacccaatcaactctcctgtctgcatgtgttcaaa

SEQ ID NO: 48767 - DNA, 600 bp, Chicken  19866894294201_2
cagaggttaaatccaaacatgaaaattgagcttgtatttaaaatccaggatcctaaagaaaatggaaatagagtgagcctttgattcagttgtaaggctgaacctcttgaaagttatttcaaggatttcctcttacatagttacaataaatacctgctttcaatattcacagtctgtttttgctgctgcgtgcaaggtttctaatcttcttttgtcttttcctgtcaggagtcttcaagcatcttattctgttctgacttgatttctcagatrgaagtatgcatctcatccatgtctgargagcaatataccacctcatctgtcaacagcaagaaatgacaataattacaagaaagtacagactatatcacatgctttactataacttagggacaaacttgaaattcgcagataagtttgagcagattctaacctttgttatgggaagcaaagatctgaagtccaccgaggccaattaggtgattactgacttggagcactttgaatcatctccacaagtagcaccattagcccgagtgacccaatcaactctcctgtctgcatgtgttcaaagatctgttggcactgctctgaagatgt

SEQ ID NO: 48768 - DNA, 600 bp, Chicken  19866894294201_3
tactataacttagggacaaacttgaaattcgcagataagtttgagcagattctaacctttgttatgggaagcaaagatctgaagtccaccgaggccaattaggtgattactgacttggagcactttgaatcatctccacaagtagcaccattagcccgagtgacccaatcaactctcctgtctgcatgtgttcaaagatctgttggcactgctctgaagatgtgagtttaactttgctctcattttctcctaggtgaaggagagaaaatgctgtatttgtttttagatgtagtatacctscattattacaaaatacctctctcatttcacacagttgtgaagtaaaggaagtggagcactgccaaacacaccaaagttttttttccatttattggtaacatgagagaagaaataatccattttatgttttaccatgcttgcttatcatctgatttagtgctcctctgtcatggctaattactctaagataattctagttctaggtctcaaaatataygaataaaacatgtccaggtataccatatatgtcaggtgtgtgcagatatccacacaattgaagactttggattataaactatg

SEQ ID NO: 48769 - DNA, 600 bp, Chicken  19866894294201_4
agatgtgagtttaactttgctctcattttctcctaggtgaaggagagaaaatgctgtatttgtttttagatgtagtatacctscattattacaaaatacctctctcatttcacacagttgtgaagtaaaggaagtggagcactgccaaacacaccaaagttttttttccatttattggtaacatgagagaagaaataatccattttatgttttaccatgcttgcttatcatctgatttagtgctcctctgtcatggctaattactctaagataattctagttctaggtctcaaaatataygaataaaacatgtccaggtataccatatatgtcaggtgtgtgcagatatccacacaattgaagactttggattataaactatgggaatggatatgactattacatgaaaaatcaatgaaatgttaatcagataaagcacgacagcaggtggccaagatatcagtagggcacatgtcttatagcgtgtaaatctctctgcaaacaggaaggtcactttcatggcatcactagatattctatgtcaccaaaacagccaaagtcaccaaaatgtcaccatgcaatgctctttaagcaagggta

SEQ ID NO: 48770 - DNA, 600 bp, Chicken  19866894294213_1
attgaaataatgaaagtttctatctactgcctctggttttcgtttgtctcatttttgtttgcttgtttccttcaatactttcatatgaggctgtacggattcttgttttacaatgaacagtactccacctgttttctacttttaaatcagaccttccctatttattttatttaaatttgtccataaaaacttttcagaaaccccaagacattgtcaacttgctatttcaagtggcatatcgtacaattttataccattgctttctgaagtccaggattcaagtccttctttatgccttasaaaagttaagccttcctggtaagagctgggacacagaagcaaagtagacagggctgcactgatacctttacattccctttggtaagatataaggaaagttcgataggctgctttacttttctacaaaatctgagcagacctaaagagttttagaacagaagccagaaaagtaaatcccccaaagccacttcacagattcttattaaggatttgtctttaatactgactctgacccaatgtctcataacttagacattggcccttccaacacttcttattcatagatgttttctgctgaca

SEQ ID NO: 48771 - DNA, 600 bp, Chicken  19866894294215_1
gagatgtacggagcacatgctttctgtagccacggactaccgggagtgcttcacctctctctgtagaccttctgtccctgctgggttgcccctccacatcactgccgaggtgcaggatgctttgcttaggtgcgtgaacatgacggttttctccatgttgagatccacagcttctctgtgcaaaagttgtgttgccaataggtggcatacttctcctgcctctggggactgaaaaggcttgctgcgtgtctgaactaggtctgatcaaatgctgatagctgttcagttcagcacacacastatctttctctgttagagctctctatgcaggaggtaattaattagttctctgatgtgtgacttggacrcttcctgctcttctgcgaacttgacagagagtgtggaataatgtcctcaaagtgctgtagggagtaactaaagtccatatagaaatatccaggttatatatctcatggcacttttgtaaattaaaccttttggcatgaagaacagcaccccacttgcaataaaataaacagtttttaagaaacccgtgttaaccaaggtctctgcyggaacttagccttgaatgtattgttg

SEQ ID NO: 48772 - DNA, 600 bp, Chicken  19866894294215_2
cttctgtccctgctgggttgcccctccacatcactgccgaggtgcaggatgctttgcttaggtgcgtgaacatgacggttttctccatgttgagatccacagcttctctgtgcaaaagttgtgttgccaataggtggcatacttctcctgcctctggggactgaaaaggcttgctgcgtgtctgaactaggtctgatcaaatgctgatagctgttcagttcagcacacacastatctttctctgttagagctctctatgcaggaggtaattaattagttctctgatgtgtgacttggacrcttcctgctcttctgcgaacttgacagagagtgtggaataatgtcctcaaagtgctgtagggagtaactaaagtccatatagaaatatccaggttatatatctcatggcacttttgtaaattaaaccttttggcatgaagaacagcaccccacttgcaataaaataaacagtttttaagaaacccgtgttaaccaaggtctctgcyggaacttagccttgaatgtattgttgtcttcagtrgagctgtacacagagcacacagttaagcatatctgtaattccagtctttgmacattcac

SEQ ID NO: 48773 - DNA, 600 bp, Chicken  19866894294215_3
atagctgttcagttcagcacacacastatctttctctgttagagctctctatgcaggaggtaattaattagttctctgatgtgtgacttggacrcttcctgctcttctgcgaacttgacagagagtgtggaataatgtcctcaaagtgctgtagggagtaactaaagtccatatagaaatatccaggttatatatctcatggcacttttgtaaattaaaccttttggcatgaagaacagcaccccacttgcaataaaataaacagtttttaagaaacccgtgttaaccaaggtctctgcyggaacttagccttgaatgtattgttgtcttcagtrgagctgtacacagagcacacagttaagcatatctgtaattccagtctttgmacattcactgaaacaaagtygtaattgcacagacctattggcaggataaagattccaattttgacctgaagagaaaactgtggttttagttgttagtttccacagggaaaaacaaaaacaaaaacccaaacagattgcttattgtttcattattcagcagtttctcatcttgtcttttcagcaatctgtttctttggtctggaataaataagca

SEQ ID NO: 48774 - DNA, 600 bp, Chicken  19866894294215_4
ctgttagagctctctatgcaggaggtaattaattagttctctgatgtgtgacttggacrcttcctgctcttctgcgaacttgacagagagtgtggaataatgtcctcaaagtgctgtagggagtaactaaagtccatatagaaatatccaggttatatatctcatggcacttttgtaaattaaaccttttggcatgaagaacagcaccccacttgcaataaaataaacagtttttaagaaacccgtgttaaccaaggtctctgcyggaacttagccttgaatgtattgttgtcttcagtrgagctgtacacagagcacacagttaagcatatctgtaattccagtctttgmacattcactgaaacaaagtygtaattgcacagacctattggcaggataaagattccaattttgacctgaagagaaaactgtggttttagttgttagtttccacagggaaaaacaaaaacaaaaacccaaacagattgcttattgtttcattattcagcagtttctcatcttgtcttttcagcaatctgtttctttggtctggaataaataagcagagcgcttttcagaaacatactattttatctaact

SEQ ID NO: 48775 - DNA, 600 bp, Chicken  19866894294215_5
cttggacrcttcctgctcttctgcgaacttgacagagagtgtggaataatgtcctcaaagtgctgtagggagtaactaaagtccatatagaaatatccaggttatatatctcatggcacttttgtaaattaaaccttttggcatgaagaacagcaccccacttgcaataaaataaacagtttttaagaaacccgtgttaaccaaggtctctgcyggaacttagccttgaatgtattgttgtcttcagtrgagctgtacacagagcacacagttaagcatatctgtaattccagtctttgmacattcactgaaacaaagtygtaattgcacagacctattggcaggataaagattccaattttgacctgaagagaaaactgtggttttagttgttagtttccacagggaaaaacaaaaacaaaaacccaaacagattgcttattgtttcattattcagcagtttctcatcttgtcttttcagcaatctgtttctttggtctggaataaataagcagagcgcttttcagaaacatactattttatctaactttatttccaatgctgggaggtgaattttagcactcactttggcatagccag

SEQ ID NO: 48776 - DNA, 600 bp, Chicken  19866894294215_6
ctgcgaacttgacagagagtgtggaataatgtcctcaaagtgctgtagggagtaactaaagtccatatagaaatatccaggttatatatctcatggcacttttgtaaattaaaccttttggcatgaagaacagcaccccacttgcaataaaataaacagtttttaagaaacccgtgttaaccaaggtctctgcyggaacttagccttgaatgtattgttgtcttcagtrgagctgtacacagagcacacagttaagcatatctgtaattccagtctttgmacattcactgaaacaaagtygtaattgcacagacctattggcaggataaagattccaattttgacctgaagagaaaactgtggttttagttgttagtttccacagggaaaaacaaaaacaaaaacccaaacagattgcttattgtttcattattcagcagtttctcatcttgtcttttcagcaatctgtttctttggtctggaataaataagcagagcgcttttcagaaacatactattttatctaactttatttccaatgctgggaggtgaattttagcactcactttggcatagccagaattaagctaatgctgagta

SEQ ID NO: 48777 - DNA, 600 bp, Chicken  19866894294215_7
aaacagattgcttattgtttcattattcagcagtttctcatcttgtcttttcagcaatctgtttctttggtctggaataaataagcagagcgcttttcagaaacatactattttatctaactttatttccaatgctgggaggtgaattttagcactcactttggcatagccagaattaagctaatgctgagtatattccaaaaccctgctgaggacctggtaacatcactgagttctcaggtagctacttaggcaacagcagtgcccaacagacaatattctctgttttctcccatgtaygtctgtccttgcacaaccgattttccttccagaagtcaaagcagacagattgcctagttgataactagaaatgaaataaaatgagtttcatttcctttggggaaaaaaaaaattaaaagcaatacattacatagaaattccattggaagcctattccaaatttcagcttctccacacatttttagttccactgttacttttttgttgaattttatgaccagcttgattatgaagttttctctttgtgggtggtgagataaaatgacttaagtccatgtcagtggaatttcagtttgttac

SEQ ID NO: 48778 - DNA, 600 bp, Chicken  19866894294217_1
ctgatgtttcatgtgaggaatgccctcctgggaccttctctgaccaaagctccagcactgacgtctgcaagccccacacggagtaagtccagagtgtttccaagtgacaaaccgattggttaaagctaataaaggacccaaagggactcctgtgtgctttgcaccaggagtgacaaattcacctgagaggcagtgggacggctttgagcctctgtgctgtttgtagctggaaggaggaagggatctctctcgcctcagtttcagttcactgagtacagtgggattccgtgcgcgtatgartttgcatccgggtcaagaatcagtgccacaggggtgagcagaaggttaatgactttctgactaaacccagtaaatacatgtggtataaacatgaccaaaaagggcatgtgccacatggaaaatcttacwgtgtgtcatgtcatttgctcctagcgctgatgcactgttctctcttttgttccccagctgtgccaagttgaacaaagtagcacaaggcaaaggaaatgccacccatgatcaggtttgcacggaccaattgccctcctacctcaccccagacacctcctccatcagaatcac

SEQ ID NO: 48779 - DNA, 600 bp, Chicken  19866894294217_2
taaaggacccaaagggactcctgtgtgctttgcaccaggagtgacaaattcacctgagaggcagtgggacggctttgagcctctgtgctgtttgtagctggaaggaggaagggatctctctcgcctcagtttcagttcactgagtacagtgggattccgtgcgcgtatgartttgcatccgggtcaagaatcagtgccacaggggtgagcagaaggttaatgactttctgactaaacccagtaaatacatgtggtataaacatgaccaaaaagggcatgtgccacatggaaaatcttacwgtgtgtcatgtcatttgctcctagcgctgatgcactgttctctcttttgttccccagctgtgccaagttgaacaaagtagcacaaggcaaaggaaatgccacccatgatcaggtttgcacggaccaattgccctcctacctcaccccagacacctcctccatcagaatcaccaatgagacagatgactctgacgtactgaagcgtaaygcaaaccyggtgacccttgctagcatcctttcaagtgccacaaccgaaattcccrgttcaactcccgaggaggaagctctggctggcacttc

SEQ ID NO: 48780 - DNA, 600 bp, Chicken  19866894294217_3
gcagaaggttaatgactttctgactaaacccagtaaatacatgtggtataaacatgaccaaaaagggcatgtgccacatggaaaatcttacwgtgtgtcatgtcatttgctcctagcgctgatgcactgttctctcttttgttccccagctgtgccaagttgaacaaagtagcacaaggcaaaggaaatgccacccatgatcaggtttgcacggaccaattgccctcctacctcaccccagacacctcctccatcagaatcaccaatgagacagatgactctgacgtactgaagcgtaaygcaaaccyggtgacccttgctagcatcctttcaagtgccacaaccgaaattcccrgttcaactcccgaggaggaagctctggctggcacttctcccaccttagccaagggggaaacaacaacgagaggtcagaaaggatttattctatctggcatgttttgttcagagatatctttagtaaaagtagtacgtgagcctcctgcataacccctgcagcttgtgaaatgatgttgggcaaacacacagatctactgatagttccccttctgccttctcttggtctctttgttctccctttgc

SEQ ID NO: 48781 - DNA, 600 bp, Chicken  19866894294217_4
ttaatgactttctgactaaacccagtaaatacatgtggtataaacatgaccaaaaagggcatgtgccacatggaaaatcttacwgtgtgtcatgtcatttgctcctagcgctgatgcactgttctctcttttgttccccagctgtgccaagttgaacaaagtagcacaaggcaaaggaaatgccacccatgatcaggtttgcacggaccaattgccctcctacctcaccccagacacctcctccatcagaatcaccaatgagacagatgactctgacgtactgaagcgtaaygcaaaccyggtgacccttgctagcatcctttcaagtgccacaaccgaaattcccrgttcaactcccgaggaggaagctctggctggcacttctcccaccttagccaagggggaaacaacaacgagaggtcagaaaggatttattctatctggcatgttttgttcagagatatctttagtaaaagtagtacgtgagcctcctgcataacccctgcagcttgtgaaatgatgttgggcaaacacacagatctactgatagttccccttctgccttctcttggtctctttgttctccctttgcccctcctg

SEQ ID NO: 48782 - DNA, 600 bp, Chicken  19866894294217_5
gaccaaaaagggcatgtgccacatggaaaatcttacwgtgtgtcatgtcatttgctcctagcgctgatgcactgttctctcttttgttccccagctgtgccaagttgaacaaagtagcacaaggcaaaggaaatgccacccatgatcaggtttgcacggaccaattgccctcctacctcaccccagacacctcctccatcagaatcaccaatgagacagatgactctgacgtactgaagcgtaaygcaaaccyggtgacccttgctagcatcctttcaagtgccacaaccgaaattcccrgttcaactcccgaggaggaagctctggctggcacttctcccaccttagccaagggggaaacaacaacgagaggtcagaaaggatttattctatctggcatgttttgttcagagatatctttagtaaaagtagtacgtgagcctcctgcataacccctgcagcttgtgaaatgatgttgggcaaacacacagatctactgatagttccccttctgccttctcttggtctctttgttctccctttgcccctcctgtgctgcaggtcttgttttctgggcagtggttctctctgtgatggtgc

SEQ ID NO: 48783 - DNA, 600 bp, Chicken  19866894294220_1
ttctttgaaacatgcagtaagtcatagaggtatggcagaaatctgcttgaattcataacaaatccattgaaaaaaaaaaagaaacaagcagaaagtagtccagagaagtgctccaaatgtcccttccaaacagaattattttatcatttgatgataaaatgaggacattatcttcaaagtcactgcacagtcagtccacacgaaagttcaatcaaccgggaaaatgttcaaggattttcttctgcattccttgatgttgtattctgtatggcaagtatttagacaaaaattatggttacrtgaaaggagaactatgttaatcctacctatgcttcttcaaggtagtcaaggtgttctatctacaaggtagatcttccaggctacaaggttttcaaaacacatctcaattttgaaaaagcatctcaaacaaaggcagtttagagaaataaaaaagcttcagaaaaaaaaaaaagtggattaacatatcacataaaactacctctaagtcaagaagtactcactgtacttctgttagcttcagacttcacccttattttactctagacaggttcctcatcctccaagcaattgccacactgc

SEQ ID NO: 48784 - DNA, 600 bp, Chicken  19866894294221_1
cttgaatgcacacggaaaggctttatcctgtccttcctaccctgatgtcccctacagaagtcttccagtttggaccaatactcaagctgggacgtcaggaaacttcactagctcacctgaagaaatcccttcagtatttccacttttgccaaaaggaatcactgccaacagcccttccaaggagaaccactctagaaacaccacgcagcgctcaacctcctggaggctgcatctccgtaaggaccaggcatcgcctccatccttcaatgctcatcctcctgagggctgcatccttcctcmtgccaagccatctgattacccttaacttgctcctttccgagagtcagctttttcctgaaacgtttagatgctgtactaggggacatggtctagtggagaaatattggtggtaggcagactagttgatcttggaggtcttttccaaccttggaaattctatgattctaacacctggtgtagccataaaccctccaaggggttttactgggtttacaatgtggtggcacctacaaattactgccctgttcccagctcacagctcagcccacagagcatcctgcagctcctcatgtgttacag

SEQ ID NO: 48785 - DNA, 600 bp, Chicken  19866894294224_1
gtactgcaaacatcctattcaagaaatatatgatctagagcaagcaaattttttaaacccagtggtgataactcttactgtgacaagccttttacttctggttaacagatcagggagaaaaatgatatcacagtttcagtgcaattacagtgaagttgaacctttcaagcaagactggaaataataatacaaatataataaaaacaagcatttgggggcagcgaagacatgaggaaatcacattttatcaccattacgaaccacttttattatcagtggatagaatttggggaatatacwttttygggatgcacaatgactattttccagtttttcaatcttaccctaggctgtaggcctaaacatgatttcttacttttttttttctaagtactgttttccaagtgtgctctacttggcctagaatcaacgtaatagaatcctactcctcctatcctgccttcttttggaaaaatgctgtaagatgatagatgtggtttagtgggcatggtggtgatgggttgatggttggactagaagatcttagtggtcttttacaaccttaatgattctatgcttctatgaaaaatacaagcaggg

SEQ ID NO: 48786 - DNA, 600 bp, Chicken  19866894294224_2
gcaaacatcctattcaagaaatatatgatctagagcaagcaaattttttaaacccagtggtgataactcttactgtgacaagccttttacttctggttaacagatcagggagaaaaatgatatcacagtttcagtgcaattacagtgaagttgaacctttcaagcaagactggaaataataatacaaatataataaaaacaagcatttgggggcagcgaagacatgaggaaatcacattttatcaccattacgaaccacttttattatcagtggatagaatttggggaatatacwttttygggatgcacaatgactattttccagtttttcaatcttaccctaggctgtaggcctaaacatgatttcttacttttttttttctaagtactgttttccaagtgtgctctacttggcctagaatcaacgtaatagaatcctactcctcctatcctgccttcttttggaaaaatgctgtaagatgatagatgtggtttagtgggcatggtggtgatgggttgatggttggactagaagatcttagtggtcttttacaaccttaatgattctatgcttctatgaaaaatacaagcagggtatga

SEQ ID NO: 48787 - DNA, 600 bp, Chicken  19866894294224_3
ctgtgacaagccttttacttctggttaacagatcagggagaaaaatgatatcacagtttcagtgcaattacagtgaagttgaacctttcaagcaagactggaaataataatacaaatataataaaaacaagcatttgggggcagcgaagacatgaggaaatcacattttatcaccattacgaaccacttttattatcagtggatagaatttggggaatatacwttttygggatgcacaatgactattttccagtttttcaatcttaccctaggctgtaggcctaaacatgatttcttacytttttttttctaagtactgttttccaagtgtgctctacttggcctagaatcaacgtaatagaatcctactcctcctatcctgccttcttttggaaaaatgctgtaagatgatagatgtggtttagtgggcatggtggtgatgggttgatggttggactagaagatcttagtggtcttttacaaccttaatgattctatgcttctatgaaaaatacaagcagggtatgacaaagataagcactggcccactgaagatcagtatcagttggtattaattaaaaagacaacaggcattaggat

SEQ ID NO: 48788 - DNA, 600 bp, Chicken  19866894294226_1
taccacttcttttttcccctccacctccaagggctcaggctcctctagggttaaacggacctccacacaagccaagttcaccagcaaggccaggaacttgctgccagtactccctgctgggatccactccgacccgcaggcctgcgtgaggctggcagcaagcttcagggcagggtcccgctgggactggctgagtttactgcccagaatgctggccagccctttgtaaagctgacggacgcactcagagccctgtgagacttcagcgagtggtggtgagagggggatgaagcgaggcaraagctcacacagctcaaacttgctcccgtcttcagccctgacgaactcctcagagagcttgctcagcacagccaggaggtggggagcatctctctgccagcacttcgcctccgatactgccagcagccccaagagcagcgccagggcacgctcagagccataaccaccattcacgtaagcctggcacagagcagaggccgctcctttggtcaccatctccctggggcctctgggagtggccagaacagcagccaggcactggtacgcatcatccaccatggacgtgcagtctggctgaca

SEQ ID NO: 48789 - DNA, 600 bp, Chicken  19866894294233_1
ctgtgctcagacccctcacagccccattgcccctctctggacacgctccaggccccgatgtctgtctggcagtgaggggcccacagctgagcgcagcactgagcagtgagcacagcagctgtgcagagcctcacaaccacacacagtgctgggctgccctcactgctccacttctgaacttttttctgggccttaaaagaggacagagagggaattcctggagctcttacttccgtgctacccatgtttgcagctgagagcagtggtccccaagcagttctgctgtcattacagtgtttragacttacttcatctattgaactgctgctgctgccatttcaacttgaaatacaaataaaaaatcagcaagcagagaaattgctaattgaacaaggcccttttattcatctgaatggcctcagtaagaaaaaaaaatgtgcactgaggggaaaccagaccccatctgagacagggctggaaagcatttcagagcaaaaggacacatcaaagttgactgacgcacaagcaactctagtaggtacagatagtttcagctaagagggttatccagggtaaatggcatttggcgatgtattatat

SEQ ID NO: 48790 - DNA, 600 bp, Chicken  19866894294253_1
gctgcttctagcttcaggccaaaaagagatcagaccagtactttgcttccaaatgaaggtttggaagagggaaactgtaagacctgttacgtcctctgcaactatactgttaatcctgaaatgagacgcaaaacaagactccagaccatgctggcagaatagtgactgttcgaaggaacagttctgcccaacgtaacagctccgggcttgctgtcctatggaaagggcttttgagagcatgctgtggctgcaggagcagtgcccagagcatgccacacttagcaattccaaattgatagkgaagatcttgaccgtaaattgcatgagtgggcacagggcagggacagaagtaggaaagcattaaagtggcttaaatcaactgttccacctctgcccctgctcctttcccatgcccagtagggcagcgggtatagaaatagctatcctttattgacctacttccctggcatattctcagaaataattcatataggaaacacagaaatgccaaactctgtaacacaacctattttaaacgtttgagacactgctacagagacatattcaaagacttctatgggcagctgatattttaagaag

SEQ ID NO: 48791 - DNA, 551 bp, Chicken  19866894294288_1
ctcactttataggcactgtatgatatgtggcagaatatggggaactcctctagattacactgagagcgatcagatttattcttctctttgcctgctcggtattatgtgtaccatgttcagaaaataaggctttactttgaaattgatattttgcaaagattcactaaaatttctctgttgtcttcacaagtttcaaaggaaaatattccaaaattgaggacaagaaacattgcacctgataaaccatatcctaccatgaacccattccaaggtcagagaaataaaaagttatcctggaawtttttactgggaggatgaatagtattattatgtgctctgtttgctttattagactgttgatgcaaccttgatgcaacttttgtacattgacaatataatatctataaatcaagaagtgatacagcttcacaggaaaacatgaaaagatttttttgttcatagactattttgatgttcaacatcaaggagacagccaccttaaagcaagtctgagcattttgttcaaagggaacttatgagggagttgagac

SEQ ID NO: 48792 - DNA, 600 bp, Chicken  19866894294290_1
aacttagctggtgcaattcagtgtaattccaatggagtaaacggggtgggccaatgagcatgagggagcagcttatttggtatcttgctacagaaacatggagttttttcatcaacaaaaacagctgttgattatttaaaactacccagcgaaatgttttgggaagtactactgtttcggtttggttttgttttttttttcttccaggggccaaataatgagattctgttcctcgaacttgacttattagagaccacatgtcacattcttaatcctacacctcttgtaaattgctcagtraggacatttgcagaacatgtgagtatctgaaacatgacttgcttggtgcaaaagtgcaagttcagtrtgttgatgttagaggccagtttatgaccagtcagaattctaagctctgcctgcaaaggttacatcactgtagcagcccataagcaccagtcactggtatctgccttgctgatttagttgccttcgtgtcaggaaggatttcacatcctgttacacgaggaggacaggacactctcagtgtaacttcccacatacacgtcatgaatgccatgggccttgctcaggcactgcagg

SEQ ID NO: 48793 - DNA, 600 bp, Chicken  19866894294290_2
gcagcttatttggtatcttgctacagaaacatggagttttttcatcaacaaaaacagctgttgattatttaaaactacccagcgaaatgttttgggaagtactactgtttcggtttggttttgttttttttttcttccaggggccaaataatgagattctgttcctcgaacttgacttattagagaccacatgtcacattcttaatcctacacctcttgtaaattgctcagtraggacatttgcagaacatgtgagtatctgaaacatgacttgcttggtgcaaaagtgcaagttcagtrtgttgatgttagaggccagtttatgaccagtcagaattctaagctctgcctgcaaaggttacatcactgtagcagcccataagcaccagtcactggtatctgccttgctgatttagttgccttcgtgtcaggaaggatttcacatcctgttacacgaggaggacaggacactctcagtgtaacttcccacatacacgtcatgaatgccatgggccttgctcaggcactgcaggtgcagctctccatgctcagcccagataacaccgcgctgttgcatatggcagacaggggaagctgtga

SEQ ID NO: 48794 - DNA, 600 bp, Chicken  19866894294292_1
aagtagtccagtatacttccctccacaaagacatgactgtaattcagctaatttccttacgatcacttcctgctatcaaaagcatgagaagagatcatagttctttctttcacagaagaaaaaagactcccgtgtttcagcttgtgagcctttacaatctaacctgtaaatccaatgcaaatctaacataaacagcaagccattacaactcagtcagcacggacatgagatgtgccagagtttcccttccaccaggctttcttgtttttttttttcccaaatatattatttatttattcyggtctacccaggctacaayttgagattttgcttgcacttttcctaccttccacaaaaygttttcacacacaagtgtttcagaggcattcagtcagtggttataaaaagttttataagatgacttgactttgctcaggagacgcccattattttcaagggccagaaggaaccatgggggagtttaaaaacaacaactaacaacaaaccaaaacaaacacagtttggtcaactggaataagaaactctatgcattcatatagacaaatttggattcccagccttcatctctacttcccttaa

SEQ ID NO: 48795 - DNA, 600 bp, Chicken  19866894294292_2
cctccacaaagacatgactgtaattcagctaatttccttacgatcacttcctgctatcaaaagcatgagaagagatcatagttctttctttcacagaagaaaaaagactcccgtgtttcagcttgtgagcctttacaatctaacctgtaaatccaatgcaaatctaacataaacagcaagccattacaactcagtcagcacggacatgagatgtgccagagtttcccttccaccaggctttcttgtttttttttttcccaaatatattatttatttattcyggtctacccaggctacaayttgagattttgcttgcacttttcctaccttccacaaaaygttttcacacacaagtgtttcagaggcattcagtcagtggttataaaaagttttataagatgacttgactttgctcaggagacgcccattattttcaagggccagaaggaaccatgggggagtttaaaaacaacaactaacaacaaaccaaaacaaacacagtttggtcaactggaataagaaactctatgcattcatatagacaaatttggattcccagccttcatctctacttcccttaaatggttttatccacaccgt

SEQ ID NO: 48796 - DNA, 600 bp, Chicken  19866894294292_3
acgatcacttcctgctatcaaaagcatgagaagagatcatagttctttctttcacagaagaaaaaagactcccgtgtttcagcttgtgagcctttacaatctaacctgtaaatccaatgcaaatctaacataaacagcaagccattacaactcagtcagcacggacatgagatgtgccagagtttcccttccaccaggctttcttgtttttttttttcccaaatatattatttatttattcyggtctacccaggctacaayttgagattttgcttgcacttttcctaccttccacaaaaygttttcacacacaagtgtttcagaggcattcagtcagtggttataaaaagttttataagatgacttgactttgctcaggagacgcccattattttcaagggccagaaggaaccatgggggagtttaaaaacaacaactaacaacaaaccaaaacaaacacagtttggtcaactggaataagaaactctatgcattcatatagacaaatttggattcccagccttcatctctacttcccttaaatggttttatccacaccgtattctacacctcctctctcccacagtaacccgctgcaca

SEQ ID NO: 48797 - DNA, 600 bp, Chicken  19866894294294_1
agctctgctgcccagcagggtcccgtagtgcaggggcttgcagatggcaacgtagcggtcataggacatgatggtgagaatgcaatactctgctgaaaacaaaaacatatagaagaagacctgtgcagcacatcctgcataggagatggccctggtgtgccagagggcattggccatggctttggggagagtggtggagatgcagcccaggtcgaggagggcgaggttgagaaggaagaagtacatgggggtgtgaaggcggtggtcgcaggctacggctgtgctgatgaggccgttgcycaggagggcagccaggtagatgcccagcaagagccagaagtgcaggagctgcagctgccgcgtgtctgccaacgccaggaggaggaactcgctgatggagctgctgttgggcatctgyggttcctgggcatggagtcctgttcagagtgtagtagataatgaccagacaaggtaattttctgaatcactcatcccactgtattataaaagattttcattctcttaggacaatgttcctttggtatcataacttgaattgaatttcataaggttcagcattcmagaagcagaagcagctta

SEQ ID NO: 48798 - DNA, 600 bp, Chicken  19866894294294_2
acctgtgcagcacatcctgcataggagatggccctggtgtgccagagggcattggccatggctttggggagagtggtggagatgcagcccaggtcgaggagggcgaggttgagaaggaagaagtacatgggggtgtgaaggcggtggtcgcaggctacggctgtgctgatgaggccgttgcycaggagggcagccaggtagatgcccagcaagagccagaagtgcaggagctgcagctgccgcgtgtctgccaacgccaggaggaggaactcgctgatggagctgctgttgggcatctgyggttcctgggcatggagtcctgttcagagtgtagtagataatgaccagacaaggtaattttctgaatcactcatcccactgtattataaaagattttcattctcttaggacaatgttcctttggtatcataacttgaattgaatttcataaggttcagcattcmagaagcagaagcagcttatggaacttctaccatcctctcatttcctaatcttatcccatctccctctatattttcatttgtttccatatttcatatctttactacaactgctcttagagcccagaagcccaaactc

SEQ ID NO: 48799 - DNA, 600 bp, Chicken  19866894294294_3
gctgatgaggccgttgcycaggagggcagccaggtagatgcccagcaagagccagaagtgcaggagctgcagctgccgcgtgtctgccaacgccaggaggaggaactcgctgatggagctgctgttgggcatctgyggttcctgggcatggagtcctgttcagagtgtagtagataatgaccagacaaggtaattttctgaatcactcatcccactgtattataaaagattttcattctcttaggacaatgttcctttggtatcataacttgaattgaatttcataaggttcagcattcmagaagcagaagcagcttatggaacttctaccatcctctcatttcctaatcttatcccatctccctctatattttcatttgtttccatatttcatatctttactacaactgctcttagagcccagaagcccaaactctgtgcccttcaatttctgtgagagaaagctgcctgtatgcaggatacatgcattattcatgtctgcagaaagcaatgatgatttcagctggttctatcctttgagaaaggagaggctgaaagcacattcagtacacagaacaaataattgattatagaaaatat

SEQ ID NO: 48800 - DNA, 600 bp, Chicken  19866894294307_1
ggcagaagagaaataaaagagcttgtgtgtttcagctttagaaacatttgaaacataacatcacaattttaagcatgccaatgataatacaagctagccatggatgaagacaaccacaagagacatgaagttcctgatgggattcagcggcatgaaagtcattacttggcttgtaaggtcagcatactagatcatagctgggcagcccaagaagcacaaagcaagagacaagcctggagcacatcgtacgtgactgcgctggcagaagtgagaacggcggccgtattcattttccttccygaatgccaaatcatgctctaaatgctagtctccctttgcaccagaagtgctaacacgcattaactaccctgaagtaaatggaggtagagcttgaacaaacaaatcttcatttaaaaatatatttagttttaagcacctgagaaatctcactggagtcatgctagaaagccaggtctgtgtaacagcttctttattggatcagagacctaagcagactttacagtagatgactggattgcaacatttggatctatgcaaccctaaaaagacagatattgctgacagytttttttcagtgga

SEQ ID NO: 48801 - DNA, 600 bp, Chicken  19866894294307_2
tcattttccttccygaatgccaaatcatgctctaaatgctagtctccctttgcaccagaagtgctaacacgcattaactaccctgaagtaaatggaggtagagcttgaacaaacaaatcttcatttaaaaatatatttagttttaagcacctgagaaatctcactggagtcatgctagaaagccaggtctgtgtaacagcttctttattggatcagagacctaagcagactttacagtagatgactggattgcaacatttggatctatgcaaccctaaaaagacagatattgctgacagytttttttcagtggatctgaggagaatgagatacccramtcccattgcactctacagcagaaagatgcttccatgggacctggtgcccagttctctttgggctttataagatgaatgacaagcagcattatcatccaagctgcctgccctgctactgcagcccgtagatacctctgctctgattcagctcatcatttaatgtcttaatgcaagcacaccctcttcactgatttaatctaaaatattgtgccgtaaactcaagaggctctgtggtgggcatataatccccccataccaactc

SEQ ID NO: 48802 - DNA, 600 bp, Chicken  19866894294307_3
tgctagtctccctttgcaccagaagtgctaacacgcattaactaccctgaagtaaatggaggtagagcttgaacaaacaaatcttcatttaaaaatatatttagttttaagcacctgagaaatctcactggagtcatgctagaaagccaggtctgtgtaacagcttctttattggatcagagacctaagcagactttacagtagatgactggattgcaacatttggatctatgcaaccctaaaaagacagatattgctgacagytttttttcagtggatctgaggagaatgagatacccramtcccattgcactctacagcagaaagatgcttccatgggacctggtgcccagttctctttgggctttataagatgaatgacaagcagcattatcatccaagctgcctgccctgctactgcagcccgtagatacctctgctctgattcagctcatcatttaatgtcttaatgcaagcacaccctcttcactgatttaatctaaaatattgtgccgtaaactcaagaggctctgtggtgggcatataatccccccataccaactcaggtatggagaaagttatcctcagcagaagttgtga

SEQ ID NO: 48803 - DNA, 600 bp, Chicken  19866894294307_4
ctagtctccctttgcaccagaagtgctaacacgcattaactaccctgaagtaaatggaggtagagcttgaacaaacaaatcttcatttaaaaatatatttagttttaagcacctgagaaatctcactggagtcatgctagaaagccaggtctgtgtaacagcttctttattggatcagagacctaagcagactttacagtagatgactggattgcaacatttggatctatgcaaccctaaaaagacagatattgctgacagytttttttcagtggatctgaggagaatgagatacccramtcccattgcactctacagcagaaagatgcttccatgggacctggtgcccagttctctttgggctttataagatgaatgacaagcagcattatcatccaagctgcctgccctgctactgcagcccgtagatacctctgctctgattcagctcatcatttaatgtcttaatgcaagcacaccctcttcactgatttaatctaaaatattgtgccgtaaactcaagaggctctgtggtgggcatataatccccccataccaactcaggtatggagaaagttatcctcagcagaagttgtgaag

SEQ ID NO: 48804 - DNA, 600 bp, Chicken  19866894294308_1
caatgcaaggttatttgataaattaaaccaaaagttttaaaaatgcatacaaatgttatttcaaccacccacaaaaatgtttttttaaatttagtttagctgatatataattaaaaggaaaaaaaaaaggtaaatgcattttaaatcatcccatttttctttaagtgttttttgttgttgttgttgtttttaaggaaactttcttccctggatagaattttcataatattccttctttccatttctctattataaaaattcatttgaagttttgcattgattcttcaactacacctacastgtagtttactaattcattcctacatccatacatgtggttcaaaagacaatttccaaacagtaaagctgggtgattcatccagttttaagtaccgccagctgatctttgactttgtagctccttcccattatagaaagctaaagaagaagctgaaaccagcagtgctggaaatatttcatcctagagtgaaaatattcacccatcaggaaagctggtagaatcaggtgaccagtcagtaagtgatcaccttagatcacttcagaatcagtgatccaccttactgacatgaaaattcaata

SEQ ID NO: 48805 - DNA, 600 bp, Chicken  19866894294315_1
cttccccacctcgggcccctcctccacgtccggtgtcttcccggaaccctgtgggcacagagcttacccaccctgggcacagcctcaccaactgctgcctcagcgccaggtgccccatcccacctcggagctgagcccagcaaaacccctgtcactgttggagcccgtggcagggagggtgctgcaggctgcctctgtgagcaaggcggggcaacaaattcctccagccttggggtttgtgctgctctggggtgagaaaggcgcttttgtaatcccagcctgcagctcagtgctactgcygcatccttcaggctggttctgcgctgggagtggggctcccatctcaccacagagacccgtaagcctacctgaggcctgtctgctccagccagaacaggcacggcttgccctgcctggctccacagcacttggattgtcatcctggaaaactctttttgttgtgagactacgtgtctccgtctccatccctgtgctgcccacagactgataatggaagggtgattgcagcagtctccttgtaggacatagcctatctgtgaggggaggactccggaccagccccacaggtatccggggctg

SEQ ID NO: 48806 - DNA, 600 bp, Chicken  19866894294317_1
tttaacaactgcaaacctcttacgagggtatgaaagctgatgactcctgatgtaatcctactcaatactggtaaggtctcaacttatagcagcagttctggttatcgtactctatgatgtatgcagacaaactacagaaagaatgcggtaagattgaacaaaaatgaaaagttatgaatgaccaaaagataaatggcagattttgagcttctgtatctacagaagagaccaagggaaatcctaatagcgtatttcagatatgtagaatttgaagaaggagagaaaataaatcatcattcyctttttgcatggtaggttgaaataaaagtagtggtccagaaaaaaaaagtgtggttaactagaaggatgattctgattaaccacaagtgaataacgttgtaatcgtttggggagttgactgtgtgatgtctgtcgaagccacatttcaatttctaaggagttgccattacaatgatgtgtgattgttttattctttttttttatttttgtttgttcatgccagagagtaaggattgaagtattctcagcatgctctaactctggagatgaggttgtgaaataccagtgacagaatcttat

SEQ ID NO: 48807 - DNA, 600 bp, Chicken  19866894294342_1
atcttgttcatggcaagcctacgccctatccaagctcagatcagcacagagcacaccaagaaaaccaatgccaagccacatacagcttaggtgaaacgggagcatttcttactggttttctactacagatgaacatgacggcaatcaaccactaaagatcttgggagaaagctaactgaagtctcccttggctaaaactgagacagctgcaagataaatggtaaagtatattttttacagtgaactcttatttaattaagacagactagaacatgctacagtatacatatgcagagattyagacataaacrtcccttgttatctaaggtgtttccttccttcacatgatgccaacctaaaagacaatttctcatgagtttctccacccaaaattttcgatcgttgagcaacagcaccagaaagcagaggaagacgtttatccatcaattaatttcctttatttcacaagctttgaattcagaaatagaaccacaactagtagatcttgatacggtagagtaagtaaaaatgcatgtgattacaaaggaaaaactttgtacaaaaactttaaaaatccgacggcaacttgaattatctgta

SEQ ID NO: 48808 - DNA, 600 bp, Chicken  19866894294342_2
ggcaagcctacgccctatccaagctcagatcagcacagagcacaccaagaaaaccaatgccaagccacatacagcttaggtgaaacgggagcatttcttactggttttctactacagatgaacatgacggcaatcaaccactaaagatcttgggagaaagctaactgaagtctcccttggctaaaactgagacagctgcaagataaatggtaaagtatattttttacagtgaactcttatttaattaagacagactagaacatgctacagtatacatatgcagagattyagacataaacrtcccttgttatctaaggtgtttccttccttcacatgatgccaacctaaaagacaatttctcatgagtttctccacccaaaattttcgatcgttgagcaacagcaccagaaagcagaggaagacgtttatccatcaattaatttcctttatttcacaagctttgaattcagaaatagaaccacaactagtagatcttgatacggtagagtaagtaaaaatgcatgtgattacaaaggaaaaactttgtacaaaaactttaaaaatccgacggcaacttgaattatctgtaagtaccaaaaa

SEQ ID NO: 48809 - DNA, 600 bp, Chicken  19866894294345_1
acttgaatataaacagactttatgcacaaaaccctcacaaaattttaatgaagtgaaattgttttgtttgcaatttgtgcagcacagttaccttccacatttcctataacaagcctccacagtaaaatttccatgccttaaactcacacattagtattattaactcatttgtctaatgtttaatggctcgtgattgtcatgtacataatattatacaataaagctgggatctaaatcctggatcttttacaagctaaggcaagttctttcacctcctggtctcctcatctgtaaagtcgratagaaatgatacttcagagaggcactaagataccaactcatcaagtgttcagtgttttgtacagagctctcagagaagtatggctagacaatattcacagcagtgtcaaatatcagacatattaacacagtggagcagagcactcaagaggtaaaatttttttaaaaaaacttcaaaaaattccctctcctgtcagttccaaaatttcattgcattacaatataaggtttttggcccagatagcttgctcaaatatatacaaaactagatttttaaaaagacataaataagcgttaatg

SEQ ID NO: 48810 - DNA, 600 bp, Chicken  19866894294355_1
gagagcagatgcttccttactctgcagaaacgcagtgcgtgaaacagtattttaacagctttatctgatattttatatctcactgtcaaacatagcagtgattccacttctatttgggtaagtaatctgaaaagaaggcagcaataatctctcaggagagccaggcacgggactaattactccagctagagatttgtaaagacacattttcagtgctgggattttatcattccacagggtaattaaaagacagctctgtcaaaggaagttttgtagtcttaaatattctttttcctctaygaagaataaccctttccaagctcggcaatgggatggctttatccatcagcartgaagcataatgcatcctaccggtcagctctatggcatgctctgctgtgtgcagtggctggcagagcagtggtggcttctgtcacctcccagtgacagatgttgggaaggaggggtgcatctataatctgtatgcgcttctctaacccatatatgctcctataatccatacatgcttctataatctgtttatgccgggaagatttagtttcagtgttaggaagaagctgggcattggaacaggctgcc

SEQ ID NO: 48811 - DNA, 600 bp, Chicken  19866894294355_2
taacagctttatctgatattttatatctcactgtcaaacatagcagtgattccacttctatttgggtaagtaatctgaaaagaaggcagcaataatctctcaggagagccaggcacgggactaattactccagctagagatttgtaaagacacattttcagtgctgggattttatcattccacagggtaattaaaagacagctctgtcaaaggaagttttgtagtcttaaatattctttttcctctaygaagaataaccctttccaagctcggcaatgggatggctttatccatcagcartgaagcataatgcatcctaccggtcagctctatggcatgctctgctgtgtgcagtggctggcagagcagtggtggcttctgtcacctcccagtgacagatgttgggaaggaggggtgcatctataatctgtatgcgcttctctaacccatatatgctcctataatccatacatgcttctataatctgtttatgccgggaagatttagtttcagtgttaggaagaagctgggcattggaacaggctgcccagggaagtggtggtgtccccatccctgggggtatttaagagaggtatggct

SEQ ID NO: 48812 - DNA, 600 bp, Chicken  19866894294362_1
gacacattagaactacatatagtgttgcaactgtctttcccatggcatctgattgcctttcttttgctcatgttacaaaaattaattttttaagtttgctagataaggtactcatccatgtttattcacatgtagaggccaaatttagcccccacaattacatactcagagttattctaagaaaatgataggaaatttacatgaacataaataaaagcggaatcaggtgcaaacattttatttatctatttattagtttgctgttcttttttattatggatgtttttcttagacaaagarcattcctgaatgaattgaaaagacaactgaagtaaaataattttttcttacttctagaaaatcatatattaaacactgaagacatttaaatactctttaaaactatgtcataagcattaggagaaatatagctaagagtaatactttgtattgtgttggtttttgttgttcttgtttgctggtaaggagtaaaatcatgtatatgtgcatacatatatatatacatacacatacctctattgtctgtttgattaattgtagatgctgtgcttattttaactttaaaatggtttctttcac

SEQ ID NO: 48813 - DNA, 600 bp, Chicken  19866894294362_2
tgaattgaaaagacaactgaagtaaaataattttttcttacttctagaaaatcatatattaaacactgaagacatttaaatactctttaaaactatgtcataagcattaggagaaatatagctaagagtaatactttgtattgtgttggtttttgttgttcttgtttgctggtaaggagtaaaatcatgtatatgtgcatacatatatatatacatacacatacctctattgtctgtttgattaattgtagatgctgtgcttattttaactttaaaatggtttctttcacaaaataattwaaaaaaaaaactattgtgtaatattcatatttaaatagtaatcaggaaaattcagtcctagtatataaagagcaaatgttggggaaaatgaaatccatccaagtagggcacagcatatcactcaataatgacttacttttacaaataggtgattttcctgtccatttcatatccggcttacatgttcgatgctctgatccaccagcaagaaaaaatcctggctgacaggtatacaccaaagtataccctaaagtaggaagatctattgctttcacatctacatgtgctggtgtctctggc

SEQ ID NO: 48814 - DNA, 599 bp, Chicken  19866894294363_1
  misc_feature (1)..(247): n is any nucleotide
nnnnnnnnnnnnnnnnnnnnnnnnnnnnnnnnnnnnnnnnnnnnnnnnnnnnnnnnnnnnnnnnnnnnnnnnnnnnnnnnnnnnnnnnnnnnnnnnnnnnnnnnnnnnnnnnnnnnnnnnnnnnnnnnnnnnnnnnnnnnnnnnnnnnnnnnnnnnnnnnnnnnnnnnnnnnnnnnnnnnnnnnnnnnnnnnnnnnnnnnnnnnnnnnnnnnnnnnnnnnnnnnnnnnnnnnnnnnnnnnnnnnnnncatccatcaggacacaagtatttaacagaatgaatagtttcctcctatctgtrggaggaggtgtgggaaagaattgatttgcgtgtcccaaaaatgccttgcccagcttcctgtgtagagtaaataaagctgcatggtctcarttaagaactccttattaatgctcaagtgttgtgtatgtctactctttcaggctcttaattggaacttaaatccactgacagttgtatcatggctaaacatttacatgcaagttgcctatttaaatgagctttacgaggtattgttgccacaatatccacaacaaatatttgtacaaatagcagaggtaagaccaattccatccttcaaa

SEQ ID NO: 48815 - DNA, 599 bp, Chicken  19866894294363_2
  misc_feature (1)..(157): n is any nucleotide
nnnnnnnnnnnnnnnnnnnnnnnnnnnnnnnnnnnnnnnnnnnnnnnnnnnnnnnnnnnnnnnnnnnnnnnnnnnnnnnnnnnnnnnnnnnnnnnnnnnnnnnnnnnnnnnnnnnnnnnnnnnnnnnnnnnnnnnnnnnnnnnnnnnnnnnnnnnnncatccatcaggacacaagtatttaacagaatgaatagtttcctcctatctgtrggaggaggtgtgggaaagaattgatttgcgtgtcccaaaaatgccttgcccagcttcctgtgtagagtaaataaagctgcatggtctcarttaagaactccttattaatgctcaagtgttgtgtatgtctactctttcaggctcttaattggaacttaaatccactgacagttgtatcatggctaaacatttacatgcaagttgcctatttaaatgagctttacgaggtattgttgccacaatatccacaacaaatatttgtacaaatagcagaggtaagaccaattccatccttcaaatactatttcatctgaaaaaaaaaatgttgttttgcaatagacttattaaacatctgtcatcttgtagctcttggatctctgtgtgctgga

SEQ ID NO: 48816 - DNA, 599 bp, Chicken  19866894294368_1
  misc_feature (1)..(18): n is any nucleotide
nnnnnnnnnnnnnnnnnnccctgtagccagacaagggagaaaagggatgttgagactgattagtgccatcataaaaccaagtgaaaatgaagctctttctgaaggtgtgtttctttctttatgaagtagcagattctagatgactttcttacactagacaattaattttgcacagaaattgttctgctttctaaacctagtcctagaaggatgcattagctattaaatagtagtaagtgacaggcaattttccaataaactgaggtggtactgaaaaaggagaattttaaaatattttcraagtttcttctgtgtagctcattaggtttagaagcgctgatatttatattaatgtgggtttttttgtttttcctgtgggtaccctaaggtttctgccttatatttgcactatygtgttaaatcacctgatcatcttgtatgatgaaatgagtggcttggtatacaaggagagagctttggaaatgayctacctttwctttggtaaggctttcaacaccatctccattaggattcccacagagaagctgataattatgaactgaatttacagacagagagrtagattgaaaactctctaa

SEQ ID NO: 48817 - DNA, 600 bp, Chicken  19866894294368_2
tttctttatgaagtagcagattctagatgactttcttacactagacaattaattttgcacagaaattgttctgctttctaaacctagtcctagaaggatgcattagctattaaatagtagtaagtgacaggcaattttccaataaactgaggtggtactgaaaaaggagaattttaaaatattttcraagtttcttctgtgtagctcattaggtttagaagcgctgatatttatattaatgtgggtttttttgtttttcctgtgggtaccctaaggtttctgccttatatttgcactatygtgttaaatcacctgatcatcttgtatgatgaaatgagtggcttggtatacaaggagagagctttggaaatgayctacctttwctttggtaaggctttcaacaccatctccattaggattcccacagagaagctgataattatgaactgaatttacagacagagagrtagattgaaaactctctaaacagcacagtttagagggtgatgactgtcagtgggtgccatttttttctgcttggaggaattcagtgactcacctttgcttcacctgcacttccatgtcagatgccattctgtc

SEQ ID NO: 48818 - DNA, 600 bp, Chicken  19866894294368_3
tttctaaacctagtcctagaaggatgcattagctattaaatagtagtaagtgacaggcaattttccaataaactgaggtggtactgaaaaaggagaattttaaaatattttcraagtttcttctgtgtagctcattaggtttagaagcgctgatatttatattaatgtgggtttttttgtttttcctgtgggtaccctaaggtttctgccttatatttgcactatygtgttaaatcacctgatcatcttgtatgatgaaatgagtggcttggtatacaaggagagagctttggaaatgayctacctttwctttggtaaggctttcaacaccatctccattaggattcccacagagaagctgataattatgaactgaatttacagacagagagrtagattgaaaactctctaaacagcacagtttagagggtgatgactgtcagtgggtgccatttttttctgcttggaggaattcagtgactcacctttgcttcacctgcacttccatgtcagatgccattctgtcagactgctcctctgctgccatctgtcacacagcaacaaaatgtaatggaatattggtgggaagattcacactac

SEQ ID NO: 48819 - DNA, 600 bp, Chicken  19866894294368_4
ctagtcctagaaggatgcattagctattaaatagtagtaagtgacaggcaattttccaataaactgaggtggtactgaaaaaggagaattttaaaatattttcraagtttcttctgtgtagctcattaggtttagaagcgctgatatttatattaatgtgggtttttttgtttttcctgtgggtaccctaaggtttctgccttatatttgcactatygtgttaaatcacctgatcatcttgtatgatgaaatgagtggcttggtatacaaggagagagctttggaaatgayctacctttwctttggtaaggctttcaacaccatctccattaggattcccacagagaagctgataattatgaactgaatttacagacagagagrtagattgaaaactctctaaacagcacagtttagagggtgatgactgtcagtgggtgccatttttttctgcttggaggaattcagtgactcacctttgcttcacctgcacttccatgtcagatgccattctgtcagactgctcctctgctgccatctgtcacacagcaacaaaatgtaatggaatattggtgggaagattcacactactgccatacc

SEQ ID NO: 48820 - DNA, 600 bp, Chicken  19866894294368_5
agaattttaaaatattttcraagtttcttctgtgtagctcattaggtttagaagcgctgatatttatattaatgtgggtttttttgtttttcctgtgggtaccctaaggtttctgccttatatttgcactatygtgttaaatcacctgatcatcttgtatgatgaaatgagtggcttggtatacaaggagagagctttggaaatgayctacctttwctttggtaaggctttcaacaccatctccattaggattcccacagagaagctgataattatgaactgaatttacagacagagagrtagattgaaaactctctaaacagcacagtttagagggtgatgactgtcagtgggtgccatttttttctgcttggaggaattcagtgactcacctttgcttcacctgcacttccatgtcagatgccattctgtcagactgctcctctgctgccatctgtcacacagcaacaaaatgtaatggaatattggtgggaagattcacactactgccataccaccaacatcctcctctgacaccatgggccaatatgacaaaataggaggcattactcttgaagtggtctttatatttaagcttct

SEQ ID NO: 48821 - DNA, 600 bp, Chicken  19866894294369_1
cataaaaaacttttatgttcttgatactgtctagtatgaagtgaaattttttgaaatggtaacttggatacttgtaactacacattactctgaggatgttactgaaaattaacattattttaccacagctttgttttgagccatgttgaaaaacaattatgatgttgtactctgattacaaagaaggtaactcagcagcctaagatgcatatttctttctgcttactgtcaggtgggggatagaaagactatcaaagagcaaagattttattttagtacttcaggaatacaaaagataarctggaattaaacttgcttcaacttcaacaacaacaaaaaagtttttctcactgtacaaaaagtcaaattaataataagaagccaagttgcagagatgttgtaaccttcatcttgtctgtaaaggctgatgactaagtcgctaatataattcctgcaatatatattttctactctttagcactgagaatttgctggggactagatttattttaaaatctgactccaacaagggagtggatttcagaccttttttaagtatatacatggtaaaatgtacctagatagcatctcacaactgct

SEQ ID NO: 48822 - DNA, 600 bp, Chicken  19866894294379_1
tttagtatggtctaattccattcattaattaaattgaagtcagtagctaagagtaacgatacactgtatcaaagagagattcattgtaccttcatcagattttgttgatgtccagaattgtgctgttgtcaaatcatcaattctatgggaagggaggggaaagtcatgtaattaggaatggcctgccacttacttaagtacaaatttgctgcattttatcttccttaaaagagtcctagaagttcacaagaagcaatcaaaataaaaatgcttcaactactgagatttatgaaaataagrtatctttgctgcaacaaggaaattcaattgctacagttactgaagtacctaagaagtcacaaataaaaataaattgcatggtgtgtacaacagtcacatgaaagctagaagttacatagctcgtccactgaccttgtgggattctttattcaatggtaaaagcttgacactaggtgcaatgatccttttgacacatctgagctccctttgcaacgcccatctctgtcaggctgaaagatgcacccaaatatatttgactgctgaaacaagtttggattttgcataggggactttggaagt

SEQ ID NO: 48823 - DNA, 600 bp, Chicken  19866894294384_1
ttacattataagatgcaggatttctacattctggcaccaagtcaacgttttaatggacattcaaacactaactaaggaaatggttgtgcattaagcctaccaataagtcaacaatcaatacaccagtactacagtaaaaatacaatgcattctttgtaactgcttctggcctcatccttctttgtcaagctcagctccaaataaagcagggagtcctgaagaagaaatgaagtacacatttcaccgttaccaaatatttttcttgagtccagacctaattgatcctgtggattgtacagrttttttgtccatttgtttaatcaagagggtagaaaagtcaggaataagtacagaattccagaaacaaaattaatcaagcaaatcaataggtatgagcagcaaargaaagaagcctcaaacagctaaggcccaaagcaactgcttccaactttatctccaaaaagcatctaaatagaaacaaaaaaagaactgyatcaaagcatactaacattcagggcttaatccaattcataggttttaattgcctgcacagcatcagtcctgtacgtcctccctcaacatattttatagcttgatcat

SEQ ID NO: 48824 - DNA, 600 bp, Chicken  19866894294384_2
aagtcaacaatcaatacaccagtactacagtaaaaatacaatgcattctttgtaactgcttctggcctcatccttctttgtcaagctcagctccaaataaagcagggagtcctgaagaagaaatgaagtacacatttcaccgttaccaaatatttttcttgagtccagacctaattgatcctgtggattgtacagrttttttgtccatttgtttaatcaagagggtagaaaagtcaggaataagtacagaattccagaaacaaaattaatcaagcaaatcaataggtatgagcagcaaargaaagaagcctcaaacagctaaggcccaaagcaactgcttccaactttatctccaaaaagcatctaaatagaaacaaaaaaagaactgyatcaaagcatactaacattcagggcttaatccaattcataggttttaattgcctgcacagcatcagtcctgtacgtcctccctcaacatattttatagcttgatcatatgaagccaaaggcaagctctgcagagtacaagatttggacaccctctggaaagcatgagcatcaggcagaattgctctgcaatggaacaaatgctctaaattg

SEQ ID NO: 48825 - DNA, 600 bp, Chicken  19866894294384_3
gctccaaataaagcagggagtcctgaagaagaaatgaagtacacatttcaccgttaccaaatatttttcttgagtccagacctaattgatcctgtggattgtacagrttttttgtccatttgtttaatcaagagggtagaaaagtcaggaataagtacagaattccagaaacaaaattaatcaagcaaatcaataggtatgagcagcaaargaaagaagcctcaaacagctaaggcccaaagcaactgcttccaactttatctccaaaaagcatctaaatagaaacaaaaaaagaactgyatcaaagcatactaacattcagggcttaatccaattcataggttttaattgcctgcacagcatcagtcctgtacgtcctccctcaacatattttatagcttgatcatatgaagccaaaggcaagctctgcagagtacaagatttggacaccctctggaaagcatgagcatcaggcagaattgctctgcaatggaacaaatgctctaaattgagttagctctggcttgccattctgagccacggtcataatgccgaaccaccgctctatttctgaactgcagaaagaacaatggtttctgg

SEQ ID NO: 48826 - DNA, 600 bp, Chicken  19866894294397_1
gtggtgcgcagcttcgaagaccgaggtgagccgggggcggcggggggcagcgctgcggcggggcggtgtgggcagcggcggctaaaagccgctctcccgcagctcccgtggagcaggaccgcttcttcttcgacgtcagcgccatggagaggggcgaacaggtgctgaaggccgagctgagggtgttcaagctgaggaggaggcgcgtggccaggagagccgatccgcagcacttctgcaaagtaagtgggaaatgaaccgtcagttatgcgcttccctgttgtattgctaataatccgraagggaaatgagaggggaatggagagtgcaaccacttagcacgtaaacccgctttacttttatttgrttatcgtcctcggtgcagagtggcactaagcctccagcatgcagagaagggatgcagggctctggctggcaggatactatccctggaggtagccttcccttcagacccacactgaactaatctgctttttgagatgtttcgaaattcggatgcaaatttgactgtttgatttgctcttaaagtaataatggtagtacgggagtcattccctagcactgactgtatcctgtarm

SEQ ID NO: 48827 - DNA, 600 bp, Chicken  19866894294397_2
gtgggcagcggcggctaaaagccgctctcccgcagctcccgtggagcaggaccgcttcttcttcgacgtcagcgccatggagaggggcgaacaggtgctgaaggccgagctgagggtgttcaagctgaggaggaggcgcgtggccaggagagccgatccgcagcacttctgcaaagtaagtgggaaatgaaccgtcagttatgcgcttccctgttgtattgctaataatccgraagggaaatgagaggggaatggagagtgcaaccacttagcacgtaaacccgctttacttttatttgrttatcgtcctcggtgcagagtggcactaagcctccagcatgcagagaagggatgcagggctctggctggcaggatactatccctggaggtagccttcccttcagacccacactgaactaatctgctttttgagatgtttcgaaattcggatgcaaatttgactgtttgatttgctcttaaagtaataatggtagtacgggagtcattccctagcactgactgtatcctgtarmaaaggcaaggtcagacgttttgtaaacttgagggcaaagatacagtgtactgcaggactgttggcag

SEQ ID NO: 48828 - DNA, 502 bp, Chicken  19866894294397_3
raagggaaatgagaggggaatggagagtgcaaccacttagcacgtaaacccgctttacttttatttgrttatcgtcctcggtgcagagtggcactaagcctccagcatgcagagaagggatgcagggctctggctggcaggatactatccctggaggtagccttcccttcagacccacactgaactaatctgctttttgagatgtttcgaaattcggatgcaaatttgactgtttgatttgctcttaaagtaataatggtagtacgggagtcattccctagcactgactgtatcctgtarmaaaggcaaggtcagacgttttgtaaacttgagggcaaagatacagtgtactgcaggactgttggcagtatcggaggtttgaaagagatgctcagggtaatagcatagtcctacctctggactcttagaatcatagaattgtttgagttggaagggacccttaaaggtcatccagtccagctcccttgcaataacttctcat

SEQ ID NO: 48829 - DNA, 501 bp, Chicken  19866894294397_4
aagggaaatgagaggggaatggagagtgcaaccacttagcacgtaaacccgctttacttttatttgrttatcgtcctcggtgcagagtggcactaagcctccagcatgcagagaagggatgcagggctctggctggcaggatactatccctggaggtagccttcccttcagacccacactgaactaatctgctttttgagatgtttcgaaattcggatgcaaatttgactgtttgatttgctcttaaagtaataatggtagtacgggagtcattccctagcactgactgtatcctgtarmaaaggcaaggtcagacgttttgtaaacttgagggcaaagatacagtgtactgcaggactgttggcagtatcggaggtttgaaagagatgctcagggtaatagcatagtcctacctctggactcttagaatcatagaattgtttgagttggaagggacccttaaaggtcatccagtccagctcccttgcaataacttctcat

SEQ ID NO: 48830 - DNA, 600 bp, Chicken  19866894294410_1
aaaaccatacgaggtatattcttctgaaaagaaggaggaagatgctttagcttttcatgtgaaaaactatttaatgctcaagaaataaggtgtctcacagctcttgccttctttattggaaaagcgtcgtgtgaaagaaaagacctggttttgtatgaagagtgattagtctatgaaagtctgaaaagaaattcttcagaagaagatgcaaaccgaaaatagagattattattcaaaaagaaatcaccaaacgttctgaagcaaatgcccacattttgattctgtagtgtttacgtaacygaggaactgaaaaatcagattaagtgacacaaggcaaaagattactatcatcttctcacccgaagcacagaccattaccaatttatggtgaaatgctctcattgcactcagatgttcagcaattgggaaccacagaaaagcctgtatgaaacaccatatctgcacttttggcatgactaaaggcacacacatattaggtttctgtatgaaagttctctctttacttaggttagcagcaggagttattttaaagaattacacatttccctcagtgtcaaaagcttgaaggtccgcagggtc

SEQ ID NO: 48831 - DNA, 600 bp, Chicken  19866894294415_1
taagttcattttcagaaaattaatgcaaatagttttcaggaaaaaaaaaagtctctaaccatttctacttcatgttttgaataggggaaaatgagtaaacacagcttgtctgtctatagggagaaataaggaaagagtctgaaccgtaaattgtccaaattcaggacagaaaccttcttctgggcttgtaatcaattccagctatttggagcagcagatacaaaagatacttctttcccacgataagtttttggtgtttctgatctatattgacacgatgacctttaaacctaagtgctytctgacaatgcctgatatgacaacacttatcccagggttttgctctcattctgcttatgtaagaaagaaaaatgacaagtgcagactgtaacatgagtcccaccaattcagccaagcaaagttcatgcagcaatgcccctgctgaggacagttacgctgtgtcaccctctggggagtgactgcagggccagacgtgctcctgttgacttcaagcggaaaagctcgagctgtccccagcacgtttgagcagtcagacccaggaaaacgttcaatacaaacaaataacctcagccaccccaa

SEQ ID NO: 48832 - DNA, 600 bp, Chicken  19866894294416_1
cctcagcactatctttcagtatcgacatactacccagatgctgcagtgttgctgccataaatgaaaatgactagtaaggaaattcctgctaattttccaaattcatttgttaattttcttttctcttacaccgtgaagttcagatcttgaaagatattgctctgatatttgtctttttgttctccactacccaaattaagcatttagatatttcatttatttggcaacatgtcaattttcttcaaagtgaatctatttggcctgcaggagcagctactgagcagtctccctgtctttaaytcgtgagctttctctccctgtcctgctgggagtgagcaggcatctgggtgggtgttcaacggccaggtgggcccaatccaccaccctggtgaatactaggaagggcaaccatcttccttgtacacaattactgaaactcccagcagctgtcatggcacctaactttcacaccaatcatttataaaaaccattataccttcttctgttgatttcttttgtagagaatgttctcaacctcaaatgcttcaaaggagagagttcaatatgtgcatcagacaaatagactgaaggagatctagt

SEQ ID NO: 48833 - DNA, 600 bp, Chicken  19866894294418_1
tcaggaaaaaaaaaacacttggaaaggagatacatgtaggttgctccaaaattaatgcctcctatatttttccacaaaatctacaccagatattaagactacaataacacgatttgatcgagaacattcttagctacaaaacactatttttcaacatagttaccacgtttagctatgcatttttgccgctgatgaacacgagcctgcaacccacgctcataaaaatctgcaccagcagaagtgatccactgttgctgtcaccactgctgaagcaaaccacccaccatctcactgtgcacrcatccactgtttggtctccataacattcaggaagcatgaatgaatgtcagtgtgtgaaattttttccacatggaggaattcatttacacacctttgcttcacaggcacttccatgtcagacaccattttatcagtgtccctctgctgccgtctgtgacatggcaacaacacataatggagtactggtgcaaaggtccaacctctgctgccataccactaacatccacctcaaacattgtggaccaacataataaaatagctgccattacttttcagagcagcctttctataagcagccag

SEQ ID NO: 48834 - DNA, 599 bp, Chicken  19866894294428_1
  misc_feature (1)..(167): n is any nucleotide
nnnnnnnnnnnnnnnnnnnnnnnnnnnnnnnnnnnnnnnnnnnnnnnnnnnnnnnnnnnnnnnnnnnnnnnnnnnnnnnnnnnnnnnnnnnnnnnnnnnnnnnnnnnnnnnnnnnnnnnnnnnnnnnnnnnnnnnnnnnnnnnnnnnnnnnnnnnnnnnnnnnnnnnttctatttgggtacgtggacggcgtgccggccagcccagcctttggcactgctgtgcctcaccgcatccaagcccagagacgtgctggcatgctgccggcccctggctaaagcaaacagccagccagacgtgkcctgggggcaaagacaacaccaygcrgggacactgagaggtgagagcagcccagggaagggccagcggcagagagcagcagcggtggygtctyctccagaacacccctgagcctcctctcccatcctccccagataaaaacccggcctaagcccaagcaataaataaataaataaatcaaaatacgmcaccccagggaatttaaaactgaccagataggcactattgatgtagaaatataaacgcggcggtggctccgtgggccctaaagctgagctgcaaagtggattgttgggttcg

SEQ ID NO: 48835 - DNA, 599 bp, Chicken  19866894294428_2
  misc_feature (1)..(144): n is any nucleotide
nnnnnnnnnnnnnnnnnnnnnnnnnnnnnnnnnnnnnnnnnnnnnnnnnnnnnnnnnnnnnnnnnnnnnnnnnnnnnnnnnnnnnnnnnnnnnnnnnnnnnnnnnnnnnnnnnnnnnnnnnnnnnnnnnnnnnnnnnnnnnnnnttctatttgggtacgtggacggcgtgccggccagcccagcctttggcactgctgtgcctcaccgcatccaagcccagagacgtgctggcatgctgccggcccctggctaaagcaaacagccagccagacgtgkcctgggggcaaagacaacaccaygcrgggacactgagaggtgagagcagcccagggaagggccagcggcagagagcagcagcggtggygtctyctccagaacacccctgagcctcctctcccatcctccccagataaaaacccggcctaagcccaagcaataaataaataaataaatcaaaatacgmcaccccagggaatttaaaactgaccagataggcactattgatgtagaaatataaacgcggcggtggctccgtgggccctaaagctgagctgcaaagtggattgttgggttcgatttgtcaaacacggaggctggc

SEQ ID NO: 48836 - DNA, 599 bp, Chicken  19866894294428_3
  misc_feature (1)..(141): n is any nucleotide
nnnnnnnnnnnnnnnnnnnnnnnnnnnnnnnnnnnnnnnnnnnnnnnnnnnnnnnnnnnnnnnnnnnnnnnnnnnnnnnnnnnnnnnnnnnnnnnnnnnnnnnnnnnnnnnnnnnnnnnnnnnnnnnnnnnnnnnnnnnnnttctatttgggtacgtggacggcgtgccggccagcccagcctttggcactgctgtgcctcaccgcatccaagcccagagacgtgctggcatgctgccggcccctggctaaagcaaacagccagccagacgtgkcctgggggcaaagacaacaccaygcrgggacactgagaggtgagagcagcccagggaagggccagcggcagagagcagcagcggtggygtctyctccagaacacccctgagcctcctctcccatcctccccagataaaaacccggcctaagcccaagcaataaataaataaataaatcaaaatacgmcaccccagggaatttaaaactgaccagataggcactattgatgtagaaatataaacgcggcggtggctccgtgggccctaaagctgagctgcaaagtggattgttgggttcgatttgtcaaacacggaggctggcaag

SEQ ID NO: 48837 - DNA, 599 bp, Chicken  19866894294428_4
  misc_feature (1)..(79): n is any nucleotide
nnnnnnnnnnnnnnnnnnnnnnnnnnnnnnnnnnnnnnnnnnnnnnnnnnnnnnnnnnnnnnnnnnnnnnnnnnnnnnnttctatttgggtacgtggacggcgtgccggccagcccagcctttggcactgctgtgcctcaccgcatccaagcccagagacgtgctggcatgctgccggcccctggctaaagcaaacagccagccagacgtgkcctgggggcaaagacaacaccaygcrgggacactgagaggtgagagcagcccagggaagggccagcggcagagagcagcagcggtggygtctyctccagaacacccctgagcctcctctcccatcctccccagataaaaacccggcctaagcccaagcaataaataaataaataaatcaaaatacgmcaccccagggaatttaaaactgaccagataggcactattgatgtagaaatataaacgcggcggtggctccgtgggccctaaagctgagctgcaaagtggattgttgggttcgatttgtcaaacacggaggctggcaagtttgggcagctctgccgatggtgttttatggaacctttcaggaaccctcaataaaaaatgta

SEQ ID NO: 48838 - DNA, 599 bp, Chicken  19866894294428_5
  misc_feature (1)..(74): n is any nucleotide
nnnnnnnnnnnnnnnnnnnnnnnnnnnnnnnnnnnnnnnnnnnnnnnnnnnnnnnnnnnnnnnnnnnnnnnnnnttctatttgggtacgtggacggcgtgccggccagcccagcctttggcactgctgtgcctcaccgcatccaagcccagagacgtgctggcatgctgccggcccctggctaaagcaaacagccagccagacgtgkcctgggggcaaagacaacaccaygcrgggacactgagaggtgagagcagcccagggaagggccagcggcagagagcagcagcggtggygtctyctccagaacacccctgagcctcctctcccatcctccccagataaaaacccggcctaagcccaagcaataaataaataaataaatcaaaatacgmcaccccagggaatttaaaactgaccagataggcactattgatgtagaaatataaacgcggcggtggctccgtgggccctaaagctgagctgcaaagtggattgttgggttcgatttgtcaaacacggaggctggcaagtttgggcagctctgccgatggtgttttatggaacctttcaggaaccctcaataaaaaatgtattaga

SEQ ID NO: 48839 - DNA, 600 bp, Chicken  19866894294428_6
ggcgtgccggccagcccagcctttggcactgctgtgcctcaccgcatccaagcccagagacgtgctggcatgctgccggcccctggctaaagcaaacagccagccagacgtgkcctgggggcaaagacaacaccaygcrgggacactgagaggtgagagcagcccagggaagggccagcggcagagagcagcagcggtggygtctyctccagaacacccctgagcctcctctcccatcctccccagataaaaacccggcctaagcccaagcaataaataaataaataaatcaaaatacgmcaccccagggaatttaaaactgaccagataggcactattgatgtagaaatataaacgcggcggtggctccgtgggccctaaagctgagctgcaaagtggattgttgggttcgatttgtcaaacacggaggctggcaagtttgggcagctctgccgatggtgttttatggaacctttcaggaaccctcaataaaaaatgtattagattagtaatttgagtcccaaatgaccaatttgaaatgattgctttcttatgatttttctgaaagtgcctgtttcgtgagaaattgcttgaaaaatc

SEQ ID NO: 48840 - DNA, 600 bp, Chicken  19866894294428_7
ccaatttgaaatgattgctttcttatgatttttctgaaagtgcctgtttcgtgagaaattgcttgaaaaatcagagggagtttgtagagacgattgtaacagcacacgcgggggctgcatgcagtgggttggggaacgctcatttaacgaggaaggaaaaaagctctatttcttgcttcttctttccttccttggcttcagtgttaccataagaagggctgatggtgaaatagttgggaaggaagggaggtttggtgccaaaaggacctcccgaggtccctttcaacctcaattatctcrtggctcctcaactctctgatcgtctccctcgctgccttctggtttctgcactttgagggctctgctcacagcacacatcagctctctgccctgcctgcaggcgtgaagcatgccrttcctatttatttaaacaaaagccgagattcttatatcactgcctgactgcagaggctgaaactttaggagaaaaaaccctgagagccttgtgataaacttgtgaaagttggcagtgctgagagcgaaccaccctgggataccgctacctggaaggcattaaggaattacagagaacagcctaat

SEQ ID NO: 48841 - DNA, 600 bp, Chicken  19866894294428_8
tgcatgcagtgggttggggaacgctcatttaacgaggaaggaaaaaagctctatttcttgcttcttctttccttccttggcttcagtgttaccataagaagggctgatggtgaaatagttgggaaggaagggaggtttggtgccaaaaggacctcccgaggtccctttcaacctcaattatctcrtggctcctcaactctctgatcgtctccctcgctgccttctggtttctgcactttgagggctctgctcacagcacacatcagctctctgccctgcctgcaggcgtgaagcatgccrttcctatttatttaaacaaaagccgagattcttatatcactgcctgactgcagaggctgaaactttaggagaaaaaaccctgagagccttgtgataaacttgtgaaagttggcagtgctgagagcgaaccaccctgggataccgctacctggaaggcattaaggaattacagagaacagcctaatggggagcgctcgtgtgggccgggctgcttaggaaagacaaagagtttgcagaagaatgagtagcagaacccgccagctcgatcactaaccaaaaaaacctgagatggctgaaata

SEQ ID NO: 48842 - DNA, 599 bp, Chicken  19866894294436_1
  misc_feature (1)..(156): n is any nucleotide
nnnnnnnnnnnnnnnnnnnnnnnnnnnnnnnnnnnnnnnnnnnnnnnnnnnnnnnnnnnnnnnnnnnnnnnnnnnnnnnnnnnnnnnnnnnnnnnnnnnnnnnnnnnnnnnnnnnnnnnnnnnnnnnnnnnnnnnnnnnnnnnnnnnnnnnnnnnntttattatggagagttcatctgcccagtactacagccagccccatcttcaactcaatcagctgcacgcatggacaaaaatagctgggaaagagaccagtatgaaacagccccacagcctgaagctgatgaaaagcaggcaagtragaacctgagcggagaagcaagattctcagcgaggggaagatcggcctcaaagaaaccacaaggaacatggcacaatgcaaagatcaaagaggggcacagacattcaacctaaagctgaaagctgctctgttttacaaattaaaaggatccaactgcatgggatttaactgaccctcttgcgctggatcagaactcttccccttcttcctcctcctttcccttcaaaaagccaaaaacccaatgaagcactatttccgatgctatgaaccattatcttcaaatgcttcctcgagtaaga

SEQ ID NO: 48843 - DNA, 600 bp, Chicken  19866894294436_2
tttaactgaccctcttgcgctggatcagaactcttccccttcttcctcctcctttcccttcaaaaagccaaaaacccaatgaagcactatttccgatgctatgaaccattatcttcaaatgcttcctcgagtaagaaaaacacttttaccatttaaacccaagtttgttcaacaagagggcttgttaaacaggttttccatggcctccaggcctcttcctaccttgggaaaatggtgtttacttcagcagcacagaagggcctttcagcacaggcacagtcacagcaggctctgtcattygggaacaaacttcccaacatcctccatctatacaactccagatgcaagatctttctcagtattttgccccattgcactctggcagctcacaaagtttcaatgtctaacaaattgcacgactcattaagtttccaaatgaggaagcaagccaggaaccacccaaaaacttccagtgtctccaacagagccacccacccaccagggctcctcagccggatcgaggtgcggtatttgcacttgaaaggaagacagggctgcccagaaccttagcaaagacatttaacttcctaaaacaatatt

SEQ ID NO: 48844 - DNA, 600 bp, Chicken  19866894294436_3
acttccagtgtctccaacagagccacccacccaccagggctcctcagccggatcgaggtgcggtatttgcacttgaaaggaagacagggctgcccagaaccttagcaaagacatttaacttcctaaaacaatattcaatcgcacagcagaatggaacattcaacacaaaattagaggacacccatgcagcttttaatttactctcacaatatttgatgcttgagataaaatggcagcccgcaaagaaaaagttgaacatgagacctcgactactattaaatcaagctcctagcagtcttwgttgcagaaataagcttaaaaacatgaccaaaagacactgtaagggctcaaataacaagagacaaagaaagaatgaatgaaccatctaaaacgtttcacttctctcaataaagctgagccttaggggagccaacctcagaacatcagagatgtcatatggggagagagctctccagagaggacgaacaatcaaaacaaagaaatgttagtttgaaagattttcccctgctattaaatgatggttcgtagcaaataataaaaacaccgagaagttataaaaatacataactagagcctaaa

SEQ ID NO: 48845 - DNA, 600 bp, Chicken  19866894294437_1
tcccgaacatcctccagggctcctatatctgcccatgtcacatcaggaattgtgacaaagccttctctcttggcagagggttgcactgatgacagggcaacaatgaaatcattcatctcaatgcacagcttctgcagctggtcctcaggcaaggggtcctgcttcttcagcaaatataagagtctctgtaattcttccttagggtacagagaaatgcagagaaaagattacacaagatgtttagaacctttttcaagggctttttagaggaatattttacccagctgtaatattcattaytataaaacaaagtatcatgtataatatagacatggtataatataacatagaacataaaaatagcattaaaaattgacattaataaaaatgctccaggaaagcattacataaatttatctcarttaaagcattgagtcaacagacaacaatcttgatttaaatactacacaaatagaactaatgcatctattttgtcctcaattttttcctgctgcttctctcacaactctgccaaactggacaatctgtgggataccgtgttacatataaatcattagaactcttaacatacattaaata

SEQ ID NO: 48846 - DNA, 600 bp, Chicken  19866894294437_2
gcacagcttctgcagctggtcctcaggcaaggggtcctgcttcttcagcaaatataagagtctctgtaattcttccttagggtacagagaaatgcagagaaaagattacacaagatgtttagaacctttttcaagggctttttagaggaatattttacccagctgtaatattcattaytataaaacaaagtatcatgtataatatagacatggtataatataacatagaacataaaaatagcattaaaaattgacattaataaaaatgctccaggaaagcattacataaatttatctcarttaaagcattgagtcaacagacaacaatcttgatttaaatactacacaaatagaactaatgcatctattttgtcctcaattttttcctgctgcttctctcacaactctgccaaactggacaatctgtgggataccgtgttacatataaatcattagaactcttaacatacattaaataaacacttactatctaagtatgtaatctgatttcaagtagtcagttcatttcctcaggctgattagacctggttttgtaacaaggccctgataaagtttgggaaaacrtaaaacagatacagc

SEQ ID NO: 48847 - DNA, 600 bp, Chicken  19866894294437_3
ataaatttatctcarttaaagcattgagtcaacagacaacaatcttgatttaaatactacacaaatagaactaatgcatctattttgtcctcaattttttcctgctgcttctctcacaactctgccaaactggacaatctgtgggataccgtgttacatataaatcattagaactcttaacatacattaaataaacacttactatctaagtatgtaatctgatttcaagtagtcagttcatttcctcaggctgattagacctggttttgtaacaaggccctgataaagtttgggaaaacrtaaaacagatacagcaaaatgctttctgacattttccatcctgcagagcacagcctgccaagggtggggaagacaggtatgtaacagttagtgaaaaatcaattccttattggggaagctatctgagaaaacagctcattaaagaacacttgtaatacagcaaggccatacgaaagccatgtgacactgcacctcaagtaaaactaggattttcattacaagataaagggaataaaacattgcaagagtccctttagtttcaacatttttccccacagcagaatatcaacatcatcactt

SEQ ID NO: 48848 - DNA, 600 bp, Chicken  19866894294440_1
aagaaagtaaattacatcttacctttcataagaaaccttttggctcaggcatgtggaggagattctttccaagggccccagggttgtgtgctgctctgatccagctgcagctgctcactgccttctcccaactcttgcagcccaatgcagcagcccggctgccttccagcagcactgcagtgggcaaaggcactgccagggcactgggtgggctggactgaatggttctaacctgagaaccattgtatgatgtagcagtaaagcagctccaaagaaacaggcagggattacctttattgyastggtttgagttttctgtttcattcatcagctctggtagatttcatacatgaatgatggtgatgttgaagggttgcaccatttcttagttatttgttttgatgtcaaaaagagcagtcactctgttcttgtttagctcagattaggcctttgtgagtgtggtaaatgactgtattgaagggatactcgctatgaaaagagaggttccaaatggaatggaacattaaaggaatggagggctgtatgttgtactcacatgtaaataaatgaagcaagcttgcttacctccttgctcagatt

SEQ ID NO: 48849 - DNA, 600 bp, Chicken  19866894294440_2
gaaagtaaattacatcttacctttcataagaaaccttttggctcaggcatgtggaggagattctttccaagggccccagggttgtgtgctgctctgatccagctgcagctgctcactgccttctcccaactcttgcagcccaatgcagcagcccggctgccttccagcagcactgcagtgggcaaaggcactgccagggcactgggtgggctggactgaatggttctaacctgagaaccattgtatgatgtagcagtaaagcagctccaaagaaacaggcagggattacctttattgyastggtttgagttttctgtttcattcatcagctctggtagatttcatacatgaatgatggtgatgttgaagggttgcaccatttcttagttatttgttttgatgtcaaaaagagcagtcactctgttcttgtttagctcagattaggcctttgtgagtgtggtaaatgactgtattgaagggatactcgctatgaaaagagaggttccaaatggaatggaacattaaaggaatggagggctgtatgttgtactcacatgtaaataaatgaagcaagcttgcttacctccttgctcagatttc

SEQ ID NO: 48850 - DNA, 413 bp, Chicken  19866894294446_1
cactgacagacagctgcttctgatatatacatttgggtggtgattatcattttgaaggtgaaaatgtgatcagtgaaattctaatgacagatgctgatgctctggtccttccctcaaaaattcaaaggcctttttgtaagaatgcctctgagtagagctgcatctgcaggtggtggtttcctagaaggctcctaataagccgaagccctacccatttaattcacaccaggatagcccatcaagtgacacaacttctgctcatctctgcaccttccatcagtgcaagcagggctgcttttrcccagcctcagagcagtccttgaattccatccaagctgcctctgcctgctttctcctggtgcagactcggtggtattggaagctgtttggctgtcactcttgcatgctttggg

SEQ ID NO: 48851 - DNA, 600 bp, Chicken  19866894294448_1
ggtagttttagctcctgttgtaaagactgtaaaagcctgtaaagatagtgctgctctgcttgtctgttctacctcctatgacaatgctaagtcataacttggtgataagttggttccaacatgtagaccttctggaacagctgtttaaaagaaaaggagacagctggattggatgattctgtagctaagtatccaagggcagtgggagaaggaagttgacagtgcccaaatacagatggcaatttaaaggcaagtctgaagttcctaccttaaagaacataacaaccaagctttttcttscttcagtgctacayaaataccaaagttgcaattctacaaaactaatctgttgtattgaggtctgcatcttatttacattagaattccaaggacaatgcagccaatggatgtggttaaaaactttttgtcagacacccccaaaagatattttcaacttagaaagaacatgctttaactatttagactgtaaacggctctgtgggtgtgtgaagctgttttttccctaagtgttctgtagcagctcattctaataaatgagtatttaaaaacagatatatattcagagagagggatttggga

SEQ ID NO: 48852 - DNA, 600 bp, Chicken  19866894294448_2
ctgttgtaaagactgtaaaagcctgtaaagatagtgctgctctgcttgtctgttctacctcctatgacaatgctaagtcataacttggtgataagttggttccaacatgtagaccttctggaacagctgtttaaaagaaaaggagacagctggattggatgattctgtagctaagtatccaagggcagtgggagaaggaagttgacagtgcccaaatacagatggcaatttaaaggcaagtctgaagttcctaccttaaagaacataacaaccaagctttttcttscttcagtgctacayaaataccaaagttgcaattctacaaaactaatctgttgtattgaggtctgcatcttatttacattagaattccaaggacaatgcagccaatggatgtggttaaaaactttttgtcagacacccccaaaagatattttcaacttagaaagaacatgctttaactatttagactgtaaacggctctgtgggtgtgtgaagctgttttttccctaagtgttctgtagcagctcattctaataaatgagtatttaaaaacagatatatattcagagagagggatttgggacataatttcaaaaa

SEQ ID NO: 48853 - DNA, 600 bp, Chicken  19866894294461_1
tgctacaacagtgtgagttttcatggcaaccctcacagtgagcctctcctgctgacctattcagcaggtgttttttagcagcttggtcacccttcaaaacctggtcattctgcaaagaacactgatctatcttgctctcggctttctttttctgctttgacatagaggctttcttgctttcaaccccattggcttctgtgccgcccttttcatcacacttgtctgccttctgacagagtcccttttggttgttaggtacgctgttctcacattcagagcaatgcacgattagaggccctrcatttcggcacagaaattgggaggagctcatcacctttggaacagttctgatgttttcctctgggttttggtgagcgtgtgaatctgtcctgtttactctctgatgtgcctgaagctgttgtactgactggaggaaaaaatttttcggcagcgagttctgtgtcatcgttcttttgagccttccctgaaggcagctgcagtggaggacatgctggacaggatgcacataaccttcagtagtttgttgtaaagtatttatgggagtcacagagctttggatctgcacggccccaggcgaag

SEQ ID NO: 48854 - DNA, 599 bp, Chicken  19866894294476_1
  misc_feature (1)..(31): n is any nucleotide
nnnnnnnnnnnnnnnnnnnnnnnnnnnnnnncctcaattgatgaaaagacagccctgagcctaagcaatcccacactgatcagatctccttcaaaatctctagcaatcagagtaagaaataattaagacaaagcaggagaactctgctggtcactaagttggaaaggaactcaagatgcagaggtgacaaccaggaccgaggcaggacatatcagagaacagagatagcttgatgctaatgacagcgtagtctggttggctggaaagacacatgctgcaaaacaaataataatttatatrtacttatgaggcaggatggactaagggaaaaaaaacagtggggccacgttacaagtatacacgggacagaagacggttcctttttatttggcagagaaagccagtcagtgctaaattctctcagctctccaccaaaaggctcttaattaggtacagtgacaaacraaaggaaggattaaagcaaagatctgctctagctcactgtgatacatctgcratatggcacgcagggaatgcccagggaaragaggggcaggacatgctgaatgttctcccagcctcccattacattcagtttc

SEQ ID NO: 48855 - DNA, 600 bp, Chicken  19866894294476_2
ggaactcaagatgcagaggtgacaaccaggaccgaggcaggacatatcagagaacagagatagcttgatgctaatgacagcgtagtctggttggctggaaagacacatgctgcaaaacaaataataatttatatrtacttatgaggcaggatggactaagggaaaaaaaacagtggggccacgttacaagtatacacgggacagaagacggttcctttttatttggcagagaaagccagtcagtgctaaattctctcagctctccaccaaaaggctcttaattaggtacagtgacaaacraaaggaaggattaaagcaaagatctgctctagctcactgtgatacatctgcratatggcacgcagggaatgcccagggaaragaggggcaggacatgctgaatgttctcccagcctcccattacattcagtttcggggataaccaggcygcatgtggtttctctgcattttgtaacctgcagcaacttctcttcctccttcatctgcattgaatttcatctgcatcccatcactcaggcagcctgctacctccctcttgtcctccyctccactctgctgaactcgcagtcatcagcaaat

SEQ ID NO: 48856 - DNA, 600 bp, Chicken  19866894294476_3
aacagagatagcttgatgctaatgacagcgtagtctggttggctggaaagacacatgctgcaaaacaaataataatttatatrtacttatgaggcaggatggactaagggaaaaaaaacagtggggccacgttacaagtatacacgggacagaagacggttcctttttatttggcagagaaagccagtcagtgctaaattctctcagctctccaccaaaaggctcttaattaggtacagtgacaaacraaaggaaggattaaagcaaagatctgctctagctcactgtgatacatctgcratatggcacgcagggaatgcccagggaaragaggggcaggacatgctgaatgttctcccagcctcccattacattcagtttcggggataaccaggcygcatgtggtttctctgcattttgtaacctgcagcaacttctcttcctccttcatctgcattgaatttcatctgcatcccatcactcaggcagcctgctacctccctcttgtcctccyctccactctgctgaactcgcagtcatcagcaaatggcaaagtttgctgctaagtccattttctaggacatttctgcaaactgcaga

SEQ ID NO: 48857 - DNA, 600 bp, Chicken  19866894294476_4
gtagtctggttggctggaaagacacatgctgcaaaacaaataataatttatatrtacttatgaggcaggatggactaagggaaaaaaaacagtggggccacgttacaagtatacacgggacagaagacggttcctttttatttggcagagaaagccagtcagtgctaaattctctcagctctccaccaaaaggctcttaattaggtacagtgacaaacraaaggaaggattaaagcaaagatctgctctagctcactgtgatacatctgcratatggcacgcagggaatgcccagggaaragaggggcaggacatgctgaatgttctcccagcctcccattacattcagtttcggggataaccaggcygcatgtggtttctctgcattttgtaacctgcagcaacttctcttcctccttcatctgcattgaatttcatctgcatcccatcactcaggcagcctgctacctccctcttgtcctccyctccactctgctgaactcgcagtcatcagcaaatggcaaagtttgctgctaagtccattttctaggacatttctgcaaactgcagaggtcacaacgtgaggcctcatacagttgc

SEQ ID NO: 48858 - DNA, 600 bp, Chicken  19866894294476_5
gatggactaagggaaaaaaaacagtggggccacgttacaagtatacacgggacagaagacggttcctttttatttggcagagaaagccagtcagtgctaaattctctcagctctccaccaaaaggctcttaattaggtacagtgacaaacraaaggaaggattaaagcaaagatctgctctagctcactgtgatacatctgcratatggcacgcagggaatgcccagggaaragaggggcaggacatgctgaatgttctcccagcctcccattacattcagtttcggggataaccaggcygcatgtggtttctctgcattttgtaacctgcagcaacttctcttcctccttcatctgcattgaatttcatctgcatcccatcactcaggcagcctgctacctccctcttgtcctccyctccactctgctgaactcgcagtcatcagcaaatggcaaagtttgctgctaagtccattttctaggacatttctgcaaactgcagaggtcacaacgtgaggcctcatacagttgctccaatggccctctccactgcaggaggccacttgctccttcatgttcacacacactgaagaaacatta

SEQ ID NO: 48859 - DNA, 600 bp, Chicken  19866894294476_6
ccaaaaggctcttaattaggtacagtgacaaacraaaggaaggattaaagcaaagatctgctctagctcactgtgatacatctgcratatggcacgcagggaatgcccagggaaragaggggcaggacatgctgaatgttctcccagcctcccattacattcagtttcggggataaccaggcygcatgtggtttctctgcattttgtaacctgcagcaacttctcttcctccttcatctgcattgaatttcatctgcatcccatcactcaggcagcctgctacctccctcttgtcctccyctccactctgctgaactcgcagtcatcagcaaatggcaaagtttgctgctaagtccattttctaggacatttctgcaaactgcagaggtcacaacgtgaggcctcatacagttgctccaatggccctctccactgcaggaggccacttgctccttcatgttcacacacactgaagaaacattaacagcaggttgttggcaagagtaatgcgtgtggtttctgaagctttctccagcttcctcaaaaggcaccttttatcagcatgcattctgacctgcactaaaatgcaatcagagcaca

SEQ ID NO: 48860 - DNA, 600 bp, Chicken  19866894294477_1
ctatggctatgtgagaaagcaagggggtgattttgcacaggaccgcagctgtttttctccacaataaacaaaaatcagaggctgaaatgtgaagttttgtgtgaaatctatttgtctttgtccaagggcctctggctcgccacacaggtgcgagcagacagaggaagcactcagagggacgtgaggggagcggcgtccaactcagctaacctgggcctggcccccattcaggcccagccagcaggtagggaggccatttttagcttgctgaggggatttgctgctgctggtggctggggrgagcctgagcgggagccttggccatgctccctggccagcctcacacacaacaagcccataaaggccctgccagctccctgctgctggctggctgctggctggcagatgtaagcagctccttagctggagggtgaatgcagtgctcaaagccaacacacacacacacacacaatgaatatttttattccctcgtataaattgttagacatttgctggcaattatttgctagaagttaaggtgttgaaagccttctgctgtacttttctagctccttttcttttcctttttcttcccccaaa

SEQ ID NO: 48861 - DNA, 600 bp, Chicken  19866894294478_1
aaggaagcattggaggactccacacaagcccacctcacttagacaaccagataggtgcaccacagtgctatctccatcccccagcccttctccaaacatcccccagagtacctcacctgcaggtgggacctctccaagcccaggatgcgtcaacaaggcaatgctggtcaacagagcagcagtggcccattcgtgccgttcccaaatagctactatctctgtgtagacactctttgtgggagaagagagatttcccttccaaagtaattactccgcttggaagcacactaattagcctgraacaaagtggctcgagtgtccgcatggggagctattgtggaatagcttattctgtcagagctattctgggcaatttcctctcacaaacaggccatgagatttaattttccttctctctgcaaacagatgaaagatctgtgctaaccaaccccaaatcatcccagccttccttgccaggaaygagagcaatgggtgcaaactgtcctgaaatcttctctcttttgggattcactacatttttttttttcttttccttttttaaattccttctctctccctctctttatttattcatttatt

SEQ ID NO: 48862 - DNA, 545 bp, Chicken  19866894294478_2
gtggcccattcgtgccgttcccaaatagctactatctctgtgtagacactctttgtgggagaagagagatttcccttccaaagtaattactccgcttggaagcacactaattagcctgraacaaagtggctcgagtgtccgcatggggagctattgtggaatagcttattctgtcagagctattctgggcaatttcctctcacaaacaggccatgagatttaattttccttctctctgcaaacagatgaaagatctgtgctaaccaaccccaaatcatcccagccttccttgccaggaaygagagcaatgggtgcaaactgtcctgaaatcttctctcttttgggattcactacatttttttttttcttttccttttttaaattccttctctctccctctctttatttattcatttattattttttttttttaaggaagagacatgaatcaagaagatttacatcaccaggactttggatctactccaacggtgacgcccaatgcagcacaaattaagccaaacagtggccattgaggacaatgt

SEQ ID NO: 48863 - DNA, 600 bp, Chicken  19866894294479_1
acaaatattgccaactgtagacatcattctaggggggggaaaaagatctccacatgtgtacagattttttactatggaattattcctttcttgataaaataagacaaaggtatatttctaacagtattaatggtgatgccagtcatagtaaaaactgacgaatcaaatccacttaatgaacacagtttgtgtttgtgttgttgtttttttttttaaatgaactgtgttatgccaagtacactacagtttgttttgaagatacctctacaaccagcagctggggaaagattaactagttgwgcctgccagatagagtaccttctctgaggttactgacccttcatagctttgtgagaaagccttttccagaaccagacatccttaatcatatgttgggatgcaagcccatgagggatacccgtaatccattatttctgagatgatacacactgcatttaacacaggtgcttttctgcagtttgcctttccaagtaggcgtattctgatatatgtgacagatcgccgctttataccttggaatgcactaagcagcattcctcttctgaatgctatagacagacatgtttctaattggacaga

SEQ ID NO: 48864 - DNA, 600 bp, Chicken  19866894294480_1
cataatcctaaataataattcattttttaattacatggtatagaataacttgcaaacagaagacacttattcaggtttcctgacaggtactgatgctgttgtgttttttttttggcaaacttggaacaaaccagaaggaaaagcaaagaattattttataaccatgagggaaagaaatgtccatttaaatgtagagaattcatacagcaaaacttaaagaaaaaatccacacttacagcagatttttttttaattcttagtgcaagaaacataaccaagttaatcacagaatcaggactrattaagaatatggaaaattctcctatacagaggtagagtccagtgcacaaggctaaaacgatattcaatagtctaaacaagactgagccaggttttacggaatccactttttaaagtatcagactgtatgtacatacatmcaataaatagactatacaatctttaaagtagtttaataaacttcacaaaaattatagaagatgcattgagatctttacataatccaaagttcatatctctatcgcccagaaatggataaaaccaatatacctgatatcaagttaaatggaaaatagttta

SEQ ID NO: 48865 - DNA, 600 bp, Chicken  19866894294480_2
aagcaaagaattattttataaccatgagggaaagaaatgtccatttaaatgtagagaattcatacagcaaaacttaaagaaaaaatccacacttacagcagatttttttttaattcttagtgcaagaaacataaccaagttaatcacagaatcaggactrattaagaatatggaaaattctcctatacagaggtagagtccagtgcacaaggctaaaacgatattcaatagtctaaacaagactgagccaggttttacggaatccactttttaaagtatcagactgtatgtacatacatmcaataaatagactatacaatctttaaagtagtttaataaacttcacaaaaattatagaagatgcattgagatctttacataatccaaagttcatatctctatcgcccagaaatggataaaaccaatatacctgatatcaagttaaatggaaaatagtttagcaaagtgttgataaatcaaaatattttacatattttaaagcctaaatttatgcttagaaaggatgaatttcaaatgctttgaaaatgttccttttgatatcatctgtaaagargtttcaaatgctttggttggcatttg

SEQ ID NO: 48866 - DNA, 600 bp, Chicken  19866894294480_3
agtatcagactgtatgtacatacatmcaataaatagactatacaatctttaaagtagtttaataaacttcacaaaaattatagaagatgcattgagatctttacataatccaaagttcatatctctatcgcccagaaatggataaaaccaatatacctgatatcaagttaaatggaaaatagtttagcaaagtgttgataaatcaaaatattttacatattttaaagcctaaatttatgcttagaaaggatgaatttcaaatgctttgaaaatgttccttttgatatcatctgtaaagargtttcaaatgctttggttggcatttgtattgttatactttccttacattccatgttcaagggaaaaatggacttggagactcacagttcccatgtattggcacaacaatgatgagaattagatattttcaaggcccaaaggacatcaggagatacggaaaaaaccttcatgtcacaaaccacgcaaatcacattagaaggttaacagaaactgtttggtatcactacctcattcctgcaagtgcctctccacctggaggcatccgatccacactgcactgaagcgaagygcgctcctctg

SEQ ID NO: 48867 - DNA, 600 bp, Chicken  19866894294480_4
tctgtaaagargtttcaaatgctttggttggcatttgtattgttatactttccttacattccatgttcaagggaaaaatggacttggagactcacagttcccatgtattggcacaacaatgatgagaattagatattttcaaggcccaaaggacatcaggagatacggaaaaaaccttcatgtcacaaaccacgcaaatcacattagaaggttaacagaaactgtttggtatcactacctcattcctgcaagtgcctctccacctggaggcatccgatccacactgcactgaagcgaagygcgctcctctgggcccctaggtttgctacaagcccatagggcttaataaaaacaaatacggaatctttacggtttaccacagtagtgcatatatcagggaagtctgctgccactcatttcagtgacagtcacaaagaaaggatttcggggaactgagaattttcaacygtatctttctaaaccgtgcaaaaaagaataaaaataaggaaaggagaaataatcacccttgggcactctgttgacaaattattttcaataaaagcttcttacaaatcccaagrgggcaacarccatggtagg

SEQ ID NO: 48868 - DNA, 600 bp, Chicken  19866894294480_5
aaaaaaccttcatgtcacaaaccacgcaaatcacattagaaggttaacagaaactgtttggtatcactacctcattcctgcaagtgcctctccacctggaggcatccgatccacactgcactgaagcgaagygcgctcctctgggcccctaggtttgctacaagcccatagggcttaataaaaacaaatacggaatctttacggtttaccacagtagtgcatatatcagggaagtctgctgccactcatttcagtgacagtcacaaagaaaggatttcggggaactgagaattttcaacygtatctttctaaaccgtgcaaaaaagaataaaaataaggaaaggagaaataatcacccttgggcactctgttgacaaattattttcaataaaagcttcttacaaatcccaagrgggcaacarccatggtaggaaggaactactaacaacaacaaaacagcttaatagttagagttgaaaattatgttcatggtttggttatttttaatttctacaagcgcctatgctgaaaaaaacatgagggtttggattttagcttcaaaaccaaatctactcgtgagaagtaccttgttaaaatgtg

SEQ ID NO: 48869 - DNA, 600 bp, Chicken  19866894294480_6
cactgcactgaagcgaagygcgctcctctgggcccctaggtttgctacaagcccatagggcttaataaaaacaaatacggaatctttacggtttaccacagtagtgcatatatcagggaagtctgctgccactcatttcagtgacagtcacaaagaaaggatttcggggaactgagaattttcaacygtatctttctaaaccgtgcaaaaaagaataaaaataaggaaaggagaaataatcacccttgggcactctgttgacaaattattttcaataaaagcttcttacaaatcccaagrgggcaacarccatggtaggaaggaactactaacaacaacaaaacagcttaatagttagagttgaaaattatgttcatggtttggttatttttaatttctacaagcgcctatgctgaaaaaaacatgagggtttggattttagcttcaaaaccaaatctactcgtgagaagtaccttgttaaaatgtgtattctgctcttctgtaggccttctcagtggaacttttacaattattttttattttatataaacagacttactttgttttaaagtaaacacatacagatcaagaatattgctt

SEQ ID NO: 48870 - DNA, 600 bp, Chicken  19866894294480_7
gaagcgaagygcgctcctctgggcccctaggtttgctacaagcccatagggcttaataaaaacaaatacggaatctttacggtttaccacagtagtgcatatatcagggaagtctgctgccactcatttcagtgacagtcacaaagaaaggatttcggggaactgagaattttcaacygtatctttctaaaccgtgcaaaaaagaataaaaataaggaaaggagaaataatcacccttgggcactctgttgacaaattattttcaataaaagcttcttacaaatcccaagrgggcaacarccatggtaggaaggaactactaacaacaacaaaacagcttaatagttagagttgaaaattatgttcatggtttggttatttttaatttctacaagcgcctatgctgaaaaaaacatgagggtttggattttagcttcaaaaccaaatctactcgtgagaagtaccttgttaaaatgtgtattctgctcttctgtaggccttctcagtggaacttttacaattattttttattttatataaacagacttactttgttttaaagtaaacacatacagatcaagaatattgcttgcaacaatg

SEQ ID NO: 48871 - DNA, 600 bp, Chicken  19866894294481_1
attttgccatatccatccaaaatgattcaaaaatctttactcaatttctactttgatttcttctttccaaacctctgattcacagctgcagataccctttacctacttccaaatctgcatttcttctttttgcagcttgggtgtaagaaccacaatatgtttggatcagtggatccaagactgtaactacacaacaccagcactaagtgcaattttgcaaatgtttccaaaatctagtacaatccaagtacataatataatgcagagtattcacttcagaacttggctacataaactaamacatttaccgctcactcccgtgcttgtatttccttttaaaacagtagctcatacccattatatgaaggctttctaagttgtgctaatagccaaatgggcaatgatttaggaaggtaaatgtgaggtaaggaatcttttaggtatayaaagtctaattgctaattcaattgatgacaaatgaaccaagcattcaggcttcaaagcagtatttatttgaaacctatgctactttgtaggtaggttagtccaagtgctgacaatactctgtttctattgtactctgatttactgcaacacaaa

SEQ ID NO: 48872 - DNA, 600 bp, Chicken  19866894294481_2
gaaccacaatatgtttggatcagtggatccaagactgtaactacacaacaccagcactaagtgcaattttgcaaatgtttccaaaatctagtacaatccaagtacataatataatgcagagtattcacttcagaacttggctacataaactaamacatttaccgctcactcccgtgcttgtatttccttttaaaacagtagctcatacccattatatgaaggctttctaagttgtgctaatagccaaatgggcaatgatttaggaaggtaaatgtgaggtaaggaatcttttaggtatayaaagtctaattgctaattcaattgatgacaaatgaaccaagcattcaggcttcaaagcagtatttatttgaaacctatgctactttgtaggtaggttagtccaagtgctgacaatactctgtttctattgtactctgatttactgcaacacaaaatcagatctgtcttcagtggttttaggactctttacaagatcagaaatgtaataatgtctctcaaggcttcattaagtggtgcagttccagttctttccacacatgcatgtctatgtaaggcaacacttctgtggccctggcaaca

SEQ ID NO: 48873 - DNA, 600 bp, Chicken  19866894294484_1
cgtcagtgcagcccaccacctcccagcactttctcctcccatctcctttctcctgccctgctttaaattttgattgcattctttttaaagaatacggaggaacaaatgcccttatcagcaattctcacaaggtataaagagtcgcttttatctcgctgcctttactaatctagagcgagccgatgcctgttaattttttaattttcctagtgaatgcatttgtggctttgtcagcatccatatccacacgcacacagaaacccacaccattggcacatgcatgctcctaaaaatggcccrggtttggggaacatccactcccactttgtgcttcccgcggtcaggtccccgtttcccagcccttctcattttgtcaaagccaaataattcgggcaggtgggtttaatgtccccacggggctgtcacctgcatgctacgccagtggccaggaacgcctgggctctgtgctcattgctggtggcaccgggaggggagcgcggtgacgagcacagctctgcttttgcaaccacaaagcagtttcatctacggcgtagagtgctatgtgtcacacgaagctcaccaggacaccccggggacgtg

SEQ ID NO: 48874 - DNA, 600 bp, Chicken  19866894294490_1
gtttagaaacagttctttctagatttcagccttttgaatctcagtgaatggtgcttttgattccagcatggagcaagaatctttccatttaaatagaggaatatataggaataagaaagaaagatgcacaaggataaagaattaacaggtaaacacttaagggcttaactaagtaactgggggaacagtgggattcctgatatgagagaaaatgtaaggcacagatcgcctcctgaaatctgctcaaaataaaataaatataacagcaatgttgatgaaaatgctacagtctacagcaayccttgaagagcagagcgttagagtgcaatggaaggggagccagcacttggctggtagtgcattagtgctctatcacctcttctgccaaagcaagccattacttactcaaagtgctctgcaggcggccccttctgggacagcatacccatcactttctgaagggtagttcggaggattcttccctttttgttggacggtcccctgggtttccacatctcatgaattatggataggatcttaatggacactggctgcatgagcactgctttctgagctgctcagctcaagacagccattgct

SEQ ID NO: 48875 - DNA, 599 bp, Chicken  19866894294491_1
  misc_feature (1)..(167): n is any nucleotide
nnnnnnnnnnnnnnnnnnnnnnnnnnnnnnnnnnnnnnnnnnnnnnnnnnnnnnnnnnnnnnnnnnnnnnnnnnnnnnnnnnnnnnnnnnnnnnnnnnnnnnnnnnnnnnnnnnnnnnnnnnnnnnnnnnnnnnnnnnnnnnnnnnnnnnnnnnnnnnnnnnnnnnncctgcctgcacgatgtgcgaagtcccgtttcctcctgcttagaggtaatgaagggacttgaggattcactcacttctgtacagcaaaagtacaaccagcctgggacagccaaacatgtctgtggatgcagaaytggatggacaaactccctgccagcatgcctgggtaatgtacctaccagagaaacacagcccactggtaagctagctgctagcaatacctgagtgtagaattcagtcaattcttctacctaagagtggggctaaattttaatgtgaaggtgtgaccctccaaaatcacctggaatttgttgatggacaaacagctgatcatcagcaacaacagctgaagaacagaattgtgctgacccaaccaaaactgctgtgtttgtcttatgggactgcctaaaggcactcgctgtggttgggatgt

SEQ ID NO: 48876 - DNA, 600 bp, Chicken  19866894294491_2
gccagcatgcctgggtaatgtacctaccagagaaacacagcccactggtaagctagctgctagcaatacctgagtgtagaattcagtcaattcttctacctaagagtggggctaaattttaatgtgaaggtgtgaccctccaaaatcacctggaatttgttgatggacaaacagctgatcatcagcaacaacagctgaagaacagaattgtgctgacccaaccaaaactgctgtgtttgtcttatgggactgcctaaaggcactcgctgtggttgggatgtaattgtgctgggtgctgtrcggacagacaagcagacacaatatcctgcccccagggtttgaatctcagaacctcttccatttctctcaaagcatacgggataaaggaygaaggcatggctgaacaacagcagagaagcacccgcatgggaccytggctcctggtcagctcagaggttttgtgccrtcatgaattttgagcagaaagggaygcacagcttacactggtatttcaaatgtacgtaagggcccttttccctaacctgtacatctgatgcattgcatatcaacacttccccgttacaactgcttcctgtgcat

SEQ ID NO: 48877 - DNA, 535 bp, Chicken  19866894294491_3
attcttctacctaagagtggggctaaattttaatgtgaaggtgtgaccctccaaaatcacctggaatttgttgatggacaaacagctgatcatcagcaacaacagctgaagaacagaattgtgctgacccaaccaaaactgctgtgtttgtcttatgggactgcctaaaggcactcgctgtggttgggatgtaattgtgctgggtgctgtrcggacagacaagcagacacaatatcctgcccccagggtttgaatctcagaacctcttccatttctctcaaagcatacgggataaaggaygaaggcatggctgaacaacagcagagaagcacccgcatgggaccytggctcctggtcagctcagaggttttgtgccrtcatgaattttgagcagaaagggaygcacagcttacactggtatttcaaatgtacgtaagggcccttttccctaacctgtacatctgatgcattgcatatcaacacttccccgttacaactgcttcctgtgcatgtttcatatacttatatataccta

SEQ ID NO: 48878 - DNA, 490 bp, Chicken  19866894294491_4
accctccaaaatcacctggaatttgttgatggacaaacagctgatcatcagcaacaacagctgaagaacagaattgtgctgacccaaccaaaactgctgtgtttgtcttatgggactgcctaaaggcactcgctgtggttgggatgtaattgtgctgggtgctgtrcggacagacaagcagacacaatatcctgcccccagggtttgaatctcagaacctcttccatttctctcaaagcatacgggataaaggaygaaggcatggctgaacaacagcagagaagcacccgcatgggaccytggctcctggtcagctcagaggttttgtgccrtcatgaattttgagcagaaagggaygcacagcttacactggtatttcaaatgtacgtaagggcccttttccctaacctgtacatctgatgcattgcatatcaacacttccccgttacaactgcttcctgtgcatgtttcatatacttatatataccta

SEQ ID NO: 48879 - DNA, 458 bp, Chicken  19866894294491_5
acaaacagctgatcatcagcaacaacagctgaagaacagaattgtgctgacccaaccaaaactgctgtgtttgtcttatgggactgcctaaaggcactcgctgtggttgggatgtaattgtgctgggtgctgtrcggacagacaagcagacacaatatcctgcccccagggtttgaatctcagaacctcttccatttctctcaaagcatacgggataaaggaygaaggcatggctgaacaacagcagagaagcacccgcatgggaccytggctcctggtcagctcagaggttttgtgccrtcatgaattttgagcagaaagggaygcacagcttacactggtatttcaaatgtacgtaagggcccttttccctaacctgtacatctgatgcattgcatatcaacacttccccgttacaactgcttcctgtgcatgtttcatatacttatatataccta

SEQ ID NO: 48880 - DNA, 433 bp, Chicken  19866894294491_6
cagctgaagaacagaattgtgctgacccaaccaaaactgctgtgtttgtcttatgggactgcctaaaggcactcgctgtggttgggatgtaattgtgctgggtgctgtrcggacagacaagcagacacaatatcctgcccccagggtttgaatctcagaacctcttccatttctctcaaagcatacgggataaaggaygaaggcatggctgaacaacagcagagaagcacccgcatgggaccytggctcctggtcagctcagaggttttgtgccrtcatgaattttgagcagaaagggaygcacagcttacactggtatttcaaatgtacgtaagggcccttttccctaacctgtacatctgatgcattgcatatcaacacttccccgttacaactgcttcctgtgcatgtttcatatacttatatataccta

SEQ ID NO: 48881 - DNA, 599 bp, Chicken  19866894294492_1
  misc_feature (1)..(159): n is any nucleotide
nnnnnnnnnnnnnnnnnnnnnnnnnnnnnnnnnnnnnnnnnnnnnnnnnnnnnnnnnnnnnnnnnnnnnnnnnnnnnnnnnnnnnnnnnnnnnnnnnnnnnnnnnnnnnnnnnnnnnnnnnnnnnnnnnnnnnnnnnnnnnnnnnnnnnnnnnnnnnnngagccagggtcccatgcgggtgcttctctgctgttgttcagccatgccttcgtcctttatcccgtatgctttgagagaaatggaagaggttctgagattcaaaccctgggggcaggatattgtgtctgcttgtctgtccgyacagcacccagcacaattacatcccaaccacagcgagtgcctttaggcagtcccataagacaaacacagcagttttggttgggtcagcacaattctgttcttcagctgttgttgctgatgatcagctgtttgtccatcaacaaattccaggtgattttggagggtcacaccttcacattaaaatttagccccactcttaggtagaagrattgactgaattctayactcaggtattgctagcagctagcttaccagtgggctgtgtttctctggtaggtacattacccaggcatgctggc

SEQ ID NO: 48882 - DNA, 600 bp, Chicken  19866894294492_2
tcgtcctttatcccgtatgctttgagagaaatggaagaggttctgagattcaaaccctgggggcaggatattgtgtctgcttgtctgtccgyacagcacccagcacaattacatcccaaccacagcgagtgcctttaggcagtcccataagacaaacacagcagttttggttgggtcagcacaattctgttcttcagctgttgttgctgatgatcagctgtttgtccatcaacaaattccaggtgattttggagggtcacaccttcacattaaaatttagccccactcttaggtagaagrattgactgaattctayactcaggtattgctagcagctagcttaccagtgggctgtgtttctctggtaggtacattacccaggcatgctggcagggagtttgtccatccaattctgcatccacagacatgtttggctgtcccaggctggttgtactttgctgtacagaagtgagtgaatcctcaagtcccttcattacctctaagcaggaggaaacgggacttcgcacatcgtgcaggcagggatcaccaaggggtggcccagtccattgtcttcccagcttgacctgggttggcagagaa

SEQ ID NO: 48883 - DNA, 600 bp, Chicken  19866894294492_3
atgctttgagagaaatggaagaggttctgagattcaaaccctgggggcaggatattgtgtctgcttgtctgtccgyacagcacccagcacaattacatcccaaccacagcgagtgcctttaggcagtcccataagacaaacacagcagttttggttgggtcagcacaattctgttcttcagctgttgttgctgatgatcagctgtttgtccatcaacaaattccaggtgattttggagggtcacaccttcacattaaaatttagccccactcttaggtagaagrattgactgaattctayactcaggtattgctagcagctagcttaccagtgggctgtgtttctctggtaggtacattacccaggcatgctggcagggagtttgtccatccaattctgcatccacagacatgtttggctgtcccaggctggttgtactttgctgtacagaagtgagtgaatcctcaagtcccttcattacctctaagcaggaggaaacgggacttcgcacatcgtgcaggcagggatcaccaaggggtggcccagtccattgtcttcccagcttgacctgggttggcagagaacctgaggggaccaaga

SEQ ID NO: 48884 - DNA, 600 bp, Chicken  19866894294495_1
tgctttggaggtgtctgtcttttgattacagaggaaacctagacggtaaggttagagaaggctgctctattacagcctttccttgtttgcccagacattgtagcttattgtagcttggagatgctccaacccagacatgccacgagcagtccaacaagtaatggatgaagtgctgctgggaggttcagctcctcagccatgtccctgagcactggtgatgaacacagcagactacccacagcagcaaaacagcagtcgtgccaaagcctgctctgtcaatgccaaatccaccttccacartgtctgtagtcacagatgagaaacagracacagaaggaataaactgctctctaacagcagctggcatctcctccctgctygctcttctgttgacaagtgaagtactaggcacagttctgcaaaactctttacattttggcacttttcaattcttccatttctcactggctaaacctgcagccacagaacctgcaaagtccatgggaacagcatgaacagaaggcaagcagaggccaggcaccagggacttcctagaggggcttaaacatagcagcaaaatgtgaagatcatttagaacac

SEQ ID NO: 48885 - DNA, 600 bp, Chicken  19866894294495_2
acagaggaaacctagacggtaaggttagagaaggctgctctattacagcctttccttgtttgcccagacattgtagcttattgtagcttggagatgctccaacccagacatgccacgagcagtccaacaagtaatggatgaagtgctgctgggaggttcagctcctcagccatgtccctgagcactggtgatgaacacagcagactacccacagcagcaaaacagcagtcgtgccaaagcctgctctgtcaatgccaaatccaccttccacartgtctgtagtcacagatgagaaacagracacagaaggaataaactgctctctaacagcagctggcatctcctccctgctygctcttctgttgacaagtgaagtactaggcacagttctgcaaaactctttacattttggcacttttcaattcttccatttctcactggctaaacctgcagccacagaacctgcaaagtccatgggaacagcatgaacagaaggcaagcagaggccaggcaccagggacttcctagaggggcttaaacatagcagcaaaatgtgaagatcatttagaacacatattgcgtacttcacaactcacagga

SEQ ID NO: 48886 - DNA, 600 bp, Chicken  19866894294495_3
ccttgtttgcccagacattgtagcttattgtagcttggagatgctccaacccagacatgccacgagcagtccaacaagtaatggatgaagtgctgctgggaggttcagctcctcagccatgtccctgagcactggtgatgaacacagcagactacccacagcagcaaaacagcagtcgtgccaaagcctgctctgtcaatgccaaatccaccttccacartgtctgtagtcacagatgagaaacagracacagaaggaataaactgctctctaacagcagctggcatctcctccctgctygctcttctgttgacaagtgaagtactaggcacagttctgcaaaactctttacattttggcacttttcaattcttccatttctcactggctaaacctgcagccacagaacctgcaaagtccatgggaacagcatgaacagaaggcaagcagaggccaggcaccagggacttcctagaggggcttaaacatagcagcaaaatgtgaagatcatttagaacacatattgcgtacttcacaactcacaggagaaaaatccatgactaatcttcaaatactgagtgttggttgttgaaataaaaa

SEQ ID NO: 48887 - DNA, 599 bp, Chicken  19866894294505_1
  misc_feature (1)..(128): n is any nucleotide
nnnnnnnnnnnnnnnnnnnnnnnnnnnnnnnnnnnnnnnnnnnnnnnnnnnnnnnnnnnnnnnnnnnnnnnnnnnnnnnnnnnnnnnnnnnnnnnnnnnnnnnnnnnnnnnnnnnnnnnnnnnnnnnntcataccattgagaatattcgtgtggaaaaaagcactgacaacattttctttcaccaaagaagagcagtagtttgaagagaacattgggaatgaatgctgacgttccactctaaccctcttcgaagtggtagatatcttagcagaaaaaaagataaactgcaccaactcctwataagggtattccccaaagggctgcagctgtaacctgtgggttacagcagcaccaccacaaccaacctgcagcttttttttcttcttctttcaggtaatcaggaacatccctagatgtctatataagcacttgtgtcattgtgtgtttgtaggtgttaaaacaaacaagcacactaacttgatagcacaattaaaactagattccagctgcgtgggagaggtcttaatgaaccttcatgttgggttccttgatattctgttgtggtagcaaccaatggttacagtataaataaaagttg

SEQ ID NO: 48888 - DNA, 599 bp, Chicken  19866894294506_1
  misc_feature (1)..(21): n is any nucleotide
nnnnnnnnnnnnnnnnnnnnntgccaataaatagagccatgtttagtgtttatatctggaatcccccaggcaggcaagcgacaaaataagctttaataatggacagggttttttttgttttgttttgtcttttaatataaactattgctctggatgggaccaatctgattagctttcattatgacattttctgacacgtttccatccattatatctgtaatcttcatttagattccaaccacattggcaatgctgtaatttgttttgcatgagcacaagaatcctcacaacatattaaawatatatatatatcaatatacatctaaggtaataattagtatttttaaagctttctaaactataagatgtgaaaatttaaacagcaaaaaatcctaagcacactgtgtaggaacaaatttgggacgaggtgtgaggggcttaatgctcaaatgctgcagtgcactccacatacaaacagtaataaaaatctatcacttaatcatttacatgttgtgtaaaacagcagtctccttttagttaagagccgctttatgttgctttcatcgatacaaatgttgcccaagtgatygtgcgggaga

SEQ ID NO: 48889 - DNA, 509 bp, Chicken  19866894294506_2
acatattaaawatatatatatatcaatatacatctaaggtaataattagtatttttaaagctttctaaactataagatgtgaaaatttaaacagcaaaaaatcctaagcacactgtgtaggaacaaatttgggacgaggtgtgaggggcttaatgctcaaatgctgcagtgcactccacatacaaacagtaataaaaatctatcacttaatcatttacatgttgtgtaaaacagcagtctccttttagttaagagccgctttatgttgctttcatcgatacaaatgttgcccaagtgatygtgcgggagaatacaagaacagactgtaataaaattaaaaataactttccaaggaaataatatttggaaggattaattacagaagttcaaacaggaggccatatgcttttccctgtctttactgttgagcatacagtatgcctgtaataaaacagggagggcaaagcaaactgattcatttaccaggtaacaattcaatatctttgtga

SEQ ID NO: 48890 - DNA, 600 bp, Chicken  19866894294510_1
cttcatccagacagtgaatgtcacctcagctgttgacgagaaaaatctgttgaatgagttgagagacagagccaagcagtgtgtagttccactcatggtgtaccatccagcattcatctactacgaccaatacctggtgatagtgcagaacaccattcagaatgttctcatcgctgctggggcgatgctcgttgtctctcttgtgcttattcccaacccactgtgttgcttgtgggtgacttttgctatagcttctgttattgttggtgtttctggtttcatgacattttgggacattarcctcgactccatatccatgattaacctggtcatttgcataggattttcagtagacttttctgcacatatttcctatgcctttgttacgagtggagagtcatcagccaatgaaagggcaataggagctctgcaccagcttggttacccagtgttacaaggagcagtatctactgtgttaggagtagttgtcctggctgcagcaaaaacctacatcttcagaacgttttttaagatcatgtttcttgttattttgtttggggctcttcatggtcttgtgtttattccagtatttctaacctt

SEQ ID NO: 48891 - DNA, 600 bp, Chicken  19866894294510_2
tcatttgcataggattttcagtagacttttctgcacatatttcctatgcctttgttacgagtggagagtcatcagccaatgaaagggcaataggagctctgcaccagcttggttacccagtgttacaaggagcagtatctactgtgttaggagtagttgtcctggctgcagcaaaaacctacatcttcagaacgttttttaagatcatgtttcttgttattttgtttggggctcttcatggtcttgtgtttattccagtatttctaaccttttttggatactttggcaaatcactccccrttactgaaactaaaatactaggtcttagatcttttagcaaatctggaattcaatatgttaggttcagagataacaaagaccgcccataacttaaatgtaagatgttatttatttattttatgtagattaaaatgcagagacttacagaaaatttaaaaaaatgaaggataggaaaaatggaataataaatatagcagagagacaaaggtttaagaaaggccaggcattaagtaacagaagaagtggaagtgcacagaatggatttacgttttgccactttttgtgtgcttgaatttttta

SEQ ID NO: 48892 - DNA, 600 bp, Chicken  19866894294511_1
tgggagttgctttgacttgggttagcatctgtctagaaaacagggaggcaagaggcaagatttcctctgcatgcagaggagagactcaaaaatgacccaagggttggaacacctctatgaggagctgagagagctggggctgatcagcctggagaagagaaggctctggggagatctgatagtggaggaaagaaggggacagacagggtatgttgtgatagggcatggggaaacggtttcagactaaaagaggggagatttagattggatataaggacaaagctgtttacaataagggcrgtgaggcactggcacaggttgctcagagaggtggtgggtgccccatccccaaagacacccaacatcaagctrgatggggttctgagcacctgatggagctgtgggtatccctgttcaytgcaggggagtggaataggatggtctttaacttccagctcaagattatatgattctataggaggatttggagtctcaaggggactctctgtctgaatcttttttcaccccattacagagtgactgaccttrcacctcatctaaggacagaataacaaatgtgagagagaaaaaaaaaaacaa

SEQ ID NO: 48893 - DNA, 571 bp, Chicken  19866894294511_2
gcagaggagagactcaaaaatgacccaagggttggaacacctctatgaggagctgagagagctggggctgatcagcctggagaagagaaggctctggggagatctgatagtggaggaaagaaggggacagacagggtatgttgtgatagggcatggggaaacggtttcagactaaaagaggggagatttagattggatataaggacaaagctgtttacaataagggcrgtgaggcactggcacaggttgctcagagaggtggtgggtgccccatccccaaagacacccaacatcaagctrgatggggttctgagcacctgatggagctgtgggtatccctgttcaytgcaggggagtggaataggatggtctttaacttccagctcaagattatatgattctataggaggatttggagtctcaaggggactctctgtctgaatcttttttcaccccattacagagtgactgaccttrcacctcatctaaggacagaataacaaatgtgagagagaaaaaaaaaaacaaccagtaattaaaacagagaggaaaaagagaagggatggttttt

SEQ ID NO: 48894 - DNA, 525 bp, Chicken  19866894294511_3
gaggagctgagagagctggggctgatcagcctggagaagagaaggctctggggagatctgatagtggaggaaagaaggggacagacagggtatgttgtgatagggcatggggaaacggtttcagactaaaagaggggagatttagattggatataaggacaaagctgtttacaataagggcrgtgaggcactggcacaggttgctcagagaggtggtgggtgccccatccccaaagacacccaacatcaagctrgatggggttctgagcacctgatggagctgtgggtatccctgttcaytgcaggggagtggaataggatggtctttaacttccagctcaagattatatgattctataggaggatttggagtctcaaggggactctctgtctgaatcttttttcaccccattacagagtgactgaccttrcacctcatctaaggacagaataacaaatgtgagagagaaaaaaaaaaacaaccagtaattaaaacagagaggaaaaagagaagggatggttttt

SEQ ID NO: 48895 - DNA, 394 bp, Chicken  19866894294511_4
gaggggagatttagattggatataaggacaaagctgtttacaataagggcrgtgaggcactggcacaggttgctcagagaggtggtgggtgccccatccccaaagacacccaacatcaagctrgatggggttctgagcacctgatggagctgtgggtatccctgttcaytgcaggggagtggaataggatggtctttaacttccagctcaagattatatgattctataggaggatttggagtctcaaggggactctctgtctgaatcttttttcaccccattacagagtgactgaccttrcacctcatctaaggacagaataacaaatgtgagagagaaaaaaaaaaacaaccagtaattaaaacagagaggaaaaagagaagggatggttttt

SEQ ID NO: 48896 - DNA, 600 bp, Chicken  19866894294517_1
aagaacgcattagtctcatctctgagactaggagttttaagtaggagttttaagtgtcaaaacattttactctgagagagtcactcagaagactactttagaattacagtcttctaccacacagttaatggacaattgcaaacagaggagttataaagctccatacctcaggtatgttcagagcacttgaaggttataaactcctctcaagttaatgaaacaaattttagagctgtgtaatgatggaaaatttcattttaggtggaaaaaggtccaaatggttaagggaaaaatcagacrcttcaagtaaatcatattactgagagaatagaactttattcaaaaaaaactgggaagccctactcaaaatcattagccacctcctccataaagggtgaagtaattcagcaatggctctacctctgaataagttacatcccagtttatatactctctacttycccaaaactcctccttagctgggagctcaaaacaccagctgcaaagcaaagcgatactgctgcctttccacataatttgttgctataggaacaacagaaacagtatgagttcgaagtctcacatttaagatcagccata

SEQ ID NO: 48897 - DNA, 600 bp, Chicken  19866894294517_2
catacctcaggtatgttcagagcacttgaaggttataaactcctctcaagttaatgaaacaaattttagagctgtgtaatgatggaaaatttcattttaggtggaaaaaggtccaaatggttaagggaaaaatcagacrcttcaagtaaatcatattactgagagaatagaactttattcaaaaaaaactgggaagccctactcaaaatcattagccacctcctccataaagggtgaagtaattcagcaatggctctacctctgaataagttacatcccagtttatatactctctacttycccaaaactcctccttagctgggagctcaaaacaccagctgcaaagcaaagcgatactgctgcctttccacataatttgttgctataggaacaacagaaacagtatgagttcgaagtctcacatttaagatcagccataaaattgaacagacaaatccctgctgagcaatacagttgaggtttgactgtctaaagagcatttgcaaaacaagcaaggtcaacagcaacaaaaaactggagcaaaaatctgaaatatctgggaaagaaaagggaagtagatgactgtgttaatggagtact

SEQ ID NO: 48898 - DNA, 600 bp, Chicken  19866894294522_1
cgtccaaatggctattcaaaattactttccaagtgttattttgagttgaaactggagagatacagattggtctgagcatttggttgacatttgaacatctgaaaatgttcccatgttactacttcagacagttagaaatttaagtcattattagtttacatttagtatttgtttggaaatgcctgaatgctaacacatcataaccatggttcactcttatcttttacgttatttattttgtttgctgaaattaaacatccacagaagttgatgctgtttgagctttgggaagctggcctygttcacagagcagatcctgttgatttcctcggggaaaactgtgtaagattccctgaggggatttaatttctgtggggttttctgggaggtgtttgcttccctggttcaggttttaaacaaaaatgttattatatttttttcccagatgtttaattgcaaatgatataggagtacgtgttgtcataattttcagccacatcataagtaattagaaaagcttaaaattgcacttctagcccacctttgttgacgtgtcctagctgaaaggatagacagtgcccgagcatatcagataaagat

SEQ ID NO: 48899 - DNA, 600 bp, Chicken  19866894294524_1
gcccaattaatataagtaagtgaggaataatagtctagctctccctttcaagtcaaagagctcgtgcacatcactttccactcatttttcttttgtgtacgttggcctgtctgctggctccagatacgaagaccagcatttggacttggtgaacctggcttgggtttggctgtctctccatgctttcagagaagccaaggcctgttgagcatttacgtgactgaggtcttaaagatctttgcaaaagataaattatatagttttaaatattttttcttccattttcctggtctcagaacmcagattggaggtttcctaagttcctatagatgacaactacatgagagttgtccctaattctgaagtagcatctaaactgtgagattaaagcttcagggagcaaggaacaggaagggtcctcccagttgaaataattggatccatgctctgatatccgtgcctgtttccaaaagagtataatgattccagccagactgtttgctcagtgtcagtctgaatttaactccatgatactttgctttattttaacttgccattattttcgtgtttattttatgtaataagtgaatcatttaacta

SEQ ID NO: 48900 - DNA, 600 bp, Chicken  19866894294524_2
taattggatccatgctctgatatccgtgcctgtttccaaaagagtataatgattccagccagactgtttgctcagtgtcagtctgaatttaactccatgatactttgctttattttaacttgccattattttcgtgtttattttatgtaataagtgaatcatttaactataaaagactcattttggaaggttaagggtggaatctggaatgggtgaagcttgggataaccactgacctgctcgattatgctggagtatggcatgagcaataatgtcaagtcagggatgcaagccagacasgcaggggtgaacaagcttgccattctcccttccccatcattggaaatgtcagtagatctgcttgagagactgatatgtttgagtttgtgacaaaggcagcctgaagtctccaccaatcagaatgcgttgatattattgttgaatttcaccttgaagaatggattttaagagaaaactaatggccttaatgccatgaaaacaccattacacgcaatctgcagtatcatgacataaatgacatgagatattttgaaggtggctactgataaagtaaccctcagccaaatggtacacagactg

SEQ ID NO: 48901 - DNA, 600 bp, Chicken  19866894294527_1
cacatcttaaggtaattctctctcatcctgtgattattaaccttggagaagaggctgacccccaccttgttacaatctcctttcaggtagttgtggagagcagagaatatataagaatgctaaattgagactgagatttttgacccacaatgtgagttgagtcatctgacagaaaggtgttgggccaatataagacactgactgaactgttgtcattgtcttaaggaagacataaagattttcatcaatgaaaaatttgggtttatttccagtgcttccccagaataagactaccctgasktcagggagcactatgaggaagatggtgactggctttgcttaatggctggttttctttcttcttcttactttctttyttcttttttttcttaaacaaaacaatacttttctcctccttgcttgtgatctgacagctctagtgttgcaaacattaaaaaggaccttggcaaatcactacaatggctccaggagtatttgcttttggtatccagcagcacttggaagctccaactgcagctttggtgtgctgggctgtgcaaacacagtgcaggaggaaattttgatgtgtgaagggccatg

SEQ ID NO: 48902 - DNA, 600 bp, Chicken  19866894294527_2
acatcttaaggtaattctctctcatcctgtgattattaaccttggagaagaggctgacccccaccttgttacaatctcctttcaggtagttgtggagagcagagaatatataagaatgctaaattgagactgagatttttgacccacaatgtgagttgagtcatctgacagaaaggtgttgggccaatataagacactgactgaactgttgtcattgtcttaaggaagacataaagattttcatcaatgaaaaatttgggtttatttccagtgcttccccagaataagactaccctgasktcagggagcactatgaggaagatggtgactggctttgcttaatggctggttttctttcttcttcttactttctttyttcttttttttcttaaacaaaacaatacttttctcctccttgcttgtgatctgacagctctagtgttgcaaacattaaaaaggaccttggcaaatcactacaatggctccaggagtatttgcttttggtatccagcagcacttggaagctccaactgcagctttggtgtgctgggctgtgcaaacacagtgcaggaggaaattttgatgtgtgaagggccatgg

SEQ ID NO: 48903 - DNA, 600 bp, Chicken  19866894294527_3
tcctttcaggtagttgtggagagcagagaatatataagaatgctaaattgagactgagatttttgacccacaatgtgagttgagtcatctgacagaaaggtgttgggccaatataagacactgactgaactgttgtcattgtcttaaggaagacataaagattttcatcaatgaaaaatttgggtttatttccagtgcttccccagaataagactaccctgasktcagggagcactatgaggaagatggtgactggctttgcttaatggctggttttctttcttcttcttactttctttyttcttttttttcttaaacaaaacaatacttttctcctccttgcttgtgatctgacagctctagtgttgcaaacattaaaaaggaccttggcaaatcactacaatggctccaggagtatttgcttttggtatccagcagcacttggaagctccaactgcagctttggtgtgctgggctgtgcaaacacagtgcaggaggaaattttgatgtgtgaagggccatgggctgcttgggggacagataaagctagcagcataacaaacacctgtctgactgatagagggcagtcacttggggcca

SEQ ID NO: 48904 - DNA, 596 bp, Chicken  19866894294527_4
aaaaggaccttggcaaatcactacaatggctccaggagtatttgcttttggtatccagcagcacttggaagctccaactgcagctttggtgtgctgggctgtgcaaacacagtgcaggaggaaattttgatgtgtgaagggccatgggctgcttgggggacagataaagctagcagcataacaaacacctgtctgactgatagagggcagtcacttggggccacaggattagacagacttcagttgttggtcacaaagattaaccaggcaattaaaggtggcaggaataataaatatgcytgggagaggagragctgctggytgagttgggctgcaagctgaatttagctgttcccaccrtaagctggtttttccacaaatacagaagyacaaatgctgaaggggagagaaagaaagcactttagaagcagtcccatgaacgggacaggccttctgtggttactcaagaaattttacatagcccactggttttttgggttggtcattggattttattcttatttaattttctgtgtactttttgatggtttcttatctcacattttaagaggaaacctgctgaatgtctgcgatgc

SEQ ID NO: 48905 - DNA, 584 bp, Chicken  19866894294527_5
gcaaatcactacaatggctccaggagtatttgcttttggtatccagcagcacttggaagctccaactgcagctttggtgtgctgggctgtgcaaacacagtgcaggaggaaattttgatgtgtgaagggccatgggctgcttgggggacagataaagctagcagcataacaaacacctgtctgactgatagagggcagtcacttggggccacaggattagacagacttcagttgttggtcacaaagattaaccaggcaattaaaggtggcaggaataataaatatgcytgggagaggagragctgctggytgagttgggctgcaagctgaatttagctgttcccaccrtaagctggtttttccacaaatacagaagyacaaatgctgaaggggagagaaagaaagcactttagaagcagtcccatgaacgggacaggccttctgtggttactcaagaaattttacatagcccactggttttttgggttggtcattggattttattcttatttaattttctgtgtactttttgatggtttcttatctcacattttaagaggaaacctgctgaatgtctgcgatgc

SEQ ID NO: 48906 - DNA, 574 bp, Chicken  19866894294527_6
acaatggctccaggagtatttgcttttggtatccagcagcacttggaagctccaactgcagctttggtgtgctgggctgtgcaaacacagtgcaggaggaaattttgatgtgtgaagggccatgggctgcttgggggacagataaagctagcagcataacaaacacctgtctgactgatagagggcagtcacttggggccacaggattagacagacttcagttgttggtcacaaagattaaccaggcaattaaaggtggcaggaataataaatatgcytgggagaggagragctgctggytgagttgggctgcaagctgaatttagctgttcccaccrtaagctggtttttccacaaatacagaagyacaaatgctgaaggggagagaaagaaagcactttagaagcagtcccatgaacgggacaggccttctgtggttactcaagaaattttacatagcccactggttttttgggttggtcattggattttattcttatttaattttctgtgtactttttgatggtttcttatctcacattttaagaggaaacctgctgaatgtctgcgatgc

SEQ ID NO: 48907 - DNA, 536 bp, Chicken  19866894294527_7
gcacttggaagctccaactgcagctttggtgtgctgggctgtgcaaacacagtgcaggaggaaattttgatgtgtgaagggccatgggctgcttgggggacagataaagctagcagcataacaaacacctgtctgactgatagagggcagtcacttggggccacaggattagacagacttcagttgttggtcacaaagattaaccaggcaattaaaggtggcaggaataataaatatgcytgggagaggagragctgctggytgagttgggctgcaagctgaatttagctgttcccaccrtaagctggtttttccacaaatacagaagyacaaatgctgaaggggagagaaagaaagcactttagaagcagtcccatgaacgggacaggccttctgtggttactcaagaaattttacatagcccactggttttttgggttggtcattggattttattcttatttaattttctgtgtactttttgatggtttcttatctcacattttaagaggaaacctgctgaatgtctgcgatgc

SEQ ID NO: 48908 - DNA, 507 bp, Chicken  19866894294527_8
tgtgctgggctgtgcaaacacagtgcaggaggaaattttgatgtgtgaagggccatgggctgcttgggggacagataaagctagcagcataacaaacacctgtctgactgatagagggcagtcacttggggccacaggattagacagacttcagttgttggtcacaaagattaaccaggcaattaaaggtggcaggaataataaatatgcytgggagaggagragctgctggytgagttgggctgcaagctgaatttagctgttcccaccrtaagctggtttttccacaaatacagaagyacaaatgctgaaggggagagaaagaaagcactttagaagcagtcccatgaacgggacaggccttctgtggttactcaagaaattttacatagcccactggttttttgggttggtcattggattttattcttatttaattttctgtgtactttttgatggtttcttatctcacattttaagaggaaacctgctgaatgtctgcgatgc

SEQ ID NO: 48909 - DNA, 406 bp, Chicken  19866894294533_1
ctggtgcgtaaatgtccttctccacacctatacatcatctcttgggtaactgaaaaaaattctaacaggaaaaaacacagttaaactatgcaaatggtgaattgctaacataatgtttagagcttttagaaaaggagtctctatggcagttttaaccaacaaaaccagctctgttgaggtagctcctccctcaggcccacttataagcctccgtcttttgctgtcacacctctgtgagctgttgctatttaccatgtccatagaaaacaagccctatcaaaacaaagcaagttatttcawtctggatgaactcactaaatattcttccaggtgagtgggataaacctacaggagaggagaagtgggaaaatgttccttaagtgaagggcggcttagactacttttg

SEQ ID NO: 48910 - DNA, 599 bp, Chicken  19866894294542_1
  misc_feature (1)..(71): n is any nucleotide
nnnnnnnnnnnnnnnnnnnnnnnnnnnnnnnnnnnnnnnnnnnnnnnnnnnnnnnnnnnnnnnnnnnnnnntaatgtaagttgtatctgtgaggtgctattgaagatatttgcttgttatgcagtagccagcattttcttttcttactttaattatcaaaatgttatgcaagtcattttcacttgtttgctcttttctcttctacttacaagcaattttatgagcaaaagctaggaatcatatgatcatagaatggcctgggttgaaaaggaccataatgatcatctggtttaaaccccyctgccacgctcagggtcaccaactactggaccaggctgcccagagccacatccagcttggaaattttctaaaattaaattttgataagcatgtttttcaacatctattgaatattacaagaaggcttgagtgttcctaatgctgtgccataagcccacatatttctgtctcttccttctctttctttgctttcaattttgttatttactgctgctagtaatttggttttcccttgactctttatataatgtacttttgtctactgaagcacaacaattgaagtttttgaaaggaactgt

SEQ ID NO: 48911 - DNA, 600 bp, Chicken  19866894294542_2
caactactggaccaggctgcccagagccacatccagcttggaaattttctaaaattaaattttgataagcatgtttttcaacatctattgaatattacaagaaggcttgagtgttcctaatgctgtgccataagcccacatatttctgtctcttccttctctttctttgctttcaattttgttatttactgctgctagtaatttggttttcccttgactctttatataatgtacttttgtctactgaagcacaacaattgaagtttttgaaaggaactgtatattctctattgggggggyaaaaaacactgcagcttgtatcagcagtaaacatggaaagaagttaatgctaacagaactggcaagaaagaagaggaatctaatcaaaagaattgtttgacgtacctggcagaaacctatttgaaacttttgtaygtgcacttgtgtcctcctgcaactttctatttccaaagaaccytcactttgactgtgaagggcgcaggatccacacaagtgtagctatctaaattatcctgcctttaactctccttgtcatttaagaaattccttaatgcaataatttcaaagcatttattttac

SEQ ID NO: 48912 - DNA, 563 bp, Chicken  19866894294542_3
ccacatatttctgtctcttccttctctttctttgctttcaattttgttatttactgctgctagtaatttggttttcccttgactctttatataatgtacttttgtctactgaagcacaacaattgaagtttttgaaaggaactgtatattctctattgggggggaaaaaaacactgcagcttgtatcagcagtaaacatggaaagaagttaatgctaacagaactggcaagaaagaagaggaatctaatcaaaagaattgtttgacgtacctggcagaaacctatttgaaacttttgtaygtgcacttgtgtcctcctgcaactttctatttccaaagaaccytcactttgactgtgaagggcgcaggatccacacaagtgtagctatctaaattatcctgcctttaactctccttgtcatttaagaaattccttaatgcaataatttcaaagcatttattttacttcacctacagtaggatttctcagagaattaaagccactacttaataatttgaaagcttgtagtctcacttgggatgtatttgcacttctctccatat

SEQ ID NO: 48913 - DNA, 520 bp, Chicken  19866894294542_4
ttgttatttactgctgctagtaatttggttttcccttgactctttatataatgtacttttgtctactgaagcacaacaattgaagtttttgaaaggaactgtatattctctattgggggggaaaaaaacactgcagcttgtatcagcagtaaacatggaaagaagttaatgctaacagaactggcaagaaagaagaggaatctaatcaaaagaattgtttgacgtacctggcagaaacctatttgaaacttttgtaygtgcacttgtgtcctcctgcaactttctatttccaaagaaccytcactttgactgtgaagggcgcaggatccacacaagtgtagctatctaaattatcctgcctttaactctccttgtcatttaagaaattccttaatgcaataatttcaaagcatttattttacttcacctacagtaggatttctcagagaattaaagccactacttaataatttgaaagcttgtagtctcacttgggatgtatttgcacttctctccatat

SEQ ID NO: 48914 - DNA, 600 bp, Chicken  19866894294549_1
tgtgagcaaggacaatggctgttggctatttttgctccgttctacaattaactctgctagcgcccgagaagctgatgacatcagaagagtgatcactattttaactgagatgcctttttctgatgctgtcttcaagccttatatatttagctttcatcactgctcacccttgtgagcatccatcatccagaatgaacttctcttgcaacaactcatagtggatgcttcccccatttccctccatccactctctcaacgtggaattccacagggtgcaggtgctgcttacatccacacatraagtggctgcaacatgagcattattctctagtgaatcagatgaaccctgatgcactagatacagctgagggactccaagtgcagctgcatggaaggttccgataggctgctgtgctgccattaatccatcccaaaaggaataatcctgtactcaagtattagcctgsattgtcctcagtattttgtttctgcctattcctcccaccttccggatagctgcatgttgtcaccttcctgctgagctcagggyrtcatacccattacttttctctgttattacgttgtcccttttgtttctac

SEQ ID NO: 48915 - DNA, 600 bp, Chicken  19866894294549_2
ccttgtgagcatccatcatccagaatgaacttctcttgcaacaactcatagtggatgcttcccccatttccctccatccactctctcaacgtggaattccacagggtgcaggtgctgcttacatccacacatraagtggctgcaacatgagcattattctctagtgaatcagatgaaccctgatgcactagatacagctgagggactccaagtgcagctgcatggaaggttccgataggctgctgtgctgccattaatccatcccaaaaggaataatcctgtactcaagtattagcctgsattgtcctcagtattttgtttctgcctattcctcccaccttccggatagctgcatgttgtcaccttcctgctgagctcagggyrtcatacccattacttttctctgttattacgttgtcccttttgtttctacttgaaaatcatttacaaagacagaggaatcgagatgacacaacccccagcatcttttatcatttgctataacctgtgttcaaatccatgctcctttattctagtgagactgggtgtagtcttccaagataaaaaggcatccttcaagatttaaatggttaacaaaaa

SEQ ID NO: 48916 - DNA, 600 bp, Chicken  19866894294549_3
tctcaacgtggaattccacagggtgcaggtgctgcttacatccacacatraagtggctgcaacatgagcattattctctagtgaatcagatgaaccctgatgcactagatacagctgagggactccaagtgcagctgcatggaaggttccgataggctgctgtgctgccattaatccatcccaaaaggaataatcctgtactcaagtattagcctgsattgtcctcagtattttgtttctgcctattcctcccaccttccggatagctgcatgttgtcaccttcctgctgagctcagggyrtcatacccattacttttctctgttattacgttgtcccttttgtttctacttgaaaatcatttacaaagacagaggaatcgagatgacacaacccccagcatcttttatcatttgctataacctgtgttcaaatccatgctcctttattctagtgagactgggtgtagtcttccaagataaaaaggcatccttcaagatttaaatggttaacaaaaagaatctctgggtctgttgatgcctgctcaactcaatgattaaaactaggcagaatctgtctttcaccattatatcacacagtt

SEQ ID NO: 48917 - DNA, 600 bp, Chicken  19866894294549_4
ctcaacgtggaattccacagggtgcaggtgctgcttacatccacacatraagtggctgcaacatgagcattattctctagtgaatcagatgaaccctgatgcactagatacagctgagggactccaagtgcagctgcatggaaggttccgataggctgctgtgctgccattaatccatcccaaaaggaataatcctgtactcaagtattagcctgsattgtcctcagtattttgtttctgcctattcctcccaccttccggatagctgcatgttgtcaccttcctgctgagctcagggyrtcatacccattacttttctctgttattacgttgtcccttttgtttctacttgaaaatcatttacaaagacagaggaatcgagatgacacaacccccagcatcttttatcatttgctataacctgtgttcaaatccatgctcctttattctagtgagactgggtgtagtcttccaagataaaaaggcatccttcaagatttaaatggttaacaaaaagaatctctgggtctgttgatgcctgctcaactcaatgattaaaactaggcagaatctgtctttcaccattatatcacacagttt

SEQ ID NO: 48918 - DNA, 600 bp, Chicken  19866894294551_1
gtatgtgttcaatggaatcccaaacccttacaggagcaaaaatactctcttccaatacgtaatgaaaacttttgtactacagaatacaggccacgctaaaaaaatgtaatatatatattttcaccatttttatgcttgtcatagaaattattttatgatttcacaactgttactatttgtaaataaataggggatgcacccataacagagcaccacttttctctaacaatatttaggaagtacacaggccaaagtaatgcagccttgcatcacttttcacattcaagatctgacatttgygatacagaacaacccagatacccttgaaactatcaaactgtcactattgcgatcagttccttatgaatgaatgtgtagctgtaggacaataattcaaactcgtggagatatcaaggcgaggggatgcagatagagaaagtaagcaatcaacgtccttttagttcaacttttcaaacatagacatcccaaagactggtaaacttgtctttcagtcccattatttttcatttccaattctgagataattgagacttctagacagcaccagattttaataatctgtggcagctagcttgaaga

SEQ ID NO: 48919 - DNA, 600 bp, Chicken  19866894294553_1
cagagagggcttgatgctgtgctgctgggacatgtctgcctgggcttacaaatgcttatgtcctgggatgtaactgctgcttaggagaaaatggcgtttttggggaagggagctgcttgttgtattcgccagtcgaggccctgctttccagaactgaaatgtacacaatttaaatagtactcttccttttaaatattttcagtttgcctcgcacagtagaatgagaaacagagactaaagtagctggagcttttgatggttctctgctattttgtttgctcttgtggctggaggatgttraatgtggtgagtggatgcttaggcagtgaagataaggctctgcaaatcaccacaccagcaatgtgaacacaagcaatgacccagcacagcctttccaaccctactgaagcgggatgcattatcagttccggcacacatccctgccagttccaggggaatttccacatcaccttctaaagcaagaatttgcatctcaggctgcaaacgcaatggaaacttcaaagtgcaaaccacctccaacgactcatttccaggcttgaacactggaaacagaattagatgatacggtcagttctacag

SEQ ID NO: 48920 - DNA, 600 bp, Chicken  19866894294558_1
tctgaaaccaagcctacaattctcctttaggatttttggaaaaaaactggctcatttcctctgtgtttacatcaccattgggttactttgcctactctgacagaatggacaacgttatttactacttttatgcactatagaaataatttcaaagttgctcaaagcatcaaatcgaaaatccattactcagtgtgtaaatataagaaagatgagaatgtgttagtttttatctaatttgcttgacagtgtccccttaataacacagaccaaaatcctgtaaaaattgtaagctttgctttygctattcatgcaaacttagtgcaattataaataattgatactcctactgtggtaattgtgttgtgtaaaactgaggtactgcagactgccttctggctctgaaatatayaacctttggttaaatwatagatgttaaaggtgatgctgagtgtctggcacacttgctgactgggaagttggaacacagagcactttacagaaagagtccctgaacttctcaaaagagtgctgtaatgaytaaaatatttatataattgatcaacagaaacctgttttttgtattaattctctatgyctacg

SEQ ID NO: 48921 - DNA, 600 bp, Chicken  19866894294558_2
caacgttatttactacttttatgcactatagaaataatttcaaagttgctcaaagcatcaaatcgaaaatccattactcagtgtgtaaatataagaaagatgagaatgtgttagtttttatctaatttgcttgacagtgtccccttaataacacagaccaaaatcctgtaaaaattgtaagctttgctttygctattcatgcaaacttagtgcaattataaataattgatactcctactgtggtaattgtgttgtgtaaaactgaggtactgcagactgccttctggctctgaaatatayaacctttggttaaatwatagatgttaaaggtgatgctgagtgtctggcacacttgctgactgggaagttggaacacagagcactttacagaaagagtccctgaacttctcaaaagagtgctgtaatgaytaaaatatttatataattgatcaacagaaacctgttttttgtattaattctctatgyctacgtattccctataatttgtgatttatccttcagcatttctcaatgaatactttttcacagtgtaaggtaaaagagcaggcatatttttctccatgttgttctccacatatg

SEQ ID NO: 48922 - DNA, 600 bp, Chicken  19866894294558_3
ttttatgcactatagaaataatttcaaagttgctcaaagcatcaaatcgaaaatccattactcagtgtgtaaatataagaaagatgagaatgtgttagtttttatctaatttgcttgacagtgtccccttaataacacagaccaaaatcctgtaaaaattgtaagctttgctttygctattcatgcaaacttagtgcaattataaataattgatactcctactgtggtaattgtgttgtgtaaaactgaggtactgcagactgccttctggctctgaaatatayaacctttggttaaatwatagatgttaaaggtgatgctgagtgtctggcacacttgctgactgggaagttggaacacagagcactttacagaaagagtccctgaacttctcaaaagagtgctgtaatgaytaaaatatttatataattgatcaacagaaacctgttttttgtattaattctctatgyctacgtattccctataatttgtgatttatccttcagcatttctcaatgaatactttttcacagtgtaaggtaaaagagcaggcatatttttctccatgttgttctccacatatgctaaaatctggtcagt

SEQ ID NO: 48923 - DNA, 600 bp, Chicken  19866894294558_4
cttgacagtgtccccttaataacacagaccaaaatcctgtaaaaattgtaagctttgctttygctattcatgcaaacttagtgcaattataaataattgatactcctactgtggtaattgtgttgtgtaaaactgaggtactgcagactgccttctggctctgaaatatayaacctttggttaaatwatagatgttaaaggtgatgctgagtgtctggcacacttgctgactgggaagttggaacacagagcactttacagaaagagtccctgaacttctcaaaagagtgctgtaatgaytaaaatatttatataattgatcaacagaaacctgttttttgtattaattctctatgyctacgtattccctataatttgtgatttatccttcagcatttctcaatgaatactttttcacagtgtaaggtaaaagagcaggcatatttttctccatgttgttctccacatatgctaaaatctggtcagtacattatgaaacaaaatatatccgtgaaatctaaaacaatgcatcaacacacactgtttatatagcttcataatagccaaccgttacttaaacttgtaatgattttccatgtc

SEQ ID NO: 48924 - DNA, 600 bp, Chicken  19866894294558_5
ctttygctattcatgcaaacttagtgcaattataaataattgatactcctactgtggtaattgtgttgtgtaaaactgaggtactgcagactgccttctggctctgaaatatayaacctttggttaaatwatagatgttaaaggtgatgctgagtgtctggcacacttgctgactgggaagttggaacacagagcactttacagaaagagtccctgaacttctcaaaagagtgctgtaatgaytaaaatatttatataattgatcaacagaaacctgttttttgtattaattctctatgyctacgtattccctataatttgtgatttatccttcagcatttctcaatgaatactttttcacagtgtaaggtaaaagagcaggcatatttttctccatgttgttctccacatatgctaaaatctggtcagtacattatgaaacaaaatatatccgtgaaatctaaaacaatgcatcaacacacactgtttatatagcttcataatagccaaccgttacttaaacttgtaatgattttccatgtcattttacatcagatttttgtaagaaaaaaggaaagatggctagtaagtgaactgatt

SEQ ID NO: 48925 - DNA, 600 bp, Chicken  19866894294560_1
tatactagttctgtgcagctcacctgtgtgttctgtttcccatagccatcctacattcattggacctgtcctgtcttttccataagataactgtaacttcttcaccatatgatgaatgatggcaaaggtagccactgcctgaccaaagtacagaactgtttgtaatgattagtgcatgtcacacatagatgggaagtagctcaaagcaagagaaagacaaattagctgaagcctctgaaagaggatgaaaaagtgaagtaaaactagtttcctacaaggtaaggagtcggggaagactgytgcccaaggtgagcaaagcctcatgtgtcccttcacragtgtcatccgctccaggtgctatacaagcttccctgtggaatcatgggcaaaaggggacagaggaccaggaaatttgatattttacttctgttgaatgaaacccagaggtgaggagacctacagccagaactgtccttccaattcrcaggagagacagtgccatgaaacagctccgagtaaagaattacagaggacaaccaatccacgccgtgctctgtgaaatctgatctttccgtgttgtttttctttaatccagagtcc

SEQ ID NO: 48926 - DNA, 600 bp, Chicken  19866894294560_2
tcccatagccatcctacattcattggacctgtcctgtcttttccataagataactgtaacttcttcaccatatgatgaatgatggcaaaggtagccactgcctgaccaaagtacagaactgtttgtaatgattagtgcatgtcacacatagatgggaagtagctcaaagcaagagaaagacaaattagctgaagcctctgaaagaggatgaaaaagtgaagtaaaactagtttcctacaaggtaaggagtcggggaagactgytgcccaaggtgagcaaagcctcatgtgtcccttcacragtgtcatccgctccaggtgctatacaagcttccctgtggaatcatgggcaaaaggggacagaggaccaggaaatttgatattttacttctgttgaatgaaacccagaggtgaggagacctacagccagaactgtccttccaattcrcaggagagacagtgccatgaaacagctccgagtaaagaattacagaggacaaccaatccacgccgtgctctgtgaaatctgatctttccgtgttgtttttctttaatccagagtccgttatctctgctgaaaaaaatgcaggtgggcttttat

SEQ ID NO: 48927 - DNA, 600 bp, Chicken  19866894294560_3
atagatgggaagtagctcaaagcaagagaaagacaaattagctgaagcctctgaaagaggatgaaaaagtgaagtaaaactagtttcctacaaggtaaggagtcggggaagactgytgcccaaggtgagcaaagcctcatgtgtcccttcacragtgtcatccgctccaggtgctatacaagcttccctgtggaatcatgggcaaaaggggacagaggaccaggaaatttgatattttacttctgttgaatgaaacccagaggtgaggagacctacagccagaactgtccttccaattcrcaggagagacagtgccatgaaacagctccgagtaaagaattacagaggacaaccaatccacgccgtgctctgtgaaatctgatctttccgtgttgtttttctttaatccagagtccgttatctctgctgaaaaaaatgcaggtgggcttttatgtatggcaactgtaccaggggtggtctttgaattagaaggcgtttgctcacagagcctgcagcaagtcatgccagttaaggggctgcaggctgcacagttatactcggaagaagagcacaaggtacaaagagcatcctcttgtatgt

SEQ ID NO: 48928 - DNA, 600 bp, Chicken  19866894294569_1
gtctcaatatgcacaaatgaagggccctattaattgctgaggacacagaccaattttttttaataagcatattagttgaatgcattaccagtttcctgaatcgtgcatgccaaagtctgtatgtacaaacaagatgcatgtgtacttcacaggcacagtcagttgtattgcagacacgtgcacacaagaactgaagcttggccaaggggagccatccttgacacacagagccagatatggacagggagggaggcagctaagcgtaactgaccacagtattgacagaactatagctacaaytggggacagcaaaaggaatcatttcagtaggaagttattgcaagagggcaaaaagtattaggcaggattaaatgggcttgcaggtggagactggggaatttaaagaatagaaagcaggtgaatctttagcgggtggtatgtctttctcttactctgtagtatcctaggaatattaacacatttatacattcaggcttttgactttcattctatgttcttgcgaagcaccttcagttttcctgaaaatctgttgctaacttttaacagtttaattaaattatattaatgagttcagccggt

SEQ ID NO: 48929 - DNA, 472 bp, Chicken  19866894294574_1
cgtgtgggttttgttgggagggtaatttgggcactggagcaagtctgtgcaggcagcagtgctttctccttctgcttaaagggtgaaagcatcttggcagctcgcttcttcggttgcacgcccttgttttgtttaaccaccactcattcagttaggactgcttagctgctgtagtagcttagctgtagggaaaaaatgaattctgtgctttcagggaaacatctgtcatccttctgagcagaacctgcagtgaatgctgttcatggagcatgcagagagctccagtttcattctgcagcraaggtggaggaggtggcttagcagccttgccccacatctctaaagtcaagtgggtcctctgtgaagcctgggatgcgtgtgcagcacatgacacacatgggaggcttttgttcgtgtttattctcaggacgttgtgcagctttgctagccgagcccttttagttgtcttaag

SEQ ID NO: 48930 - DNA, 600 bp, Chicken  19866894294577_1
ctcattttttcttttcacatattgactattgttgtttttacttgaagaaaataactacattttggaagaggacatcatgtctagaggtctgctgttctgtagtacgggattgaaagcagcccagcaggatgcccacagaagcctgacagtgatgtgctagatagatagttcagggaccacaagcaagtgatggactatttctagcctttatgaatcatgagattctttttttccacatccctttaaaaactgtggcagacattgtctgtcttatcagacatgaataaagaatgcctgtascaccgtagctcttcagtgtatgacctagagatgccttattctggtttagtgtgcagcatctccttgaccagcagctttgttttcttttgcttttaattgaagttagaaaaaaagatgcatcctctaataatatctatagagtgaatttgttatactggcatctgaactagctagtatggatcatgtgaattactgaaaaaaatataagagcaaaagagtgttgcttgtaatagtgaagggttaaaaagcactgtaagagagaagacagtgcagacaggtggaggtggggtgggagaggca

SEQ ID NO: 48931 - DNA, 599 bp, Chicken  19866894294578_1
  misc_feature (1)..(62): n is any nucleotide
nnnnnnnnnnnnnnnnnnnnnnnnnnnnnnnnnnnnnnnnnnnnnnnnnnnnnnnnnnnnnnatgcctacttcaggatgagaagacctacaacctaaaaatgtccattactttcacttgaaaggatcttttagagtgactagtggtattagagacatttacattttgtcagatgaagccaatccaaagaaagcacaagcaacaggtggaaatagtcggcacagctgtttgggctctgatgtttttattctcaaataatagtttgaaagaatattccatggctattcattatctcattgcygattttttcaaatatatactaacagaactatgattatgaaacaaaagccaatgtatttaataatacagaagatgaaagcaattcagaattgtattaaaattaatattttactgacatctaatcttaggggcttttaatagaatcagttcaagacaaaagtkttttttggtgcaaacttattttataatttaggcagaaagaaaaataagaaagaatgagatttggaaggggcaaatacataactagagttaatatatgttacaaaatatgtatcccatgtttttataygtttaaggttt

SEQ ID NO: 48932 - DNA, 600 bp, Chicken  19866894294578_2
attttgtcagatgaagccaatccaaagaaagcacaagcaacaggtggaaatagtcggcacagctgtttgggctctgatgtttttattctcaaataatagtttgaaagaatattccatggctattcattatctcattgcygattttttcaaatatatactaacagaactatgattatgaaacaaaagccaatgtatttaataatacagaagatgaaagcaattcagaattgtattaaaattaatattttactgacatctaatcttaggggcttttaatagaatcagttcaagacaaaagtkttttttggtgcaaacttattttataatttaggcagaaagaaaaataagaaagaatgagatttggaaggggcaaatacataactagagttaatatatgttacaaaatatgtatcccatgtttttataygtttaaggtttctgcatagcactgtctgtatttgaagatttcttcatagcttgtaaaacataaaaagaaaattaactttcgtgacagaaaaagaggtgagaaaatttttagtaggatgctctaaggcataataacaatacactacccgtatgttatatatagtaataggagtg

SEQ ID NO: 48933 - DNA, 600 bp, Chicken  19866894294578_3
tatctcattgcygattttttcaaatatatactaacagaactatgattatgaaacaaaagccaatgtatttaataatacagaagatgaaagcaattcagaattgtattaaaattaatattttactgacatctaatcttaggggcttttaatagaatcagttcaagacaaaagtkttttttggtgcaaacttattttataatttaggcagaaagaaaaataagaaagaatgagatttggaaggggcaaatacataactagagttaatatatgttacaaaatatgtatcccatgtttttataygtttaaggtttctgcatagcactgtctgtatttgaagatttcttcatagcttgtaaaacataaaaagaaaattaactttcgtgacagaaaaagaggtgagaaaatttttagtaggatgctctaaggcataataacaatacactacccgtatgttatatatagtaataggagtgtgaataaaggggtgctaattcttgccctagttttatgaaacttctttaaaatggaaaacttatgacaattttcttgccatttataatcttcagaagacagagaaactgcttttccatgtgtttaaaa

SEQ ID NO: 48934 - DNA, 599 bp, Chicken  19866894294579_1
  misc_feature (1)..(197): n is any nucleotide
nnnnnnnnnnnnnnnnnnnnnnnnnnnnnnnnnnnnnnnnnnnnnnnnnnnnnnnnnnnnnnnnnnnnnnnnnnnnnnnnnnnnnnnnnnnnnnnnnnnnnnnnnnnnnnnnnnnnnnnnnnnnnnnnnnnnnnnnnnnnnnnnnnnnnnnnnnnnnnnnnnnnnnnnnnnnnnnnnnnnnnnnnnnnnnnnnnnnnttagtacactatttgctatcaattacaaagagtcaaaaggccaaatttttgtcattcattagttcagagatctgctgaccttgtgacctttgaggcccattastggaaacttagtctatctaagaagggaaacagaatgttgaacagcttttggcttgctggtttttggataagcaaagaattttctgtccatttgctattatttaggataacatcataaaagaggacatcggggtttgccaaattcccgttctgcttaccagctaaaagggatgggttagcctccattgcagaacacatctgatgaattggattggatttgcatcaatttagttttacttacattacttttctctaatttacttattggattccgtatctttagaaatttttattactctc

SEQ ID NO: 48935 - DNA, 600 bp, Chicken  19866894294586_1
tgctaacctgaggactccttattttgctttaaaaatccgttctgacagcaatatttccacatcagttgctagacctattctctgtcctatgggaagtgtcacactgccctgccatttcagttgccccaggctgtcacaccaaaccccaccttcaactgcgcctctgcctgctttgagaagcggtaatggctccaatgttattcgtgttggatcagtgcagattcctgtacggagacacctatttaacatagaatgcaatgacttttaaaaaatattcttgtatttgcttttttttttttycccctgtgggggtgcatgtaaaatactgatttttctgtcatttcctagatgatccttaagccccagctgtattcccttgacaaataatttttgagctagacagagaaattacaaaatacttaagaaacaaattctggttaacaaaataccaacatgatgagttcatttctgagtatagcacagattacgtgctggttagtttgtccttagattacttttataataaagcttaataaggaaattaatacatttattgctacagtcatggatgagatcttgttctcctgaaagtcagtggat

SEQ ID NO: 48936 - DNA, 600 bp, Chicken  19866894294588_1
tgggggaaaccctgagcttgtagcactagtggaacagctgagcaaaatgttcaaagaaaatgacaattaattaatctcctggggatgaatggaagctttatttttttttaaacgggtaaatgagcaggttatctgagaggtgtgacagtcagtctcccttaaaactactgtgttgccacatggcagaaatgtatgtcgaaaataagtttgattgctgagtattgtagtataccttatctatacagtcttaaatgtaactgcttgcagatgtcttcaaaacatatactagaattgaaacaractttgaatctggatttttacacaatcattggcattacttcagccctagaaatctcacaggttacagtatatcttcaacaaagctactgtaagcttcagcctgaaattctgtattaaattaaacctgattgacccaagtggcttgtgtgtttttaaacagcactctagtaaaccaaaatatgcagtgttaaataacaaaagatgctcacaacctgaatgcatcaatgcatatactaatgttgcattataagtgttagagctgtgaagatcagttagatctgcatgtatttagttctaatg

SEQ ID NO: 48937 - DNA, 599 bp, Chicken  19866894294589_1
  misc_feature (1)..(26): n is any nucleotide
nnnnnnnnnnnnnnnnnnnnnnnnnnttaaaactacccataagtagtcctaccaataacacacagaagttttattataattctaactacaaactggagatatgatttttaagaataacatgtaaaacagattctcaaaaccaatgcaatttttttctttttaaataaaagatttgcaaacaaaaacatttaaagttaaattaaacttctcaaattctgaaattatcatgaagtgtgggaaaaaatagtacctggattgtctggaggaatggtcatcacataaatctttatccagaaagcrgcaaggggatcgttttgtagaagtctcaactggtgacagtttacttagactgttacctagtgctatgacaaatcaactcaacaaatgctctgcaggaactgtgagatacacagttaattctttacttaaaaatctactacttgcaatttctattcttttctatttcaggatttttaagcaaatratacagtaaaccaatttgtggtaaatcatgtctagagagtttctagccaagaaagtcgagataacaaattagcgttttaaacattaacattttactttatctttggcttgcaaag

SEQ ID NO: 48938 - DNA, 600 bp, Chicken  19866894294589_2
acatttaaagttaaattaaacttctcaaattctgaaattatcatgaagtgtgggaaaaaatagtacctggattgtctggaggaatggtcatcacataaatctttatccagaaagcrgcaaggggatcgttttgtagaagtctcaactggtgacagtttacttagactgttacctagtgctatgacaaatcaactcaacaaatgctctgcaggaactgtgagatacacagttaattctttacttaaaaatctactacttgcaatttctattcttttctatttcaggatttttaagcaaatratacagtaaaccaatttgtggtaaatcatgtctagagagtttctagccaagaaagtcgagataacaaattagcgttttaaacattaacattttactttatctttggcttgcaaagatgcacttcagggaagtttctctattgcttcaaaacagtttcacgaagatgctgtgattcctactctgtgacaggacctcggggctgattcccttacagtcatagatgtggttatgcaaacaggcattccctgtaatcttcaaactgaatatctttcaaatagagaattcagttatattctatga

SEQ ID NO: 48939 - DNA, 600 bp, Chicken  19866894294592_1
aggatcaagatagtgagagcagtgtggtgttgcttagctgcctgttggctgttaaaccaccctgcttaactatttttttttatcttgttgcatcaactgtgttcttgttaaatctcctatccagaagcacatgagtttttctatcacgatacgccttcctcatccggcacctactcgttattcaaagactggatcagtctgtgccttcttgaactgctcaaaccttgtttagaagaggtcttaattcaccatgagtcttcctgtgataccagtctctttagcaagtacttcagaaaactmcattcattctgaaagatctgtttaaacctgaagtgatcttatgagaaaagaacaaatccacagcagtttcctgtgttcaaggacatggggatttagttttatgcttatgttatctctcttgaattcccttaacttttttttagaaaaccaagtgtgggaaaggtaactagccttatctgaggggaacggaatgattatcagtcagtgcctttatctgcagacctgctggttggtgcttgcttgttttttctttagctgggtttgaaagttgccaaagtgaataatttagagtgctgagta

SEQ ID NO: 48940 - DNA, 600 bp, Chicken  19866894294593_1
taacaagtcctgtttgatgaaacaggtaggtacgaaggaagaaagttcaagtattactgccaaagcttcctgcaaagtgatacaactggttgttcctactgctgatactgcaattcggaaatcagaatcctgatggtagtattctgcagtaaagtctgttttgggtaataatctatggagtggaacaatcggcccggtaacagaacttgtttctatgatctaaatacacagaaggaaaatttaaagtaattaacagggatgtgtgtcttgcatgcctaaagtgataacagcacatgtgasagcacaacattatgagaacacttattatggttaaaaaaatgttctgccacaaacctagatcagtgaattatgagcagaacgagctttgcataactaaccatgggtaaaaccttctagtctgatgttcccttaatttgaagacaatgcaccaacataaataaagtaaatacaaagggcaagacatcctcttgaatgagtgctttatctgagcaagcaacttattttgcgtaaggattattcaataaataattaaagataaaacattttgttttccaattggcatagatgttagaaatagtc

SEQ ID NO: 48941 - DNA, 599 bp, Chicken  19866894294595_1
  misc_feature (1)..(32): n is any nucleotide
nnnnnnnnnnnnnnnnnnnnnnnnnnnnnnnncataaatccaagtgggtttgggcatgcattctgcattatgagagagaggcagcgagtggagtgctctgactgagctgccatggcaggactgcatcaagcttaattcagcatttgtcagctcttacatattgggtaggtacaaatcactccagagtctgatttggtaccatagcagatctctttatagaacctctaaggaagaaggaagcagctaaataaactgattatttccctctttgttgctctacagcttcttagcatggagctmaactgaaagggcagtgtgtacrtgttttccttaacgaaatggggagttagtggtgtgtggcacaggaagcatgcagtcgtatcacaccagtgctgtgaaattcacatacaagcctatacatttttccaaggttaagcagctgcaggcagcagtttgggactcaagaacataaaagtctactcctctctwtattttttttaatgatgagtagcttgttttgggggtgctggctgcccacctgtaactgcaggaggctgactgtagagtaactgctgccctgtggagggatggactcaggc

SEQ ID NO: 48942 - DNA, 599 bp, Chicken  19866894294595_2
  misc_feature (1)..(10): n is any nucleotide
nnnnnnnnnncataaatccaagtgggtttgggcatgcattctgcattatgagagagaggcagcgagtggagtgctctgactgagctgccatggcaggactgcatcaagcttaattcagcatttgtcagctcttacatattgggtaggtacaaatcactccagagtctgatttggtaccatagcagatctctttatagaacctctaaggaagaaggaagcagctaaataaactgattatttccctctttgttgctctacagcttcttagcatggagctmaactgaaagggcagtgtgtacrtgttttccttaacgaaatggggagttagtggtgtgtggcacaggaagcatgcagtcgtatcacaccagtgctgtgaaattcacatacaagcctatacatttttccaaggttaagcagctgcaggcagcagtttgggactcaagaacataaaagtctactcctctctwtattttttttaatgatgagtagcttgttttgggggtgctggctgcccacctgtaactgcaggaggctgactgtagagtaactgctgccctgtggagggatggactcaggcattgagcagtccagtgctcata

SEQ ID NO: 48943 - DNA, 600 bp, Chicken  19866894294595_3
gatttggtaccatagcagatctctttatagaacctctaaggaagaaggaagcagctaaataaactgattatttccctctttgttgctctacagcttcttagcatggagctmaactgaaagggcagtgtgtacrtgttttccttaacgaaatggggagttagtggtgtgtggcacaggaagcatgcagtcgtatcacaccagtgctgtgaaattcacatacaagcctatacatttttccaaggttaagcagctgcaggcagcagtttgggactcaagaacataaaagtctactcctctctwtattttttttaatgatgagtagcttgttttgggggtgctggctgcccacctgtaactgcaggaggctgactgtagagtaactgctgccctgtggagggatggactcaggcattgagcagtccagtgctcatacgtgttgaattcccaggggtggcttaagtccctgaagcaagtctcttcttgcttaagaacaaaaagccctgtggtgcatttaacttcagaagaagctgtttcagcattaatggaagctgctggaagttctggtgcatgccttgtttgttttgttactctcggagccca

SEQ ID NO: 48944 - DNA, 599 bp, Chicken  19866894294598_1
  misc_feature (1)..(99): n is any nucleotide
nnnnnnnnnnnnnnnnnnnnnnnnnnnnnnnnnnnnnnnnnnnnnnnnnnnnnnnnnnnnnnnnnnnnnnnnnnnnnnnnnnnnnnnnnnnnnnnnnnnaaaccaagaaatttgagatgcctatgggtagataagtttgtgtagagatggcctaaataatatgggctaaacagtgtgttgtaaatcaatgccatattttcaaaaattctggagttaattgtattcctgtcaggagtttgagattaattactgaagtttaattatacaattatacatgaatgtagatatatgaatgtatgkagggtagttcatttgaatttgcaaagttgtcttgtttgtacttgaattactaaatgcttctgtccgtgttagatattggccactgaccccctccccattagtttacatactgcttatgatcatttgcagtaaaaaattgtagtgcctggctatgattgtttcctgtttctggtttccttactgttgactaagctgaagatgatgatattgttagaactgctaatttagaccttggratgtatgtatttagtcttcctctctgctcctggcttctgttgccagagctatgccaagtagct

SEQ ID NO: 48945 - DNA, 600 bp, Chicken  19866894294598_2
taagtttgtgtagagatggcctaaataatatgggctaaacagtgtgttgtaaatcaatgccatattttcaaaaattctggagttaattgtattcctgtcaggagtttgagattaattactgaagtttaattatacaattatacatgaatgtagatatatgaatgtatgkagggtagttcatttgaatttgcaaagttgtcttgtttgtacttgaattactaaatgcttctgtccgtgttagatattggccactgaccccctccccattagtttacatactgcttatgatcatttgcagtkaaaaattgtagtgcctggctatgattgtttcctgtttctggtttccttactgttgactaagctgaagatgatgatattgttagaactgctaatttagaccttggratgtatgtatttagtcttcctctctgctcctggcttctgttgccagagctatgccaagtagctcctaattctgtccttctgagggctgtgagaataaattcaataaagttattaagtatgagataccattgaggctttcacagtaactgagacaaagtagaaggatgaattttaaattctgcttcttgaatgccc

SEQ ID NO: 48946 - DNA, 600 bp, Chicken  19866894294598_3
ttgagattaattactgaagtttaattatacaattatacatgaatgtagatatatgaatgtatgkagggtagttcatttgaatttgcaaagttgtcttgtttgtacttgaattactaaatgcttctgtccgtgttagatattggccactgaccccctccccattagtttacatactgcttatgatcatttgcagtaaaaaattgtagtgcctggctatgattgtttcctgtttctggtttccttactgttgactaagctgaagatgatgatattgttagaactgctaatttagaccttggratgtatgtatttagtcttcctctctgctcctggcttctgttgccagagctatgccaagtagctcctaattctgtccttctgagggctgtgagaataaattcaataaagttattaagtatgagataccattgaggctttcacagtaactgagacaaagtagaaggatgaattttaaattctgcttcttgaatgcccacttatgtgatttttgaaattggttttccttgaacagttacagcaggcaaattcaatcaattgagtattcgtaggaagtaaatacaaaagcgaagtgagcatggt

SEQ ID NO: 48947 - DNA, 599 bp, Chicken  19866894294613_1
  misc_feature (1)..(64): n is any nucleotide
nnnnnnnnnnnnnnnnnnnnnnnnnnnnnnnnnnnnnnnnnnnnnnnnnnnnnnnnnnnnnnnnttgaggttttttattgcattttctcactggaaaattacagtaggttaacattccagttgaacacatactaaataaaaactgtgaaatgaatgtcgagcccaaagaagggaatgttagaaaacaactgctaaaaaggtatttagcatcagaatcataaaatgcatgaattgttcatttgttagagatttcactcacaaaaagcaattcctttgatcaaattgtgactttgatggagwccacatagtaatcccagtgcttttcatgtagtaatcaaactcagttacatttccaatactgcaatatgctactagtgaacaacttactaattagttcctttscaagatcgtacacattgtgttgagaaaaaaagaaaaaaaaaagcaggacatttcttagtttactagttataaatcactctctcagtcgtattctaaaaggctctacagcacaagccatactgataattgcattttttcctttcacatttttgcttcagctacatacagccttcagtttcattccttaaattcttgag

SEQ ID NO: 48948 - DNA, 600 bp, Chicken  19866894294613_2
agtaggttaacattccagttgaacacatactaaataaaaactgtgaaatgaatgtcgagcccaaagaagggaatgttagaaaacaactgctaaaaaggtatttagcatcagaatcataaaatgcatgaattgttcatttgttagagatttcactcacaaaaagcaattcctttgatcaaattgtgactttgatggagwccacatagtaatcccagtgcttttcatgtagtaatcaaactcagttacatttccaatactgcaatatgctactagtgaacaacttactaattagttcctttscaagatcgtacacattgtgttgagaaaaaaagaaaaaaaaaagcaggacatttcttagtttactagttataaatcactctctcagtcgtattctaaaaggctctacagcacaagccatactgataattgcattttttcctttcacatttttgcttcagctacatacagccttcagtttcattccttaaattcttgagttgtggcactattaccccatgtcaactccagacgttgaaagagtgattttgtgtgaatgtagtgcttgatgtgagacctttccctgacaaactggaaaaacaa

SEQ ID NO: 48949 - DNA, 600 bp, Chicken  19866894294613_3
ataaaaactgtgaaatgaatgtcgagcccaaagaagggaatgttagaaaacaactgctaaaaaggtatttagcatcagaatcataaaatgcatgaattgttcatttgttagagatttcactcacaaaaagcaattcctttgatcaaattgtgactttgatggagwccacatagtaatcccagtgcttttcatgtagtaatcaaactcagttacatttccaatactgcaatatgctactagtgaacaacttactaattagttcctttscaagatcgtacacattgtgttgagaaaaaaagsaaaaaaaaagcaggacatttcttagtttactagttataaatcactctctcagtcgtattctaaaaggctctacagcacaagccatactgataattgcattttttcctttcacatttttgcttcagctacatacagccttcagtttcattccttaaattcttgagttgtggcactattaccccatgtcaactccagacgttgaaagagtgattttgtgtgaatgtagtgcttgatgtgagacctttccctgacaaactggaaaaacaaactccatttgaaaatatgaccaagtgcagcatg

SEQ ID NO: 48950 - DNA, 600 bp, Chicken  19866894294620_1
aagtattctgttaatctaaatgattggcttgttaatatatacggcattctaagcaaaaaaaagacagctgcttgcacgtagaagttcagtcaacagtatttttggtggaacgctgtgattgtttcatgttattaaacagctctcaggtttgtgctgtagcccaggaggtggggaccccaccagtgctgcccagtcccaggcttctctcctcaccagtgaagccatcggcttgctactagttattttccaattgcttgtattgacacgtgtgcctctggtctgcccagcagctctctgccyggccttytccttgagcccagagccactctggccaccacagctccacatcacaggtgtggatcctgccctggtggctgcacgtggtccgttggcacgggcatttgggtagtgttggggatcgcaattatttgtggggcaaaacatgtccagtgaaatggggagctggttcagaatgtctggaagattcatgggagtgaatatgcagagccgagggtgccatatgcgtgatgtggctggctgctcttacttacattaacttctgcagtacctctcagtgtggaagagctgcccctctgggct

SEQ ID NO: 48951 - DNA, 600 bp, Chicken  19866894294620_2
ctgttaatctaaatgattggcttgttaatatatacggcattctaagcaaaaaaaagacagctgcttgcacgtagaagttcagtcaacagtatttttggtggaacgctgtgattgtttcatgttattaaacagctctcaggtttgtgctgtagcccaggaggtggggaccccaccagtgctgcccagtcccaggcttctctcctcaccagtgaagccatcggcttgctactagttattttccaattgcttgtattgacacgtgtgcctctggtctgcccagcagctctctgccyggccttytccttgagcccagagccactctggccaccacagctccacatcacaggtgtggatcctgccctggtggctgcacgtggtccgttggcacgggcatttgggtagtgttggggatcgcaattatttgtggggcaaaacatgtccagtgaaatggggagctggttcagaatgtctggaagattcatgggagtgaatatgcagagccgagggtgccatatgcgtgatgtggctggctgctcttacttacattaacttctgcagtacctctcagtgtggaagagctgcccctctgggcttggtggt

SEQ ID NO: 48952 - DNA, 600 bp, Chicken  19866894294622_1
cttccaatgtctcaccatcctcacagtaatgaatttctttctaatatctagtctaaatccatcctcttccagtttaaagtcatccccccttgccctcttgctacatgctcttataagatatccctcctcagctttcctgaggaactccttcagtactggaaggccactgtaaggtctctctgaggtctagtcactagaattaaatggatattttccaatagtcaaaacactacatttaaatccaaacctgtagcctgatccctgcctcctccacatgaacatgccttgtgcctatccatsagaaactactaggatagttccagtgtttaggggcatggcagactgcacctgtcaagagtgattcctacagataaggcaacaggtttagcaagagacagttatcatggcaagcaggtagaaagttgagtattgtacaaatccaaagatgagaaataacgatccaaataactatgcactacctccagtatgctacatctttttttttttccttcttcagatattattgagccagtgcacaagtcatactgtctgcctcaaaaatgcattttgatcagtaggtactaatgagctacaatagta

SEQ ID NO: 48953 - DNA, 599 bp, Chicken  19866894294635_1
  misc_feature (1)..(233): n is any nucleotide
nnnnnnnnnnnnnnnnnnnnnnnnnnnnnnnnnnnnnnnnnnnnnnnnnnnnnnnnnnnnnnnnnnnnnnnnnnnnnnnnnnnnnnnnnnnnnnnnnnnnnnnnnnnnnnnnnnnnnnnnnnnnnnnnnnnnnnnnnnnnnnnnnnnnnnnnnnnnnnnnnnnnnnnnnnnnnnnnnnnnnnnnnnnnnnnnnnnnnnnnnnnnnnnnnnnnnnnnnnnnnnnnnnnnnnnnnatatttgcttctgagtcccaacaaagaggaatgttttagtaggatggaacagaaagctgacaacagygacaacaaaaagccttcaaacaccacactacatttatcctcactgtattgcacaacagcatttgtaaaacaaggatctttgggttttaatgaatagtttgttgagcaggagaatactccaatacccattgcttttcatcayaggyggatatgagagttgttttccacctctggtatcgcagagcaccaggctgggagaggacaggggcatcttctggaggtgaaggaarcaattcacaggtttcgtggctgtgtgtcatctcaggagggagaaatgaagaaacacrttcagtccaggtt

SEQ ID NO: 48954 - DNA, 600 bp, Chicken  19866894294635_10
tccyctctgacatatatttgacattctgttcttggtttgagcttttcaaacagttatataaatactcacaggagcatttatttttctcacagctgattgtgcaataggacacgctaacaccttgacttcgttctattgaaaaacctccatttactccttagtacagttcacagaaggtaaatctcagagctgccagagctgccctcgtcacgcgttccagatggctccagaagagctccgagcaatttttytgtacaagagaaagcgagtgaactcaggtgccagactgggatccattcrggtgaaccaaacacattacagttcctcggatgggaagcgtggacagaaccactgtatttaaaggaaatgacagccatgaattttcccaacaagtcgcagaaacacccaaatccaaggcacttttcagatcacttcatacaaatgcttgatatccatatccctccccatgtcctttgtattagtgagacaaagcaggtattaagcaagagacccaaaccctaaatcctacttctgcataacttcatggtaagtaaattgtctatagctttcttttcatcattggaaaagccagtcggttaa

SEQ ID NO: 48955 - DNA, 599 bp, Chicken  19866894294635_2
  misc_feature (1)..(92): n is any nucleotide
nnnnnnnnnnnnnnnnnnnnnnnnnnnnnnnnnnnnnnnnnnnnnnnnnnnnnnnnnnnnnnnnnnnnnnnnnnnnnnnnnnnnnnnnnnnnatatttgcttctgagtcccaacaaagaggaatgttttagtaggatggaacagaaagctgacaacagygacaacaaaaagccttcaaacaccacactacatttatcctcactgtattgcacaacagcatttgtaaaacaaggatctttgggttttaatgaatagtttgttgagcaggagaatactccaatacccattgcttttcatcayaggyggatatgagagttgttttccacctctggtatcgcagagcaccaggctgggagaggacaggggcatcttctggaggtgaaggaarcaattcacaggtttcgtggctgtgtgtcatctcaggagggagaaatgaagaaacacrttcagtccaggttccaggagcagatacagagcagtgccttaaaggcttgtatctgctycactctcaggaagttttgctttatcaaacaaaacgttgaatcaatgcgatgtcaatcagaggctgactcaatgcagctttacagacggcttagccc

SEQ ID NO: 48956 - DNA, 599 bp, Chicken  19866894294635_3
  misc_feature (1)..(88): n is any nucleotide
nnnnnnnnnnnnnnnnnnnnnnnnnnnnnnnnnnnnnnnnnnnnnnnnnnnnnnnnnnnnnnnnnnnnnnnnnnnnnnnnnnnnnnnnatatttgcttctgagtcccaacaaagaggaatgttttagtaggatggaacagaaagctgacaacagygacaacaaaaagccttcaaacaccacactacatttatcctcactgtattgcacaacagcatttgtaaaacaaggatctttgggttttaatgaatagtttgttgagcaggagaatactccaatacccattgcttttcatcayaggyggatatgagagttgttttccacctctggtatcgcagagcaccaggctgggagaggacaggggcatcttctggaggtgaaggaarcaattcacaggtttcgtggctgtgtgtcatctcaggagggagaaatgaagaaacacrttcagtccaggttccaggagcagatacagagcagtgccttaaaggcttgtatctgctycactctcaggaagttttgctttatcaaacaaaacgttgaatcaatgcgatgtcaatcagaggctgactcaatgcagctttacagacggcttagcccaatc

SEQ ID NO: 48957 - DNA, 599 bp, Chicken  19866894294635_4
  misc_feature (1)..(4): n is any nucleotide
nnnnatatttgcttctgagtcccaacaaagaggaatgttttagtaggatggaacagaaagctgacaacagygacaacaaaaagccttcaaacaccacactacatttatcctcactgtattgcacaacagcatttgtaaaacaaggatctttgggttttaatgaatagtttgttgagcaggagaatactccaatacccattgcttttcatcayaggyggatatgagagttgttttccacctctggtatcgcagagcaccaggctgggagaggacaggggcatcttctggaggtgaaggaarcaattcacaggtttcgtggctgtgtgtcatctcaggagggagaaatgaagaaacacrttcagtccaggttccaggagcagatacagagcagtgccttaaaggcttgtatctgctycactctcaggaagttttgctttatcaaacaaaacgttgaatcaatgcgatgtcaatcagaggctgactcaatgcagctttacagacggcttagcccaatcttctgctttcttctctcccacacccacaagatcccattgcttccctcctatcacctcctgctttttggtggccacaagaaagaa

SEQ ID NO: 48958 - DNA, 600 bp, Chicken  19866894294635_5
aagctgacaacagygacaacaaaaagccttcaaacaccacactacatttatcctcactgtattgcacaacagcatttgtaaaacaaggatctttgggttttaatgaatagtttgttgagcaggagaatactccaatacccattgcttttcatcayaggyggatatgagagttgttttccacctctggtatcgcagagcaccaggctgggagaggacaggggcatcttctggaggtgaaggaarcaattcacaggtttcgtggctgtgtgtcatctcaggagggagaaatgaagaaacacrttcagtccaggttccaggagcagatacagagcagtgccttaaaggcttgtatctgctycactctcaggaagttttgctttatcaaacaaaacgttgaatcaatgcgatgtcaatcagaggctgactcaatgcagctttacagacggcttagcccaatcttctgctttcttctctcccacacccacaagatcccattgcttccctcctatcacctcctgctttttggtggccacaagaaagaataaaccctcacctcctccccatccattctccatcacatcatctgaaaaagcactggga

SEQ ID NO: 48959 - DNA, 600 bp, Chicken  19866894294635_6
gtattgcacaacagcatttgtaaaacaaggatctttgggttttaatgaatagtttgttgagcaggagaatactccaatacccattgcttttcatcayaggyggatatgagagttgttttccacctctggtatcgcagagcaccaggctgggagaggacaggggcatcttctggaggtgaaggaarcaattcacaggtttcgtggctgtgtgtcatctcaggagggagaaatgaagaaacacrttcagtccaggttccaggagcagatacagagcagtgccttaaaggcttgtatctgctycactctcaggaagttttgctttatcaaacaaaacgttgaatcaatgcgatgtcaatcagaggctgactcaatgcagctttacagacggcttagcccaatcttctgctttcttctctcccacacccacaagatcccattgcttccctcctatcacctcctgctttttggtggccacaagaaagaataaaccctcacctcctccccatccattctccatcacatcatctgaaaaagcactgggatcttttctgacggtaccgcagcgctgcactgctttaatacaatcccaaaactccaggc

SEQ ID NO: 48960 - DNA, 600 bp, Chicken  19866894294635_7
cttgaatgggaagtttagtgaccacactgcccgactgcttgtttgagatggctgccagaatgaggggcaatatcacaaaatgcatctcagcaagttcagatcagatactagggaagtccctttcagaaggctggtgcagccctggggtgggtcacagagctggggatctcagttcttggggatgtttcatgctaaacatgcatcttgagacagagcagcatgtttggtgagaaattatcgtgttgagcaatttttgaccaggtattgaaggaaccacagacatttggtacataacaatcyggcaaaatcctcagaagctgctccctacctttttttaaataccaaaaagtgcctttaaaagccttatcataaactaccaaacccctgcagctccaggctcagtattcccaagacatcagaccgttctgaggtttcactcacatgcaaaatttgctctatattctggtggatggttccagagtgcagggtctggccatgcaacttgcatcacaagagcaaactccacatatttgaaaagattatcagccaactacagttctttccactgtagaaacagttactcagttaagataaacaaag

SEQ ID NO: 48961 - DNA, 600 bp, Chicken  19866894294635_8
tgattaaacatgtgaatcagttgataaactggttatcaaagttctgaaaacatttttaacaatgacccttcctgccatggttaacaatgacccacaaaagctagaataattcagcactttgcaggaaaccaactggacagaaaacagaacgcgcttcagatctgagaagcagcagctctgcaatgtgcactgacacatttggatactactaatcagtaaatttgtggtaaacattttagttaccaattaaaagctttggacaattcttttcggcacacaggaaaaatgaagttttatccyctctgacatatatttgacattctgttcttggtttgagcttttcaaacagttatataaatactcacaggagcatttatttttctcacagctgattgtgcaataggacacgctaacaccttgacttcgttctattgaaaaacctccatttactccttagtacagttcacagaaggtaaatctcagagctgccagagctgccctcgtcacgcgttccagatggctccagaagagctccgagcaatttttytgtacaagagaaagcgagtgaactcaggtgccagactgggatccattcrggtg

SEQ ID NO: 48962 - DNA, 600 bp, Chicken  19866894294635_9
taaaagctttggacaattcttttcggcacacaggaaaaatgaagttttatccyctctgacatatatttgacattctgttcttggtttgagcttttcaaacagttatataaatactcacaggagcatttatttttctcacagctgattgtgcaataggacacgctaacaccttgacttcgttctattgaaaaacctccatttactccttagtacagttcacagaaggtaaatctcagagctgccagagctgccctcgtcacgcgttccagatggctccagaagagctccgagcaatttttytgtacaagagaaagcgagtgaactcaggtgccagactgggatccattcrggtgaaccaaacacattacagttcctcggatgggaagcgtggacagaaccactgtatttaaaggaaatgacagccatgaattttcccaacaagtcgcagaaacacccaaatccaaggcacttttcagatcacttcatacaaatgcttgatatccatatccctccccatgtcctttgtattagtgagacaaagcaggtattaagcaagagacccaaaccctaaatcctacttctgcataacttcatggtaag

SEQ ID NO: 48963 - DNA, 599 bp, Chicken  19866894294637_1
  misc_feature (1)..(184): n is any nucleotide
nnnnnnnnnnnnnnnnnnnnnnnnnnnnnnnnnnnnnnnnnnnnnnnnnnnnnnnnnnnnnnnnnnnnnnnnnnnnnnnnnnnnnnnnnnnnnnnnnnnnnnnnnnnnnnnnnnnnnnnnnnnnnnnnnnnnnnnnnnnnnnnnnnnnnnnnnnnnnnnnnnnnnnnnnnnnnnnnnnnnnnnntttgtacgaaggggcaggaggtaaaggaatgtatagaaacacatgagcaaacctttatctacatgtctccaaggaactcatagggtaggcatggcagtacacagctcactcagtakttttcaaggcttcatggtatgatcatcttgcctatgcagagctccatggtgctgcrgccagagccttgataatactagccccrgtaagtacctgcttgtcagctgtactgtmrctggcctgatgcatagggtgttcctgttgaagttagttgaaaggcaaagctcattatgaaagcctcatgttttggggtttttcatggtatttgttcacaaaacagtgctaaaatggcagttttggtttttgtacattagtaagtaaaagactggaggtgacattttcaaaatcttttttttttttt

SEQ ID NO: 48964 - DNA, 599 bp, Chicken  19866894294637_2
  misc_feature (1)..(128): n is any nucleotide
nnnnnnnnnnnnnnnnnnnnnnnnnnnnnnnnnnnnnnnnnnnnnnnnnnnnnnnnnnnnnnnnnnnnnnnnnnnnnnnnnnnnnnnnnnnnnnnnnnnnnnnnnnnnnnnnnnnnnnnnnnnnnnnntttgtacgaaggggcaggaggtaaaggaatgtatagaaacacatgagcaaacctttatctacatgtctccaaggaactcatagggtaggcatggcagtacacagctcactcagtakttttcaaggcttcatggtatgatcatcttgcctatgcagagctccatggtgctgcrgccagagccttgataatactagccccrgtaagtacctgcttgtcagctgtactgtmrctggcctgatgcatagggtgttcctgttgaagttagttgaaaggcaaagctcattatgaaagcctcatgttttggggtttttcatggtatttgttcacaaaacagtgctaaaatggcagttttggtttttgtacattagtaagtaaaagactggaggtgacattttcaaaatcttttttttttttttttttacctaccctcacatctttcctgtgttgaaggattaaatacagcacatgtag

SEQ ID NO: 48965 - DNA, 599 bp, Chicken  19866894294637_3
  misc_feature (1)..(101): n is any nucleotide
nnnnnnnnnnnnnnnnnnnnnnnnnnnnnnnnnnnnnnnnnnnnnnnnnnnnnnnnnnnnnnnnnnnnnnnnnnnnnnnnnnnnnnnnnnnnnnnnnnnnntttgtacgaaggggcaggaggtaaaggaatgtatagaaacacatgagcaaacctttatctacatgtctccaaggaactcatagggtaggcatggcagtacacagctcactcagtakttttcaaggcttcatggtatgatcatcttgcctatgcagagctccatggtgctgcrgccagagccttgataatactagccccrgtaagtacctgcttgtcagctgtactgtmrctggcctgatgcatagggtgttcctgttgaagttagttgaaaggcaaagctcattatgaaagcctcatgttttggggtttttcatggtatttgttcacaaaacagtgctaaaatggcagttttggtttttgtacattagtaagtaaaagactggaggtgacattttcaaaatcttttttttttttttttttacctaccctcacatctttcctgtgttgaaggattaaatacagcacatgtagaaagtgcacaggtaaaatgtgtagagg

SEQ ID NO: 48966 - DNA, 599 bp, Chicken  19866894294637_4
  misc_feature (1)..(72): n is any nucleotide
nnnnnnnnnnnnnnnnnnnnnnnnnnnnnnnnnnnnnnnnnnnnnnnnnnnnnnnnnnnnnnnnnnnnnnnntttgtacgaaggggcaggaggtaaaggaatgtatagaaacacatgagcaaacctttatctacatgtctccaaggaactcatagggtaggcatggcagtacacagctcactcagtakttttcaaggcttcatggtatgatcatcttgcctatgcagagctccatggtgctgcrgccagagccttgataatactagccccrgtaagtacctgcttgtcagctgtactgtmrctggcctgatgcatagggtgttcctgttgaagttagttgaaaggcaaagctcattatgaaagcctcatgttttggggtttttcatggtatttgttcacaaaacagtgctaaaatggcagttttggtttttgtacattagtaagtaaaagactggaggtgacattttcaaaatcttttttttttttttttttacctaccctcacatctttcctgtgttgaaggattaaatacagcacatgtagaaagtgcacaggtaaaatgtgtagaggcttttttctgttttttaacctcttctatt

SEQ ID NO: 48967 - DNA, 599 bp, Chicken  19866894294637_5
  misc_feature (1)..(71): n is any nucleotide
nnnnnnnnnnnnnnnnnnnnnnnnnnnnnnnnnnnnnnnnnnnnnnnnnnnnnnnnnnnnnnnnnnnnnnntttgtacgaaggggcaggaggtaaaggaatgtatagaaacacatgagcaaacctttatctacatgtctccaaggaactcatagggtaggcatggcagtacacagctcactcagtakttttcaaggcttcatggtatgatcatcttgcctatgcagagctccatggtgctgcrgccagagccttgataatactagccccrgtaagtacctgcttgtcagctgtactgtmrctggcctgatgcatagggtgttcctgttgaagttagttgaaaggcaaagctcattatgaaagcctcatgttttggggtttttcatggtatttgttcacaaaacagtgctaaaatggcagttttggtttttgtacattagtaagtaaaagactggaggtgacattttcaaaatcttttttttttttttttttacctaccctcacatctttcctgtgttgaaggattaaatacagcacatgtagaaagtgcacaggtaaaatgtgtagaggcttttttctgttttttaacctcttctattt

SEQ ID NO: 48968 - DNA, 600 bp, Chicken  19866894294637_6
gctcactcagtakttttcaaggcttcatggtatgatcatcttgcctatgcagagctccatggtgctgcrgccagagccttgataatactagccccrgtaagtacctgcttgtcagctgtactgtmrctggcctgatgcatagggtgttcctgttgaagttagttgaaaggcaaagctcattatgaaagcctcatgttttggggtttttcatggtatttgttcacaaaacagtgctaaaatggcagttttggtttttgtacattagtaagtaaaagactggaggtgacattttcaaaatcrtttttttttttttttttacctaccctcacatctttcctgtgttgaaggattaaatacagcacatgtagaaagtgcacaggtaaaatgtgtagaggcttttttctgttttttaacctcttctatttgtacctgtttctgttttctgtttaggatctccagtcagtgcccagccagtgattatggctgttcctcctcctcggccatctactctggtggcaaaaccagttgcatacatgccagcatcaatagtgacttctcaacagccttcatgtcatgcaattcatgtcgttcarcaagctc

SEQ ID NO: 48969 - DNA, 600 bp, Chicken  19866894294637_7
aaaatcttttttttttttttttttacctaccctcacatctttcctgtgttgaaggattaaatacagcacatgtagaaagtgcacaggtaaaatgtgtagaggcttttttctgttttttaacctcttctatttgtacctgtttctgttttctgtttaggatctccagtcagtgcccagccagtgattatggctgttcctcctcctcggccatctactctggtggcaaaaccagttgcatacatgccagcatcaatagtgacttctcaacagccttcatgtcatgcaattcatgtcgttcarcaagctcccactgttacaatggtccgagttgtgacctcctctgcaaactctgcaaatggatacatcctcacaaatcagggcacggcaggaggagctcatgaagctgcaggagcagtgttggacttagctggtgaccaccgaggtagcttgtcacttctcttgctacttcactaataagtcaagcaggcttggagtgtggggggagagtcagacatcagtttcactcactgggtgcttagcccttaataaaagatgcttgtctagataaatttgagtaggagttcatccagctgatgtttc

SEQ ID NO: 48970 - DNA, 600 bp, Chicken  19866894294638_1
atcacagcattcataagctcttgtcagtgtttcaatgattatgtggaaaatttgtgtgtatttaccaatcttgctaaaatcaccactggatataagcgattatgctaaaatgccagggcttgacatgtacagaaattgagctgtagttctgtagaagatgaattacaggactgcataaagccaggaatacttttctcactgtgttaatcaacgtactgtacgatactgtactcccaggggggataagtacatctatagtcttgtggatcatattcatgggtcagcttcactgcttgtgaktccaggtattccttagggctgaaaatagtaagtaaaacagatatttgaaatattttctatagtagctcatgtatgtaggttgctctgaaagtcatgccttcttttaatttccatggaagctacaacagatacaaagagaacaataatgctatttgatagagcawattctcagctrcaragcactctttttcaacataggcaccaccattagctatgcattttccccagtgatgaacaatagcctgcatgccacgcttataaaatctgcatggccatccaaaacacagctcacgtaccact

SEQ ID NO: 48971 - DNA, 600 bp, Chicken  19866894294638_2
acaggactgcataaagccaggaatacttttctcactgtgttaatcaacgtactgtacgatactgtactcccaggggggataagtacatctatagtcttgtggatcatattcatgggtcagcttcactgcttgtgaktccaggtattccttagggctgaaaatagtaagtaaaacagatatttgaaatattttctatagtagctcatgtatgtaggttgctctgaaagtcatgccttcttttaatttccatggaagctacaacagatacaaagagaacaataatgctatttgatagagcawattctcagctrcaragcactctttttcaacataggcaccaccattagctatgcattttccccagtgatgaacaatagcctgcatgccacgcttataaaatctgcatggccatccaaaacacagctcacgtaccactcaccgcctcactgtgctcacatctattgcttggtctccataaacattcagcaagcatcagtgaatgtcaatgggtgccatttttttctgcgttgaggacttcagtgacacacctttgccttcataacgcccttcactgccggaagtcattttgtcagactgccc

SEQ ID NO: 48972 - DNA, 600 bp, Chicken  19866894294638_3
taaagccaggaatacttttctcactgtgttaatcaacgtactgtacgatactgtactcccaggggggataagtacatctatagtcttgtggatcatattcatgggtcagcttcactgcttgtgaktccaggtattccttagggctgaaaatagtaagtaaaacagatatttgaaatattttctatagtagctcatgtatgtaggttgctctgaaagtcatgccttcttttaatttccatggaagctacaacagatacaaagagaacaataatgctatttgatagagcawattctcagctrcaragcactctttttcaacataggcaccaccattagctatgcattttccccagtgatgaacaatagcctgcatgccacgcttataaaatctgcatggccatccaaaacacagctcacgtaccactcaccgcctcactgtgctcacatctattgcttggtctccataaacattcagcaagcatcagtgaatgtcaatgggtgccatttttttctgcgttgaggacttcagtgacacacctttgccttcataacgcccttcactgccggaagtcattttgtcagactgcccctctgctacca

SEQ ID NO: 48973 - DNA, 600 bp, Chicken  19866894294638_4
agccaggaatacttttctcactgtgttaatcaacgtactgtacgatactgtactcccaggggggataagtacatctatagtcttgtggatcatattcatgggtcagcttcactgcttgtgaktccaggtattccttagggctgaaaatagtaagtaaaacagatatttgaaatattttctatagtagctcatgtatgtaggttgctctgaaagtcatgccttcttttaatttccatggaagctacaacagatacaaagagaacaataatgctatttgatagagcawattctcagctrcaragcactctttttcaacataggcaccaccattagctatgcattttccccagtgatgaacaatagcctgcatgccacgcttataaaatctgcatggccatccaaaacacagctcacgtaccactcaccgcctcactgtgctcacatctattgcttggtctccataaacattcagcaagcatcagtgaatgtcaatgggtgccatttttttctgcgttgaggacttcagtgacacacctttgccttcataacgcccttcactgccggaagtcattttgtcagactgcccctctgctaccatct

SEQ ID NO: 48974 - DNA, 599 bp, Chicken  19866894294643_1
  misc_feature (1)..(14): n is any nucleotide
nnnnnnnnnnnnnntctgtgagttgcaatatgatgagccctagctgtatcttctcccttatcaaactgctgttgcacaccagccagatggacagggaaaacagggttttatgagccttcctctgcctagagcctcatgtgacccactgataagaatactgtagttctcagtttgttcaacggattggttgtaggcatcttaaaatataacagctaacattaaaatcaagaacagatcaggctggaaaccttgttttataaacaaggaaagcaaaacatattcctgaagttgtaaatactygacaaatacaaatagagctcttaatgcatgaatgaattaatacaataaaacaaatcagaagggtgggtttccacaaagagtaaagcgatatggttttcttccatctcctagttccctgtcagttaaatattgctccatactttctttcctttgctttctccctttgttcactgtgtggttgttgccttaagaaaagacagcaaagatacaactaaatgtggagtaagatgagctagttctttccctatggtgcaaaatataaatagaacatgagagaccaaaatacaaacaaactttcc

SEQ ID NO: 48975 - DNA, 600 bp, Chicken  19866894294652_1
aataaaccacactcgtcactttgctaagtggacgagtaattaaaatggactttccaaagagacaaatctattcaataatattataaatggcactaatgatggagagctgcacgtaattacaaaatgtacacactactgaaattggttggcaaattagaagtatttgaaggcaattatgtgattctattaaagaaaaaaaaaaaagaaagaaaaatatcatttaaaggaaatgcaaggaaagtacgtaatctgattcgtttctaatggagcctcagcagaaatgccgcatctagtttgatrcattacatttcaagattttggattagccttggtagcgtctagttattgacaagaaaaatctctgagagaagaagtgaaagaaccgggctcataaagtttcaatattaaagagtggagacataaggtgttctgatacctaaataacctacatggatagaacagtgaaactgtttcttctatgtttatgatggctagacttgaggaaaactttttttttttttttttttttcagaagaagaggtcagaacacatgtatttgaaaaatataatgctttctagactgctccagatgttaatgaa

SEQ ID NO: 48976 - DNA, 600 bp, Chicken  19866894294653_1
gctgcctcgctgtgcagggatcgcaagccggttcttagtctcacgcctgctttcagtctgggcgagcaacacagagccagagctagtctggacctaccaggtacactaagaattaacacgttattttaggagctacgtagttcttcattatatctctttttcagtaacagcttacactgatcttctttgtatttttgtttttttttccttaggtgatctaagccccagcttcaggaaaaatcctgaaatctaagaaaagtgcttaacttagcaaatgtcggtgatgggatcaactcagcrgagctcttttctgcaagactttggtctacctgccctccctgcccaaactgtgctcggtaaggtaggtggcagagagcactgtaattcaagagcagctattgctcktttctttgtcactccataggtcactggctagcagaaatctctgcagaaattcatccaaggatactttgaaaacttggcctccactgatgagaaaattaagtggtgactcatgctcccatcagctccaggcttgattactgcaatttgatggactgagaaactgatattccaccgagacagcaatttgcttagggg

SEQ ID NO: 48977 - DNA, 600 bp, Chicken  19866894294653_2
ctaagaattaacacgttattttaggagctacgtagttcttcattatatctctttttcagtaacagcttacactgatcttctttgtatttttgtttttttttccttaggtgatctaagccccagcttcaggaaaaatcctgaaatctaagaaaagtgcttaacttagcaaatgtcggtgatgggatcaactcagcrgagctcttttctgcaagactttggtctacctgccctccctgcccaaactgtgctcggtaaggtaggtggcagagagcactgtaattcaagagcagctattgctcktttctttgtcactccataggtcactggctagcagaaatctctgcagaaattcatccaaggatactttgaaaacttggcctccactgatgagaaaattaagtggtgactcatgctcccatcagctccaggcttgattactgcaatttgatggactgagaaactgatattccaccgagacagcaatttgcttaggggaacagctgagaggcctcattggcaccaattgcttccaacacatctctcttgtccttttaatcactagcaaatttaatttcacttcccactgaagatctcactctc

SEQ ID NO: 48978 - DNA, 600 bp, Chicken  19866894294654_1
ttttagaaaatatacatgaagtactgtacgttttttacctgcttcaaattggcattataaaacagggttaataaacatagcgaaaactaactaatcaaacacagactagtttattgaggatcgatcagatcagactccttacaattgcagttctggaactttaattctactaagagattttgcctattttatcattctagtgatttaactgaaggaaagttttaaaagtccactttgtctttttgaaacattcttttatatagtcatgtcatgaaagttagctatcaagggagctcccarttctttacaactcttctgctagaactaaatctgagggcctcttgagcactgtaaggacaagttcagtgttttctatttatcagcccaagcttatgagtgcagttgtaccaccagtaaaaagctaacttccgtgacctcttcccatctcagaagaggtgaaaaggaaatactccagaggttggagtagaaggcaatagctgtggggatttcttcttgaagttcccagtgtggcctctaaacaaacctaaaaccactctagctccagagtaacagcaaacaactgcaaactgcttatgaatc

SEQ ID NO: 48979 - DNA, 600 bp, Chicken  19866894294654_2
gtgttttctatttatcagcccaagcttatgagtgcagttgtaccaccagtaaaaagctaacttccgtgacctcttcccatctcagaagaggtgaaaaggaaatactccagaggttggagtagaaggcaatagctgtggggatttcttcttgaagttcccagtgtggcctctaaacaaacctaaaaccactctagctccagagtaacagcaaacaactgcaaactgcttatgaatccaaactgcaggattagttcagttgcactctcaaagaaagtattttactcactctaccatagcacrtagtaatccttggtttgtttatggagtctaaaactctgtgggtttggactctggtaaagtcaaacttaaaaatgtgcttgagttaagatcaaatcaggatcactgtcctttcacaaatgttcatctttaaatagattcagattcctgtggctagattccccagactgaatgagctgcccttggcaaaggactgcaaaatggaagaggaagtgaaggctttaaagcatttgtggttccccctctcccagctggctgagagtcaatccgattgcagcttcggtgtgctcagatgcccctggc

SEQ ID NO: 48980 - DNA, 600 bp, Chicken  19866894294658_1
catctaaacgaacactgtctctgactgcctgaaaacattgtgtactacattttatttccaaaattatccagcttgaagttcacatcagccaactatttcctaaattcaagctgtttttctgtcaagaagcaagacaaactgagcagttataccaggtacagggagaggtttttaattgcggcaaacacgaaccatctaagcaggtgatttgcttagccttcaaaaagcacctacagtggcaatacagaacagcttgccccctagctactctaggttctagagaaaacatatgtctggggraaatccctgaagyatttaractgtgtggccttaccaacagcacacatatgttatgcatgcacaaaaggcagttacacctgctctcacagcctaccaagagtgtccccaaactgcagtaatagggcaggctctgactgcacagaaatcaccacttgttctttgcaacattaatttctagccacattacaccactgacattttcctgtttgcaatgtgtggtgtcttgcatttggtgatcccacaccacagccttcaaatttgcttgcagtcttctcagtttagcacactgcatccatgcaa

SEQ ID NO: 48981 - DNA, 600 bp, Chicken  19866894294658_2
actgtctctgactgcctgaaaacattgtgtactacattttatttccaaaattatccagcttgaagttcacatcagccaactatttcctaaattcaagctgtttttctgtcaagaagcaagacaaactgagcagttataccaggtacagggagaggtttttaattgcggcaaacacgaaccatctaagcaggtgatttgcttagccttcaaaaagcacctacagtggcaatacagaacagcttgccccctagctactctaggttctagagaaaacatatgtctggggraaatccctgaagyatttaractgtgtggccttaccaacagcacacatatgttatgcatgcacaaaaggcagttacacctgctctcacagcctaccaagagtgtccccaaactgcagtaatagggcaggctctgactgcacagaaatcaccacttgttctttgcaacattaatttctagccacattacaccactgacattttcctgtttgcaatgtgtggtgtcttgcatttggtgatcccacaccacagccttcaaatttgcttgcagtcttctcagtttagcacactgcatccatgcaagagtcatggtatc

SEQ ID NO: 48982 - DNA, 600 bp, Chicken  19866894294658_3
tctgactgcctgaaaacattgtgtactacattttatttccaaaattatccagcttgaagttcacatcagccaactatttcctaaattcaagctgtttttctgtcaagaagcaagacaaactgagcagttataccaggtacagggagaggtttttaattgcggcaaacacgaaccatctaagcaggtgatttgcttagccttcaaaaagcacctacagtggcaatacagaacagcttgccccctagctactctaggttctagagaaaacatatgtctggggraaatccctgaagyatttaractgtgtggccttaccaacagcacacatatgttatgcatgcacaaaaggcagttacacctgctctcacagcctaccaagagtgtccccaaactgcagtaatagggcaggctctgactgcacagaaatcaccacttgttctttgcaacattaatttctagccacattacaccactgacattttcctgtttgcaatgtgtggtgtcttgcatttggtgatcccacaccacagccttcaaatttgcttgcagtcttctcagtttagcacactgcatccatgcaagagtcatggtatcttctcc

SEQ ID NO: 48983 - DNA, 599 bp, Chicken  19866894294659_1
  misc_feature (1)..(163): n is any nucleotide
nnnnnnnnnnnnnnnnnnnnnnnnnnnnnnnnnnnnnnnnnnnnnnnnnnnnnnnnnnnnnnnnnnnnnnnnnnnnnnnnnnnnnnnnnnnnnnnnnnnnnnnnnnnnnnnnnnnnnnnnnnnnnnnnnnnnnnnnnnnnnnnnnnnnnnnnnnnnnnnnnnnaactgccttgaaatgggcagctctgtgcaaacgcagattagatgtgtgtgttgtgatgcgttatggacgggagatggacatttatgaggctgtgcctgccctgctgtcacactggggtggtcccataaaagccagcratgtaaagtgagggcagatttagctcccrtgtcgcaaccaaagtgagatgaatgcgtcctgttgcctcgtcagctcagcacaccgctcctggagcgctgctcagagcacagagccttacagttttatggagaggacacttccacaaggtgggtggaaatgtttctcctgaagcagcaccccgacccggcgcttcgggctgtgctttttgcaacacagacacagtcctacrgagaacaagaacgacgtaatgatgaaaattgatcccaaagttccattcataggtacccacggttcctgg

SEQ ID NO: 48984 - DNA, 599 bp, Chicken  19866894294659_2
  misc_feature (1)..(134): n is any nucleotide
nnnnnnnnnnnnnnnnnnnnnnnnnnnnnnnnnnnnnnnnnnnnnnnnnnnnnnnnnnnnnnnnnnnnnnnnnnnnnnnnnnnnnnnnnnnnnnnnnnnnnnnnnnnnnnnnnnnnnnnnnnnnnnnnnnnnnnaactgccttgaaatgggcagctctgtgcaaacgcagattagatgtgtgtgttgtgatgcgttatggacgggagatggacatttatgaggctgtgcctgccctgctgtcacactggggtggtcccataaaagccagcratgtaaagtgagggcagatttagctcccrtgtcgcaaccaaagtgagatgaatgcgtcctgttgcctcgtcagctcagcacaccgctcctggagcgctgctcagagcacagagccttacagttttatggagaggacacttccacaaggtgggtggaaatgtttctcctgaagcagcaccccgacccggcgcttcgggctgtgctttttgcaacacagacacagtcctacrgagaacaagaacgacgtaatgatgaaaattgatcccaaagttccattcataggtacccacggttcctggtcaccggactgagccttgccttggccgtt

SEQ ID NO: 48985 - DNA, 600 bp, Chicken  19866894294659_3
cgggagatggacatttatgaggctgtgcctgccctgctgtcacactggggtggtcccataaaagccagcratgtaaagtgagggcagatttagctcccrtgtcgcaaccaaagtgagatgaatgcgtcctgttgcctcgtcagctcagcacaccgctcctggagcgctgctcagagcacagagccttacagttttatggagaggacacttccacaaggtgggtggaaatgtttctcctgaagcagcaccccgacccggcgcttcgggctgtgctttttgcaacacagacacagtcctacrgagaacaagaacgacgtaatgatgaaaattgatcccaaagttccattcataggtacccacggttcctggtcaccggactgagccttgccttggccgttggttggtggttgtactgggaggccacgcactgggagcagtgagctggccagtgaagcaagcagcagtaacatgcagcacatcacagtgcaaatagagggggttttcagtggaaattccatcttcccccaggtcaactaacagagactgggaagagtaaatggatttttaggcgccgaattctgcacacagctctctctgcag

SEQ ID NO: 48986 - DNA, 600 bp, Chicken  19866894294660_1
acagagagcatatgttcacacaatattaggcagcacttaacagcttgagcgcctgtcacgtgtaagactagctaaaagcaagtggaattaatctgctcaaagaggcctctgagaagtaccccaaaaaaccatcaagataggctggctaatgaaaaacaaaacaaaaacagaccgaagcataaggatgcatcttagagactggagtctctaagaaactgagaaatcagaaatatatgtttcttatgtttgttagtcatcaataacctctgaacaccaaattcactatttgtcactcttacrtaaaatacgtatgttcaccacaaaccaagtcactgaagtgcagacagcctgtgaatccgagtttgaatcgaggaagaaaaagctgaggaaagaacaataccaagctgctgtacctctatctcctaagctaagtgtcacaaaaagttacaggaatgaaaatgacttttttctttctactttggtttaaagtaaaatatcctgaatctgacccttcttgaaaagtgaaaacattgctggcctccaaacagagatgtgaccctgatgtcttcaataatatcgctcagcagcaggtaacagagg

SEQ ID NO: 48987 - DNA, 600 bp, Chicken  19866894294665_1
ttcaaacgcggtgctctcctgcaatgagagccccaggctgcctccacgtctaaggccccagaagcacacctaggctgcaccagcagactgcagctcaaacagccaagtggcagaccaagagacaaggctggcaaactcagctttcaatcacagtccagagtaccagtgccagcaaattaagcatcatctgagaaacacattttgaaggcaattctgtgcttaagcttgtggtacaagcttctctccatggcgcctagccaatggagagaatggagccactggctccattcagagccaatrcagcatttgtctctcsaaattcttctcttcctgcagaatctggaagcagagagccactgaacatctattggtccactaaatcaggaggaggagggataagatcccgtgggttcagcctagcaacaaggcaaacatcatagctgtcatgcatgaggacattgatggccaccacgttccactggttctcccatgtatctaactccaggatctctttggtgatgacttcgtgacgagctgaaatgcagaagcaacagcaggaatcagaactgcagccaaacaggatcaaagaggtttgcaaaa

SEQ ID NO: 48988 - DNA, 600 bp, Chicken  19866894294665_2
tcctgcaatgagagccccaggctgcctccacgtctaaggccccagaagcacacctaggctgcaccagcagactgcagctcaaacagccaagtggcagaccaagagacaaggctggcaaactcagctttcaatcacagtccagagtaccagtgccagcaaattaagcatcatctgagaaacacattttgaaggcaattctgtgcttaagcttgtggtacaagcttctctccatggcgcctagccaatggagagaatggagccactggctccattcagagccaatrcagcatttgtctctcsaaattcttctcttcctgcagaatctggaagcagagagccactgaacatctattggtccactaaatcaggaggaggagggataagatcccgtgggttcagcctagcaacaaggcaaacatcatagctgtcatgcatgaggacattgatggccaccacgttccactggttctcccatgtatctaactccaggatctctttggtgatgacttcgtgacgagctgaaatgcagaagcaacagcaggaatcagaactgcagccaaacaggatcaaagaggtttgcaaaaatattattactgttct

SEQ ID NO: 48989 - DNA, 599 bp, Chicken  19866894294675_1
  misc_feature (1)..(36): n is any nucleotide
nnnnnnnnnnnnnnnnnnnnnnnnnnnnnnnnnnnncatatcagaagttgagatccagcaaaccctccatcggatctcacattgtaggatgttcagggaattagatacttgtagtcaaaaaggaatagaactgatcagagtgtatattagtgaaaaaccaactagtagtagtcacaagtcatattctgacaagatctcaaaggtgctaaatcttctgaaacatgcagtaagtagtttatgcacttgctagtaatccatagactcagaatgcagcagttactgttcttgttgaagaacttmtaaagaacttataaagaacttatcttcatatttatgaagaacttcacaaatacttgtatgaagtatttatactaagctccaaaaaaaaaaaaaaaaaaaaaaaaggtttagcaaggtttagcagaaacaattttttttcytttttcctgaaagttttacttagaagtgaaacctgtggagatagtagctgaacagcatttgggaaattatataaaggcatgggaaaaaataaataacgccaaaatttgagtgaaagacatagtcaraacaaacagcagtctttaaaaaaattatctaca

SEQ ID NO: 48990 - DNA, 600 bp, Chicken  19866894294675_2
tgtatattagtgaaaaaccaactagtagtagtcacaagtcatattctgacaagatctcaaaggtgctaaatcttctgaaacatgcagtaagtagtttatgcacttgctagtaatccatagactcagaatgcagcagttactgttcttgttgaagaacttmtaaagaacttataaagaacttatcttcatatttatgaagaacttcacaaatacttgtatgaagtatttatactaagctccaaaaaaaaaaaaaaaaaaaaaaaaggtttagcaaggtttagcagaaacaattttttttcytttttcctgaaagttttacttagaagtgaaacctgtggagatagtagctgaacagcatttgggaaattatataaaggcatgggaaaaaataaataacgccaaaatttgagtgaaagacatagtcaraacaaacagcagtctttaaaaaaattatctacagacatatctttattgacttttgttctctcatttatgtcatagcagtaagatttctaaacaaatgtgtacaaaatgcttgaaactttaaatagtatacctttaaaaacagtgggaatctctggagccatctttggaatttat

SEQ ID NO: 48991 - DNA, 600 bp, Chicken  19866894294675_3
aatgcagcagttactgttcttgttgaagaacttmtaaagaacttataaagaacttatcttcatatttatgaagaacttcacaaatacttgtatgaagtatttatactaagctccaaaaaaaaaaaaaaaaaaaaaaaaggtttagcaaggtttagcagaaacaattttttttcytttttcctgaaagttttacttagaagtgaaacctgtggagatagtagctgaacagcatttgggaaattatataaaggcatgggaaaaaataaataacgccaaaatttgagtgaaagacatagtcaraacaaacagcagtctttaaaaaaattatctacagacatatctttattgacttttgttctctcatttatgtcatagcagtaagatttctaaacaaatgtgtacaaaatgcttgaaactttaaatagtatacctttaaaaacagtgggaatctctggagccatctttggaatttatagctctaamattttgcgtatgtgcagatagcagttttttgtttgagcagacatttccaggacactggggcctgtcctgtttagtatatttattgatgacctggacaggaggattgaacagaacctc

SEQ ID NO: 48992 - DNA, 600 bp, Chicken  19866894294675_4
aaagttttacttagaagtgaaacctgtggagatagtagctgaacagcatttgggaaattatataaaggcatgggaaaaaataaataacgccaaaatttgagtgaaagacatagtcaraacaaacagcagtctttaaaaaaattatctacagacatatctttattgacttttgttctctcatttatgtcatagcagtaagatttctaaacaaatgtgtacaaaatgcttgaaactttaaatagtatacctttaaaaacagtgggaatctctggagccatctttggaatttatagctctaamattttgcgtatgtgcagatagcagttttttgtttgagcagacatttccaggacactggggcctgtcctgtttagtatatttattgatgacctggacaggaggattgaacagaacctcagtaagtttgcacatgacaccaagtcatgtgcaaggtcctacagaggggtgtggacaggctggatagctgggctgtggccactgggatgaagttcaacaagaccaagtacagggtcctgcactttggccacaataaccccagacaacactgcaggcttggggcagagtggctggaggactgtg

SEQ ID NO: 48993 - DNA, 600 bp, Chicken  19866894294681_1
ctgagaataaggtactgacgcaggtccttgactttcaatctcatgagctgtggccgctgaaatgctgtttcttgcagcaagtgacaagtagaacatcttctgagattctcttgtgagacagaacaaactgagcaaaaatccttcttgcagtcacaacacacatgctaagaagaatgagaaaaccattcagttgtgtcacagaaagcaaacctacaaccccacttgtcccatctccagaccacataatttactgctagcctttcattgctgattttgacatatatcagttttaggatttamgtctagaaaactgccccatcaaatagttctgcagctgtgccaaggtggaacaagaccacaaggaaaggggaaactgaacaaaactgaggaaagaggcttcagagaattaggtcaataagtggaccaaaatggacaaggtaatgacgatggacagtcatcrtatgcagaagtaacatcaacaatctcagctctatttatctggaaacttaattaagccaccagcttgtccccaaatgaaatgaggccattggagcacaacagcacttaacagaactaaacctgtttaacaaacagtatttc

SEQ ID NO: 48994 - DNA, 466 bp, Chicken  19866894294681_2
catgctaagaagaatgagaaaaccattcagttgtgtcacagaaagcaaacctacaaccccacttgtcccatctccagaccacataatttactgctagcctttcattgctgattttgacatatatcagttttaggatttamgtctagaaaactgccccatcaaatagttctgcagctgtgccaaggtggaacaagaccacaaggaaaggggaaactgaacaaaactgaggaaagaggcttcagagaattaggtcaataagtggaccaaaatggacaaggtaatgacgatggacagtcatcrtatgcagaagtaacatcaacaatctcagctctatttatctggaaacttaattaagccaccagcttgtccccaaatgaaatgaggccattggagcacaacagcacttaacagaactaaacctgtttaacaaacagtatttcacagaaagaagttgtgatactaaatt

SEQ ID NO: 48995 - DNA, 599 bp, Chicken  19866894294682_1
  misc_feature (1)..(103): n is any nucleotide
nnnnnnnnnnnnnnnnnnnnnnnnnnnnnnnnnnnnnnnnnnnnnnnnnnnnnnnnnnnnnnnnnnnnnnnnnnnnnnnnnnnnnnnnnnnnnnnnnnnnnnngaaagggctgagcagattctccaaagtacccaatactgaaaccagataatgacctgtgagccatgcttagagatgtaaaaggtacattttatttttcctacagctgtggtcactagaaatagtctggatctatacacatgtggcctagcaaaaattctttgagaaactgttgaaaagggcattctaaatgccccatsragctttgagtaccagccctattcaagtaccacccagtgtcctaccttcggaggaaaaccaggatagctgtgtttctgacgggcacactttctgcagacagtcatatgttgtatgcgattcaagcaagtcaggcactcgcttacaagagtcaatgcagagagaagagggcctaaactctaattccaccccatttcaattcttagcttctttcctcatgagggaacgtgcagcaggtgtgtcatacaggaatgatagggcagtaggtaataataaggcataggcaacaggtggcattctc

SEQ ID NO: 48996 - DNA, 599 bp, Chicken  19866894294682_2
  misc_feature (1)..(102): n is any nucleotide
nnnnnnnnnnnnnnnnnnnnnnnnnnnnnnnnnnnnnnnnnnnnnnnnnnnnnnnnnnnnnnnnnnnnnnnnnnnnnnnnnnnnnnnnnnnnnnnnnnnnnngaaagggctgagcagattctccaaagtacccaatactgaaaccagataatgacctgtgagccatgcttagagatgtaaaaggtacattttatttttcctacagctgtggtcactagaaatagtctggatctatacacatgtggcctagcaaaaattctttgagaaactgttgaaaagggcattctaaatgccccatsragctttgagtaccagccctattcaagtaccacccagtgtcctaccttcggaggaaaaccaggatagctgtgtttctgacgggcacactttctgcagacagtcatatgttgtatgcgattcaagcaagtcaggcactcgcttacaagagtcaatgcagagagaagagggcctaaactctaattccaccccatttcaattcttagcttctttcctcatgagggaacgtgcagcaggtgtgtcatacaggaatgatagggcagtaggtaataataaggcataggcaacaggtggcattctcc

SEQ ID NO: 48997 - DNA, 600 bp, Chicken  19866894294683_1
taaaacacacgggaaaataatacccattcctctctgattctcagttttgtcaagagcaaaaagaagaaaggaacaagatgaggatgctttcgttcattcaactatgagatttgactggggggcacacaaatgattccccttcctcagctctaagggaggtgcaagcacgtggctggaagtcacccagctcattcgtgctgccagaggagcgcaaatgaagaacggcacagatgtattacaaaagcccactgctgggtgacactgcatcttcacagagaaatcttagaagatacagatgcyttctgtatgaaacaaacttcctaacacacatccaatggcgaacaaagccccggaaargaatcacctttgtggttctctgggttttgcaaagaactgacaataaaatgcaagccattttatgacagatcacagcttagtccactcaagttaattctcaaccagawattcacagaygagtcttctactcaaaggcyattatttcccattacacaggccaagttttagctcagcttgttacatggaagaaagctcttttctccctgcccatccccagcacacatgccatattttcctaaaaaa

SEQ ID NO: 48998 - DNA, 600 bp, Chicken  19866894294683_2
aaaaagaagaaaggaacaagatgaggatgctttcgttcattcaactatgagatttgactggggggcacacaaatgattccccttcctcagctctaagggaggtgcaagcacgtggctggaagtcacccagctcattcgtgctgccagaggagcgcaaatgaagaacggcacagatgtattacaaaagcccactgctgggtgacactgcatcttcacagagaaatcttagaagatacagatgcyttctgtatgaaacaaacttcctaacacacatccaatggcgaacaaagccccggaaargaatcacctttgtggttctctgggttttgcaaagaactgacaataaaatgcaagccattttatgacagatcacagcttagtccactcaagttaattctcaaccagawattcacagaygagtcttctactcaaaggcyattatttcccattacacaggccaagttttagctcagcttgttacatggaagaaagctcttttctccctgcccatccccagcacacatgccatattttcctaaaaaacaaatatttttcctccaccttctaaaataactaacagcaaccacgttggaaaactac

SEQ ID NO: 48999 - DNA, 600 bp, Chicken  19866894294683_3
gcacgtggctggaagtcacccagctcattcgtgctgccagaggagcgcaaatgaagaacggcacagatgtattacaaaagcccactgctgggtgacactgcatcttcacagagaaatcttagaagatacagatgcyttctgtatgaaacaaacttcctaacacacatccaatggcgaacaaagccccggaaargaatcacctttgtggttctctgggttttgcaaagaactgacaataaaatgcaagccattttatgacagatcacagcttagtccactcaagttaattctcaaccagawattcacagaygagtcttctactcaaaggcyattatttcccattacacaggccaagttttagctcagcttgttacatggaagaaagctcttttctccctgcccatccccagcacacatgccatattttcctaaaaaacaaatatttttcctccaccttctaaaataactaacagcaaccacgttggaaaactaccaaatgtggaaaattccagcttcaaggaaaagcttagctaagttgcaggcgaccaacaagaaggcatccaaatggaagtccatggagaattaaccataacgcagttc

SEQ ID NO: 49000 - DNA, 600 bp, Chicken  19866894294683_4
ggaagtcacccagctcattcgtgctgccagaggagcgcaaatgaagaacggcacagatgtattacaaaagcccactgctgggtgacactgcatcttcacagagaaatcttagaagatacagatgcyttctgtatgaaacaaacttcctaacacacatccaatggcgaacaaagccccggaaargaatcacctttgtggttctctgggttttgcaaagaactgacaataaaatgcaagccattttatgacagatcacagcttagtccactcaagttaattctcaaccagawattcacagaygagtcttctactcaaaggcyattatttcccattacacaggccaagttttagctcagcttgttacatggaagaaagctcttttctccctgcccatccccagcacacatgccatattttcctaaaaaacaaatatttttcctccaccttctaaaataactaacagcaaccacgttggaaaactaccaaatgtggaaaattccagcttcaaggaaaagcttagctaagttgcaggcgaccaacaagaaggcatccaaatggaagtccatggagaattaaccataacgcagttccatgcagtta

SEQ ID NO: 49001 - DNA, 600 bp, Chicken  19866894294683_5
gtgctgccagaggagcgcaaatgaagaacggcacagatgtattacaaaagcccactgctgggtgacactgcatcttcacagagaaatcttagaagatacagatgcyttctgtatgaaacaaacttcctaacacacatccaatggcgaacaaagccccggaaargaatcacctttgtggttctctgggttttgcaaagaactgacaataaaatgcaagccattttatgacagatcacagcttagtccactcaagttaattctcaaccagawattcacagaygagtcttctactcaaaggcyattatttcccattacacaggccaagttttagctcagcttgttacatggaagaaagctcttttctccctgcccatccccagcacacatgccatattttcctaaaaaacaaatatttttcctccaccttctaaaataactaacagcaaccacgttggaaaactaccaaatgtggaaaattccagcttcaaggaaaagcttagctaagttgcaggcgaccaacaagaaggcatccaaatggaagtccatggagaattaaccataacgcagttccatgcagttacagattgaatagaagtatgt

SEQ ID NO: 49002 - DNA, 600 bp, Chicken  19866894294690_1
ctcatttaacacatttgctacaaaagtttattgttttatttttctataatataaatcaaaatctgtttctttaataccacacttactttaaggttgggaaattatgtactattttcaaaggacaatgtctaacatagcgacagtctaagcaaaaattaaattaattcagtatcagtgaaaagaatatttgccactcaaatatgattgtgcatatcattagtttatacagctccattggatatcttgctgttttatacatcactcttcatctcagtataacagctattgtatgtttattcyatggctaggataagctgctgtatcacagataccaagagagaacaaactgagttaacagtgaggacataccccaccataaattttcataaataaactaagaaaaattggatagagcaagcagtggtgtttagttttaagagagaaaaaagtcaatgcagctgatggacttaaatgcgcttttcagtacgatattttcagcagaataactgcctcaattcacccacaaaatgtcctataaactttaatgagtagttcatgctgaggtcaataggctgatatgggactgtgttaatacagtgc

SEQ ID NO: 49003 - DNA, 599 bp, Chicken  19866894294692_1
  misc_feature (1)..(205): n is any nucleotide
nnnnnnnnnnnnnnnnnnnnnnnnnnnnnnnnnnnnnnnnnnnnnnnnnnnnnnnnnnnnnnnnnnnnnnnnnnnnnnnnnnnnnnnnnnnnnnnnnnnnnnnnnnnnnnnnnnnnnnnnnnnnnnnnnnnnnnnnnnnnnnnnnnnnnnnnnnnnnnnnnnnnnnnnnnnnnnnnnnnnnnnnnnnnnnnnnnnnnnnnnnnnntttgcagcccatgagttgtcggcatggtccaagaggagctcccaagtcctaactcctgacaactttaagtaactgttcagaagagagaggtaaawatctctagcatttcttgtagctctgtacctgtgctgtatttcttttttctcaccaargaacgcttgggacaagaagctggtgcctagagttgatcgtragctgctcaaacgtggcaggagttagagctgtatctgtcctccccttccacgatcctgtcagttyttgctttgttattgcagcttcagaagttcccgtaatcgagtttcctgctctagctggaaagaacaccaaacttctcttttttttcccagggccgttatacctgcttcctctctggtctctaccacctctcagggct

SEQ ID NO: 49004 - DNA, 599 bp, Chicken  19866894294692_2
  misc_feature (1)..(148): n is any nucleotide
nnnnnnnnnnnnnnnnnnnnnnnnnnnnnnnnnnnnnnnnnnnnnnnnnnnnnnnnnnnnnnnnnnnnnnnnnnnnnnnnnnnnnnnnnnnnnnnnnnnnnnnnnnnnnnnnnnnnnnnnnnnnnnnnnnnnnnnnnnnnnnnnnnnntttgcagcccatgagttgtcggcatggtccaagaggagctcccaagtcctaactcctgacaactttaagtaactgttcagaagagagaggtaaawatctctagcatttcttgtagctctgtacctgtgctgtatttcttttttctcaccaargaacgcttgggacaagaagctggtgcctagagttgatcgtragctgctcaaacgtggcaggagttagagctgtatctgtcctccccttccacgatcctgtcagttyttgctttgttattgcagcttcagaagttcccgtaatcgagtttcctgctctagctggaaagaacaccaaacttctcttttttttcccagggccgttatacctgcttcctctctggtctctaccacctctcagggcttggtttccgctttgctctggacttctgcaagagcccttttcatttctgtttttggtg

SEQ ID NO: 49005 - DNA, 599 bp, Chicken  19866894294692_3
  misc_feature (1)..(107): n is any nucleotide
nnnnnnnnnnnnnnnnnnnnnnnnnnnnnnnnnnnnnnnnnnnnnnnnnnnnnnnnnnnnnnnnnnnnnnnnnnnnnnnnnnnnnnnnnnnnnnnnnnnnnnnnnnntttgcagcccatgagttgtcggcatggtccaagaggagctcccaagtcctaactcctgacaactttaagtaactgttcagaagagagaggtaaawatctctagcatttcttgtagctctgtacctgtgctgtatttcttttttctcaccaargaacgcttgggacaagaagctggtgcctagagttgatcgtragctgctcaaacgtggcaggagttagagctgtatctgtcctccccttccacgatcctgtcagttyttgctttgttattgcagcttcagaagttcccgtaatcgagtttcctgctctagctggaaagaacaccaaacttctcttttttttcccagggccgttatacctgcttcctctctggtctctaccacctctcagggcttggtttccgctttgctctggacttctgcaagagcccttttcatttctgtttttggtgtgtggagccaggataaggtacaggaaacagctgctcagatc

SEQ ID NO: 49006 - DNA, 599 bp, Chicken  19866894294692_4
  misc_feature (1)..(42): n is any nucleotide
nnnnnnnnnnnnnnnnnnnnnnnnnnnnnnnnnnnnnnnnnntttgcagcccatgagttgtcggcatggtccaagaggagctcccaagtcctaactcctgacaactttaagtaactgttcagaagagagaggtaaawatctctagcatttcttgtagctctgtacctgtgctgtatttcttttttctcaccaargaacgcttgggacaagaagctggtgcctagagttgatcgtragctgctcaaacgtggcaggagttagagctgtatctgtcctccccttccacgatcctgtcagttyttgctttgttattgcagcttcagaagttcccgtaatcgagtttcctgctctagctggaaagaacaccaaacttctcttttttttcccagggccgttatacctgcttcctctctggtctctaccacctctcagggcttggtttccgctttgctctggacttctgcaagagcccttttcatttctgtttttggtgtgtggagccaggataaggtacaggaaacagctgctcagatcctgagcaacttgggtattggtgcctacatacagcactggttgtcagaatgacaacagttgtcggt

SEQ ID NO: 49007 - DNA, 421 bp, Chicken  19866894294692_5
gcttcagaagttcccgtaatcgagtttcctgctctagctggaaagaacaccaaacttctcttttttttcccagggccgttatacctgcttcctctctggtctctaccacctctcagggcttggtttccgctttgctctggacttctgcaagagcccttttcatttctgtttttggtgtgtggagccaggataaggtacaggaaacagctgctcagatcctgagcaacttgggtattggtgcctacatacagcactggttgtcagaatgacaacagttgtcggttctgtaacgtccaaaaygtgacagtggtcaaagatggcactgcaacagagattgtgacctttttcttttcaaagagactagattgtgctttagtcaacaaattgattcgtggcattagggctaaaagggggggggggg

SEQ ID NO: 49008 - DNA, 600 bp, Chicken  19866894294696_1
atttgatcaatatactgctgatctcccagaactatccagcagatatttctatttgtcactattagtatgatccttgaaatatgaaaaattaagcgtcacgacatcaaagtttttaatcacgaatatgataaggcacacctatgttacgactaactctaacatgagtttatcacttaaaattttggcttggtttctactttctatgttgccagcaagaagcttgctcttgacagatatctctgagaatgctttcttttgtacaatgttagttaccttctcaattatcaagagaaagaattmatctgcttccttaaagtagagccaatgagcctgtctagtaatggccaattatgaaaggatttgcttttcactccatgataaactagacatttatgtcctcatcatgatatttcttgtgaataaaacatgctgagcagctcatgatgaataacaaaatagcaaagaatttgctttttgtcctccaacatcttcaggattcttctctgattttcttcctttatttttattcaaccaaactcataccttaatgcagctgacaaatcacagataatatttcataatctcacacgctggcaaaat

SEQ ID NO: 49009 - DNA, 600 bp, Chicken  19866894294706_1
cttgtagtaatcatagttcagtttttaatatttgtcataggtggtatgtgtatcttaccctgtttttatgctggcatatcttaatgcagaattgttttaaagtgtgttagacttctgaaattcaagagtgtgtagtaggtgggaagatctgatagaactgatttttacttacggatttgcttgtctggtgctgttaattgaaaacttgcttccctttctgtttagagttgaacagcagctgaatggtaaacgttgggagttgaaacctaaatctgtattgcaggccttctaatgtgaacrtgggggtggaggaataggtaacccagtaattatattgattaatgttaagcctagttatatttccgtggtccttcaaagtgcagatagactgagtatttcaggcaatttcagcataagatttagtgcatcatagtttcaagatgctataaactgatctcttggtttgtttggtttttttttttagttgtttttttgttttcctgctaaggtctataagatcttgtataatatccttattctgtgttctctgcgttcatctttgaaaaattgggtttcattcttaaaaggttcactttttgt

SEQ ID NO: 49010 - DNA, 600 bp, Chicken  19866894294707_1
aatttcataaaatctttcgtttacattgtaggctattcatttttcctttctcagataggtatgatttaacctgtaacactcttgtattaaagaaattttcttctgctccaccaaaatcatgagtttggaagactgagaagggtgggaagatgtaggcatctaagtaaaacatatgttgaataggaagaaatcagtcatcctgagttctgggcctgtgattatttccacatgcctggattgtattgctgtgttgtgtgccattaatgtcattagatgctttatgtcggagtggatttttgyatatgctgatgagattgcaagattaggactgcactgggttgagtctgccaatgtggtttcaagggctgtaagtggaggtgagtatccttctagacccctcctccttatgccatgtgcccagcccagtgttccmcatagtgcccwtaaatgtctggttgggttacaagcttccaggcagcagggtttgtcctcagcccttytcaagaaaagcaaactgactaatcaaaccccaccttgtaaaaacggatatttaaaactgctgcttggtgttgraaggaggcgcaatgaaaaataagctca

SEQ ID NO: 49011 - DNA, 600 bp, Chicken  19866894294707_2
tgagaagggtgggaagatgtaggcatctaagtaaaacatatgttgaataggaagaaatcagtcatcctgagttctgggcctgtgattatttccacatgcctggattgtattgctgtgttgtgtgccattaatgtcattagatgctttatgtcggagtggatttttgyatatgctgatgagattgcaagattaggactgcactgggttgagtctgccaatgtggtttcaagggctgtaagtggaggtgagtatccttctagacccctcctccttatgccatgtgcccagcccagtgttccmcatagtgcccwtaaatgtctggttgggttacaagcttccaggcagcagggtttgtcctcagcccttytcaagaaaagcaaactgactaatcaaaccccaccttgtaaaaacggatatttaaaactgctgcttggtgttgraaggaggcgcaatgaaaaataagctcagygttcttgttcaaaggtgcctgtgtgtcggggagaaatgccagccttcccccattgtttgtcyctgggctgatctctgagaatgagaccttgggagccattgccattccatttggttcctggtgaaaggaaa

SEQ ID NO: 49012 - DNA, 600 bp, Chicken  19866894294707_3
ggaagatgtaggcatctaagtaaaacatatgttgaataggaagaaatcagtcatcctgagttctgggcctgtgattatttccacatgcctggattgtattgctgtgttgtgtgccattaatgtcattagatgctttatgtcggagtggatttttgyatatgctgatgagattgcaagattaggactgcactgggttgagtctgccaatgtggtttcaagggctgtaagtggaggtgagtatccttctagacccctcctccttatgccatgtgcccagcccagtgttccmcatagtgcccwtaaatgtctggttgggttacaagcttccaggcagcagggtttgtcctcagcccttytcaagaaaagcaaactgactaatcaaaccccaccttgtaaaaacggatatttaaaactgctgcttggtgttgraaggaggcgcaatgaaaaataagctcagygttcttgttcaaaggtgcctgtgtgtcggggagaaatgccagccttcccccattgtttgtcyctgggctgatctctgagaatgagaccttgggagccattgccattccatttggttcctggtgaaaggaaaagagatttgac

SEQ ID NO: 49013 - DNA, 600 bp, Chicken  19866894294707_4
tgagttctgggcctgtgattatttccacatgcctggattgtattgctgtgttgtgtgccattaatgtcattagatgctttatgtcggagtggatttttgyatatgctgatgagattgcaagattaggactgcactgggttgagtctgccaatgtggtttcaagggctgtaagtggaggtgagtatccttctagacccctcctccttatgccatgtgcccagcccagtgttccmcatagtgcccwtaaatgtctggttgggttacaagcttccaggcagcagggtttgtcctcagcccttytcaagaaaagcaaactgactaatcaaaccccaccttgtaaaaacggatatttaaaactgctgcttggtgttgraaggaggcgcaatgaaaaataagctcagygttcttgttcaaaggtgcctgtgtgtcggggagaaatgccagccttcccccattgtttgtcyctgggctgatctctgagaatgagaccttgggagccattgccattccatttggttcctggtgaaaggaaaagagatttgactgctccctccagataaaaatactgagaagaggagtcttctaggccagaaaacaact

SEQ ID NO: 49014 - DNA, 600 bp, Chicken  19866894294707_5
atgctttatgtcggagtggatttttgyatatgctgatgagattgcaagattaggactgcactgggttgagtctgccaatgtggtttcaagggctgtaagtggaggtgagtatccttctagacccctcctccttatgccatgtgcccagcccagtgttccmcatagtgcccwtaaatgtctggttgggttacaagcttccaggcagcagggtttgtcctcagcccttytcaagaaaagcaaactgactaatcaaaccccaccttgtaaaaacggatatttaaaactgctgcttggtgttgraaggaggcgcaatgaaaaataagctcagygttcttgttcaaaggtgcctgtgtgtcggggagaaatgccagccttcccccattgtttgtcyctgggctgatctctgagaatgagaccttgggagccattgccattccatttggttcctggtgaaaggaaaagagatttgactgctccctccagataaaaatactgagaagaggagtcttctaggccagaaaacaacttatttttctttccttgttttttttgttatttgagcctgccagattggtctctccaactgtgtgggcggcacag

SEQ ID NO: 49015 - DNA, 600 bp, Chicken  19866894294707_6
atgctgatgagattgcaagattaggactgcactgggttgagtctgccaatgtggtttcaagggctgtaagtggaggtgagtatccttctagacccctcctccttatgccatgtgcccagcccagtgttccmcatagtgcccwtaaatgtctggttgggttacaagcttccaggcagcagggtttgtcctcagcccttytcaagaaaagcaaactgactaatcaaaccccaccttgtaaaaacggatatttaaaactgctgcttggtgttgraaggaggcgcaatgaaaaataagctcagygttcttgttcaaaggtgcctgtgtgtcggggagaaatgccagccttcccccattgtttgtcyctgggctgatctctgagaatgagaccttgggagccattgccattccatttggttcctggtgaaaggaaaagagatttgactgctccctccagataaaaatactgagaagaggagtcttctaggccagaaaacaacttatttttctttccttgttttttttgttatttgagcctgccagattggtctctccaactgtgtgggcggcacagaagaggatgctgagacaaagaatggggga

SEQ ID NO: 49016 - DNA, 600 bp, Chicken  19866894294707_7
gctgtaagtggaggtgagtatccttctagacccctcctccttatgccatgtgcccagcccagtgttccmcatagtgcccwtaaatgtctggttgggttacaagcttccaggcagcagggtttgtcctcagcccttytcaagaaaagcaaactgactaatcaaaccccaccttgtaaaaacggatatttaaaactgctgcttggtgttgraaggaggcgcaatgaaaaataagctcagygttcttgttcaaaggtgcctgtgtgtcggggagaaatgccagccttcccccattgtttgtcyctgggctgatctctgagaatgagaccttgggagccattgccattccatttggttcctggtgaaaggaaaagagatttgactgctccctccagataaaaatactgagaagaggagtcttctaggccagaaaacaacttatttttctttccttgttttttttgttatttgagcctgccagattggtctctccaactgtgtgggcggcacagaagaggatgctgagacaaagaatgggggagggaggaaagaagtgaaaaagacctttggactagtggcatggtgcatgggaggaagaggaag

SEQ ID NO: 49017 - DNA, 600 bp, Chicken  19866894294708_1
acactaggaatgattcttctcttgtggtgttgtattccccaactgtgacccttgagcaactctaactaaattgtaactctttttcagatgtaattggaatttgtaagagctatgaagatgtcactaaaattgtagtgaaagctagcaatagggaggtatcgaagaggaatgtgcatctgatggatacatcagggaaactggtgacagctacgctatggggaaatgaggtatgtgctctcttacctgttcttaagcaaaggtttctttgtgatggtgaagaaatacacactgttgtcatcyaagatgggcacagwactgagacagagtcttaggtgttggaggatcaggggtagaaagaaggtgaaagactgtctggtttcattcaggtgtgatgttcgtaacctttttctgacagactgctgacatgatctgactaatgtgttctgaacaactgcagacatgatgtctcaggcacaaagactgtagataacaggtttctggtttagaaaaggatatgtgttgtggttcgatcatggaaaagcccgatggctacagatgtcttgtttgcaaggagctctattctcagggtagggtacttgt

SEQ ID NO: 49018 - DNA, 600 bp, Chicken  19866894294708_2
tcttctcttgtggtgttgtattccccaactgtgacccttgagcaactctaactaaattgtaactctttttcagatgtaattggaatttgtaagagctatgaagatgtcactaaaattgtagtgaaagctagcaatagggaggtatcgaagaggaatgtgcatctgatggatacatcagggaaactggtgacagctacgctatggggaaatgaggtatgtgctctcttacctgttcttaagcaaaggtttctttgtgatggtgaagaaatacacactgttgtcatcyaagatgggcacagwactgagacagagtcttaggtgttggaggatcaggggtagaaagaaggtgaaagactgtctggtttcattcaggtgtgatgttcgtaacctttttctgacagactgctgacatgatctgactaatgtgttctgaacaactgcagacatgatgtctcaggcacaaagactgtagataacaggtttctggtttagaaaaggatatgtgttgtggttcgatcatggaaaagcccgatggctacagatgtcttgtttgcaaggagctctattctcagggtagggtacttgttacctgaataaact

SEQ ID NO: 49019 - DNA, 600 bp, Chicken  19866894294708_3
acagactgctgacatgatctgactaatgtgttctgaacaactgcagacatgatgtctcaggcacaaagactgtagataacaggtttctggtttagaaaaggatatgtgttgtggttcgatcatggaaaagcccgatggctacagatgtcttgtttgcaaggagctctattctcagggtagggtacttgttacctgaataaactgctgcttaactaggggtttgaaaggctgtatctcagactaagagtttaaaatgtcagagctttgggaatggaaagtttgtgtagttactgtgaaccrctcgtttatcttgataacagactgctttgttctccgtggtgtagatacgtggggatttatgtgctggtccataaaatgggagtcatcctgccagactggcaatggtgcctcgtggctaaatgatcaagtgctctgatactgtaggtggctgaacattgttaaccatctgctgatgtaaatgaagtaaactgaggttctgtattgtaaagttttgaggttgaaccagcttgttactggagaggttactagttatgaacatcttgtgtaactctcagatcaggggtctgtaattaagaaagt

SEQ ID NO: 49020 - DNA, 600 bp, Chicken  19866894294717_1
cactcagtgtggcccaggtaagccaaaaggtttgacacccatgtcataaagagtctgcaataatgccttgggcattcttactctttcagtaagtcagtctcccactgattactctacatagagaagaaacagcaaagttactgaaaagtgacaatggtcgaagtgctgtataacttacgagatcataaaattaatcttttgaaaatgagactttagagagtttgcaaaaatatttttttagaatagaagaattgtatttcagatattcagtgctagagcacaagtataaagggaaatttygtagacaaagaaatagttttrttctctccatatgaaaaataaataaaaactgttatagaaaggagattaaaatggtaaaagacagtaccaatatagagatttgtcatttatctgtctttggatcactgccacagtatggctgccttcactcaagataagcgatgattataatatcattaaaaaaagaaaaagaaaagaaaaagcagacgaaagctctcatctagtattctcaaaacacactctttttattttcatttctcttcctcaaagcttttccctaataattattttgacatctga

SEQ ID NO: 49021 - DNA, 600 bp, Chicken  19866894294717_2
gccaaaaggtttgacacccatgtcataaagagtctgcaataatgccttgggcattcttactctttcagtaagtcagtctcccactgattactctacatagagaagaaacagcaaagttactgaaaagtgacaatggtcgaagtgctgtataacttacgagatcataaaattaatcttttgaaaatgagactttagagagtttgcaaaaatatttttttagaatagaagaattgtatttcagatattcagtgctagagcacaagtataaagggaaatttygtagacaaagaaatagttttrttctctccatatgaaaaataaataaaaactgttatagaaaggagattaaaatggtaaaagacagtaccaatatagagatttgtcatttatctgtctttggatcactgccacagtatggctgccttcactcaagataagcgatgattataatatcattaaaaaaagaaaaagaaaagaaaaagcagacgaaagctctcatctagtattctcaaaacacactctttttattttcatttctcttcctcaaagcttttccctaataattattttgacatctgacttttgccctagggggatatt

SEQ ID NO: 49022 - DNA, 599 bp, Chicken  19866894294720_1
  misc_feature (1)..(212): n is any nucleotide
nnnnnnnnnnnnnnnnnnnnnnnnnnnnnnnnnnnnnnnnnnnnnnnnnnnnnnnnnnnnnnnnnnnnnnnnnnnnnnnnnnnnnnnnnnnnnnnnnnnnnnnnnnnnnnnnnnnnnnnnnnnnnnnnnnnnnnnnnnnnnnnnnnnnnnnnnnnnnnnnnnnnnnnnnnnnnnnnnnnnnnnnnnnnnnnnnnnnnnnnnnnnnnnnnnnnttactcgagaaacattttcagttggctgtaattgcagacagcttcttgggaaaaaaaaattctcttatgcacaacagttcaaaacctyaattagttctctaattattacaccctccagctacagtgtataaaatccatgttacaygaaaaaatatatttattttaaattatttcaagcaagtggaatacaaaaatctcagagatcccaagagacaggaaatatatgcartaacactcatgtttgtaagagattaattcatccttaaatcataaggaacaagagaggtgctatatggcacaaagggaacaagattataaatttcaatgcagatcaatctaccctgaaatgtgaggtacttttaagaggaagaatgaagaacatctcat

SEQ ID NO: 49023 - DNA, 599 bp, Chicken  19866894294720_2
  misc_feature (1)..(155): n is any nucleotide
nnnnnnnnnnnnnnnnnnnnnnnnnnnnnnnnnnnnnnnnnnnnnnnnnnnnnnnnnnnnnnnnnnnnnnnnnnnnnnnnnnnnnnnnnnnnnnnnnnnnnnnnnnnnnnnnnnnnnnnnnnnnnnnnnnnnnnnnnnnnnnnnnnnnnnnnnnnttactcgagaaacattttcagttggctgtaattgcagacagcttcttgggaaaaaaaaattctcttatgcacaacagttcaaaacctyaattagttctctaattattacaccctccagctacagtgtataaaatccatgttacaygaaaaaatatatttattttaaattatttcaagcaagtggaatacaaaaatctcagagatcccaagagacaggaaatatatgcartaacactcatgtttgtaagagattaattcatccttaaatcataaggaacaagagaggtgctatatggcacaaagggaacaagattataaatttcaatgcagatcaatctaccctgaaatgtgaggtacttttaagaggaagaatgaagaacatctcataaaacatttcaaaggcactaaagcctaggggttcctacccttaggagaatgctaagg

SEQ ID NO: 49024 - DNA, 599 bp, Chicken  19866894294720_3
  misc_feature (1)..(71): n is any nucleotide
nnnnnnnnnnnnnnnnnnnnnnnnnnnnnnnnnnnnnnnnnnnnnnnnnnnnnnnnnnnnnnnnnnnnnnnttactcgagaaacattttcagttggctgtaattgcagacagcttcttgggaaaaaaaaattctcttatgcacaacagttcaaaacctyaattagttctctaattattacaccctccagctacagtgtataaaatccatgttacaygaaaaaatatatttattttaaattatttcaagcaagtggaatacaaaaatctcagagatcccaagagacaggaaatatatgcartaacactcatgtttgtaagagattaattcatccttaaatcataaggaacaagagaggtgctatatggcacaaagggaacaagattataaatttcaatgcagatcaatctaccctgaaatgtgaggtacttttaagaggaagaatgaagaacatctcataaaacatttcaaaggcactaaagcctaggggttcctacccttaggagaatgctaagggaaggttttactgctgtttccacctaacggtatcattagatctacacctaatacatcatacgaagccagatccttttcagaagt

SEQ ID NO: 49025 - DNA, 600 bp, Chicken  19866894294721_1
cttctccctaagttgaacttatcaaaacagtaaacgctgttaaaaattcagactaacttcagttatgattacttgaaaagcacccttattttgtttgtttgtttgttttttaacatggcttctagagaaagactttcagaaaaaaagaaaaaaaaaagaaaaaaaaaagcctacgcagtatttggaagctaaaatccattacagtaagcttgaaactatttacacacacattcccagttccacaacactgcagcccacttcaggctgcacccaagactggtgattcacttaagctcatarttcatatcatacctctcccacaaatcctcacccgaatgctgccatcataacttcctgaatagcactattttctttctgattwtactaagttgcttttcctacataaggaaacaagatgtagggctgaggctggccttaaggaggcaatgcctagggtatcactgaggttggtgactgctttctacctcatttcaggccctgaggagatgctgaagacaagagctgtgcaggatgaaggtcctctgtgagtcttgctgtggaaacggctgtctatgggatgaagtgaaccctgtgagagat

SEQ ID NO: 49026 - DNA, 600 bp, Chicken  19866894294721_2
cccttattttgtttgtttgtttgttttttaacatggcttctagagaaagactttcagaaaaaaagaaaaaaaaaagaaaaaaaaaagcctacgcagtatttggaagctaaaatccattacagtaagcttgaaactatttacacacacattcccagttccacaacactgcagcccacttcaggctgcacccaagactggtgattcacttaagctcatarttcatatcatacctctcccacaaatcctcacccgaatgctgccatcataacttcctgaatagcactattttctttctgattwtactaagttgcttttcctacataaggaaacaagatgtagggctgaggctggccttaaggaggcaatgcctagggtatcactgaggttggtgactgctttctacctcatttcaggccctgaggagatgctgaagacaagagctgtgcaggatgaaggtcctctgtgagtcttgctgtggaaacggctgtctatgggatgaagtgaaccctgtgagagataggaccctacagsaaaaaagggctcttaccgaactagaggtgggagccctgaggggagcagctctgtgaggtatgccctggt

SEQ ID NO: 49027 - DNA, 600 bp, Chicken  19866894294721_3
tctcccacaaatcctcacccgaatgctgccatcataacttcctgaatagcactattttctttctgattwtactaagttgcttttcctacataaggaaacaagatgtagggctgaggctggccttaaggaggcaatgcctagggtatcactgaggttggtgactgctttctacctcatttcaggccctgaggagatgctgaagacaagagctgtgcaggatgaaggtcctctgtgagtcttgctgtggaaacggctgtctatgggatgaagtgaaccctgtgagagataggaccctacagsaaaaaagggctcttaccgaactagaggtgggagccctgaggggagcagctctgtgaggtatgccctggtgaaggcctgtgaggagatgaggatgctgcccgatggatctgaggcctcacaagggcaaagcaggagccctggatgaaaagatggagcccaggaggggccggagcttcggagccgggcactgcggggaagagcagcccttttggggccggggactgtggggaggaacggccttgaggagcagagccggcatcgcgccttcccgccggtaaccttgacaacgggtcgagtgaa

SEQ ID NO: 49028 - DNA, 600 bp, Chicken  19866894294734_1
ttaccttactggatttgtgctggttttgattgaaaaaggctgaaagtaaaacttctgcaaactttacctgacaaaagaagtatgccgagtattcatgaagtctatttcactgtgtgaagtgttcacacagtaaactgtcagcagtacaaaacactgagcttgaggaagcttggtttaggcataaattatttcttgtttctttattgcctaaaggaaagagtgttttcttgtctactacagacataaaataatttaaattgtggctataaagtaaatttgaatagaaatcagaaaaatttyagtgatgatagtaatgaaacattggagtagattgcctggargacattamaaagtttccattgctggatgcctttaacagattaaatgcctttayrtaatattacaagygcgctgtttggaggactggattaagtgaagtcccttctaattttattatgactaatatttttaattaggcttagtcatgacaaaattggttgagaaaaatgtcagtagagctgggctagctagatagttctgtgactcaaatactacaattttttttctaatttaatagtctctgagaacatgggctgaaaa

SEQ ID NO: 49029 - DNA, 600 bp, Chicken  19866894294734_2
gaaagtaaaacttctgcaaactttacctgacaaaagaagtatgccgagtattcatgaagtctatttcactgtgtgaagtgttcacacagtaaactgtcagcagtacaaaacactgagcttgaggaagcttggtttaggcataaattatttcttgtttctttattgcctaaaggaaagagtgttttcttgtctactacagacataaaataatttaaattgtggctataaagtaaatttgaatagaaatcagaaaaatttyagtgatgatagtaatgaaacattggagtagattgcctggargacattamaaagtttccattgctggatgcctttaacagattaaatgcctttayrtaatattacaagygcgctgtttggaggactggattaagtgaagtcccttctaattttattatgactaatatttttaattaggcttagtcatgacaaaattggttgagaaaaatgtcagtagagctgggctagctagatagttctgtgactcaaatactacaattttttttctaatttaatagtctctgagaacatgggctgaaaaattcagagttttaattaacttttcaagtgggttgcaaatgc

SEQ ID NO: 49030 - DNA, 600 bp, Chicken  19866894294734_3
aacttctgcaaactttacctgacaaaagaagtatgccgagtattcatgaagtctatttcactgtgtgaagtgttcacacagtaaactgtcagcagtacaaaacactgagcttgaggaagcttggtttaggcataaattatttcttgtttctttattgcctaaaggaaagagtgttttcttgtctactacagacataaaataatttaaattgtggctataaagtaaatttgaatagaaatcagaaaaatttyagtgatgatagtaatgaaacattggagtagattgcctggargacattamaaagtttccattgctggatgcctttaacagattaaatgcctttayrtaatattacaagygcgctgtttggaggactggattaagtgaagtcccttctaattttattatgactaatatttttaattaggcttagtcatgacaaaattggttgagaaaaatgtcagtagagctgggctagctagatagttctgtgactcaaatactacaattttttttctaatttaatagtctctgagaacatgggctgaaaaattcagagttttaattaacttttcaagtgggttgcaaatgcaaatacct

SEQ ID NO: 49031 - DNA, 600 bp, Chicken  19866894294734_4
atgaagtctatttcactgtgtgaagtgttcacacagtaaactgtcagcagtacaaaacactgagcttgaggaagcttggtttaggcataaattatttcttgtttctttattgcctaaaggaaagagtgttttcttgtctactacagacataaaataatttaaattgtggctataaagtaaatttgaatagaaatcagaaaaatttyagtgatgatagtaatgaaacattggagtagattgcctggargacattamaaagtttccattgctggatgcctttaacagattaaatgcctttayrtaatattacaagygcgctgtttggaggactggattaagtgaagtcccttctaattttattatgactaatatttttaattaggcttagtcatgacaaaattggttgagaaaaatgtcagtagagctgggctagctagatagttctgtgactcaaatactacaattttttttctaatttaatagtctctgagaacatgggctgaaaaattcagagttttaattaacttttcaagtgggttgcaaatgcaaatacctgtttgaaaaagatgaattctagtaactagaatctcaaaactgtgt

SEQ ID NO: 49032 - DNA, 600 bp, Chicken  19866894294734_5
tgaagtctatttcactgtgtgaagtgttcacacagtaaactgtcagcagtacaaaacactgagcttgaggaagcttggtttaggcataaattatttcttgtttctttattgcctaaaggaaagagtgttttcttgtctactacagacataaaataatttaaattgtggctataaagtaaatttgaatagaaatcagaaaaatttyagtgatgatagtaatgaaacattggagtagattgcctggargacattamaaagtttccattgctggatgcctttaacagattaaatgcctttayrtaatattacaagygcgctgtttggaggactggattaagtgaagtcccttctaattttattatgactaatatttttaattaggcttagtcatgacaaaattggttgagaaaaatgtcagtagagctgggctagctagatagttctgtgactcaaatactacaattttttttctaatttaatagtctctgagaacatgggctgaaaaattcagagttttaattaacttttcaagtgggttgcaaatgcaaatacctgtttgaaaaagatgaattctagtaactagaatctcaaaactgtgtt

SEQ ID NO: 49033 - DNA, 600 bp, Chicken  19866894294734_6
actgtgtgaagtgttcacacagtaaactgtcagcagtacaaaacactgagcttgaggaagcttggtttaggcataaattatttcttgtttctttattgcctaaaggaaagagtgttttcttgtctactacagacataaaataatttaaattgtggctataaagtaaatttgaatagaaatcagaaaaatttyagtgatgatagtaatgaaacattggagtagattgcctggargacattamaaagtttccattgctggatgcctttaacagattaaatgcctttayrtaatattacaagygcgctgtttggaggactggattaagtgaagtcccttctaattttattatgactaatatttttaattaggcttagtcatgacaaaattggttgagaaaaatgtcagtagagctgggctagctagatagttctgtgactcaaatactacaattttttttctaatttaatagtctctgagaacatgggctgaaaaattcagagttttaattaacttttcaagtgggttgcaaatgcaaatacctgtttgaaaaagatgaattctagtaactagaatctcaaaactgtgtttaggtcaaataag

SEQ ID NO: 49034 - DNA, 600 bp, Chicken  19866894294740_1
acaaatctatttgccttaggatattacatgcttgctaacttgtcactgctctatctaatggcattacctaaaatagtatgcaggtatacttgccaccaagaatttctattacagtaaaacctaaataaaaacacaatcatgctttggaaaagtgttttgaaggctgtcaaaacagaattgtcagaacagtttggtgaataactgcataagaaccaccttcacccactttcaaaaaaaaaaaaaaggagggggtcttctctaactctaaccttaagactgctttctcctgacagtttgtaytggggtgagggggtgggaagaaaaaaaccaaactaatgtcagactgcatttggcatgtatatttacttttcatgagactgttgctgtgaaagtaccacccacgttcgtagcattgagaaataataccaacagcaaagggaaaaacagcattgttcacagtaccattttcagaatgaaggaggggctgccgttcctgtgggaaatccgttattcctctgtcctcagtgcaataggacagcctcaaatgcttagctttaactgagtgaccgcaatgtgactaaaggatttgctaaaggatcc

SEQ ID NO: 49035 - DNA, 600 bp, Chicken  19866894294742_1
ttaagctaagccggtagtgtacgatcacaaaccaaaacatcaagctgtgcaattaagacctatacaaaatctatcaccacagtggagagtacaaatgaaaacatggaatatataaattatatacatacttactgagagtaagcccatatgtgtaaacaatcacttatgggatcaagttctgctattaattacgaagaccaaaatctggcagaaaccaagggtgtttcagattcagttgtgactgtgctaatttaatagcaaattcaaagtcaattaaaaaaaactcaactcaaagagaaygttctgcatgacactcaatctccaagtgacatctgtccacaacaaatagaggaatcaaagtttttgtgcctcgatataagttcaacagaactacagaaccaaaaaaatttatctggctgctagggatttgcaatttcacattcattaactggataaaaggagtaaagtctcaaactgactgacaccactcgagttttgatttttcatgctgagaatgaaagaattcagacaggggcgagcttaaaaaacacccagttccactttagggattgacatagggattttagatatagcaagcat

SEQ ID NO: 49036 - DNA, 600 bp, Chicken  19866894294750_1
agtaatctctggcaataaacacacatatttttcttttcaagatggtttatgatcagtgatttcagtccactgcacattaccctaccacatgtcctgaactgcttgggacaatcccagattaggaaacgcattcacaggtcttgcacaaagactactttatacagaaataacaaaatgtcctaacatctgttcaaggcccgtttagtaataaacacataaaccttgacactttcaaggaaggccttctacctagaaggtaccattatctctgggagatgagggagccaactggctttgcayacacatactttgttctaaactaaatcttaatttcatggatgttattacagaagccattaaattctgtccttgctttcaagggagaagaccttagcttaagttgaaygacacatttgtgtggcagatttaaaatacacaggtgaartgtgaacccacaaaattacaaaagattgtcrtacattgtgggaagggagattgttaacaaggaaaaggaaaaacagcgaagccatccctacaccatggtgtctacagtcagtctcttaagagaccacgagtttcccaagaaagaagcacagtggc

SEQ ID NO: 49037 - DNA, 600 bp, Chicken  19866894294750_2
gacaatcccagattaggaaacgcattcacaggtcttgcacaaagactactttatacagaaataacaaaatgtcctaacatctgttcaaggcccgtttagtaataaacacataaaccttgacactttcaaggaaggccttctacctagaaggtaccattatctctgggagatgagggagccaactggctttgcayacacatactttgttctaaactaaatcttaatttcatggatgttattacagaagccattaaattctgtccttgctttcaagggagaagaccttagcttaagttgaaygacacatttgtgtggcagatttaaaatacacaggtgaartgtgaacccacaaaattacaaaagattgtcrtacattgtgggaagggagattgttaacaaggaaaaggaaaaacagcgaagccatccctacaccatggtgtctacagtcagtctcttaagagaccacgagtttcccaagaaagaagcacagtggcagtagtatgggttattgctctttgacatttacagctttgattttagactagaaggagggtttatgcacttaaaaggccgagagccttttttttcttcgcagtgatg

SEQ ID NO: 49038 - DNA, 600 bp, Chicken  19866894294750_3
caaagactactttatacagaaataacaaaatgtcctaacatctgttcaaggcccgtttagtaataaacacataaaccttgacactttcaaggaaggccttctacctagaaggtaccattatctctgggagatgagggagccaactggctttgcayacacatactttgttctaaactaaatcttaatttcatggatgttattacagaagccattaaattctgtccttgctttcaagggagaagaccttagcttaagttgaaygacacatttgtgtggcagatttaaaatacacaggtgaartgtgaacccacaaaattacaaaagattgtcrtacattgtgggaagggagattgttaacaaggaaaaggaaaaacagcgaagccatccctacaccatggtgtctacagtcagtctcttaagagaccacgagtttcccaagaaagaagcacagtggcagtagtatgggttattgctctttgacatttacagctttgattttagactagaaggagggtttatgcacttaaaaggccgagagccttttttttcttcgcagtgatggccatcacgctaataaaatattacttctcccttataaac

SEQ ID NO: 49039 - DNA, 600 bp, Chicken  19866894294750_4
gtcctaacatctgttcaaggcccgtttagtaataaacacataaaccttgacactttcaaggaaggccttctacctagaaggtaccattatctctgggagatgagggagccaactggctttgcayacacatactttgttctaaactaaatcttaatttcatggatgttattacagaagccattaaattctgtccttgctttcaagggagaagaccttagcttaagttgaaygacacatttgtgtggcagatttaaaatacacaggtgaartgtgaacccacaaaattacaaaagattgtcrtacattgtgggaagggagattgttaacaaggaaaaggaaaaacagcgaagccatccctacaccatggtgtctacagtcagtctcttaagagaccacgagtttcccaagaaagaagcacagtggcagtagtatgggttattgctctttgacatttacagctttgattttagactagaaggagggtttatgcacttaaaaggccgagagccttttttttcttcgcagtgatggccatcacgctaataaaatattacttctcccttataaacttgcagctctgactgtcatgtacctgtagca

SEQ ID NO: 49040 - DNA, 599 bp, Chicken  19866894294757_1
  misc_feature (1)..(16): n is any nucleotide
nnnnnnnnnnnnnnnntttccagatttctgctgccatctgcttgccagcagcttacttgctgtgcatgctacaaaagtaattgctgcacgtttcaagttctgacagtagacaactccctcaaaaaactaaaactactgaaaaataagcccacagggattcaaagtgtaaaagctgctctgtactacctctgtgtattgatcctccttgccaagtaagattgcagttcagtgcagactaaatgctggaagctatcacagaatattaattccagttccaccacagtaatagaccccagcacygtctgctcctctcacacacatttccccgttagggttaaaatcttaacagattacagatcctctcttctgcctaatctctttatttatctgccaggacaataacacataggtcaatcatttactcatactaactcacttttatggcaaaaaatggagcctatctccccttggtgaactgcacctagccaaaacgattccatgctatgattctgtgactccattctatgaaaggggtatattttgatgaaggaattagtaatggaggcagaaagatctttgcataacaagtagcatagact

SEQ ID NO: 49041 - DNA, 600 bp, Chicken  19866894294757_2
ttacagatcctctcttctgcctaatctctttatttatctgccaggacaataacacataggtcaatcatttactcatactaactcacttttatggcaaaaaatggagcctatctccccttggtgaactgcacctagccaaaacgattccatgctatgattctgtgactccattctatgaaaggggtatattttgatgaaggaattagtaatggaggcagaaagatctttgcataacaagtagcatagactttgcgtgtaacactgtgtgcggtgagcagattttgaatctgtacacgtgtkcaaagcatgaagtccctgtttggcactacctgtgtttgaagaagccagtccaaaagggtttcagctggcgtaaagactgttggtcactgacgtctgtttttgttcagtggtttcaatcctactacgtttatttgtgactatttcaaattggatctcttttccacactgctacagaagaaactactaacttctctgagttggtgtctgtttttcagcctattttcatgtgttatattcccaagtgaatctgcatggaagataaaatctaaatacgtacaaaggaacatctatatattcata

SEQ ID NO: 49042 - DNA, 600 bp, Chicken  19866894294759_1
atgtccttagcagtatcagagaaaccgctctggtagggctgcaaattgaaagttgtgtgttgtgggttggctttcataaatggagctgtgacctcagagaggttaaatgattaatttgtcatggaaaaacagtgggatggtagcacaggccagagagagctgaggaagctgccagcattacatcaaatactgctgctgtccggttggcatctctgtatgtgaacctggcttggcacagagtgcgagatactggagaggctttaaagggccacatctccaaaactgaggtttgaagcataygaatgaaaagaaggatgggaaataataagggaaaggatcttcatctccacagaaatctcagagactaacccaccatggccaaagtggatccattaacaatcacccataaggagctgtgcaggacacagaggccccagagagagcaaggacacacaccagcttcacctggcagcaaacccaatggtttaacatgtgacatcagctgccaacatcacagaaaccaccgcagcaattaacagacctggtgcctggcagcatctgctggagatgataagcatcgctcaacaggaagacttcagc

SEQ ID NO: 49043 - DNA, 600 bp, Chicken  19866894294760_1
ttacagtcccaggtcagtgcaggactgcttggtaccctctggcagatcaccacattgtgctacagggacagaattgccgattagttcagaaagtggtccctgtcaagcaaagctataagctagttccttgatttggaaagctttcaataacctgagcatttcaaaagattggccttttccagccaagacactgatgcttaaagattttcgttagcagtctatcttggcaaagatttctgcttcctgcaccagcatgctggaactgagaaatctctctgtgcataacttcttgtcatgttyccccaatagtccttaagtagaagtagggagcgggttatagtggagtggattttgtatatcagaagacagaaagagcagagagctagaagaatgcacaaatttcacgtggcagaggattcccagcctgctgttgcgtatatacccacagaaagwaatgtttgtggagcyagtggtagaggaggaatgtgatttggaaagcagatatctaatctcacaraggccattgacttttagtgtttatgagatttccgacatcmttgctccctcagagcatcagtcacaatatctgtgtgaatgtgg

SEQ ID NO: 49044 - DNA, 600 bp, Chicken  19866894294760_2
gagcatttcaaaagattggccttttccagccaagacactgatgcttaaagattttcgttagcagtctatcttggcaaagatttctgcttcctgcaccagcatgctggaactgagaaatctctctgtgcataacttcttgtcatgttyccccaatagtccttaagtagaagtagggagcgggttatagtggagtggattttgtatatcagaagacagaaagagcagagagctagaagaatgcacaaatttcacgtggcagaggattcccagcctgctgttgcgtatatacccacagaaagwaatgtttgtggagcyagtggtagaggaggaatgtgatttggaaagcagatatctaatctcacaraggccattgacttttagtgtttatgagatttccgacatcmttgctccctcagagcatcagtcacaatatctgtgtgaatgtggctctctcacgctccaatctgaacatttaaatcagcaccctgaaagtcatttccattttggccttaaagagaacatcagctatttgaggtgcttagcaataggacaaagcttcccttgtgctgtggacagcttatcacacttgctaggtttgtg

SEQ ID NO: 49045 - DNA, 600 bp, Chicken  19866894294760_3
ttggccttttccagccaagacactgatgcttaaagattttcgttagcagtctatcttggcaaagatttctgcttcctgcaccagcatgctggaactgagaaatctctctgtgcataacttcttgtcatgttyccccaatagtccttaagtagaagtagggagcgggttatagtggagtggattttgtatatcagaagacagaaagagcagagagctagaagaatgcacaaatttcacgtggcagaggattcccagcctgctgttgcgtatatacccacagaaagwaatgtttgtggagcyagtggtagaggaggaatgtgatttggaaagcagatatctaatctcacaraggccattgacttttagtgtttatgagatttccgacatcmttgctccctcagagcatcagtcacaatatctgtgtgaatgtggctctctcacgctccaatctgaacatttaaatcagcaccctgaaagtcatttccattttggccttaaagagaacatcagctatttgaggtgcttagcaataggacaaagcttcccttgtgctgtggacagcttatcacacttgctaggtttgtgtgttagggtttgctt

SEQ ID NO: 49046 - DNA, 600 bp, Chicken  19866894294760_4
tctatcttggcaaagatttctgcttcctgcaccagcatgctggaactgagaaatctctctgtgcataacttcttgtcatgttyccccaatagtccttaagtagaagtagggagcgggttatagtggagtggattttgtatatcagaagacagaaagagcagagagctagaagaatgcacaaatttcacgtggcagaggattcccagcctgctgttgcgtatatacccacagaaagwaatgtttgtggagcyagtggtagaggaggaatgtgatttggaaagcagatatctaatctcacaraggccattgacttttagtgtttatgagatttccgacatcmttgctccctcagagcatcagtcacaatatctgtgtgaatgtggctctctcacgctccaatctgaacatttaaatcagcaccctgaaagtcatttccattttggccttaaagagaacatcagctatttgaggtgcttagcaataggacaaagcttcccttgtgctgtggacagcttatcacacttgctaggtttgtgtgttagggtttgctttgtgggaagctgaggagaaagttttacgtgaaattatgaagttgcaata

SEQ ID NO: 49047 - DNA, 600 bp, Chicken  19866894294760_5
tggaactgagaaatctctctgtgcataacttcttgtcatgttyccccaatagtccttaagtagaagtagggagcgggttatagtggagtggattttgtatatcagaagacagaaagagcagagagctagaagaatgcacaaatttcacgtggcagaggattcccagcctgctgttgcgtatatacccacagaaagwaatgtttgtggagcyagtggtagaggaggaatgtgatttggaaagcagatatctaatctcacaraggccattgacttttagtgtttatgagatttccgacatcmttgctccctcagagcatcagtcacaatatctgtgtgaatgtggctctctcacgctccaatctgaacatttaaatcagcaccctgaaagtcatttccattttggccttaaagagaacatcagctatttgaggtgcttagcaataggacaaagcttcccttgtgctgtggacagcttatcacacttgctaggtttgtgtgttagggtttgctttgtgggaagctgaggagaaagttttacgtgaaattatgaagttgcaataaaatagagcgtgatatgttacataatgagagtctctgtaa

SEQ ID NO: 49048 - DNA, 600 bp, Chicken  19866894294761_1
tttgactgcagtgagaattatttccatgctcagccgagcttgcatttttttctcagtgcatctttcattctgaacatcttatgcttactttttggataactgcaacctctgtagtgctttatctcagaatgcagttttggaccatctcccttcaagaaaagctaagctacacagaacagcccttccaggttgcagtatgagctaccagaagagctactgctgctcgagtgtctctgtgccgtgcaccgctggatggccaggcttggtgtcaacaaacaagcccatgggcccactgtttgyagctccagtgccaaggcttaattggagaagggacactgttaatcagaaccaggaatcattgggctgacttgccaagtcagactaagaggagtttatatggtcgttctgaggacttagcataaagcatctggacatgcaagacatcggtacgtaaacacgatatgccctgatgttttagttattttggcctgcagcagcgaagaacattttaaaggccggatcctttgtagtgctgaataccctcaacaccagttgtactcgtcagaacccaccgtgctcggcgccttcccatgaggtgcc

SEQ ID NO: 49049 - DNA, 600 bp, Chicken  19866894294768_1
ttttgatatgaaatgatactgtgaaagtacacacaaagcacttccattcatcagcaatttgctgctgttaggctgcacttgtttttactttcagattacaaagtgcaggtatgcttcatgcagcatttaacaagtggtagtattttcatgagagtgtggtattttctatagaaaaaacaatgttgtaatgctgagtaccttcaattaaaaaaaaacacctgaaacataatacggcctaacaattgtccccacatttttcttctttaattaagaggaaaacattgtttgcagttacaacgkttcttcaaggttatttaagcatttgagtgttctgtttactgtactgattctgacttgctttgccaagcctaacaaattttatgtcattgctttgatagtctaccattccttctgttcaacacgtggtttcctgagcatatggatgtgatatttcatattccacataatagctcttgttaaaactccagttttcctgcaagtcttagttcttttgccttctatatatcctactatctccaatctggccctcctataacaagtccaaggccatcataacaattttaaatccttctactgttt

SEQ ID NO: 49050 - DNA, 599 bp, Chicken  19866894294769_1
  misc_feature (1)..(121): n is any nucleotide
nnnnnnnnnnnnnnnnnnnnnnnnnnnnnnnnnnnnnnnnnnnnnnnnnnnnnnnnnnnnnnnnnnnnnnnnnnnnnnnnnnnnnnnnnnnnnnnnnnnnnnnnnnnnnnnnnnnnnnnnntctcttctgcatttttctagttctctgggttgtattttttaacgctttttctcacaagagaacaaagaattgctgtgcaagaaaagaccccttggtccagcatgcctgtccccttgagggttatccttttataacgagtgtttctctgcatatagcatctttcccttcaatagcatgtytcccttactggaaaatctttctcaaactccttttcatgccattggctttgatggtgttatttagcaaattattccatatrttgcctattagattttaagctaagtatttgttccygaaatccagatcactgttcctttgcaacttgtaaatgacactctgaggtgtgtgaggttctcttttttcccttactttcaagcactcccagagataaacattttatttttcctaaagaatggtaatcacattgaaaagggcacaaaaaatgttgtgttaccacttcaatgacatggtctgcaca

SEQ ID NO: 49051 - DNA, 599 bp, Chicken  19866894294769_2
  misc_feature (1)..(41): n is any nucleotide
nnnnnnnnnnnnnnnnnnnnnnnnnnnnnnnnnnnnnnnnntctcttctgcatttttctagttctctgggttgtattttttaacgctttttctcacaagagaacaaagaattgctgtgcaagaaaagaccccttggtccagcatgcctgtccccttgagggttatccttttataacgagtgtttctctgcatatagcatctttcccttcaatagcatgtytcccttactggaaaatctttctcaaactccttttcatgccattggctttgatggtgttatttagcaaattattccatatrttgcctattagattttaagctaagtatttgttccygaaatccagatcactgttcctttgcaacttgtaaatgacactctgaggtgtgtgaggttctcttttttcccttactttcaagcactcccagagataaacattttatttttcctaaagaatggtaatcacattgaaaagggcacaaaaaatgttgtgttaccacttcaatgacatggtctgcacagcgtgaaatgttaccgtggacaatttgtgttctagttgcttgctgatttatcctaaaacatgcattcccttctcttatat

SEQ ID NO: 49052 - DNA, 599 bp, Chicken  19866894294769_3
  misc_feature (1)..(6): n is any nucleotide
nnnnnntctcttctgcatttttctagttctctgggttgtattttttaacgctttttctcacaagagaacaaagaattgctgtgcaagaaaagaccccttggtccagcatgcctgtccccttgagggttatccttttataacgagtgtttctctgcatatagcatctttcccttcaatagcatgtytcccttactggaaaatctttctcaaactccttttcatgccattggctttgatggtgttatttagcaaattattccatatrttgcctattagattttaagctaagtatttgttccygaaatccagatcactgttcctttgcaacttgtaaatgacactctgaggtgtgtgaggttctcttttttcccttactttcaagcactcccagagataaacattttatttttcctaaagaatggtaatcacattgaaaagggcacaaaaaatgttgtgttaccacttcaatgacatggtctgcacagcgtgaaatgttaccgtggacaatttgtgttctagttgcttgctgatttatcctaaaacatgcattcccttctcttatatacgtgttctgtatttgtttaaaaaatccttagaac

SEQ ID NO: 49053 - DNA, 599 bp, Chicken  19866894294771_1
  misc_feature (1)..(169): n is any nucleotide
nnnnnnnnnnnnnnnnnnnnnnnnnnnnnnnnnnnnnnnnnnnnnnnnnnnnnnnnnnnnnnnnnnnnnnnnnnnnnnnnnnnnnnnnnnnnnnnnnnnnnnnnnnnnnnnnnnnnnnnnnnnnnnnnnnnnnnnnnnnnnnnnnnnnnnnnnnnnnnnnnnnnnnnnncatcacagctgcatagtctcttttcaaggccattagggaggaaggtttagataatttgctctggcatcaagtgtcttggagcacgagatacatgcatttctccctagacctctcccatgctgtttcacatractgtgtaaggaatgaacaaattaaacaacatcagatgtgtttttggctgacttgagattaacctaagtcaatgattctgcccacgatattttgggtaattcaataaaaacaaaaacataaaatagacacgcctcaccaagtctatgacaagtaatcactcartctcctattattaatcattctaatgacaagtaatctaatagcacagtkttcaataacggggtaattttttctatcttttcccagttcaaaagctcatgcttctctgatcattttacaaaagggtgatgttttctac

SEQ ID NO: 49054 - DNA, 599 bp, Chicken  19866894294771_2
  misc_feature (1)..(6): n is any nucleotide
nnnnnncatcacagctgcatagtctcttttcaaggccattagggaggaaggtttagataatttgctctggcatcaagtgtcttggagcacgagatacatgcatttctccctagacctctcccatgctgtttcacatractgtgtaaggaatgaacaaattaaacaacatcagatgtgtttttggctgacttgagattaacctaagtcaatgattctgcccacgatattttgggtaattcaataaaaacaaaaacataaaatagacacgcctcaccaagtctatgacaagtaatcactcartctcctattattaatcattctaatgacaagtaatctaatagcacagtkttcaataacggggtaattttttctatcttttcccagttcaaaagctcatgcttctctgatcattttacaaaagggtgatgttttctacaaagagggtcatctgcctattcttcaagcacaastactgtaatgctttaacgattcagcatataatttaaactaagtcatcaaatttaaagacaagcatgtctctttactcctccactactacatgcataatgtctcctccttgtactcagtatcacagcaca

SEQ ID NO: 49055 - DNA, 600 bp, Chicken  19866894294771_3
aggtttagataatttgctctggcatcaagtgtcttggagcacgagatacatgcatttctccctagacctctcccatgctgtttcacatractgtgtaaggaatgaacaaattaaacaacatcagatgtgtttttggctgacttgagattaacctaagtcaatgattctgcccacgatattttgggtaattcaataaaaacaaaaacataaaatagacacgcctcaccaagtctatgacaagtaatcactcartctcctattattaatcattctaatgacaagtaatctaatagcacagtkttcaataacggggtaattttttctatcttttcccagttcaaaagctcatgcttctctgatcattttacaaaagggtgatgttttctacaaagagggtcatctgcctattcttcaagcacaastactgtaatgctttaacgattcagcatataatttaaactaagtcatcaaatttaaagacaagcatgtctctttactcctccactactacatgcataatgtctcctccttgtactcagtatcacagcacagtcaccttctaacctcattatttcctaaagtgtcctgagagaggctctg

SEQ ID NO: 49056 - DNA, 579 bp, Chicken  19866894294771_4
agatgtgtttttggctgacttgagattaacctaagtcaatgattctgcccacgatattttgggtaattcaataaaaacaaaaacataaaatagacacgcctcaccaagtctatgacaagtaatcactcartctcctattattaatcattctaatgacaagtaatctaatagcacagtkttcaataacggggtaattttttctatcttttcccagttcaaaagctcatgcttctctgatcattttacaaaagggtgatgttttctacaaagagggtcatctgcctattcttcaagcacaastactgtaatgctttaacgattcagcatataatttaaactaagtcatcaaatttaaagacaagcatgtctctttactcctccactactacatgcataatgtctcctccttgtactcagtatcacagcacagtcaccttctaacctcattatttcctaaagtgtcctgagagaggctctgagttcagaatggtgccatataaagctgtctcagtactgaaagagtcactggcaatttaggcaatatatgtatgttgctctgaaagtaatacattctactat

SEQ ID NO: 49057 - DNA, 600 bp, Chicken  19866894294775_1
ccctcggttgccctcacaagggagacccctatgacaatagtccttctttttttcctgactgacgttgtagcaaaatggggagcagactgactagccttgggcaacctctcctgcatggatggactttcaccaacatccacagcccccggtctgtccagctccagagcctcatacccattatgtaagggcacctgggaaggtgggataggctgaggggcagtacgcttgttgccccgaagaggaacttgcttccacccctcgctgtctctgaggttgccccttcccacctgactgtgagamagcagatgattccccactgcttgaggagcatctcccccacacccttcctgttggacagcrgagtgcaactccaccaatcaatcyccttcccacaatcccagatgctcctcagcctttctacttcctcctttagctctaccaccaggctgagcagatcctccacctgctcacaccgcacacaggtggtatcccggctgccctcctgtagcagtgacagggctaggcattctccacagcctgagacctgaactacagcatgaacattcgtcccttttagcagcagctcgccgatgtttggtg

SEQ ID NO: 49058 - DNA, 600 bp, Chicken  19866894294775_2
gacgttgtagcaaaatggggagcagactgactagccttgggcaacctctcctgcatggatggactttcaccaacatccacagcccccggtctgtccagctccagagcctcatacccattatgtaagggcacctgggaaggtgggataggctgaggggcagtacgcttgttgccccgaagaggaacttgcttccacccctcgctgtctctgaggttgccccttcccacctgactgtgagamagcagatgattccccactgcttgaggagcatctcccccacacccttcctgttggacagcrgagtgcaactccaccaatcaatcyccttcccacaatcccagatgctcctcagcctttctacttcctcctttagctctaccaccaggctgagcagatcctccacctgctcacaccgcacacaggtggtatcccggctgccctcctgtagcagtgacagggctaggcattctccacagcctgagacctgaactacagcatgaacattcgtcccttttagcagcagctcgccgatgtttggtgaccatggttgcaccttggtgtgtccagagagcaatgacctgttaagcgctaagtactaag

SEQ ID NO: 49059 - DNA, 600 bp, Chicken  19866894294775_3
gactgactagccttgggcaacctctcctgcatggatggactttcaccaacatccacagcccccggtctgtccagctccagagcctcatacccattatgtaagggcacctgggaaggtgggataggctgaggggcagtacgcttgttgccccgaagaggaacttgcttccacccctcgctgtctctgaggttgccccttcccacctgactgtgagamagcagatgattccccactgcttgaggagcatctcccccacacccttcctgttggacagcrgagtgcaactccaccaatcaatcyccttcccacaatcccagatgctcctcagcctttctacttcctcctttagctctaccaccaggctgagcagatcctccacctgctcacaccgcacacaggtggtatcccggctgccctcctgtagcagtgacagggctaggcattctccacagcctgagacctgaactacagcatgaacattcgtcccttttagcagcagctcgccgatgtttggtgaccatggttgcaccttggtgtgtccagagagcaatgacctgttaagcgctaagtactaagccccctcccccctatatggcaagg

SEQ ID NO: 49060 - DNA, 600 bp, Chicken  19866894294779_1
ctctagctctgtgttatttagaagaattgacgcagcctttcatggcaaaatgttaaatagcaattcaatctttacaatcagaatgctatgactcatcctcagactcttcttcccatgcatatagcaaagctgaatgaaggtagagtcctgacctgataatgttttggaaacaagccacttatatttggaaaaggaagaaactgacataaatgtactcatacaaatttgaaaacaaaataacgttatatatatacatgcatataaatgcatgtaatacatatatatgtaaatatatatatwtttttactctatttgtcatggcaaactaccttttttctttttcttttttaatttcatttgtaatgctgctttacatctcttttagcccagatttcttcctttctcacttcttgaaaaatctattaacagtagtaagagaaaaaaattaagtgtgaagcatgtcatgacagatcaatgcttgccttttcaacaatgggtgatcattacaggatgtctttcttcaccattttctggatatattctgcaagatgtagcttgatgtaaagggttgaacagtctgtgtacttcatcctgtttgct

SEQ ID NO: 49061 - DNA, 599 bp, Chicken  19866894294784_1
  misc_feature (1)..(9): n is any nucleotide
nnnnnnnnnctgaaaatactatcagcaagcagagcgctagagctgtgagtgtcactgctcagattccttgctactggtttgagatgccctcagacacgctcctagcatgcttataaacaataaaaggaatctgaattgatcagagggcacacacacggtcactgattactgggagcataataaaagctgcagtggaggaggtcaccagcttcccattgcattcagtgagttagtgagaaatgacaccaaaagtcctgctccagtaacagctaaaggtctctgctgagcttatttcaagaytgcgatttccctgaggctgactggttcaaatarttatctaacgagtcaggcctccraggagagcatttgacatcccagcagggaaaatacagctttaactgtcaacattctataacctgaaatttgaaatactaactgatcattttgaagttgctgatccttcccaataagatacgtgttttccttataaatagtactgccttggatctttatgttttccctgatgcaactctggcagtaattaatagggccgatcactcatttgctcctttgttgtcgtttttttttcctggrgtact

SEQ ID NO: 49062 - DNA, 600 bp, Chicken  19866894294784_2
gcgctagagctgtgagtgtcactgctcagattccttgctactggtttgagatgccctcagacacgctcctagcatgcttataaacaataaaaggaatctgaattgatcagagggcacacacacggtcactgattactgggagcataataaaagctgcagtggaggaggtcaccagcttcccattgcattcagtgagttagtgagaaatgacaccaaaagtcctgctccagtaacagctaaaggtctctgctgagcttatttcaagaytgcgatttccctgaggctgactggttcaaatarttatctaacgagtcaggcctccraggagagcatttgacatcccagcagggaaaatacagctttaactgtcaacattctataacctgaaatttgaaatactaactgatcattttgaagttgctgatccttcccaataagatacgtgttttccttataaatagtactgccttggatctttatgttttccctgatgcaactctggcagtaattaatagggccgatcactcatttgctcctttgttgtcgtttttttttcctggrgtactccagttggcttagttcttctctttctttttttct

SEQ ID NO: 49063 - DNA, 600 bp, Chicken  19866894294784_3
gctcagattccttgctactggtttgagatgccctcagacacgctcctagcatgcttataaacaataaaaggaatctgaattgatcagagggcacacacacggtcactgattactgggagcataataaaagctgcagtggaggaggtcaccagcttcccattgcattcagtgagttagtgagaaatgacaccaaaagtcctgctccagtaacagctaaaggtctctgctgagcttatttcaagaytgcgatttccctgaggctgactggttcaaatarttatctaacgagtcaggcctccraggagagcatttgacatcccagcagggaaaatacagctttaactgtcaacattctataacctgaaatttgaaatactaactgatcattttgaagttgctgatccttcccaataagatacgtgttttccttataaatagtactgccttggatctttatgttttccctgatgcaactctggcagtaattaatagggccgatcactcatttgctcctttgttgtcgtttttttttcctggrgtactccagttggcttagttcttctctttctttttttctttaactacaacttacttacattg

SEQ ID NO: 49064 - DNA, 506 bp, Chicken  19866894294784_4
caagaytgcgatttccctgaggctgactggttcaaatarttatctaacgagtcaggcctccraggagagcatttgacatcccagcagggaaaatacagctttaactgtcaacattctataacctgaaatttgaaatactaactgatcattttgaagttgctgatccttcccaataagatacgtgttttccttataaatagtactgccttggatctttatgttttccctgatgcaactctggcagtaattaatagggccgatcactcatttgctcctttgttgtcgtttttttttcctggrgtactccagttggcttagttcttctctttctttttttctttaactacaacttacttacattggtttaactgttggtctgcagtaaacttcctcattatcaactagtcawtatcatcaagcaattaaaaaaaaagaaaaaaaatgctaaacgtaataaatctttagtgccttttgatatgtctggggcaagttataaataaagacac

SEQ ID NO: 49065 - DNA, 397 bp, Chicken  19866894294784_5
aacattctataacctgaaatttgaaatactaactgatcattttgaagttgctgatccttcccaataagatacgtgttttccttataaatagtactgccttggatctttatgttttccctgatgcaactctggcagtaattaatagggccgatcactcatttgctcctttgttgtcgtttttttttcctggrgtactccagttggcttagttcttctctttctttttttctttaactacaacttacttacattggtttaactgttggtctgcagtaaacttcctcattatcaactagtcawtatcatcaagcaattaaaaaaaaagaaaaaaaatgctaaacgtaataaatctttagtgccttttgatatgtctggggcaagttataaataaagacac

SEQ ID NO: 49066 - DNA, 600 bp, Chicken  19866894294785_1
ctcaaggtgaatcatgatggagagtgtttatcacacctaggatgtgaaattcctgattgcgaatctgtgatgagctgtaagcttcagtaactttatatttccacattctttcttggaaatgacggataaaagtggtctgacatttgatttggaggcaatttttaacagagcttaagaccagtgaagcacgaatactgaagtctgtgtgttttggaactgttatcttggtaacagtctatcttggtactactttcctaccactacaaagcaaagaaggcagccaggtgacaggtaggtccraaaaacagaaaggaagcgaaccgtagctggctatttcastcccaactgaggtatcacctggggggatcctgttttgctagcacagatggttacagagggcttggtacagttcactgtatctgctttgtgtcagctcagagcagctacgtgcatcatgcctactgaagaaactagggatgtcacagcagttccttcagtaaaatcaactcagagtgcctcaccttggctgctgctcctgcagcatgccctggactttccattccatcacacacgctgtgctgtcagcctgggaagctcctg

SEQ ID NO: 49067 - DNA, 600 bp, Chicken  19866894294785_2
ggatgtgaaattcctgattgcgaatctgtgatgagctgtaagcttcagtaactttatatttccacattctttcttggaaatgacggataaaagtggtctgacatttgatttggaggcaatttttaacagagcttaagaccagtgaagcacgaatactgaagtctgtgtgttttggaactgttatcttggtaacagtctatcttggtactactttcctaccactacaaagcaaagaaggcagccaggtgacaggtaggtccraaaaacagaaaggaagcgaaccgtagctggctatttcastcccaactgaggtatcacctggggggatcctgttttgctagcacagatggttacagagggcttggtacagttcactgtatctgctttgtgtcagctcagagcagctacgtgcatcatgcctactgaagaaactagggatgtcacagcagttccttcagtaaaatcaactcagagtgcctcaccttggctgctgctcctgcagcatgccctggactttccattccatcacacacgctgtgctgtcagcctgggaagctcctgctgcactgtgcccctggggctgctatgcagactctcgaa

SEQ ID NO: 49068 - DNA, 600 bp, Chicken  19866894294786_1
atcagtcagaccagcagctaaacaggtgggtcttcagtgtgggttttccatctgatgctaattgagaaatcatgctagccatattactgtgttactactttcagcgaagtcatgctgaggcttgttggggagcttgtaactcttaagtgtaactatatttctgcaaagacaacggtagtcttaggaaacagacattccttagaatcaaaactagatttcctttcccctgctgaaaagtagaaacaactctaatgcagctctgcccttgaattgtaatttgtcacctgtaggacttttttktttgtttgtttcatattatgtctctatgcagtcctagtgtttttcttcctttagtaagttagctttaaggtagcatgattggttatttcctttccttctgctgagctttcttttcagaaactgaagataagaaatgtgtgcgttgtcttgattgctgttgcaggtaggtgtgtagtactgatgctttctctgtgtgctggggattgcatattctgagctagcagcaattgagcccgtgatcattgttatgggacagttggtactgtccctgccaagacttgcgggttgtgtgagaggaat

SEQ ID NO: 49069 - DNA, 600 bp, Chicken  19866894294790_1
ttgcctttaccctattgtctcctcatccctctcccatgcaaatttgtatttatgtgcccatcacattttggctgaacctggagtggagagaaggctcaaaagtttatctctggaagaaacagcaagcatgatgctggaagagagtagacttatactacagatcaggaggaaattctttactgtgagtggggcgataccctggaacagattgcccagagtggttgtgaatgcccctccatggggctggatggggctttgagcagcctggtctagagggaggtgtccgtgcctgcaacagargggtcttaaaggtcccttccaaygcaatccattctatgattctattcttctgtgcttgtgttctgagcgctggcaggagatgttgcagggaggagaataggtayattgatgctggaaaggtggattcgtgttagaggtcctattccacaagctgacaaaaggagggatgaagactatgcgctccttgcagctttctggcgtgctgcccatcacaacrgcaaacaaaaagttcagctcctaaaactcacactccctgctctattgtctagaaataactaaagttaaaacaataagtgagag

SEQ ID NO: 49070 - DNA, 600 bp, Chicken  19866894294790_2
catccctctcccatgcaaatttgtatttatgtgcccatcacattttggctgaacctggagtggagagaaggctcaaaagtttatctctggaagaaacagcaagcatgatgctggaagagagtagacttatactacagatcaggaggaaattctttactgtgagtggggcgataccctggaacagattgcccagagtggttgtgaatgcccctccatggggctggatggggctttgagcagcctggtctagagggaggtgtccgtgcctgcaacagargggtcttaaaggtcccttccaaygcaatccattctatgattctattcttctgtgcttgtgttctgagcgctggcaggagatgttgcagggaggagaataggtayattgatgctggaaaggtggattcgtgttagaggtcctattccacaagctgacaaaaggagggatgaagactatgcgctccttgcagctttctggcgtgctgcccatcacaacrgcaaacaaaaagttcagctcctaaaactcacactccctgctctattgtctagaaataactaaagttaaaacaataagtgagagttttataatacacagtatgttta

SEQ ID NO: 49071 - DNA, 600 bp, Chicken  19866894294790_3
tatctctggaagaaacagcaagcatgatgctggaagagagtagacttatactacagatcaggaggaaattctttactgtgagtggggcgataccctggaacagattgcccagagtggttgtgaatgcccctccatggggctggatggggctttgagcagcctggtctagagggaggtgtccgtgcctgcaacagargggtcttaaaggtcccttccaaygcaatccattctatgattctattcttctgtgcttgtgttctgagcgctggcaggagatgttgcagggaggagaataggtayattgatgctggaaaggtggattcgtgttagaggtcctattccacaagctgacaaaaggagggatgaagactatgcgctccttgcagctttctggcgtgctgcccatcacaacrgcaaacaaaaagttcagctcctaaaactcacactccctgctctattgtctagaaataactaaagttaaaacaataagtgagagttttataatacacagtatgtttagagataaacttagttgtaataggcataatatatacactactgacgttgacatttaactatgggccttcagaagataaagtg

SEQ ID NO: 49072 - DNA, 600 bp, Chicken  19866894294790_4
gtggttgtgaatgcccctccatggggctggatggggctttgagcagcctggtctagagggaggtgtccgtgcctgcaacagargggtcttaaaggtcccttccaaygcaatccattctatgattctattcttctgtgcttgtgttctgagcgctggcaggagatgttgcagggaggagaataggtayattgatgctggaaaggtggattcgtgttagaggtcctattccacaagctgacaaaaggagggatgaagactatgcgctccttgcagctttctggcgtgctgcccatcacaacrgcaaacaaaaagttcagctcctaaaactcacactccctgctctattgtctagaaataactaaagttaaaacaataagtgagagttttataatacacagtatgtttagagataaacttagttgtaataggcataatatatacactactgacgttgacatttaactatgggccttcagaagataaagtgcttgactcctctgattagaggacagtaagccaagttctggtttgaaatgatttctttcagcagtcacgaggaagatgccttcataatgctaagagtgcgctcgtcacatgatg

SEQ ID NO: 49073 - DNA, 600 bp, Chicken  19866894294801_1
gcctgtaagatcaggcattgcactggcctggtgggaaaataatcttaaaatgtctctacttcaaatctacatggatgtgtgcgaccttttcttttaaatctttatcaggcagagaacagaccgagccctgacctgctgagccctccagccaggggtacggcacaggcagagcttggtctgcagctgctgcgcctgacatggcacagtgaatattgggagtactggcactgaattatactgttggcttttttaagtgtgtccatctgtgtgtgtacatatgcgtactgtcatgattctggrcatatatgtatatataaaatctcctgtcagaaaattatcaatttaaactattgattccagttattgcataagtagttcatcctcttcctggtaagtatacataagattttacaatcttgaaatatgcattagtttcttgaaaccaaaattcaaatgtaaaattcatgttctaaatggaggatatcctcactacaggcagctttagcttgctttgcttgtatgtgctttaacacttcaatttggattcctagagtacttgagaaattacatttccagtttgtatgcagttaacatgcttgg

SEQ ID NO: 49074 - DNA, 600 bp, Chicken  19866894294808_1
tagccaccatcacatgcctaggatcagcaggactatttttttttttcttaccctgaaacagagactgatttacctggaacggatggagttacatgactgtaaaattgtggtgaatgaggacgtgttcgggctccaggagttctgcctcccaaatccctgttctaaatagcacattgtcataaaaagctgactttaaaactagcttgcaaaactttttgcatggagaagccagcaatttacacagttgagcaaatcacagaaaactctaaatgtgaagtaggaaaatatttacacttccawggcctgagtgtaaattggagaagtacatcccattaacgggagtttacgcacattgatacatttcatttttccctgcaatgctgaaaatgagacactgagatgcaaatgcaccgggatctgatcagtgatgctgtttctgtgcccacaagccagatgacatagcaggtataatattgaaatatatttcacacattgccttgacacagggaagggatgcaaggaggtgggggtagttcttagctctcttttgtcatttatcatctttctatggtagagcagccattactcctgtctgcatta

SEQ ID NO: 49075 - DNA, 600 bp, Chicken  19866894294810_1
taagatgacaaataggaaacacaaggccacgaccaaccatccagggcttctcataactgactactgcagaacggagtttaacgtcagccaattaagaagagcagttctatggaagaatccttaggattccctcacagagttaatttccacaagcgacttcaaagcttagccgctccctaggacttaagtacattatacacctgtgatcagaacaattactgatcacacctttatgtaacagaggttcctaccacggatattcattacagatgaaatcactggagagaaatctgacataawctaagggattaagaagaaaggcttgaaggtaaaagagcaggaacactgcctgggcacagcaacagaagagtcacctatcaaaaaagtgctgtttgaagcagaacgtagtttatggaacagaaaacctctcccagatggacgaagatgaagaaagtagcgatatatttttttcctaaatacaaaactcctgccataaaggctgacaaacgcattacagccaatacccaaccttcccaaatacctccttaaaaccagggccaaacccaaaaaaggcaacttgtgccttcaacagcgggcagc

SEQ ID NO: 49076 - DNA, 600 bp, Chicken  19866894294812_1
tctcctccttcactccccagctctgcccttacttgtgtctttgtgttccccttttcatccacaaggtgtaaaaagattgtacttgggctcaataggacattttttcaatggtcaaatgttccaggagcatttccttagagcacctgatggcatttttaaaaaggtgactcaaagtacaccttgctggcttttcctttactttaaattctagaaagtggatcctacattgcattgcatggattgtctgacagaaagattcccactgttatttttgatattcttgctaaatattcctagctmgctgctctagccgataaaacactgagttcaagggagcagagacgtgactcactatggctgctcttacattgcctcctcacccrtctcatatcacttcttcaaagaaaagtcacctcctcctggcactcgcacttggcacattgtttgcacctaggtaagtgggtattaacctgacctgtcagcacagcagaactttgcactcacattttcgcagagcagaacaccagaaattagagcaaagccctgtgaaatcgagctgacagttcttgtaaaatcttgtataaaatcctatatgccatt

SEQ ID NO: 49077 - DNA, 600 bp, Chicken  19866894294812_2
tgggctcaataggacattttttcaatggtcaaatgttccaggagcatttccttagagcacctgatggcatttttaaaaaggtgactcaaagtacaccttgctggcttttcctttactttaaattctagaaagtggatcctacattgcattgcatggattgtctgacagaaagattcccactgttatttttgatattcttgctaaatattcctagctmgctgctctagccgataaaacactgagttcaagggagcagagacgtgactcactatggctgctcttacattgcctcctcacccrtctcatatcacttcttcaaagaaaagtcacctcctcctggcactcgcacttggcacattgtttgcacctaggtaagtgggtattaacctgacctgtcagcacagcagaactttgcactcacattttcgcagagcagaacaccagaaattagagcaaagccctgtgaaatcgagctgacagttcttgtaaaatcttgtataaaatcctatatgccattcagaaagcacagtagtatttcctgaggtttgggatttcattcaaatcatatttaaaagattttagtattacttctgttattct

SEQ ID NO: 49078 - DNA, 600 bp, Chicken  19866894294812_3
acattttcgcagagcagaacaccagaaattagagcaaagccctgtgaaatcgagctgacagttcttgtaaaatcttgtataaaatcctatatgccattcagaaagcacagtagtatttcctgaggtttgggatttcattcaaatcatatttaaaagattttagtattacttctgttattctcttttccacagtttttctgttactgtacccattttgaaaaggctatttctaaatgcagagggtggtagaggaatttccagtacagccttggtgattgtttccagtagttttaagactgytctgagctggcaaaacacaaggccaagtgtacctttcggggagagacttcctcaccaaaaaatgcaaaggctggtttgtttgtatccagtcacgcagaatgttgtgtctctgcagaacattgcactgactgcaattgtacttcacctgcagccttgggggaaacacacagaaatcatccctccagatggtgcagtgagaggctggagggaagagaagctccaaagttccctgactgcacagaagcagccagtgccactctccaagaactgcacaaagaggctttgtctcagccgatgaga

SEQ ID NO: 49079 - DNA, 582 bp, Chicken  19866894294818_1
gcagctttaggaccacctcataactcacacatggcgaggaaggcacatggtctaagtatgtgagcaggtgcaagaacacacaagctgaatttctgccctcctgttcactgctgaggcagtggccattgtgcagtgagccacggaaacatcccagagctgaggctccttccacaactaccaactgaaggtgtctccacttgaaattctaagttattactataaatgctgaggtctccccaaccagaagattttcaactctaaacaatttttaacaaatatgtaagatattagactgaattractatttatataaaaatatggaagtagactgagttttcacaaasaaagcctgctcagtttactgttacattatgtttacaagtaagcttagtgaaaaaaagattgggtcaaaacaagaaataaggtatcttgatgaaatatgctttaaaagaaatatgtatttaatatgatacattataatgcttctttgggctataaaaagggttcctttatctccaaatgctcataacatgtttaaaatacattctgaattttgatttctcacagcgtttgatataaaaa

SEQ ID NO: 49080 - DNA, 538 bp, Chicken  19866894294818_2
acatggtctaagtatgtgagcaggtgcaagaacacacaagctgaatttctgccctcctgttcactgctgaggcagtggccattgtgcagtgagccacggaaacatcccagagctgaggctccttccacaactaccaactgaaggtgtctccacttgaaattctaagttattactataaatgctgaggtctccccaaccagaagattttcaactctaaacaatttttaacaaatatgtaagatattagactgaattractatttatataaaaatatggaagtagactgagttttcacaaasaaagcctgctcagtttactgttacattatgtttacaagtaagcttagtgaaaaaaagattgggtcaaaacaagaaataaggtatcttgatgaaatatgctttaaaagaaatatgtatttaatatgatacattataatgcttctttgggctataaaaagggttcctttatctccaaatgctcataacatgtttaaaatacattctgaattttgatttctcacagcgtttgatataaaaa

SEQ ID NO: 49081 - DNA, 600 bp, Chicken  19866894294820_1
tgatgacatcactttgtagagtggagcagagctgagggacacagagctgccgtgggcaagctgcagttttcctgctgaatacagagaacgcattaggatagcagcaggctttgggtcagagccccacctttgtgaaagtagacctccagcgggtgcccatggaacagctgtagtggtgtctgatggcaaaagtagggtgttcaattgctcctggtgtgcaaacaaccctacatcacttcatttctgagtcaaagacaacaccaacacaactgatctcacctgtgtacgtgcttctgtcarctgggggaaaagggcattttcctgcgctgttttctcttcctgtgtggaaggttttgttctcaatccatcaggactcrcagtgctttcttattagagctgatgcttcttatttccattatttttctgagctttgctcacgtcttcagctctgtgcagaawattggtgattctaacagaggccaggagcattttgtttgagaggaataaggacaccgattaatttggaagcagttatctgaatcggaggaaatgtgggaagcgtgggcaatctgtgctcccccagctgcgagataagtctcc

SEQ ID NO: 49082 - DNA, 600 bp, Chicken  19866894294820_2
aatacagagaacgcattaggatagcagcaggctttgggtcagagccccacctttgtgaaagtagacctccagcgggtgcccatggaacagctgtagtggtgtctgatggcaaaagtagggtgttcaattgctcctggtgtgcaaacaaccctacatcacttcatttctgagtcaaagacaacaccaacacaactgatctcacctgtgtacgtgcttctgtcarctgggggaaaagggcattttcctgcgctgttttctcttcctgtgtggaaggttttgttctcaatccatcaggactcrcagtgctttcttattagagctgatgcttcttatttccattatttttctgagctttgctcacgtcttcagctctgtgcagaawattggtgattctaacagaggccaggagcattttgtttgagaggaataaggacaccgattaatttggaagcagttatctgaatcggaggaaatgtgggaagcgtgggcaatctgtgctcccccagctgcgagataagtctcctctctgtccatcctatcacagtgcttgcagataacagctctgccttcctgccggatatctcacctaacagatccaga

SEQ ID NO: 49083 - DNA, 600 bp, Chicken  19866894294820_3
tggaacagctgtagtggtgtctgatggcaaaagtagggtgttcaattgctcctggtgtgcaaacaaccctacatcacttcatttctgagtcaaagacaacaccaacacaactgatctcacctgtgtacgtgcttctgtcarctgggggaaaagggcattttcctgcgctgttttctcttcctgtgtggaaggttttgttctcaatccatcaggactcrcagtgctttcttattagagctgatgcttcttatttccattatttttctgagctttgctcacgtcttcagctctgtgcagaawattggtgattctaacagaggccaggagcattttgtttgagaggaataaggacaccgattaatttggaagcagttatctgaatcggaggaaatgtgggaagcgtgggcaatctgtgctcccccagctgcgagataagtctcctctctgtccatcctatcacagtgcttgcagataacagctctgccttcctgccggatatctcacctaacagatccagacttgggaacaccgtgctctttcctgagatgggagcaggcaggcaggaggacccccagtctgtttttaagaagtagcagtgtt

SEQ ID NO: 49084 - DNA, 600 bp, Chicken  19866894294823_1
atgtcctagctgcaccaagctgtttcgtgacaagacagacttaacctggcaccttgtgtctgtgcactcgattgagcgcgcttttgtgtgtctcctctgtggcaagggcttgggcacacagaagaacctcgctcgccatgccaaggtgtgctgcccggccgccgtgtgtgctgggccttgcttctgagctaggaaaactaatggtttccttacaacaggtgtaaggttggggattaactcctcgaaactgaccaggttgggtgctggtgccagataccgtgtaactgcaccgtggtgcartgctggtgtgaayatatccttggtcggtctacatcgtggcactttggatgcctcagtggtgtgatatcctgtgtacttgtctttaactttmtgcagcagtggatctcaaagtgctttataaaagaaayggtgatgttttcctgagaaaatarcatccctaagcctgtgagcacgttagcagtggaattaatggcagaattcagtgttctgtgttctggtcccatgctctgtccgtggtacagtttgagcatttcggggtctttcagcttgaaatgaggagctgtgtgagcacagggctgc

SEQ ID NO: 49085 - DNA, 600 bp, Chicken  19866894294823_2
accaagctgtttcgtgacaagacagacttaacctggcaccttgtgtctgtgcactcgattgagcgcgcttttgtgtgtctcctctgtggcaagggcttgggcacacagaagaacctcgctcgccatgccaaggtgtgctgcccggccgccgtgtgtgctgggccttgcttctgagctaggaaaactaatggtttccttacaacaggtgtaaggttggggattaactcctcgaaactgaccaggttgggtgctggtgccagataccgtgtaactgcaccgtggtgcartgctggtgtgaayatatccttggtcggtctacatcgtggcactttggatgcctcagtggtgtgatatcctgtgtacttgtctttaactttmtgcagcagtggatctcaaagtgctttataaaagaaayggtgatgttttcctgagaaaatarcatccctaagcctgtgagcacgttagcagtggaattaatggcagaattcagtgttctgtgttctggtcccatgctctgtccgtggtacagtttgagcatttcggggtctttcagcttgaaatgaggagctgtgtgagcacagggctgctcagcactgtgag

SEQ ID NO: 49086 - DNA, 600 bp, Chicken  19866894294823_3
ctcctctgtggcaagggcttgggcacacagaagaacctcgctcgccatgccaaggtgtgctgcccggccgccgtgtgtgctgggccttgcttctgagctaggaaaactaatggtttccttacaacaggtgtaaggttggggattaactcctcgaaactgaccaggttgggtgctggtgccagataccgtgtaactgcaccgtggtgcartgctggtgtgaayatatccttggtcggtctacatcgtggcactttggatgcctcagtggtgtgatatcctgtgtacttgtctttaactttmtgcagcagtggatctcaaagtgctttataaaagaaayggtgatgttttcctgagaaaatarcatccctaagcctgtgagcacgttagcagtggaattaatggcagaattcagtgttctgtgttctggtcccatgctctgtccgtggtacagtttgagcatttcggggtctttcagcttgaaatgaggagctgtgtgagcacagggctgctcagcactgtgaggtgtcaggtctgaggttctgccctctgaaggagaggggaaatactgtctggggcttgaaaattgccgcagcgttggta

SEQ ID NO: 49087 - DNA, 600 bp, Chicken  19866894294823_4
tcgctcgccatgccaaggtgtgctgcccggccgccgtgtgtgctgggccttgcttctgagctaggaaaactaatggtttccttacaacaggtgtaaggttggggattaactcctcgaaactgaccaggttgggtgctggtgccagataccgtgtaactgcaccgtggtgcartgctggtgtgaayatatccttggtcggtctacatcgtggcactttggatgcctcagtggtgtgatatcctgtgtacttgtctttaactttmtgcagcagtggatctcaaagtgctttataaaagaaayggtgatgttttcctgagaaaatarcatccctaagcctgtgagcacgttagcagtggaattaatggcagaattcagtgttctgtgttctggtcccatgctctgtccgtggtacagtttgagcatttcggggtctttcagcttgaaatgaggagctgtgtgagcacagggctgctcagcactgtgaggtgtcaggtctgaggttctgccctctgaaggagaggggaaatactgtctggggcttgaaaattgccgcagcgttggtacacttgaatacttgataccatttttgagtttttagga

SEQ ID NO: 49088 - DNA, 600 bp, Chicken  19866894294823_5
gcccggccgccgtgtgtgctgggccttgcttctgagctaggaaaactaatggtttccttacaacaggtgtaaggttggggattaactcctcgaaactgaccaggttgggtgctggtgccagataccgtgtaactgcaccgtggtgcartgctggtgtgaayatatccttggtcggtctacatcgtggcactttggatgcctcagtggtgtgatatcctgtgtacttgtctttaactttmtgcagcagtggatctcaaagtgctttataaaagaaayggtgatgttttcctgagaaaatarcatccctaagcctgtgagcacgttagcagtggaattaatggcagaattcagtgttctgtgttctggtcccatgctctgtccgtggtacagtttgagcatttcggggtctttcagcttgaaatgaggagctgtgtgagcacagggctgctcagcactgtgaggtgtcaggtctgaggttctgccctctgaaggagaggggaaatactgtctggggcttgaaaattgccgcagcgttggtacacttgaatacttgataccatttttgagtttttaggagttcttagaaaatatacctgggta

SEQ ID NO: 49089 - DNA, 600 bp, Chicken  19866894294823_6
attcagtgttctgtgttctggtcccatgctctgtccgtggtacagtttgagcatttcggggtctttcagcttgaaatgaggagctgtgtgagcacagggctgctcagcactgtgaggtgtcaggtctgaggttctgccctctgaaggagaggggaaatactgtctggggcttgaaaattgccgcagcgttggtacacttgaatacttgataccatttttgagtttttaggagttcttagaaaatatacctgggtatggctggagcttcctggggttgtgcaaattttccagctaatttaygtaatataatttatgttagccaagattgaatgtatgctttggcacttgaggaggatttgtgtagaaggtcacagtggcggtgcacatagaaaaccaggagtggttgttagtggaaggtggaaatcctactgtaacccttgttttgtgactgcagaggattgcagtgagagttctgttcacgtggggatagtggcatttcctgctggttctttgtgtgtctctgtgcaaatgttatcccagtgtagtatcaktcagaagtctggtgtgtccaaaggacaaaaggtggtgttggaaaccccg

SEQ ID NO: 49090 - DNA, 556 bp, Chicken  19866894294823_7
ggtatggctggagcttcctggggttgtgcaaattttccagctaatttaygtaatataatttatgttagccaagattgaatgtatgctttggcacttgaggaggatttgtgtagaaggtcacagtggcggtgcacatagaaaaccaggagtggttgttagtggaaggtggaaatcctactgtaacccttgttttgtgactgcagaggattgcagtgagagttctgttcacgtggggatagtggcatttcctgctggttctttgtgtgtctctgtgcaaatgttatcccagtgtagtatcaktcagaagtctggtgtgtccaaaggacaaaaggtggtgttggaaaccccgtcacagtccccctggatgtgatgtgacacgtgtcatactgacgtgtgtgctcctgacagacaatatctgatcgtccaatggagagtttcttaattaaaaatatgggcagagtcaactacttgtaggttgtaactgcacatgaaaacgctcacagattgtctgagagcctcattcagcacagagctgtttccttgcagtcttccagct

SEQ ID NO: 49091 - DNA, 600 bp, Chicken  19866894294825_1
gcagttagcatttgggagtgaagtcctggctcccatcatcagcgttgtcatagtgaggactgtggtaacacctgtgggacatacaaatataaattctgataaaacaaagatagcaacaaggcctttcattgcatttggtaagctacaaaatactctttactgagcttcataaactaatatgccacagcatttcacatggcatgttttggaaagactttaagagcactggtgaccttgaagttaaatgcttaaaaatactgaagaaatgtgtttagaaagctgagaagatgggaaattagratgggagggattttcatgtcatagaaagtatatttactattaatacatctttgcaatactatgcaaatgcttccattaaaaccttcagacatcattttgttcagtctagttgtccatcagccttgcttaaagtcagatttgtttttgctgttctatagaagtgttttccctaccccacctgcagcctgatcagaagtgatctgcatttttccctttcagaatctcctttacttgccattaactatacttaatctcayaattctcttattattcatgtgttaattactatatatcattcac

SEQ ID NO: 49092 - DNA, 600 bp, Chicken  19866894294825_2
ctgaagaaatgtgtttagaaagctgagaagatgggaaattagratgggagggattttcatgtcatagaaagtatatttactattaatacatctttgcaatactatgcaaatgcttccattaaaaccttcagacatcattttgttcagtctagttgtccatcagccttgcttaaagtcagatttgtttttgctgttctatagaagtgttttccctaccccacctgcagcctgatcagaagtgatctgcatttttccctttcagaatctcctttacttgccattaactatacttaatctcayaattctcttattattcatgtgttaattactatatatcattcactgtataactatatagaactataaaggttggaaaagacctctaagaccatgtagtccaaccaccaacacatctccaccatggtcaccaaaccacatcccccagtaccacatctacccaccagtagccacagcatcctcagtaccacatcttgagcacctccagagacagtgactccaccgcctccttgggcagtctgttccagtgcttcaccaccctttctgaggagaaatttttcctaacaccaaacctgaacatcc

SEQ ID NO: 49093 - DNA, 599 bp, Chicken  19866894294830_1
  misc_feature (1)..(184): n is any nucleotide
nnnnnnnnnnnnnnnnnnnnnnnnnnnnnnnnnnnnnnnnnnnnnnnnnnnnnnnnnnnnnnnnnnnnnnnnnnnnnnnnnnnnnnnnnnnnnnnnnnnnnnnnnnnnnnnnnnnnnnnnnnnnnnnnnnnnnnnnnnnnnnnnnnnnnnnnnnnnnnnnnnnnnnnnnnnnnnnnnnnnnnnntagtatagcagtacttatgatccatttttaattcaaaatgtcttagatttcttagggccaggaaattggctggcccgtcttaggtacagagcttttggtctctaatgttctggaargatttaatraatttatattagattcacagagtagttgagaagcatgaagtcaagcgtagctggctgcctgttgcactggaactttcccttctgcagccattcccttctgctgatttgtggtctcctcactttctcttccagggatgtggggggcccagataccaaggtctggtcgggaatgctgatgttgggcatgtggatatggcctaccgtgtggtggcagatcatgtgcggaccttgtgcgtgtgcatcactgatggcatctacccaggcctctctggagcagagtaaggatatat

SEQ ID NO: 49094 - DNA, 599 bp, Chicken  19866894294830_2
  misc_feature (1)..(175): n is any nucleotide
nnnnnnnnnnnnnnnnnnnnnnnnnnnnnnnnnnnnnnnnnnnnnnnnnnnnnnnnnnnnnnnnnnnnnnnnnnnnnnnnnnnnnnnnnnnnnnnnnnnnnnnnnnnnnnnnnnnnnnnnnnnnnnnnnnnnnnnnnnnnnnnnnnnnnnnnnnnnnnnnnnnnnnnnnnnnnnntagtatagcagtacttatgatccatttttaattcaaaatgtcttagatttcttagggccaggaaattggctggcccgtcttaggtacagagcttttggtctctaatgttctggaargatttaatraatttatattagattcacagagtagttgagaagcatgaagtcaagcgtagctggctgcctgttgcactggaactttcccttctgcagccattcccttctgctgatttgtggtctcctcactttctcttccagggatgtggggggcccagataccaaggtctggtcgggaatgctgatgttgggcatgtggatatggcctaccgtgtggtggcagatcatgtgcggaccttgtgcgtgtgcatcactgatggcatctacccaggcctctctggagcagagtaaggatatatggaaagagc

SEQ ID NO: 49095 - DNA, 599 bp, Chicken  19866894294832_1
  misc_feature (1)..(76): n is any nucleotide
nnnnnnnnnnnnnnnnnnnnnnnnnnnnnnnnnnnnnnnnnnnnnnnnnnnnnnnnnnnnnnnnnnnnnnnnnnnncctcctctgcttgacccagcagagcccggccagtttaatgagatctagttgaagggctgcattcctggctagacctgttgtaagcacttctccagcaggccgtcagatgcggagcagcaggccagaagagcccacttcagcttagctccccacaccaacacaccgcaggtgcaccaggcgctctgtgccgaaaggagaagcagcgctgcttgaaagcagctgarcatgcctctggtgactgctgctgcttccaagacagctttcatacaggttttcagaccacacctgctgtccacactgaataaagcctttttcctgccagtacatttcaaagaagcaaattaaacaaaacagcaggggaatagcataatctcagggaagattatgctatgccacaaaagcagtttaargcagcagcttctgtgtgccatgtgcctaaatacagagcatttcaaggaagaaacatttctcacccttcccaaacattctaggcaccctccttcagtctcaacctgcgtgccaa

SEQ ID NO: 49096 - DNA, 600 bp, Chicken  19866894294832_2
ggagcagcaggccagaagagcccacttcagcttagctccccacaccaacacaccgcaggtgcaccaggcgctctgtgccgaaaggagaagcagcgctgcttgaaagcagctgarcatgcctctggtgactgctgctgcttccaagacagctttcatacaggttttcagaccacacctgctgtccacactgaataaagcctttttcctgccagtacatttcaaagaagcaaattaaacaaaacagcaggggaatagcataatctcagggaagattatgctatgccacaaaagcagtttaargcagcagcttctgtgtgccatgtgcctaaatacagagcatttcaaggaagaaacatttctcacccttcccaaacattctaggcaccctccttcagtctcaacctgcgtgccaaaactsaaatggagtatccagtaaactactggagactgactccaaaccaatacataaaccaccaggctcatgaaaacagtgctagggttctgaaaagacagcaataatcatagaatcatagaagcatagaatcacaaaggttggaaaagacccacaggatsacycagtccaaccattcacccatcacc

SEQ ID NO: 49097 - DNA, 600 bp, Chicken  19866894294832_3
cctctggtgactgctgctgcttccaagacagctttcatacaggttttcagaccacacctgctgtccacactgaataaagcctttttcctgccagtacatttcaaagaagcaaattaaacaaaacagcaggggaatagcataatctcagggaagattatgctatgccacaaaagcagtttaargcagcagcttctgtgtgccatgtgcctaaatacagagcatttcaaggaagaaacatttctcacccttcccaaacattctaggcaccctccttcagtctcaacctgcgtgccaaaactsaaatggagtatccagtaaactactggagactgactccaaaccaatacataaaccaccaggctcatgaaaacagtgctagggttctgaaaagacagcaataatcatagaatcatagaagcatagaatcacaaaggttggaaaagacccacaggatsacycagtccaaccattcacccatcaccaatggttctcactaaaccatgtccctcaacacaacgtccaacggtaaggtctgccacagacaaaggattttaagctccttccaggtaggagaaaagcatttgcttgtagtatcacagc

SEQ ID NO: 49098 - DNA, 537 bp, Chicken  19866894294832_4
tatgctatgccacaaaagcagtttaargcagcagcttctgtgtgccatgtgcctaaatacagagcatttcaaggaagaaacatttctcacccttcccaaacattctaggcaccctccttcagtctcaacctgcgtgccaaaactsaaatggagtatccagtaaactactggagactgactccaaaccaatacataaaccaccaggctcatgaaaacagtgctagggttctgaaaagacagcaataatcatagaatcatagaagcatagaatcacaaaggttggaaaagacccacaggatsacycagtccaaccattcacccatcaccaatggttctcactaaaccatgtccctcaacacaacgtccaacggtaaggtctgccacagacaaaggattttaagctccttccaggtaggagaaaagcatttgcttgtagtatcacagcaaaacaggcagaaggacaatgaaaatcttccactgttataaaagaaggtgcagggttggtacccgttgatacaactgtgatcatattagcag

SEQ ID NO: 49099 - DNA, 534 bp, Chicken  19866894294832_5
gctatgccacaaaagcagtttaargcagcagcttctgtgtgccatgtgcctaaatacagagcatttcaaggaagaaacatttctcacccttcccaaacattctaggcaccctccttcagtctcaacctgcgtgccaaaactsaaatggagtatccagtaaactactggagactgactccaaaccaatacataaaccaccaggctcatgaaaacagtgctagggttctgaaaagacagcaataatcatagaatcatagaagcatagaatcacaaaggttggaaaagacccacaggatsacycagtccaaccattcacccatcaccaatggttctcactaaaccatgtccctcaacacaacgtccaacggtaaggtctgccacagacaaaggattttaagctccttccaggtaggagaaaagcatttgcttgtagtatcacagcaaaacaggcagaaggacaatgaaaatcttccactgttataaaagaaggtgcagggttggtacccgttgatacaactgtgatcatattagcag

SEQ ID NO: 49100 - DNA, 599 bp, Chicken  19866894294838_1
  misc_feature (1)..(140): n is any nucleotide
nnnnnnnnnnnnnnnnnnnnnnnnnnnnnnnnnnnnnnnnnnnnnnnnnnnnnnnnnnnnnnnnnnnnnnnnnnnnnnnnnnnnnnnnnnnnnnnnnnnnnnnnnnnnnnnnnnnnnnnnnnnnnnnnnnnnnnnnnnnntgacctttttctaatagtgacaaagtaatgactgacaaaaactgattgcaaatgggtggctttagaaaattgtttgcatttccgtaaattttcccaaaagatctcagtagcataaatttagaatggtattttctatggtcccaagtttaaggcccaagtkcacagctgagagacctgtgaacycttaattcccttctgaattacaaactgattcagaaaactacactacggttgagggtggtcaaagaacctgttcagcttcaaagcatacagaaagattaaattaaactgaaagaaggaaggcgacctaccttggagaaatatcacawccttgctgcataaaagctcccagggagaaccagaggctgttgaatatcccaaactcattcgtctgatcgttggctggctggtcccgtccttcctcaaactcctcggtgtgccactcgtaagggctgaagc

SEQ ID NO: 49101 - DNA, 599 bp, Chicken  19866894294838_2
  misc_feature (1)..(117): n is any nucleotide
nnnnnnnnnnnnnnnnnnnnnnnnnnnnnnnnnnnnnnnnnnnnnnnnnnnnnnnnnnnnnnnnnnnnnnnnnnnnnnnnnnnnnnnnnnnnnnnnnnnnnnnnnnnnnnnnnnnnntgacctttttctaatagtgacaaagtaatgactgacaaaaactgattgcaaatgggtggctttagaaaattgtttgcatttccgtaaattttcccaaaagatctcagtagcataaatttagaatggtattttctatggtcccaagtttaaggcccaagtkcacagctgagagacctgtgaacycttaattcccttctgaattacaaactgattcagaaaactacactacggttgagggtggtcaaagaacctgttcagcttcaaagcatacagaaagattaaattaaactgaaagaaggaaggcgacctaccttggagaaatatcacawccttgctgcataaaagctcccagggagaaccagaggctgttgaatatcccaaactcattcgtctgatcgttggctggctggtcccgtccttcctcaaactcctcggtgtgccactcgtaagggctgaagcgactcaccaagaagaggacaaca

SEQ ID NO: 49102 - DNA, 600 bp, Chicken  19866894294838_3
gactgacaaaaactgattgcaaatgggtggctttagaaaattgtttgcatttccgtaaattttcccaaaagatctcagtagcataaatttagaatggtattttctatggtcccaagtttaaggcccaagtkcacagctgagagacctgtgaacycttaattcccttctgaattacaaactgattcagaaaactacactacggttgagggtggtcaaagaacctgttcagcttcaaagcatacagaaagattaaattaaactgaaagaaggaaggcgacctaccttggagaaatatcacawccttgctgcataaaagctcccagggagaaccagaggctgttgaatatcccaaactcattcgtctgatcgttggctggctggtcccgtccttcctcaaactcctcggtgtgccactcgtaagggctgaagcgactcaccaagaagaggacaacactcactccaatgtaggcaaaaacaatacacatccatatttcataagccaaagggtccagaaaagagaacactcctggtttggacttctgaggtttttttatcatgatagagatacctaagctcataaaaggtttggaaaagtctata

SEQ ID NO: 49103 - DNA, 600 bp, Chicken  19866894294842_1
acaccttagcaagcagatgattttcataatttaataaagtgtatacttaattccacaacaattatattcttgaatatagattatcttcttgaacatgttctaactaagtccccagatgtttgtttttcaaggtaggtgctatgtattgaaattttaatagcatgttgtacattattcctctaaaaatctttaccacactttgggagtatcttactgccatgttctaggcaataagtagaaattaacatggtctcactaacttcaaggttcgattgctgtttctttgttgttgttgtttgktttttttttttttttcaggtttacaatcctcaaaaaacttaaatgcacatccagctttctttctcctttatcactttgtacttacagttaagttggactrcagtgtagatgcatttcaacatgggcattttagtccctgcagttgagctttgtttttcatccatccaggatggaaaatttgttctataattctatatcctaatgaaatcactgatcataagcatgcaagcaaaaatgaaatattgcttagttaagtcaatttctgagtgtctcttgatttttgtcatgtttgacagttag

SEQ ID NO: 49104 - DNA, 600 bp, Chicken  19866894294842_2
taactaagtccccagatgtttgtttttcaaggtaggtgctatgtattgaaattttaatagcatgttgtacattattcctctaaaaatctttaccacactttgggagtatcttactgccatgttctaggcaataagtagaaattaacatggtctcactaacttcaaggttcgattgctgtttctttgttgttgttgtttgktttttttttttttttcaggtttacaatcctcaaaaaacttaaatgcacatccagctttctttctcctttatcactttgtacttacagttaagttggactrcagtgtagatgcatttcaacatgggcattttagtccctgcagttgagctttgtttttcatccatccaggatggaaaatttgttctataattctatatcctaatgaaatcactgatcataagcatgcaagcaaaaatgaaatattgcttagttaagtcaatttctgagtgtctcttgatttttgtcatgtttgacagttagcttatcaaagatatttacttgtcagcaaagatttgtttcctcaggacctatcttatcttattctatgaattggaaaagaaagcataatactcaatcattt

SEQ ID NO: 49105 - DNA, 600 bp, Chicken  19866894294846_1
gagcaggtttgcctccattcatttcagtctcatttggattccccccactctgtctcctctctcttactgctctcagacagctgaacacacctgccagaggaatgagtgggtggcagctctttaccccgatgtccaacccccaaaggctaaaacaaaaatgacaaatcttaccacttctgaatttccttgcaatgcccttcagctgacagtcatggactatgtggcttagcgttacactttaataagagttttaagaaagtctaacatgactggtaactttaaaatacctgttatttcatytgagttacatacatgcttttggtttactcacagactttcaaaataaaaagctgctcagaaagctttttcaactgagacaaatgaaaacaaataaggaaactgagctgcttgttgagcagaagatgagacactgacagccctkwmwtttttcttttatgaacattccatctcaacacaccacaaaacagcaataacaacaacaaaaacccccacaccaacaggaaagaaaacaagcaagaaacattttccctcatgaggcaaggatagggtgagagctggatgtgtttcttactgcaaaca

SEQ ID NO: 49106 - DNA, 594 bp, Chicken  19866894294846_2
aaggctaaaacaaaaatgacaaatcttaccacttctgaatttccttgcaatgcccttcagctgacagtcatggactatgtggcttagcgttacactttaataagagttttaagaaagtctaacatgactggtaactttaaaatacctgttatttcatytgagttacatacatgcttttggtttactcacagactttcaaaataaaaagctgctcagaaagctttttcaactgagacaaatgaaaacaaataaggaaactgagctgcttgttgagcagaagatgagacactgacagccctkwmwtttttcttttatgaacattccatctcaacacaccacaaaacagcaataacaacaacaaaaacccccacaccaacaggaaagaaaacaagcaagaaacattttccctcatgaggcaaggatagggtgagagctggatgtgtttcttactgcaaacaagcaaaattacttaaataaaatgaattttaaaatatattaatgttgcctacactaggaaggggaaagatgtaacaggcatcatgcgcaattgaggactacatcgatacctgcccagttctctgcagtctaaaacag

SEQ ID NO: 49107 - DNA, 593 bp, Chicken  19866894294846_3
aggctaaaacaaaaatgacaaatcttaccacttctgaatttccttgcaatgcccttcagctgacagtcatggactatgtggcttagcgttacactttaataagagttttaagaaagtctaacatgactggtaactttaaaatacctgttatttcatytgagttacatacatgcttttggtttactcacagactttcaaaataaaaagctgctcagaaagctttttcaactgagacaaatgaaaacaaataaggaaactgagctgcttgttgagcagaagatgagacactgacagccctkwmwtttttcttttatgaacattccatctcaacacaccacaaaacagcaataacaacaacaaaaacccccacaccaacaggaaagaaaacaagcaagaaacattttccctcatgaggcaaggatagggtgagagctggatgtgtttcttactgcaaacaagcaaaattacttaaataaaatgaattttaaaatatattaatgttgcctacactaggaaggggaaagatgtaacaggcatcatgcgcaattgaggactacatcgatacctgcccagttctctgcagtctaaaacag

SEQ ID NO: 49108 - DNA, 592 bp, Chicken  19866894294846_4
ggctaaaacaaaaatgacaaatcttaccacttctgaatttccttgcaatgcccttcagctgacagtcatggactatgtggcttagcgttacactttaataagagttttaagaaagtctaacatgactggtaactttaaaatacctgttatttcatytgagttacatacatgcttttggtttactcacagactttcaaaataaaaagctgctcagaaagctttttcaactgagacaaatgaaaacaaataaggaaactgagctgcttgttgagcagaagatgagacactgacagccctkwmwtttttcttttatgaacattccatctcaacacaccacaaaacagcaataacaacaacaaaaacccccacaccaacaggaaagaaaacaagcaagaaacattttccctcatgaggcaaggatagggtgagagctggatgtgtttcttactgcaaacaagcaaaattacttaaataaaatgaattttaaaatatattaatgttgcctacactaggaaggggaaagatgtaacaggcatcatgcgcaattgaggactacatcgatacctgcccagttctctgcagtctaaaacag

SEQ ID NO: 49109 - DNA, 591 bp, Chicken  19866894294846_5
gctaaaacaaaaatgacaaatcttaccacttctgaatttccttgcaatgcccttcagctgacagtcatggactatgtggcttagcgttacactttaataagagttttaagaaagtctaacatgactggtaactttaaaatacctgttatttcatytgagttacatacatgcttttggtttactcacagactttcaaaataaaaagctgctcagaaagctttttcaactgagacaaatgaaaacaaataaggaaactgagctgcttgttgagcagaagatgagacactgacagccctkwmwtttttcttttatgaacattccatctcaacacaccacaaaacagcaataacaacaacaaaaacccccacaccaacaggaaagaaaacaagcaagaaacattttccctcatgaggcaaggatagggtgagagctggatgtgtttcttactgcaaacaagcaaaattacttaaataaaatgaattttaaaatatattaatgttgcctacactaggaaggggaaagatgtaacaggcatcatgcgcaattgaggactacatcgatacctgcccagttctctgcagtctaaaacag

SEQ ID NO: 49110 - DNA, 600 bp, Chicken  19866894294848_1
cccagcagccctcctcgtgcccaggagccaggcactcaccgaggacgtgacccgccagcaccgcatgcgcgtaaccttgaagctgccttccttgatctgctcgctcggcagccgcacttggaagttgagctcgttgttgccagcgctgacgacgacgtggcatcccttctcggggaagtccgtgacgcagggatcgaacttgagatagccatagtatttcagggtctgagccagtcggatgaactgtgggcagagcagggaaaatcagcacccacaggcagctccgtcggttggaaagcrggcgccaagctcagccctggggctcttacggggcagtgggaccggtctggagccyrggactactccraccacagcatcatgccctcccctacctccttcttggagactttttcctgcagagacttgagctgccggtgctgctccttgttgacaaggatccatccatgctcgatatctgacaccgtctatcgagaagcagaggctggtgagcagctgggcccaaagccctgagagccrcagagcagtcactggggctgcgttgccccctcctcaccccgctgggccacacagaccctcacc

SEQ ID NO: 49111 - DNA, 600 bp, Chicken  19866894294848_2
cagcaccgcatgcgcgtaaccttgaagctgccttccttgatctgctcgctcggcagccgcacttggaagttgagctcgttgttgccagcgctgacgacgacgtggcatcccttctcggggaagtccgtgacgcagggatcgaacttgagatagccatagtatttcagggtctgagccagtcggatgaactgtgggcagagcagggaaaatcagcacccacaggcagctccgtcggttggaaagcrggcgccaagctcagccctggggctcttacggggcagtgggaccggtctggagccyrggactactccraccacagcatcatgccctcccctacctccttcttggagactttttcctgcagagacttgagctgccggtgctgctccttgttgacaaggatccatccatgctcgatatctgacaccgtctatcgagaagcagaggctggtgagcagctgggcccaaagccctgagagccrcagagcagtcactggggctgcgttgccccctcctcaccccgctgggccacacagaccctcacctgtgcatacaacaagttgagtcccacatgatgctccattacatcatcatcgtagg

SEQ ID NO: 49112 - DNA, 600 bp, Chicken  19866894294848_3
agcaccgcatgcgcgtaaccttgaagctgccttccttgatctgctcgctcggcagccgcacttggaagttgagctcgttgttgccagcgctgacgacgacgtggcatcccttctcggggaagtccgtgacgcagggatcgaacttgagatagccatagtatttcagggtctgagccagtcggatgaactgtgggcagagcagggaaaatcagcacccacaggcagctccgtcggttggaaagcrggcgccaagctcagccctggggctcttacggggcagtgggaccggtctggagccyrggactactccraccacagcatcatgccctcccctacctccttcttggagactttttcctgcagagacttgagctgccggtgctgctccttgttgacaaggatccatccatgctcgatatctgacaccgtctatcgagaagcagaggctggtgagcagctgggcccaaagccctgagagccrcagagcagtcactggggctgcgttgccccctcctcaccccgctgggccacacagaccctcacctgtgcatacaacaagttgagtcccacatgatgctccattacatcatcatcgtagga

SEQ ID NO: 49113 - DNA, 600 bp, Chicken  19866894294848_4
cgcgtaaccttgaagctgccttccttgatctgctcgctcggcagccgcacttggaagttgagctcgttgttgccagcgctgacgacgacgtggcatcccttctcggggaagtccgtgacgcagggatcgaacttgagatagccatagtatttcagggtctgagccagtcggatgaactgtgggcagagcagggaaaatcagcacccacaggcagctccgtcggttggaaagcrggcgccaagctcagccctggggctcttacggggcagtgggaccggtctggagccyrggactactccraccacagcatcatgccctcccctacctccttcttggagactttttcctgcagagacttgagctgccggtgctgctccttgttgacaaggatccatccatgctcgatatctgacaccgtctatcgagaagcagaggctggtgagcagctgggcccaaagccctgagagccrcagagcagtcactggggctgcgttgccccctcctcaccccgctgggccacacagaccctcacctgtgcatacaacaagttgagtcccacatgatgctccattacatcatcatcgtaggaggagtcccagt

SEQ ID NO: 49114 - DNA, 600 bp, Chicken  19866894294848_5
gatgaactgtgggcagagcagggaaaatcagcacccacaggcagctccgtcggttggaaagcrggcgccaagctcagccctggggctcttacggggcagtgggaccggtctggagccyrggactactccraccacagcatcatgccctcccctacctccttcttggagactttttcctgcagagacttgagctgccggtgctgctccttgttgacaaggatccatccatgctcgatatctgacaccgtctatcgagaagcagaggctggtgagcagctgggcccaaagccctgagagccrcagagcagtcactggggctgcgttgccccctcctcaccccgctgggccacacagaccctcacctgtgcatacaacaagttgagtcccacatgatgctccattacatcatcatcgtaggaggagtcccagtagctggaagggaaccacacgagtcagcttcttccccagctcctgacagcagtggggagaacaccgtcctgcaggcagggacgtggagctgggctgcccccacagcccgctccctttcgcagccttcagcagccacatcccgctcacagaaccgtgggggggtcagaaggg

SEQ ID NO: 49115 - DNA, 600 bp, Chicken  19866894294852_1
gctgaacacatgaacactctgggataattcttagaagtcactattagtgtcaagaataaactgcacactgatgcccccatgtaatagtgtgctatgtaaagtgctctgttcaacatcttagaagtctgttactttctgttgattggtatggaaagaaaagaccttgctcttctttctctttaagaagagatagggaaagataaacaaaaatttaaacccaaactgaaaagctgtttcttcagcaaggacttgcttacagacaacagaaagagagaagaaaaacggtgctagctactgagrgatgtcacagcatcatgctcacattaccagaggaaaggaaaaagaaagcagaaaaaaaagtatctgatatttatctgatatttgacaagacaaaatgacatttatcagtactacccccataaataacctaaggtgcatgtttttttccccccactaggtcagaaagtgtttctctagcaagtaatcaatagttttatactaagaaarttcctctaagtgtcagctcatcctcttcaaatctgcaacctattcatatttatcattagcaaagaaatcatcttgaagaactttcggtagaaa

SEQ ID NO: 49116 - DNA, 600 bp, Chicken  19866894294852_2
aaatttaaacccaaactgaaaagctgtttcttcagcaaggacttgcttacagacaacagaaagagagaagaaaaacggtgctagctactgagrgatgtcacagcatcatgctcacattaccagaggaaaggaaaaagaaagcagaaaaaaaagtatctgatatttatctgatatttgacaagacaaaatgacatttatcagtactacccccataaataacctaaggtgcatgtttttttccccccactaggtcagaaagtgtttctctagcaagtaatcaatagttttatactaagaaarttcctctaagtgtcagctcatcctcttcaaatctgcaacctattcatatttatcattagcaaagaaatcatcttgaagaactttcggtagaaaatccttctaagaaatcaaagaatgtcacagaatcctttttttttttttccccagataaaaaaaagaacagaaaatatatgaatttmtatatttaatatttacacaatatgtaccttcatttcacttgtgaaaataggcttggcgaaagagtgtgataaaagtcctgcgatgtgtggaccttyttacatctgatactacatcaaatcc

SEQ ID NO: 49117 - DNA, 600 bp, Chicken  19866894294852_3
aagacaaaatgacatttatcagtactacccccataaataacctaaggtgcatgtttttttccccccactaggtcagaaagtgtttctctagcaagtaatcaatagttttatactaagaaarttcctctaagtgtcagctcatcctcttcaaatctgcaacctattcatatttatcattagcaaagaaatcatcttgaagaactttcggtagaaaatccttctaagaaatcaaagaatgtcacagaatcctttttttttttttccccagataaaaaaaagaacagaaaatatatgaatttmtatatttaatatttacacaatatgtaccttcatttcacttgtgaaaataggcttggcgaaagagtgtgataaaagtcctgcgatgtgtggaccttyttacatctgatactacatcaaatccagtcaaggtccctgcccataatttattatgcatccagtatgattggattttcattgtctgaaattatagaaacccagatcctgagaataaatgtctgtagtttaacatatttgtaagtcactagaaggaaaagctaaatagagtccagagactagatggatgaggggttatgttttaca

SEQ ID NO: 49118 - DNA, 600 bp, Chicken  19866894294852_4
aatcaatagttttatactaagaaarttcctctaagtgtcagctcatcctcttcaaatctgcaacctattcatatttatcattagcaaagaaatcatcttgaagaactttcggtagaaaatccttctaagaaatcaaagaatgtcacagaatcctttttttttttttccccagataaaaaaaagaacagaaaatatatgaatttmtatatttaatatttacacaatatgtaccttcatttcacttgtgaaaataggcttggcgaaagagtgtgataaaagtcctgcgatgtgtggaccttyttacatctgatactacatcaaatccagtcaaggtccctgcccataatttattatgcatccagtatgattggattttcattgtctgaaattatagaaacccagatcctgagaataaatgtctgtagtttaacatatttgtaagtcactagaaggaaaagctaaatagagtccagagactagatggatgaggggttatgttttacaggagaaaacgaaatccagtctttaataatctttgtataacagtgcaaggtgttcacagaaaatgcatctcagtgctgtggcacttgggaccgtttc

SEQ ID NO: 49119 - DNA, 600 bp, Chicken  19866894294857_1
agaataacaccagtcagcttgagtagagtcacaagattattaatactccagctgactcattctctcattgtgattaatatcactttagttgatttttgcactacattttcagtcggtatacttcttagattagagctaagtcaagatacataaattctgttattaaaaacgtaccttgtccatcactcactgaattttcatccttaattatctctccactgtaagcaaacccatgacagcatcaacgtattataaccaaaaaacagggcttgcattccagaaaaagcaaaaacaatctcytcttttgctgtcaggctgactccaaagaaaagtagctaaaattaacctgragctctrtttcacacaatgcttgctgttccttttaacttctacagcagacccgacatcttcagacatcaaggccttcctgaggaagggactaatctgaaggcttcttgaaggcacctttgtctttcaagatttttcttttctccttcacactttttcagaatgttagataatcaacaaaagagcattcaacttacattttctatatgatgtctctcctcatcttcttcatccattcatgtaatttcatag

SEQ ID NO: 49120 - DNA, 600 bp, Chicken  19866894294857_2
gctgactcattctctcattgtgattaatatcactttagttgatttttgcactacattttcagtcggtatacttcttagattagagctaagtcaagatacataaattctgttattaaaaacgtaccttgtccatcactcactgaattttcatccttaattatctctccactgtaagcaaacccatgacagcatcaacgtattataaccaaaaaacagggcttgcattccagaaaaagcaaaaacaatctcytcttttgctgtcaggctgactccaaagaaaagtagctaaaattaacctgragctctrtttcacacaatgcttgctgttccttttaacttctacagcagacccgacatcttcagacatcaaggccttcctgaggaagggactaatctgaaggcttcttgaaggcacctttgtctttcaagatttttcttttctccttcacactttttcagaatgttagataatcaacaaaagagcattcaacttacattttctatatgatgtctctcctcatcttcttcatccattcatgtaatttcatagaactgtagaatcacagaaaccataggtttgggttggaagggaccttttaa

SEQ ID NO: 49121 - DNA, 600 bp, Chicken  19866894294857_3
cattctctcattgtgattaatatcactttagttgatttttgcactacattttcagtcggtatacttcttagattagagctaagtcaagatacataaattctgttattaaaaacgtaccttgtccatcactcactgaattttcatccttaattatctctccactgtaagcaaacccatgacagcatcaacgtattataaccaaaaaacagggcttgcattccagaaaaagcaaaaacaatctcytcttttgctgtcaggctgactccaaagaaaagtagctaaaattaacctgragctctrtttcacacaatgcttgctgttccttttaacttctacagcagacccgacatcttcagacatcaaggccttcctgaggaagggactaatctgaaggcttcttgaaggcacctttgtctttcaagatttttcttttctccttcacactttttcagaatgttagataatcaacaaaagagcattcaacttacattttctatatgatgtctctcctcatcttcttcatccattcatgtaatttcatagaactgtagaatcacagaaaccataggtttgggttggaagggaccttttaagatcacc

SEQ ID NO: 49122 - DNA, 600 bp, Chicken  19866894294865_1
actgcagtctgcctgcgtggagaggggctgcttctgagccctggggagcagcgggcaccgagggaccctcgagaggacactgccaagcagactgcctggagctgcccctgcgcaccattccagaaacatctcagctatgcagcagagcctctcaatttcctgctatttgtttgtttgttcctctatcaaagggcttcagttccttggaaattccttctccaccaagcgccggtgaggagcctggagatgcggcctggcaccaggcccgggcagccagagcagccacatctgcttcaccayctgctgagaccctgcaggcatcatgaccctgctccctgcagcactgcaaagcctttcttggggtgcacagagtcacaaatacctataccacacaaacctgctctgctacactctactatggaatgaaatgcctgtgcttgcagctaacaacagcgctgccctcagccaagacaccatggagctccaagcagtgycctrcgcccttccaagtcctcagcactacacccaaaaaccccattcataccacctagcaccagcagatgcccatgggagaaaygggcagcctggggatgtctctct

SEQ ID NO: 49123 - DNA, 600 bp, Chicken  19866894294865_2
ttcagttccttggaaattccttctccaccaagcgccggtgaggagcctggagatgcggcctggcaccaggcccgggcagccagagcagccacatctgcttcaccayctgctgagaccctgcaggcatcatgaccctgctccctgcagcactgcaaagcctttcttggggtgcacagagtcacaaatacctataccacacaaacctgctctgctacactctactatggaatgaaatgcctgtgcttgcagctaacaacagcgctgccctcagccaagacaccatggagctccaagcagtgycctrcgcccttccaagtcctcagcactacacccaaaaaccccattcataccacctagcaccagcagatgcccatgggagaaaygggcagcctggggatgtctctctgctggatggtagcagctgctgcacccaaaaagaagagccggaaggctgaaggagcatggagctgcagggacactctgggaaagtctcagagaccatttttgaaggtcttatggcaagtgcaggaagctcctgcagcaggacaccgtgtccccagatggagcaagctgctcccaccctggctaagggagtacagg

SEQ ID NO: 49124 - DNA, 600 bp, Chicken  19866894294865_3
gttccttggaaattccttctccaccaagcgccggtgaggagcctggagatgcggcctggcaccaggcccgggcagccagagcagccacatctgcttcaccayctgctgagaccctgcaggcatcatgaccctgctccctgcagcactgcaaagcctttcttggggtgcacagagtcacaaatacctataccacacaaacctgctctgctacactctactatggaatgaaatgcctgtgcttgcagctaacaacagcgctgccctcagccaagacaccatggagctccaagcagtgycctrcgcccttccaagtcctcagcactacacccaaaaaccccattcataccacctagcaccagcagatgcccatgggagaaaygggcagcctggggatgtctctctgctggatggtagcagctgctgcacccaaaaagaagagccggaaggctgaaggagcatggagctgcagggacactctgggaaagtctcagagaccatttttgaaggtcttatggcaagtgcaggaagctcctgcagcaggacaccgtgtccccagatggagcaagctgctcccaccctggctaagggagtacaggcaat

SEQ ID NO: 49125 - DNA, 588 bp, Chicken  19866894294865_4
agcagccacatctgcttcaccayctgctgagaccctgcaggcatcatgaccctgctccctgcagcactgcaaagcctttcttggggtgcacagagtcacaaatacctataccacacaaacctgctctgctacactctactatggaatgaaatgcctgtgcttgcagctaacaacagcgctgccctcagccaagacaccatggagctccaagcagtgycctrcgcccttccaagtcctcagcactacacccaaaaaccccattcataccacctagcaccagcagatgcccatgggagaaaygggcagcctggggatgtctctctgctggatggtagcagctgctgcacccaaaaagaagagccggaaggctgaaggagcatggagctgcagggacactctgggaaagtctcagagaccatttttgaaggtcttatggcaagtgcaggaagctcctgcagcaggacaccgtgtccccagatggagcaagctgctcccaccctggctaagggagtacaggcaatgactgcagtccccgctggaggggtgggccttccttgcccttcctgatccctgctcagctgagtgctc

SEQ ID NO: 49126 - DNA, 600 bp, Chicken  19866894294868_1
acgcaaactaactcaattctttaattaaatctgcagcagtttctatttttcaacgtatgtgggaaaaggtagggtctgataaattccctcagttgaagaattttcaagttccagctggactgcactttaattaagttcattttctcccttttatctgctgaggtcccactccattaaaatttcaaatcaatcttcagtgtaacgtttcagaaaagagaactctgtgtgactgttaaatgatttgtcaggaagctgaaatccttcaaaacttctaagtctataagttgtggtggcaaaggrgagcgttgggaaggcaaagtgaaaattatgaacgtgggaagcgtgccccatctgaagtctggtgcacagagcaggcttttaatggagctacttctgtttctgctctttgccagctgtagtgtgacactggggatctgctcagtaaaatgataacacttgcacaacaaactgtttgtccctggctggttgacaaactgagagcagtggtattgtttttgagcaagagcccagagtcccctcgtcatcctctcatgctgaaataattgttaaccattgaaagagagcatctatttcacaggc

SEQ ID NO: 49127 - DNA, 600 bp, Chicken  19866894294879_1
gagacaaaaatagcttcaattgtacttacaagaggatatgtttaatgaaacaaagttatgaaaacaaagttattttaatgacataaattaaaactacgtactacatcagctaagaaagcatccctttgcactacaaaggcgctaaactgtgcttaaatactgccctctgggggtcacagagccacttgcttccagtttctaagaaaatttcagcctcagctgatgtgagagcaatgaaatcatacaaaataacaaggctaaatggtgtatacgtataaaggaaataagaaaaaaaaatcmaaattcacagacattcagaacattttatttacataggcaaaatgtacttaatcctgacaggaaacaagatatttcacccattagaaataacctaaaatatgctttgtgcaaccaaaatatttaccagtcgtccagaaatattctgatctcttaagtctcctgaactagttcatttgcaggttggatatactctgtgtaagaactgtagttgtcactggaaacttgaaacttgcctcttctcaaggcaagatccttacagttgaaagctgtaacttgaacttaccttaaaagattgctagt

SEQ ID NO: 49128 - DNA, 600 bp, Chicken  19866894294879_2
atatgctttgtgcaaccaaaatatttaccagtcgtccagaaatattctgatctcttaagtctcctgaactagttcatttgcaggttggatatactctgtgtaagaactgtagttgtcactggaaacttgaaacttgcctcttctcaaggcaagatccttacagttgaaagctgtaacttgaacttaccttaaaagattgctagtttctgattattttgccacttgtacagtacagagtaaatcatatatatacattttatattaaataggatattcagaggttgccaagttaggcaactwgtgctgcacagaggcaggcaacaaactcctagcaatgacagtggcatataactcacttcagccacttggaaaatggyattaagtcatttaagatagttaaaaaagacaatcacaatggctctaagtatgttaatacaagaaaagacatttttttctgaatatttctggttactaattaaaacaacgagccatgaactgaagaagaaaacacatttggaaagtacatcatttgtgctgtcctaatttggaagttaagactgggaggagtctractgtatctttactaaacagttttctaag

SEQ ID NO: 49129 - DNA, 600 bp, Chicken  19866894294879_3
ttgcaggttggatatactctgtgtaagaactgtagttgtcactggaaacttgaaacttgcctcttctcaaggcaagatccttacagttgaaagctgtaacttgaacttaccttaaaagattgctagtttctgattattttgccacttgtacagtacagagtaaatcatatatatacattttatattaaataggatattcagaggttgccaagttaggcaactwgtgctgcacagaggcaggcaacaaactcctagcaatgacagtggcatataactcacttcagccacttggaaaatggyattaagtcatttaagatagttaaaaaagacaatcacaatggctctaagtatgttaatacaagaaaagacatttttttctgaatatttctggttactaattaaaacaacgagccatgaactgaagaagaaaacacatttggaaagtacatcatttgtgctgtcctaatttggaagttaagactgggaggagtctractgtatctttactaaacagttttctaagtttactgaataaagcgtttatttactgaaaccactgccctactttctcagtctttaaaaatgaattaatattgttag

SEQ ID NO: 49130 - DNA, 600 bp, Chicken  19866894294879_4
tattcagaggttgccaagttaggcaactwgtgctgcacagaggcaggcaacaaactcctagcaatgacagtggcatataactcacttcagccacttggaaaatggyattaagtcatttaagatagttaaaaaagacaatcacaatggctctaagtatgttaatacaagaaaagacatttttttctgaatatttctggttactaattaaaacaacgagccatgaactgaagaagaaaacacatttggaaagtacatcatttgtgctgtcctaatttggaagttaagactgggaggagtctractgtatctttactaaacagttttctaagtttactgaataaagcgtttatttactgaaaccactgccctactttctcagtctttaaaaatgaattaatattgttagaatatgatatacgtagtgtatcaatctctacttgcattctgttcaactactgaccttgttcttcataagggtcatctggatcgtctgcaaccagttcagcactgcttggtgtctcatggtcctccttagtcacaaatataattttgtcttttcctgtcacataggagacaataagcaaaagatcaggaaaagst

SEQ ID NO: 49131 - DNA, 600 bp, Chicken  19866894294879_5
ractgtatctttactaaacagttttctaagtttactgaataaagcgtttatttactgaaaccactgccctactttctcagtctttaaaaatgaattaatattgttagaatatgatatacgtagtgtatcaatctctacttgcattctgttcaactactgaccttgttcttcataagggtcatctggatcgtctgcaaccagttcagcactgcttggtgtctcatggtcctccttagtcacaaatataattttgtcttttcctgtcacataggagacaataagcaaaagatcaggaaaagstgaaactgartaagwaatttacagagtggccgaccagaacacrgtaatgagatactcarcacgatgccctgatgttaatactgtatgaattctacttttcttattgagcatcttcaattacaagttcctggttcacaggaacatgtatataaagacaatcaggaaagtattcacagggaaggtactggaaagttacaaaaagacctggaaataagacctaggagaaaaacaactacacttaaaaaggtcaagtagtaacttatctgggagaacagtaaataaaactgatcctgttgtttt

SEQ ID NO: 49132 - DNA, 600 bp, Chicken  19866894294879_6
ttactaaacagttttctaagtttactgaataaagcgtttatttactgaaaccactgccctactttctcagtctttaaaaatgaattaatattgttagaatatgatatacgtagtgtatcaatctctacttgcattctgttcaactactgaccttgttcttcataagggtcatctggatcgtctgcaaccagttcagcactgcttggtgtctcatggtcctccttagtcacaaatataattttgtcttttcctgtcacataggagacaataagcaaaagatcaggaaaagstgaaactgartaagwaatttacagagtggccgaccagaacacrgtaatgagatactcarcacgatgccctgatgttaatactgtatgaattctacttttcttattgagcatcttcaattacaagttcctggttcacaggaacatgtatataaagacaatcaggaaagtattcacagggaaggtactggaaagttacaaaaagacctggaaataagacctaggagaaaaacaactacacttaaaaaggtcaagtagtaacttatctgggagaacagtaaataaaactgatcctgttgtttttgtaccacac

SEQ ID NO: 49133 - DNA, 600 bp, Chicken  19866894294879_7
aaacagttttctaagtttactgaataaagcgtttatttactgaaaccactgccctactttctcagtctttaaaaatgaattaatattgttagaatatgatatacgtagtgtatcaatctctacttgcattctgttcaactactgaccttgttcttcataagggtcatctggatcgtctgcaaccagttcagcactgcttggtgtctcatggtcctccttagtcacaaatataattttgtcttttcctgtcacataggagacaataagcaaaagatcaggaaaagstgaaactgartaagwaatttacagagtggccgaccagaacacrgtaatgagatactcarcacgatgccctgatgttaatactgtatgaattctacttttcttattgagcatcttcaattacaagttcctggttcacaggaacatgtatataaagacaatcaggaaagtattcacagggaaggtactggaaagttacaaaaagacctggaaataagacctaggagaaaaacaactacacttaaaaaggtcaagtagtaacttatctgggagaacagtaaataaaactgatcctgttgtttttgtaccacactcatg

SEQ ID NO: 49134 - DNA, 600 bp, Chicken  19866894294879_8
gcgtttatttactgaaaccactgccctactttctcagtctttaaaaatgaattaatattgttagaatatgatatacgtagtgtatcaatctctacttgcattctgttcaactactgaccttgttcttcataagggtcatctggatcgtctgcaaccagttcagcactgcttggtgtctcatggtcctccttagtcacaaatataattttgtcttttcctgtcacataggagacaataagcaaaagatcaggaaaagstgaaactgartaagwaatttacagagtggccgaccagaacacrgtaatgagatactcarcacgatgccctgatgttaatactgtatgaattctacttttcttattgagcatcttcaattacaagttcctggttcacaggaacatgtatataaagacaatcaggaaagtattcacagggaaggtactggaaagttacaaaaagacctggaaataagacctaggagaaaaacaactacacttaaaaaggtcaagtagtaacttatctgggagaacagtaaataaaactgatcctgttgtttttgtaccacactcatgtaactgtaggaagttattctcagtattc

SEQ ID NO: 49135 - DNA, 600 bp, Chicken  19866894294879_9
accactgccctactttctcagtctttaaaaatgaattaatattgttagaatatgatatacgtagtgtatcaatctctacttgcattctgttcaactactgaccttgttcttcataagggtcatctggatcgtctgcaaccagttcagcactgcttggtgtctcatggtcctccttagtcacaaatataattttgtcttttcctgtcacataggagacaataagcaaaagatcaggaaaagstgaaactgartaagwaatttacagagtggccgaccagaacacrgtaatgagatactcarcacgatgccctgatgttaatactgtatgaattctacttttcttattgagcatcttcaattacaagttcctggttcacaggaacatgtatataaagacaatcaggaaagtattcacagggaaggtactggaaagttacaaaaagacctggaaataagacctaggagaaaaacaactacacttaaaaaggtcaagtagtaacttatctgggagaacagtaaataaaactgatcctgttgtttttgtaccacactcatgtaactgtaggaagttattctcagtattcagtaagaagtgaaaaa

SEQ ID NO: 49136 - DNA, 599 bp, Chicken  19866894294882_1
  misc_feature (1)..(28): n is any nucleotide
nnnnnnnnnnnnnnnnnnnnnnnnnnnnctgatgtgtgtaggaatcccactgctgtgtatcaaatcttcctttttaagggaacaacagaggctgcagttgtgggtccagtttgtgaacttgctgaagccataagggtaagttcctgagaagcccagccagtgcagccttttggcagggtggagtttgcagcccttctctcaaacagcacagaccaaagcctttcatttgcattgcttgccatgtgttcttgttattatttcttttcaatggcctacagcacaacagaaactgcagcacaragggatcatgatttccagaagcaaacaaacccagagctggattagacagggcccatccgtatctcctcttccagcccyatttttccttgctgactttctgtgcagcagctggcagtgtgtgcaaacccaggaaaagccttgcagagccaagggaaacccaagaggcaattaattcatcttgaaactgcacagccctaaactgtcactggtgacctggacttcctacacagagagcttaggtagttgtgcatgtgccaacatgctgtcagggctgactttttatgaatgatttttttgca

SEQ ID NO: 49137 - DNA, 600 bp, Chicken  19866894294882_2
ggaacaacagaggctgcagttgtgggtccagtttgtgaacttgctgaagccataagggtaagttcctgagaagcccagccagtgcagccttttggcagggtggagtttgcagcccttctctcaaacagcacagaccaaagcctttcatttgcattgcttgccatgtgttcttgttattatttcttttcaatggcctacagcacaacagaaactgcagcacaragggatcatgatttccagaagcaaacaaacccagagctggattagacagggcccatccgtatctcctcttccagcccyatttttccttgctgactttctgtgcagcagctggcagtgtgtgcaaacccaggaaaagccttgcagagccaagggaaacccaagaggcaattaattcatcttgaaactgcacagccctaaactgtcactggtgacctggacttcctacacagagagcttaggtagttgtgcatgtgccaacatgctgtcagggctgactttttatgaatgatttttttgcaacgagtaagagtttgttgaacaaacctttaaacatgtcagcraagtcgaggttgtgtagctctccactgcagcaggcac

SEQ ID NO: 49138 - DNA, 589 bp, Chicken  19866894294882_3
ttagacagggcccatccgtatctcctcttccagcccyatttttccttgctgactttctgtgcagcagctggcagtgtgtgcaaacccaggaaaagccttgcagagccaagggaaacccaagaggcaattaattcatcttgaaactgcacagccctaaactgtcactggtgacctggacttcctacacagagagcttaggtagttgtgcatgtgccaacatgctgtcagggctgactttttatgaatgatttttttgcaacgagtaagagtttgttgaacaaacctttaaacatgtcagcraagtcgaggttgtgtagctctccactgcagcaggcactgttagcctcatgactttgcccattgcccttgggagtcagtgtggctctacctgaggaaaaggagctccaaccatgaagtccatttttaaaagagctatctrtgagagccaggaggacaggaagaaagaagggaagaggcttgcctgttcctacaaaggtttcaaagaggaattcctacctgagcagagtgtgtcttctcaagggagtttcccctggccttctttacaaagctctgggtgctctaccatgac

SEQ ID NO: 49139 - DNA, 450 bp, Chicken  19866894294882_4
gaaactgcacagccctaaactgtcactggtgacctggacttcctacacagagagcttaggtagttgtgcatgtgccaacatgctgtcagggctgactttttatgaatgatttttttgcaacgagtaagagtttgttgaacaaacctttaaacatgtcagcraagtcgaggttgtgtagctctccactgcagcaggcactgttagcctcatgactttgcccattgcccttgggagtcagtgtggctctacctgaggaaaaggagctccaaccatgaagtccatttttaaaagagctatctrtgagagccaggaggacaggaagaaagaagggaagaggcttgcctgttcctacaaaggtttcaaagaggaattcctacctgagcagagtgtgtcttctcaagggagtttcccctggccttctttacaaagctctgggtgctctaccatgac

SEQ ID NO: 49140 - DNA, 599 bp, Chicken  19866894294886_1
  misc_feature (1)..(192): n is any nucleotide
nnnnnnnnnnnnnnnnnnnnnnnnnnnnnnnnnnnnnnnnnnnnnnnnnnnnnnnnnnnnnnnnnnnnnnnnnnnnnnnnnnnnnnnnnnnnnnnnnnnnnnnnnnnnnnnnnnnnnnnnnnnnnnnnnnnnnnnnnnnnnnnnnnnnnnnnnnnnnnnnnnnnnnnnnnnnnnnnnnnnnnnnnnnnnnnngccttctgaaggtaagcagcttctttcctttatttctgtgcctatagctgttgcatttgagtaaatcccccactcgctggagcctggaaccttgctgctctgctgtcygtgctgcactttctattgcattacaaaggcccaccaagaacttttctttacttattcratgtttattgtcctccacggactgagagtctgycttgtttaataaggaaaatagctgcyagaaataggaatcttccccacagctgatgttgtagctttcctccttgctttcctgtagccacaccgtgtttggtgttcactgcatcatgtggggatggagggctgagtgtgcttctgcacagccagctctgcatcagccccatgaagcttctttggccatttttgacctgcttgtcttcaat

SEQ ID NO: 49141 - DNA, 599 bp, Chicken  19866894294886_2
  misc_feature (1)..(134): n is any nucleotide
nnnnnnnnnnnnnnnnnnnnnnnnnnnnnnnnnnnnnnnnnnnnnnnnnnnnnnnnnnnnnnnnnnnnnnnnnnnnnnnnnnnnnnnnnnnnnnnnnnnnnnnnnnnnnnnnnnnnnnnnnnnnnnnnnnnnnngccttctgaaggtaagcagcttctttcctttatttctgtgcctatagctgttgcatttgagtaaatcccccactcgctggagcctggaaccttgctgctctgctgtcygtgctgcactttctattgcattacaaaggcccaccaagaacttttctttacttattcratgtttattgtcctccacggactgagagtctgycttgtttaataaggaaaatagctgcyagaaataggaatcttccccacagctgatgttgtagctttcctccttgctttcctgtagccacaccgtgtttggtgttcactgcatcatgtggggatggagggctgagtgtgcttctgcacagccagctctgcatcagccccatgaagcttctttggccatttttgacctgcttgtcttcaatcacacatcctgtcatcgtttagaaacctgccttaccccctgctcagggtgattcattt

SEQ ID NO: 49142 - DNA, 599 bp, Chicken  19866894294886_3
  misc_feature (1)..(101): n is any nucleotide
nnnnnnnnnnnnnnnnnnnnnnnnnnnnnnnnnnnnnnnnnnnnnnnnnnnnnnnnnnnnnnnnnnnnnnnnnnnnnnnnnnnnnnnnnnnnnnnnnnnnngccttctgaaggtaagcagcttctttcctttatttctgtgcctatagctgttgcatttgagtaaatcccccactcgctggagcctggaaccttgctgctctgctgtcygtgctgcactttctattgcattacaaaggcccaccaagaacttttctttacttattcratgtttattgtcctccacggactgagagtctgycttgtttaataaggaaaatagctgcyagaaataggaatcttccccacagctgatgttgtagctttcctccttgctttcctgtagccacaccgtgtttggtgttcactgcatcatgtggggatggagggctgagtgtgcttctgcacagccagctctgcatcagccccatgaagcttctttggccatttttgacctgcttgtcttcaatcacacatcctgtcatcgtttagaaacctgccttaccccctgctcagggtgattcatttctttcttgctcttttactgagctgtgtaatgtt

SEQ ID NO: 49143 - DNA, 599 bp, Chicken  19866894294886_4
  misc_feature (1)..(75): n is any nucleotide
nnnnnnnnnnnnnnnnnnnnnnnnnnnnnnnnnnnnnnnnnnnnnnnnnnnnnnnnnnnnnnnnnnnnnnnnnnngccttctgaaggtaagcagcttctttcctttatttctgtgcctatagctgttgcatttgagtaaatcccccactcgctggagcctggaaccttgctgctctgctgtcygtgctgcactttctattgcattacaaaggcccaccaagaacttttctttacttattcratgtttattgtcctccacggactgagagtctgycttgtttaataaggaaaatagctgcyagaaataggaatcttccccacagctgatgttgtagctttcctccttgctttcctgtagccacaccgtgtttggtgttcactgcatcatgtggggatggagggctgagtgtgcttctgcacagccagctctgcatcagccccatgaagcttctttggccatttttgacctgcttgtcttcaatcacacatcctgtcatcgtttagaaacctgccttaccccctgctcagggtgattcatttctttcttgctcttttactgagctgtgtaatgtttgttttagtctagaatgcagtttatc

SEQ ID NO: 49144 - DNA, 486 bp, Chicken  19866894294886_5
tggggatggagggctgagtgtgcttctgcacagccagctctgcatcagccccatgaagcttctttggccatttttgacctgcttgtcttcaatcacacatcctgtcatcgtttagaaacctgccttaccccctgctcagggtgattcatttctttcttgctcttttactgagctgtgtaatgtttgttttagtctagaatgcagtttatcaacgtgtgctaccttctgcaaaggacttgttctgtttttctttctaaggaagtgcagattgctgttaaacaagcttctaaagcagataaygctctgagccctttcttaccccttcttttctccaacatagaaaattattaaccaggcacctcttttgcctgtatttttagtgagcataaattaatctccttaatacatagtatgcttcttgcatctacacgtaattaaatcatatttgattcttggaagctattcattcaagtgtaaacctgcttc

SEQ ID NO: 49145 - DNA, 599 bp, Chicken  19866894294887_1
  misc_feature (1)..(75): n is any nucleotide
nnnnnnnnnnnnnnnnnnnnnnnnnnnnnnnnnnnnnnnnnnnnnnnnnnnnnnnnnnnnnnnnnnnnnnnnnnntggcaaagcgctcgtgttcccatgccagaatgtcttcagccaggtttatcttcttgtgcaccatggaaaacttcacctctgggaactggctggcaacaacctgagggaaaggcaaagctgtttggggggtcgtgcttcccactgtgccatcccaccttgcacagcccagcccaaccagacccaatatttttacatggtaaatatacttccaccggtaagatgccrccgatgctatcaaaatgttgtcttagcatcactacagaaatcacgtgggtcttttttacaagcagcaagtcataacaaagcactgtggaaaacacagcagacctagtgtgcttcattcaggactatgatgtgaggatgtctgcactccaaatcgagcgaccagaaacaatacacaaaataattcagtggtagacccttcctttgcatcctattccctttcttcctcttgcaagagagctgtggctccccgaggttgagccctgacttcccatccacccaaccatctccattaccatctc

SEQ ID NO: 49146 - DNA, 600 bp, Chicken  19866894294888_1
atccagaaagagtaggcataacttctggagtgtcctgaggacagaggatcctgactcctggacctcgtttatgataattggcaagaaaacaaatgaacaaacagaggctgagtgaactgttttgctcaattttaagtggaaaaaaggtgcttgatttcaatcctctcagaaataaaaatgacattttgagcaagaaaattcaaagcattccctttaagaatctgttaagacaaaatgtctttgactttttcttgcattccttttagaatgtccaattacatgagtggtatgagtctttargcattttgatgtcaccgagtttgtagcatttgmggaaaagcatgacttagaacttttttgctaaagttctcctgcaagtgtatgcttcagaagttagccatgyagctgttatttcgggctccaaaactctcaaactcaaacctacacccaatggaaacactcaggttccgccttatttcatgcttcaaccatgcaaaaccattaagtttgctatagcatttcagcacaaaaccataaatcacccttagaatgcttgaagggctgcagaattagtgaccctattcaaagttttgaattcac

SEQ ID NO: 49147 - DNA, 600 bp, Chicken  19866894294888_2
cctgaggacagaggatcctgactcctggacctcgtttatgataattggcaagaaaacaaatgaacaaacagaggctgagtgaactgttttgctcaattttaagtggaaaaaaggtgcttgatttcaatcctctcagaaataaaaatgacattttgagcaagaaaattcaaagcattccctttaagaatctgttaagacaaaatgtctttgactttttcttgcattccttttagaatgtccaattacatgagtggtatgagtctttargcattttgatgtcaccgagtttgtagcatttgmggaaaagcatgacttagaacttttttgctaaagttctcctgcaagtgtatgcttcagaagttagccatgyagctgttatttcgggctccaaaactctcaaactcaaacctacacccaatggaaacactcaggttccgccttatttcatgcttcaaccatgcaaaaccattaagtttgctatagcatttcagcacaaaaccataaatcacccttagaatgcttgaagggctgcagaattagtgaccctattcaaagttttgaattcacaacaaagcagctaaccaagtagmtttcatcctg

SEQ ID NO: 49148 - DNA, 600 bp, Chicken  19866894294888_3
gaggctgagtgaactgttttgctcaattttaagtggaaaaaaggtgcttgatttcaatcctctcagaaataaaaatgacattttgagcaagaaaattcaaagcattccctttaagaatctgttaagacaaaatgtctttgactttttcttgcattccttttagaatgtccaattacatgagtggtatgagtctttargcattttgatgtcaccgagtttgtagcatttgmggaaaagcatgacttagaacttttttgctaaagttctcctgcaagtgtatgcttcagaagttagccatgyagctgttatttcgggctccaaaactctcaaactcaaacctacacccaatggaaacactcaggttccgccttatttcatgcttcaaccatgcaaaaccattaagtttgctatagcatttcagcacaaaaccataaatcacccttagaatgcttgaagggctgcagaattagtgaccctattcaaagttttgaattcacaacaaagcagctaaccaagtagmtttcatcctggacattttgtgcaggtctctttagtgttatccacactcatttactatctgcttgcatcttccagtgttta

SEQ ID NO: 49149 - DNA, 476 bp, Chicken  19866894294888_4
tagcatttgmggaaaagcatgacttagaacttttttgctaaagttctcctgcaagtgtatgcttcagaagttagccatgyagctgttatttcgggctccaaaactctcaaactcaaacctacacccaatggaaacactcaggttccgccttatttcatgcttcaaccatgcaaaaccattaagtttgctatagcatttcagcacaaaaccataaatcacccttagaatgcttgaagggctgcagaattagtgaccctattcaaagttttgaattcacaacaaagcagctaaccaagtagmtttcatcctggacattttgtgcaggtctctttagtgttatccacactcatttactatctgcttgcatcttccagtgtttaagagaaaaagctttcagagaacaaacgccacaaatagcacacactgtatgaaagaggctgttcataatctgtcaggaggcgattaacttaaaacta

SEQ ID NO: 49150 - DNA, 599 bp, Chicken  19866894294895_1
  misc_feature (1)..(66): n is any nucleotide
nnnnnnnnnnnnnnnnnnnnnnnnnnnnnnnnnnnnnnnnnnnnnnnnnnnnnnnnnnnnnnnnnnccatctcccaggtctccacacagggcagggagccctcatcaggcaccactgtccctccatgcctgcctgagccctgcagctcctggggactgtccccaaaccctcctttctccaaaggtctccacatccaccggcagcgggcagagcagcagaggactttgcacaggacgcacaccatgctcacatgcttctctgtttatagatgtatttttgagagatagagggacgagcacrgaggtggggtgggaggagcgtgcgggcacagggctgtgctcattgcgagggtgtgaacttgcagatgaagtggtgctgtcggtcacagtcggcgctggaccacaccgtgaaacctacgggagagatgtgccgcggggtcagcatggagwggggcagcagctcccaggtcccctctgcccagaggggtcccayaggagaaggaagcacgggggctgygggcactcactgctgcttcgggtcagcagggcacagcttcctccttgggcaccattcccaggaagcgttcggaggtcatcgaa

SEQ ID NO: 49151 - DNA, 600 bp, Chicken  19866894294895_2
tggggactgtccccaaaccctcctttctccaaaggtctccacatccaccggcagcgggcagagcagcagaggactttgcacaggacgcacaccatgctcacatgcttctctgtttatagatgtatttttgagagatagagggacgagcacrgaggtggggtgggaggagcgtgcgggcacagggctgtgctcattgcgagggtgtgaacttgcagatgaagtggtgctgtcggtcacagtcggcgctggaccacaccgtgaaacctacgggagagatgtgccgcggggtcagcatggagwggggcagcagctcccaggtcccctctgcccagaggggtcccayaggagaaggaagcacgggggctgygggcactcactgctgcttcgggtcagcagggcacagcttcctccttgggcaccattcccaggaagcgttcggaggtcatcgaatttcaccccgtgggtccagcgccagtcccggctctgagcaggacacggggtcaggagcacagccccgctgcccccggccccatgggtaccccctgcccctcacctgccgcaggtagtgcaggcccagccagacgggctgcgtgcgctggt

SEQ ID NO: 49152 - DNA, 600 bp, Chicken  19866894294895_3
tccaccggcagcgggcagagcagcagaggactttgcacaggacgcacaccatgctcacatgcttctctgtttatagatgtatttttgagagatagagggacgagcacrgaggtggggtgggaggagcgtgcgggcacagggctgtgctcattgcgagggtgtgaacttgcagatgaagtggtgctgtcggtcacagtcggcgctggaccacaccgtgaaacctacgggagagatgtgccgcggggtcagcatggagwggggcagcagctcccaggtcccctctgcccagaggggtcccayaggagaaggaagcacgggggctgygggcactcactgctgcttcgggtcagcagggcacagcttcctccttgggcaccattcccaggaagcgttcggaggtcatcgaatttcaccccgtgggtccagcgccagtcccggctctgagcaggacacggggtcaggagcacagccccgctgcccccggccccatgggtaccccctgcccctcacctgccgcaggtagtgcaggcccagccagacgggctgcgtgcgctggtagtacatgatgacccggctcagcgtggctgcttccttgggctc

SEQ ID NO: 49153 - DNA, 600 bp, Chicken  19866894294895_4
agaggactttgcacaggacgcacaccatgctcacatgcttctctgtttatagatgtatttttgagagatagagggacgagcacrgaggtggggtgggaggagcgtgcgggcacagggctgtgctcattgcgagggtgtgaacttgcagatgaagtggtgctgtcggtcacagtcggcgctggaccacaccgtgaaacctacgggagagatgtgccgcggggtcagcatggagwggggcagcagctcccaggtcccctctgcccagaggggtcccayaggagaaggaagcacgggggctgygggcactcactgctgcttcgggtcagcagggcacagcttcctccttgggcaccattcccaggaagcgttcggaggtcatcgaatttcaccccgtgggtccagcgccagtcccggctctgagcaggacacggggtcaggagcacagccccgctgcccccggccccatgggtaccccctgcccctcacctgccgcaggtagtgcaggcccagccagacgggctgcgtgcgctggtagtacatgatgacccggctcagcgtggctgcttccttgggctcctccacccaggccaggtgggctcc

SEQ ID NO: 49154 - DNA, 600 bp, Chicken  19866894294900_1
gcgtgaatagtttatttcttatgtgcgacattagcataaaagagatctccgctagatttttttactcacagactgatctcactgactcaaacattagcagtccagttgttgtgtttagatgcccgagtctgtgaaatctgcatgtgcgagttgatcgtttatatgaagaaatgtatcggttataaatcagtgcaactctgacatgggtacgatgatgttttcatccctattggtgatctgaatcagtactttcatactgtgtaggattttaatgtgagaggcccatttgctatctccttktatcagcgtcacaggaaatacttgacagtaggaagaactgtttcccttcaggtaaaaataccgcttcaggggctaactcgtacacatttcatagattgactacagtggagaaaaaaacagttctctcagttggagctgctaagttgtagtccagattgtgacatcaggaataaaaaaatgaactgcattcgttgtatgtattagcttgcatgatagttcttgtgtttttgtgaggttaatggtagtacttcagactcgtgtttccaggagcaaaattctcttgtccaattttttttttct

SEQ ID NO: 49155 - DNA, 600 bp, Chicken  19866894294902_1
tgtagggggcctgctttgcaggggggctgggctcgatgatctctaaaggtccctctcagcctctacaattctgtgattctgtgattttgtccactgcagacattgccatgcaaacatgaggcagaactgccatttgacaagctttctctacaaaaatatcatttccttctcaaccaaagtataattgtgctctcccttgtaacattcacggtttggccgatagtttcccagcttcatttgtttagttatcttaactcgtatggagtttcactgagcaatagaaaccagacagaagatcayactactggagccttaggcagtagggaaagtaacgagcgtggccaccattaattgcaacttattttcttttttaaactctaaattccagagtcagcacagcatctttcctgtcacacttcttgttctttgcatgttctttccctatcccagattgctgtactgcgaagcctacagcttcttgatgtcctaggagccactccatcacatttggatgccatcttgactctccagctccttcatgtgtgcaacagtttggaatgatgaagcagagaggtatgctggcaggaggtaaatacagct

SEQ ID NO: 49156 - DNA, 600 bp, Chicken  19866894294907_1
tggtctagatcagggggacaaggtgaatgtttttctcattgatgtgtatttgaggtaacagcaaagaatctgtggctcttccccgtgttcctacatccttccatctgcacttcttactgtatttccctgacaccttttggggagctgcccaacgcacacaccgctcaggacagtgctacacaaaccttcagggcacagcctgtgccaacagcatagcgataggacaagaggtaacggccttcagctgtgccaggggaggttcaggttggatattaggaaacatttcttctcagaaggagmggtgctgcagtggcacagctgcccagggagaggtggagtcaccatccctggaggtgtcccagacccacrgagatgtggcactgagggatgtgtcagtgggcatggaggggtgggttggaaaagattccaatctcagtatatctattctacatacgtgtccctggtgaagggagatgagctgctgctcaccagccccttatagatcctttctgcagcacctgttccccacccaagagctgcctatttctcccctacccacacggcaaagccctgcacagagctccccccacagcaaagggg

SEQ ID NO: 49157 - DNA, 600 bp, Chicken  19866894294907_2
ctgtggctcttccccgtgttcctacatccttccatctgcacttcttactgtatttccctgacaccttttggggagctgcccaacgcacacaccgctcaggacagtgctacacaaaccttcagggcacagcctgtgccaacagcatagcgataggacaagaggtaacggccttcagctgtgccaggggaggttcaggttggatattaggaaacatttcttctcagaaggagmggtgctgcagtggcacagctgcccagggagaggtggagtcaccatccctggaggtgtcccagacccacrgagatgtggcactgagggatgtgtcagtgggcatggaggggtgggttggaaaagattccaatctcagtatatctattctacatacgtgtccctggtgaagggagatgagctgctgctcaccagccccttatagatcctttctgcagcacctgttccccacccaagagctgcctatttctcccctacccacacggcaaagccctgcacagagctccccccacagcaaaggggaagcagctgatgcacatacaggtttgggacagacttctcatcaaatcattcaccataaaaaaagtacct

SEQ ID NO: 49158 - DNA, 600 bp, Chicken  19866894294910_1
aaaacaattcttcaaccagcactaatcataatagaagacaatctagaaaacaatggtacgcccatgccagttaagactagaattgttctccaatgcataatccaatatattcctattcatctaaaaattaatgtattagatgtagattacaaagcaaattaaaagcctaacaacaacaacagacagttaatataactatctcatcagtatttttccctattggatactaatacacttggtatttgtgttgcaaaactgcttctctggtcatggtacttcttcttgacattttaccatatrtgtcttcctcrtcttgtttraagttccaccctgctggggcmttgttgtaaagtgtgcatgacttcatttatccttcttctttacacagcatgaaaaatacctacaagtccctcaattctaamctgcagaaaataactacgtgttaattcaaatgtaatatccacatattttccatgaatgtgaataaagaaacaacccatgaagaacctaagtgaacaacaaaaacaagccctgccattctccacaagaactcttgttgccaagcaattttcactgccaattttgttgtgccagactgtg

SEQ ID NO: 49159 - DNA, 600 bp, Chicken  19866894294910_2
tcaaccagcactaatcataatagaagacaatctagaaaacaatggtacgcccatgccagttaagactagaattgttctccaatgcataatccaatatattcctattcatctaaaaattaatgtattagatgtagattacaaagcaaattaaaagcctaacaacaacaacagacagttaatataactatctcatcagtatttttccctattggatactaatacacttggtatttgtgttgcaaaactgcttctctggtcatggtacttcttcttgacattttaccatatrtgtcttcctcrtcttgtttraagttccaccctgctggggcmttgttgtaaagtgtgcatgacttcatttatccttcttctttacacagcatgaaaaatacctacaagtccctcaattctaamctgcagaaaataactacgtgttaattcaaatgtaatatccacatattttccatgaatgtgaataaagaaacaacccatgaagaacctaagtgaacaacaaaaacaagccctgccattctccacaagaactcttgttgccaagcaattttcactgccaattttgttgtgccagactgtgagactgattca

SEQ ID NO: 49160 - DNA, 600 bp, Chicken  19866894294910_3
actaatcataatagaagacaatctagaaaacaatggtacgcccatgccagttaagactagaattgttctccaatgcataatccaatatattcctattcatctaaaaattaatgtattagatgtagattacaaagcaaattaaaagcctaacaacaacaacagacagttaatataactatctcatcagtatttttccctattggatactaatacacttggtatttgtgttgcaaaactgcttctctggtcatggtacttcttcttgacattttaccatatrtgtcttcctcrtcttgtttraagttccaccctgctggggcmttgttgtaaagtgtgcatgacttcatttatccttcttctttacacagcatgaaaaatacctacaagtccctcaattctaamctgcagaaaataactacgtgttaattcaaatgtaatatccacatattttccatgaatgtgaataaagaaacaacccatgaagaacctaagtgaacaacaaaaacaagccctgccattctccacaagaactcttgttgccaagcaattttcactgccaattttgttgtgccagactgtgagactgattcaaagggtatt

SEQ ID NO: 49161 - DNA, 600 bp, Chicken  19866894294910_4
tctagaaaacaatggtacgcccatgccagttaagactagaattgttctccaatgcataatccaatatattcctattcatctaaaaattaatgtattagatgtagattacaaagcaaattaaaagcctaacaacaacaacagacagttaatataactatctcatcagtatttttccctattggatactaatacacttggtatttgtgttgcaaaactgcttctctggtcatggtacttcttcttgacattttaccatatrtgtcttcctcrtcttgtttraagttccaccctgctggggcmttgttgtaaagtgtgcatgacttcatttatccttcttctttacacagcatgaaaaatacctacaagtccctcaattctaamctgcagaaaataactacgtgttaattcaaatgtaatatccacatattttccatgaatgtgaataaagaaacaacccatgaagaacctaagtgaacaacaaaaacaagccctgccattctccacaagaactcttgttgccaagcaattttcactgccaattttgttgtgccagactgtgagactgattcaaagggtatttttttttttttgtctggcaga

SEQ ID NO: 49162 - DNA, 569 bp, Chicken  19866894294910_5
aaaaattaatgtattagatgtagattacaaagcaaattaaaagcctaacaacaacaacagacagttaatataactatctcatcagtatttttccctattggatactaatacacttggtatttgtgttgcaaaactgcttctctggtcatggtacttcttcttgacattttaccatatrtgtcttcctcrtcttgtttraagttccaccctgctggggcmttgttgtaaagtgtgcatgacttcatttatccttcttctttacacagcatgaaaaatacctacaagtccctcaattctaamctgcagaaaataactacgtgttaattcaaatgtaatatccacatattttccatgaatgtgaataaagaaacaacccatgaagaacctaagtgaacaacaaaaacaagccctgccattctccacaagaactcttgttgccaagcaattttcactgccaattttgttgtgccagactgtgagactgattcaaagggtatttttttttttttgtctggcagataatggcagaagatgccagaggtacagtgaaataatagaaagctttgcag

SEQ ID NO: 49163 - DNA, 478 bp, Chicken  19866894294912_1
tcttcagatcagccatagaaggcaagcaaatcagtgtcgagtgacttgctgcagaggggagtcatatatgtagcagtaactgtgaccttggctgtggttcgtaagtcctaatccaggttcagtgtgcaatgaaggggtgaggatgctcagagtgattgatctgctggctaagcatagacgaaatgtatcacagataggaaatgatcctgagtttgcagagtagtgtcacaaagactggaatccatcacagtatattatgggatggggccatgctctgtcctggctttttattctgcttayttagcaattcttgtgccctcatacatgccctgtgagacagcaggcataaagaagcctgtttgctgcagtgctgcatcactacattgagttgagcwgagaatttcctcgctgaaggagggctgagaacatgcccttatcactattttctgagtgcttacatgcacatcccgactcctca

SEQ ID NO: 49164 - DNA, 383 bp, Chicken  19866894294912_2
ggttcgtaagtcctaatccaggttcagtgtgcaatgaaggggtgaggatgctcagagtgattgatctgctggctaagcatagacgaaatgtatcacagataggaaatgatcctgagtttgcagagtagtgtcacaaagactggaatccatcacagtatattatgggatggggccatgctctgtcctggctttttattctgcttayttagcaattcttgtgccctcatacatgccctgtgagacagcaggcataaagaagcctgtttgctgcagtgctgcatcactacattgagttgagcwgagaatttcctcgctgaaggagggctgagaacatgcccttatcactattttctgagtgcttacatgcacatcccgactcctca

SEQ ID NO: 49165 - DNA, 600 bp, Chicken  19866894294915_1
agcacgtcatagcttccacatctaacataatcactattaatatgctcttaactcatggtgttgtgaaattgctcagatttaagtcatctgttttgaataagcaaaacagcctcgaagacttgaaaagtatgtggcaccttggtagcaaaagataggaaggcaattctgtcacacaaatctgatttcttattttgacctccctactactcctgatgtgctgaaaaggatggtcaaacacctttaaataacacatgtttttaaggttacatgcaagttcataaaatttcagctggcttaaamtttgaacatcagaaatgaaaaacagtttttgctagaatcccttctaaatattttcaacttatctaaagtatgtcattaaatattgttagaagactagtaagcaacaaaaaagaaatatcctataaggtaagagaaagacagttggtattttgtrtttgtttggctttatttttcttggagatggtgagtgttaaaatatcagaaaagataggtattgctatgaagctttcataggccagaagatctgactgacctatactcaaactgaaaacaactcgatttacaaatatattccagtac

SEQ ID NO: 49166 - DNA, 600 bp, Chicken  19866894294915_2
ggaaggcaattctgtcacacaaatctgatttcttattttgacctccctactactcctgatgtgctgaaaaggatggtcaaacacctttaaataacacatgtttttaaggttacatgcaagttcataaaatttcagctggcttaaamtttgaacatcagaaatgaaaaacagtttttgctagaatcccttctaaatattttcaacttatctaaagtatgtcattaaatattgttagaagactagtaagcaacaaaaaagaaatatcctataaggtaagagaaagacagttggtattttgtrtttgtttggctttatttttcttggagatggtgagtgttaaaatatcagaaaagataggtattgctatgaagctttcataggccagaagatctgactgacctatactcaaactgaaaacaactcgatttacaaatatattccagtacaggaagtttctacttaatgcagtatagcttgcatcaaattgtaagatcaatccagctacatttaaaggttgcatagtccattatcagtggttgaaataggatattaggaatacttaattaggttttagaagtttcaatgcactgtatgtcaaac

SEQ ID NO: 49167 - DNA, 599 bp, Chicken  19866894294919_1
  misc_feature (1)..(144): n is any nucleotide
nnnnnnnnnnnnnnnnnnnnnnnnnnnnnnnnnnnnnnnnnnnnnnnnnnnnnnnnnnnnnnnnnnnnnnnnnnnnnnnnnnnnnnnnnnnnnnnnnnnnnnnnnnnnnnnnnnnnnnnnnnnnnnnnnnnnnnnnnnnnnnnnaggaggcatcttaacatatttctggctttcttctggtgctaaaagaaattttgtctgagtagcttcagaaatattttttttcattgaaataagaaataatttttccatatttcccaccgagctttctgcaaacagggatcatctgcttgctgttgrggagctgctgtagaatttttgctattgcagtactccaaaatatcattattcctctgtgttgaaaattgtcacagctgtaaaatggaaaagtgtcttagttatgattcaattggttttaaacaacattatcgtgacctaatgtatatctatgggtatatctacaagtagacattaggacgtgactttgttagacttttatagaataaaacttaaatgcctttcacactrtggtccagagtctcttgctccagctgttaacgtctggcctcagggagattcaaacakctagatggcctcat

SEQ ID NO: 49168 - DNA, 600 bp, Chicken  19866894294919_2
tgaaataagaaataatttttccatatttcccaccgagctttctgcaaacagggatcatctgcttgctgttgrggagctgctgtagaatttttgctattgcagtactccaaaatatcattattcctctgtgttgaaaattgtcacagctgtaaaatggaaaagtgtcttagttatgattcaattggttttaaacaacattatcgtgacctaatgtatatctatgggtatatctacaagtagacattaggacgtgactttgttagacttttatagaataaaacttaaatgcctttcacactrtggtccagagtctcttgctccagctgttaacgtctggcctcagggagattcaaacakctagatggcctcatgtaagaaccaaccttgatgttctgggataaattttgtcaataaatgaatatggtcagccttgtgtcycctttctccctaggatcagcaaaaggaggggaaaaacatgcagagaggaacacagaccctttccttgcaggcactttctcatcagtttgcatcacttgtcatataaaagtgcacttcggcataaaaatacatcaggatttcttttgatgctgctgcttattc

SEQ ID NO: 49169 - DNA, 600 bp, Chicken  19866894294919_3
tctgcttgctgttgrggagctgctgtagaatttttgctattgcagtactccaaaatatcattattcctctgtgttgaaaattgtcacagctgtaaaatggaaaagtgtcttagttatgattcaattggttttaaacaacattatcgtgacctaatgtatatctatgggtatatctacaagtagacattaggacgtgactttgttagacttttatagaataaaacttaaatgcctttcacactrtggtccagagtctcttgctccagctgttaacgtctggcctcagggagattcaaacakctagatggcctcatgtaagaaccaaccttgatgttctgggataaattttgtcaataaatgaatatggtcagccttgtgtcycctttctccctaggatcagcaaaaggaggggaaaaacatgcagagaggaacacagaccctttccttgcaggcactttctcatcagtttgcatcacttgtcatataaaagtgcacttcggcataaaaatacatcaggatttcttttgatgctgctgcttattctgccacctgttttttggccccttgattgtattgctttccctggcgttgcataatgaa

SEQ ID NO: 49170 - DNA, 600 bp, Chicken  19866894294919_4
tgtcacagctgtaaaatggaaaagtgtcttagttatgattcaattggttttaaacaacattatcgtgacctaatgtatatctatgggtatatctacaagtagacattaggacgtgactttgttagacttttatagaataaaacttaaatgcctttcacactrtggtccagagtctcttgctccagctgttaacgtctggcctcagggagattcaaacakctagatggcctcatgtaagaaccaaccttgatgttctgggataaattttgtcaataaatgaatatggtcagccttgtgtcycctttctccctaggatcagcaaaaggaggggaaaaacatgcagagaggaacacagaccctttccttgcaggcactttctcatcagtttgcatcacttgtcatataaaagtgcacttcggcataaaaatacatcaggatttcttttgatgctgctgcttattctgccacctgttttttggccccttgattgtattgctttccctggcgttgcataatgaattggactgagggatttgatcatgtcaaaaatcagctgttttggttcttaggagtgggcagtgcttagatgcaagcatcaag

SEQ ID NO: 49171 - DNA, 600 bp, Chicken  19866894294920_1
atccctgccatttttgtgcctgggaaggtcacgtaacagatcttcctggaagatacattaaggcacatacaagaagagaaggtgatccaagacagccagcatggcttcaccaagggaagatatttccagactaacctggaggctttctatgatacagtgacaacttcagtagacaaagaaagagcgactgatgttatctacctggacttgttgtaagagattattcatttgcatcattttctcaaagcttgctgagggacacagatgaacaagtccaagcaagtccaggtcaggggttgygaaatcctttgtctgaggcacacagatggaccaggccaggggtaacgagagagaaataagccagagcttaatggccaggaagcagtattttgtgtgagcttatctcgagggagatagccatctcagggggtgctgcacatgactgttacccaagcacccaggaatgccatgttggcagaagaaggataaaaaaggggcgaacaaccatgagattaggtttctgacaacagattcctcacaaagaacgggtttctgacaacagattcctcatgaagaaaggtttttctgatagcagattcc

SEQ ID NO: 49172 - DNA, 600 bp, Chicken  19866894294928_1
agcatctaggactcccaggtggcaactggaaacaaaaaccaaatgttgaaagtggctatgaaagagagttagataaaaaaaaatatactatccttctgatcctcaacttttaggataggcctctctaaacaagttgtcaaagaactctaatcctttcgaaggataaatgatagcaacagttaggcaaatttcttacaactacgttttcttacttcatatatatatttatatatatatcttataaatatatgaagtacacagactgcaacattccaagtgccaagactgagattacatacrttaatggaacaacacaactctcattctgtcagggctccaaaggaaacaagcatatattcaagacagaaaatggaacattcrcttgataggctcatgactgaaaaaggatcttttattgatgctgtactccatatgaccccttttaggaaattaaaatgttcttaaatgattcaactttaaatacatcacaggaccaggcagaaatagaagttcaggagaatgtcaagccttacagagacaggatattaaaaaaaaagcaaaatgatggtaataatagcatatcagaagtgtatcaagaat

SEQ ID NO: 49173 - DNA, 600 bp, Chicken  19866894294928_2
aatatactatccttctgatcctcaacttttaggataggcctctctaaacaagttgtcaaagaactctaatcctttcgaaggataaatgatagcaacagttaggcaaatttcttacaactacgttttcttacttcatatatatatttatatatatatcttataaatatatgaagtacacagactgcaacattccaagtgccaagactgagattacatacrttaatggaacaacacaactctcattctgtcagggctccaaaggaaacaagcatatattcaagacagaaaatggaacattcrcttgataggctcatgactgaaaaaggatcttttattgatgctgtactccatatgaccccttttaggaaattaaaatgttcttaaatgattcaactttaaatacatcacaggaccaggcagaaatagaagttcaggagaatgtcaagccttacagagacaggatattaaaaaaaaagcaaaatgatggtaataatagcatatcagaagtgtatcaagaataaatttaagtctaatagatttagttttattttacataaaaatagcataccacaacacttaaagcattataataaacttgat

SEQ ID NO: 49174 - DNA, 598 bp, Chicken  19866894294931_1
ttgccttgaaaaatggggattagaccacagttcttcattctgaaggagttatactgtaatagcagctattctatgctgcctttctcccctggaagtagtttcctcattaaacacattcttctctttcctcttaatttatgcatgagtcacacagcaaataactagcatgggtagaagctatagtacaagatcttaatgcctccattttgaacctccttatctctgtgagaaatcacaagtcagcctactgaacaaaccctaactgctacacacacaaatcaaaatcagagccccaacttscatscaatacaggacctagctatatcatarcaccatttaaacactgaaaatgaatttacaaatttctgtgcaagcaaacagaagtggcttacaatgctcagctagtactagtaggctttgttgcgagcaagggtccactttgtagtatttacaatgtatttttcctacttccatccctcagttttatttacgtatgacggagataatcatccaccaaaaaaccccaccaaacttcatttattcgctcttcagttctgaagcatccaagttacacagttgctttttcaacgtatttgtt

SEQ ID NO: 49175 - DNA, 594 bp, Chicken  19866894294931_2
cttgaaaaatggggattagaccacagttcttcattctgaaggagttatactgtaatagcagctattctatgctgcctttctcccctggaagtagtttcctcattaaacacattcttctctttcctcttaatttatgcatgagtcacacagcaaataactagcatgggtagaagctatagtacaagatcttaatgcctccattttgaacctccttatctctgtgagaaatcacaagtcagcctactgaacaaaccctaactgctacacacacaaatcaaaatcagagccccaacttscatscaatacaggacctagctatatcatarcaccatttaaacactgaaaatgaatttacaaatttctgtgcaagcaaacagaagtggcttacaatgctcagctagtactagtaggctttgttgcgagcaagggtccactttgtagtatttacaatgtatttttcctacttccatccctcagttttatttacgtatgacggagataatcatccaccaaaaaaccccaccaaacttcatttattcgctcttcagttctgaagcatccaagttacacagttgctttttcaacgtatttgtt

SEQ ID NO: 49176 - DNA, 568 bp, Chicken  19866894294931_3
ttcttcattctgaaggagttatactgtaatagcagctattctatgctgcctttctcccctggaagtagtttcctcattaaacacattcttctctttcctcttaatttatgcatgagtcacacagcaaataactagcatgggtagaagctatagtacaagatcttaatgcctccattttgaacctccttatctctgtgagaaatcacaagtcagcctactgaacaaaccctaactgctacacacacaaatcaaaatcagagccccaacttscatscaatacaggacctagctatatcatarcaccatttaaacactgaaaatgaatttacaaatttctgtgcaagcaaacagaagtggcttacaatgctcagctagtactagtaggctttgttgcgagcaagggtccactttgtagtatttacaatgtatttttcctacttccatccctcagttttatttacgtatgacggagataatcatccaccaaaaaaccccaccaaacttcatttattcgctcttcagttctgaagcatccaagttacacagttgctttttcaacgtatttgtt

SEQ ID NO: 49177 - DNA, 600 bp, Chicken  19866894294949_1
attagaactatgtaggcacacgtttttctttttttttttccacctctgttcatagatggcttagagagagacacaatcaagctcactttagatcacaactaactgatggcatacagttgctattaattctggaaacagaaaatcataaatgaactgactagatacttcaagaagggacgcagaaaagacttgcaatactgtttttatgcatcgtatttcaacagttgcctaccccatgacatatcgaattatttgagtgccagactaagcagtggaagtgacagatactgagagcatttytggagaggacatccaaagaaaatgtgtaaaatatgtgaaaatatgtaaaaattagacacaaatgtatgtctgatgtgccaagaaaaaaaatccaatggattttacatttactcttcaagaaaagcatcaatgatgcagagtaggatactaaaaatatcactgaattgtaaaagtgagaataaaaacactgccatgcctatgcatgggagcacacagattccagaatattaaaatgcctaaccacaaaacacttcacttttgcttctaagtaaaatacaaaggattttactacaagcttaa

SEQ ID NO: 49178 - DNA, 595 bp, Chicken  19866894294951_1
tttattgtaggagttcaaagtggtttaattagatacatctgttaaccattgctttctggtcagctgggtatattcaccgaagcagtatccaaataaaatccttttctacacaactatgtactatctaagccgttggcctaggggccctgtatagtttgtctgaactgtttacaggcagtgtaacaatgacagtgctgactcagctctcgtttcccctcccccttcgcttccttatgtttttcccctgaagtttttcccatttgcagccattaacagctggcttgtctacagcctgaaatmaagaaatgatgtttagcaggtcacctggggcttaacagggagaaagccatagcatgagcctgggtatttctgggttagatatcaactctgtaggctgcagatccaacagctggattgcatgaaaacagctgtctctattctttttcttttttccttcttgtccaggagccaatattctccgtgactctgctgggaatgtgaagcttggggactttggggccagcaaacggctgcagacaatctgtatgtctggaacaggcatccgctctgtcactggcacgccatattggatgag

SEQ ID NO: 49179 - DNA, 600 bp, Chicken  19866894294957_1
gaaatgagaattttggtcattagaaacgcagctaaaacaaataataaatatagtgcggtgacatttatggtgaaagccgccagagcttaggagatttccctgcctggtgccataaaggccttccaagcaccaaaggcatttaaagctaaattaaaatcctcattagctgctcttgagtgtatttgcattgatgaggtccctggtggatgtggttttatgggcgtggaggtaaacctgtgtggcataactacagagagagctttcagctgcactgatgtaacctgtgtgcgatatgccagygattgagatattccayygtgagccaacctcctcagagtgctccatgccacaaaacaaaaataaacatacacaaaacccacaaacaattgtcactatgttatctgattcaaagaggaagatgtcagtttaaatacaggcaaggatgtttatctttgtgccccgatacgtgaagatctcagagctaccgttaatgtttacagtgcaaagactgaccagtacattttgttcaagcctaaatgtgaactggatacaatctgtttgtatggaaaacactggccatacctgcccctgcagagtctc

SEQ ID NO: 49180 - DNA, 600 bp, Chicken  19866894294957_2
tcattagaaacgcagctaaaacaaataataaatatagtgcggtgacatttatggtgaaagccgccagagcttaggagatttccctgcctggtgccataaaggccttccaagcaccaaaggcatttaaagctaaattaaaatcctcattagctgctcttgagtgtatttgcattgatgaggtccctggtggatgtggttttatgggcgtggaggtaaacctgtgtggcataactacagagagagctttcagctgcactgatgtaacctgtgtgcgatatgccagygattgagatattccayygtgagccaacctcctcagagtgctccatgccacaaaacaaaaataaacatacacaaaacccacaaacaattgtcactatgttatctgattcaaagaggaagatgtcagtttaaatacaggcaaggatgtttatctttgtgccccgatacgtgaagatctcagagctaccgttaatgtttacagtgcaaagactgaccagtacattttgttcaagcctaaatgtgaactggatacaatctgtttgtatggaaaacactggccatacctgcccctgcagagtctctcgcgccacatttcct

SEQ ID NO: 49181 - DNA, 600 bp, Chicken  19866894294957_3
cattagaaacgcagctaaaacaaataataaatatagtgcggtgacatttatggtgaaagccgccagagcttaggagatttccctgcctggtgccataaaggccttccaagcaccaaaggcatttaaagctaaattaaaatcctcattagctgctcttgagtgtatttgcattgatgaggtccctggtggatgtggttttatgggcgtggaggtaaacctgtgtggcataactacagagagagctttcagctgcactgatgtaacctgtgtgcgatatgccagygattgagatattccayygtgagccaacctcctcagagtgctccatgccacaaaacaaaaataaacatacacaaaacccacaaacaattgtcactatgttatctgattcaaagaggaagatgtcagtttaaatacaggcaaggatgtttatctttgtgccccgatacgtgaagatctcagagctaccgttaatgtttacagtgcaaagactgaccagtacattttgttcaagcctaaatgtgaactggatacaatctgtttgtatggaaaacactggccatacctgcccctgcagagtctctcgcgccacatttcctg

SEQ ID NO: 49182 - DNA, 522 bp, Chicken  19866894294957_4
attcaaagaggaagatgtcagtttaaatacaggcaaggatgtttatctttgtgccccgatacgtgaagatctcagagctaccgttaatgtttacagtgcaaagactgaccagtacattttgttcaagcctaaatgtgaactggatacaatctgtttgtatggaaaacactggccatacctgcccctgcagagtctctcgcgccacatttcctggcatcagctggatttttaatttaacttcattcagtgctttcatgtgacagtgataggtcatacataaaaccctcagaaagatagacyggcatatgaaacatatctaaccagctgcaagtcacagttaaaagaaaaygggaattcaagaagagttcctgatgcacccttccaagaaaaagaactcgaggtgtgagctgggatgaaaggagggaaacgctgtgagaggtactacacatggagcagaaactgtaggaaaacaagccctatgggaacctctagatgtgtggcttatacaaaaccccaagatag

SEQ ID NO: 49183 - DNA, 473 bp, Chicken  19866894294957_5
tgtgccccgatacgtgaagatctcagagctaccgttaatgtttacagtgcaaagactgaccagtacattttgttcaagcctaaatgtgaactggatacaatctgtttgtatggaaaacactggccatacctgcccctgcagagtctctcgcgccacatttcctggcatcagctggatttttaatttaacttcattcagtgctttcatgtgacagtgataggtcatacataaaaccctcagaaagatagacyggcatatgaaacatatctaaccagctgcaagtcacagttaaaagaaaaygggaattcaagaagagttcctgatgcacccttccaagaaaaagaactcgaggtgtgagctgggatgaaaggagggaaacgctgtgagaggtactacacatggagcagaaactgtaggaaaacaagccctatgggaacctctagatgtgtggcttatacaaaaccccaagatag

SEQ ID NO: 49184 - DNA, 600 bp, Chicken  19866894294959_1
gcatcagactcacgtggatttatttacagtctctgactagaatcaacatgagctttcagagccctggagtacataataacaggaaaatcgtggccctagttaaacacatccccagggaaagcctggtaaatgtccagggtagtgattaggaaaggttaacttatgatgtgacaaggaaagtagtacaacttagataacactaataaatgacactggtgctgaaaaacgatagattattctgatgtgttatgttaaaaaaaaaaagaaacggagcagtttttagtggagtattctgaaagkatctgcaacgtgcagttacgtagtataccagcatatcaatttggctgtctgtgtgtggaaaatgtattacagaaagaattatttaatatttaaggaattgtcagacgtgctttatgagggaaaggatattatgcaaacttccaatttgtgcagctgtcatgagtggggagccacaatgtctttcatattggaggaaaatagcaatgatagaaaacatccactgaatgactgaaaacaaacttgcaagggagagacaattttctttttgctctggtttgttttatgtactgtacattgtaa

SEQ ID NO: 49185 - DNA, 599 bp, Chicken  19866894294965_1
  misc_feature (1)..(68): n is any nucleotide
nnnnnnnnnnnnnnnnnnnnnnnnnnnnnnnnnnnnnnnnnnnnnnnnnnnnnnnnnnnnnnnnnnnngatacactattataaagaccagctgcacagattttgacagcctgatgtaactgaaagatttgagaagcttcaatcgcccagctcagtcctagtccaatgggattctctttcaggcattcaagtaagtgcaataagctttcacactgcagaccagtgtttgtttccaaaatgttcctgtctggaatcaaatctagccatttctaactcctcactacccatatccccaataatyattaaatgattattcttttaattgctcayagagattcatgggaatgcctcacttaatttaaaagggtgaaaagcattgaattcagctttgagacaagatttcacccaacycatgtatgccacaagggttttcaaccgtawcagtgamatccagtgcagtagtgaccaggctgttagaggacctcctgagcccagtaacagggttatttagawttttttccacattttcaatgggttcaccatacattttattgtttctaactcacgccttcaatccctctcctccatgttcaccctgct

SEQ ID NO: 49186 - DNA, 599 bp, Chicken  19866894294965_2
  misc_feature (1)..(39): n is any nucleotide
nnnnnnnnnnnnnnnnnnnnnnnnnnnnnnnnnnnnnnngatacactattataaagaccagctgcacagattttgacagcctgatgtaactgaaagatttgagaagcttcaatcgcccagctcagtcctagtccaatgggattctctttcaggcattcaagtaagtgcaataagctttcacactgcagaccagtgtttgtttccaaaatgttcctgtctggaatcaaatctagccatttctaactcctcactacccatatccccaataatyattaaatgattattcttttaattgctcayagagattcatgggaatgcctcacttaatttaaaagggtgaaaagcattgaattcagctttgagacaagatttcacccaacycatgtatgccacaagggttttcaaccgtawcagtgamatccagtgcagtagtgaccaggctgttagaggacctcctgagcccagtaacagggttatttagawttttttccacattttcaatgggttcaccatacattttattgtttctaactcacgccttcaatccctctcctccatgttcaccctgctgtagacacccagtcccgctaagagcttgg

SEQ ID NO: 49187 - DNA, 600 bp, Chicken  19866894294965_3
tgatgtaactgaaagatttgagaagcttcaatcgcccagctcagtcctagtccaatgggattctctttcaggcattcaagtaagtgcaataagctttcacactgcagaccagtgtttgtttccaaaatgttcctgtctggaatcaaatctagccatttctaactcctcactacccatatccccaataatyattaaatgattattcttttaattgctcayagagattcatgggaatgcctcacttaatttaaaagggtgaaaagcattgaattcagctttgagacaagatttcacccaacycatgtatgccacaagggttttcaaccgtawcagtgamatccagtgcagtagtgaccaggctgttagaggacctcctgagcccagtaacagggttatttagawttttttccacattttcaatgggttcaccatacattttattgtttctaactcacgccttcaatccctctcctccatgttcaccctgctgtagacacccagtcccgctaagagcttgggggggattaattagaaccctccaagccagaaggaagaagaaaaagcactgaaaaggctgaaagtgttttgattccttcttcc

SEQ ID NO: 49188 - DNA, 600 bp, Chicken  19866894294965_4
atcgcccagctcagtcctagtccaatgggattctctttcaggcattcaagtaagtgcaataagctttcacactgcagaccagtgtttgtttccaaaatgttcctgtctggaatcaaatctagccatttctaactcctcactacccatatccccaataatyattaaatgattattcttttaattgctcayagagattcatgggaatgcctcacttaatttaaaagggtgaaaagcattgaattcagctttgagacaagatttcacccaacycatgtatgccacaagggttttcaaccgtawcagtgamatccagtgcagtagtgaccaggctgttagaggacctcctgagcccagtaacagggttatttagawttttttccacattttcaatgggttcaccatacattttattgtttctaactcacgccttcaatccctctcctccatgttcaccctgctgtagacacccagtcccgctaagagcttgggggggattaattagaaccctccaagccagaaggaagaagaaaaagcactgaaaaggctgaaagtgttttgattccttcttccatgatcagcacgggcagcaacaaccaggtg

SEQ ID NO: 49189 - DNA, 600 bp, Chicken  19866894294965_5
agctcagtcctagtccaatgggattctctttcaggcattcaagtaagtgcaataagctttcacactgcagaccagtgtttgtttccaaaatgttcctgtctggaatcaaatctagccatttctaactcctcactacccatatccccaataatyattaaatgattattcttttaattgctcayagagattcatgggaatgcctcacttaatttaaaagggtgaaaagcattgaattcagctttgagacaagatttcacccaacycatgtatgccacaagggttttcaaccgtawcagtgamatccagtgcagtagtgaccaggctgttagaggacctcctgagcccagtaacagggttatttagawttttttccacattttcaatgggttcaccatacattttattgtttctaactcacgccttcaatccctctcctccatgttcaccctgctgtagacacccagtcccgctaagagcttgggggggattaattagaaccctccaagccagaaggaagaagaaaaagcactgaaaaggctgaaagtgttttgattccttcttccatgatcagcacgggcagcaacaaccaggtgctgatgc

SEQ ID NO: 49190 - DNA, 600 bp, Chicken  19866894294965_6
tgcagaccagtgtttgtttccaaaatgttcctgtctggaatcaaatctagccatttctaactcctcactacccatatccccaataatyattaaatgattattcttttaattgctcayagagattcatgggaatgcctcacttaatttaaaagggtgaaaagcattgaattcagctttgagacaagatttcacccaacycatgtatgccacaagggttttcaaccgtawcagtgamatccagtgcagtagtgaccaggctgttagaggacctcctgagcccagtaacagggttatttagawttttttccacattttcaatgggttcaccatacattttattgtttctaactcacgccttcaatccctctcctccatgttcaccctgctgtagacacccagtcccgctaagagcttgggggggattaattagaaccctccaagccagaaggaagaagaaaaagcactgaaaaggctgaaagtgttttgattccttcttccatgatcagcacgggcagcaacaaccaggtgctgatgctgagtcacttctcagaagtgcacaatgtttgtactgtgcactgtgttattttgaaattgggacaa

SEQ ID NO: 49191 - DNA, 600 bp, Chicken  19866894294965_7
gcagaccagtgtttgtttccaaaatgttcctgtctggaatcaaatctagccatttctaactcctcactacccatatccccaataatyattaaatgattattcttttaattgctcayagagattcatgggaatgcctcacttaatttaaaagggtgaaaagcattgaattcagctttgagacaagatttcacccaacycatgtatgccacaagggttttcaaccgtawcagtgamatccagtgcagtagtgaccaggctgttagaggacctcctgagcccagtaacagggttatttagawwtttttccacattttcaatgggttcaccatacattttattgtttctaactcacgccttcaatccctctcctccatgttcaccctgctgtagacacccagtcccgctaagagcttgggggggattaattagaaccctccaagccagaaggaagaagaaaaagcactgaaaaggctgaaagtgttttgattccttcttccatgatcagcacgggcagcaacaaccaggtgctgatgctgagtcacttctcagaagtgcacaatgtttgtactgtgcactgtgttattttgaaattgggacaat

SEQ ID NO: 49192 - DNA, 600 bp, Chicken  19866894294969_1
attctcagacctcccggcagggctgggtgctcaccgtgaggcttcgctcctcgggcagcagcagccacggagcacccactgagtcccatcaccttttgccacagcagcattactcagctgcccgtaagtactgtgactcagtaacaaagcttaaatttaaataagttaatagctgatgggttgatttgattggtggctttgtttcctagaatccaggtggattgaatctgtcagtttgagctgtctaggtgctgcatcttgccatgctttaatccacatcagggtttgcaggcatttaarcaagtgatttctccagtgttttaatacttgtgtttgtcctgtccgcatgtgctttaaattctatcaatgacatttccaatgagcttcttttgttcaaataatttgtattgtacgtagcaggtaacatccaaaaacatgttataagaaaaagggcgtagtccagaaaagactcaagctgtttcagctgcccacgtccaaaaccatacatggctgaagctgtgcagccctgagccagagtcagtgttttaacttgctttcaccaagctgtgccctttgaggtacagagcacttagccaggcc

SEQ ID NO: 49193 - DNA, 600 bp, Chicken  19866894294971_1
gggctatgaactgaaagtaaagggccaatagttaagagctcctcagttctactccaccaactttttaaaataaggtaatgataaagagcattccttctggcagcatgtacatttcggctgtgactggctgcctaacagagtgcctttacgcataccagcagaatcatgtccagttttgccatttgtggataacgatgacaagatacaaaagcatgtgtttgccataaatagctctggctaacggaggattgctcacacagagcagatcaaattctctataaggagagcattatctggctytcagccaaaacatgtccccagtgcaagcctcagtagtggcaaacactttccagttctatttacatagaagttaacaagcagaacagttcatctaggatacttcttgtaccaagtcagtgctaactgtaacgcttaagaagcaacaactattcaccaacctgtattctgcgttacatacagctgtcgttacgtatcacctcatcacaacagagagctgcgagatttcatgcaaggttttactctgacatgtagaactttaagagcattcaggtgctaaacacaggcgcacggttaattcct

SEQ ID NO: 49194 - DNA, 599 bp, Chicken  19866894294972_1
  misc_feature (1)..(120): n is any nucleotide
nnnnnnnnnnnnnnnnnnnnnnnnnnnnnnnnnnnnnnnnnnnnnnnnnnnnnnnnnnnnnnnnnnnnnnnnnnnnnnnnnnnnnnnnnnnnnnnnnnnnnnnnnnnnnnnnnnnnnnnntttgtgccaagtacaatgacagaccacatatattaaatgagagaaaactacagcacagctcattccataagagcacaggttggatgagctaacagttaagaatagcacatggcttctatctatggcaacatggaagtttgaaaggaaatccaggatttttggagaatgaggctgagggarmagttagtgattgagggtaaccttatacaatataaaaggaataactcatgcccagaagcactgctcttgtaggcttagttttgatttcagtctttccgtgttggaggcagaaattgcacaagcatattaatgcatgtggcagtctgcaagttcactcttttcctcaaataaacggctgccatttattctagactcccacaygcatcatttgaatgattgagtgacaacttcttgtcccctcaatcaaggaaggctgccacaagagcagcccactgcactgctcccctgggaacaccaga

SEQ ID NO: 49195 - DNA, 599 bp, Chicken  19866894294972_2
  misc_feature (1)..(119): n is any nucleotide
nnnnnnnnnnnnnnnnnnnnnnnnnnnnnnnnnnnnnnnnnnnnnnnnnnnnnnnnnnnnnnnnnnnnnnnnnnnnnnnnnnnnnnnnnnnnnnnnnnnnnnnnnnnnnnnnnnnnnnntttgtgccaagtacaatgacagaccacatatattaaatgagagaaaactacagcacagctcattccataagagcacaggttggatgagctaacagttaagaatagcacatggcttctatctatggcaacatggaagtttgaaaggaaatccaggatttttggagaatgaggctgagggarmagttagtgattgagggtaaccttatacaatataaaaggaataactcatgcccagaagcactgctcttgtaggcttagttttgatttcagtctttccgtgttggaggcagaaattgcacaagcatattaatgcatgtggcagtctgcaagttcactcttttcctcaaataaacggctgccatttattctagactcccacaygcatcatttgaatgattgagtgacaacttcttgtcccctcaatcaaggaaggctgccacaagagcagcccactgcactgctcccctgggaacaccagag

SEQ ID NO: 49196 - DNA, 600 bp, Chicken  19866894294972_3
ggatgagctaacagttaagaatagcacatggcttctatctatggcaacatggaagtttgaaaggaaatccaggatttttggagaatgaggctgagggarmagttagtgattgagggtaaccttatacaatataaaaggaataactcatgcccagaagcactgctcttgtaggcttagttttgatttcagtctttccgtgttggaggcagaaattgcacaagcatattaatgcatgtggcagtctgcaagttcactcttttcctcaaataaacggctgccatttattctagactcccacaygcatcatttgaatgattgagtgacaacttcttgtcccctcaatcaaggaaggctgccacaagagcagcccactgcactgctcccctgggaacaccagaggcacaacgcagaaggtcagtgcagctgactgatgtaccgagccagggctgtgtccagaccctgcgagaggtcatctccaggcctgtgtccaatcctctgtatctgctctttccctaattaataatttatctgtgttctgttttaaagcaatgaatgaytggactgcaaaccatctggaaacagatgagtaaaatcttctgc

SEQ ID NO: 49197 - DNA, 600 bp, Chicken  19866894294972_4
tttcctcaaataaacggctgccatttattctagactcccacaygcatcatttgaatgattgagtgacaacttcttgtcccctcaatcaaggaaggctgccacaagagcagcccactgcactgctcccctgggaacaccagaggcacaacgcagaaggtcagtgcagctgactgatgtaccgagccagggctgtgtccagaccctgcgagaggtcatctccaggcctgtgtccaatcctctgtatctgctctttccctaattaataatttatctgtgttctgttttaaagcaatgaatgaytggactgcaaaccatctggaaacagatgagtaaaatcttctgcactgcagataaaatgatattaggttgacagaaatgtttacttcgacagcatctgagggaattacaaagctgaaatcaggaggtggagtactgggcaggtggacggtgtgtggagagggaaaaggagggctgtgatttagtagaaaggraaaatcttacctacaaccctgagctctgcactcgaatagatgacaccgtgtttattttcagctatgcactggtatctgccagaatctgtcagatttagactcgatattg

SEQ ID NO: 49198 - DNA, 600 bp, Chicken  19866894294972_5
gtgtccagaccctgcgagaggtcatctccaggcctgtgtccaatcctctgtatctgctctttccctaattaataatttatctgtgttctgttttaaagcaatgaatgaytggactgcaaaccatctggaaacagatgagtaaaatcttctgcactgcagataaaatgatattaggttgacagaaatgtttacttcgacagcatctgagggaattacaaagctgaaatcaggaggtggagtactgggcaggtggacggtgtgtggagagggaaaaggagggctgtgatttagtagaaaggraaaatcttacctacaaccctgagctctgcactcgaatagatgacaccgtgtttattttcagctatgcactggtatctgccagaatctgtcagatttagactcgatattgtaagtgcgccattttcaatctggatccttccctgaatattaagaaaaatacctttactgatgatgtatttcctgtgaaaattttaagataagtaagaaattcaaataggacagcatcaatgtgacaaatggggcagatgtagcagcatatatgtaaaaacagttctaaaataattcatatgacagcagyga

SEQ ID NO: 49199 - DNA, 600 bp, Chicken  19866894294972_6
graaaatcttacctacaaccctgagctctgcactcgaatagatgacaccgtgtttattttcagctatgcactggtatctgccagaatctgtcagatttagactcgatattgtaagtgcgccattttcaatctggatccttccctgaatattaagaaaaatacctttactgatgatgtatttcctgtgaaaattttaagataagtaagaaattcaaataggacagcatcaatgtgacaaatggggcagatgtagcagcatatatgtaaaaacagttctaaaataattcatatgacagcagygagatttggcaatacagtggataaaaatcaattcttcacacttgcccagtttcacagaggctttttattctcaaatagccttgcatttctccaggaatgtggacatcgtacgaggaagaygagagcatccaaaacacacagatggcactggcattttacactatttagagatttcacacttgccatttgttaatgagctctctgtgatactgtgcagaaaaaaatccaacagtcattaaatggaagacatatttaggtgccttaagagctgacaaggctactgaatgaagaacagggtgc

SEQ ID NO: 49200 - DNA, 600 bp, Chicken  19866894294972_7
cattttcaatctggatccttccctgaatattaagaaaaatacctttactgatgatgtatttcctgtgaaaattttaagataagtaagaaattcaaataggacagcatcaatgtgacaaatggggcagatgtagcagcatatatgtaaaaacagttctaaaataattcatatgacagcagygagatttggcaatacagtggataaaaatcaattcttcacacttgcccagtttcacagaggctttttattctcaaatagccttgcatttctccaggaatgtggacatcgtacgaggaagaygagagcatccaaaacacacagatggcactggcattttacactatttagagatttcacacttgccatttgttaatgagctctctgtgatactgtgcagaaaaaaatccaacagtcattaaatggaagacatatttaggtgccttaagagctgacaaggctactgaatgaagaacagggtgcttctcaccctgatgcttcctgaaaagctgtcttcttacagtgggaagcaagtgctttgggatggagtgatagggattggtgacaagaggaaccagtgacaaagacaaaacccacagcttc

SEQ ID NO: 49201 - DNA, 600 bp, Chicken  19866894294974_1
aaagaggtgtccagggtggctgagcagcagggctggggcagagcagccaggaaaccaacatgtgtgagctaccctagtgctgttgggagccaaatggagcaccaggcaaatgcgtctgaatatgtcctatagcatactgaatcaacgtgacttagggagcactgcatggaatggcagccagtgcgtttgtcagcacggctctgtggtgtgcactgggctatggagacatctccctatcttttagggagtttccccccactgttggatggggacccatccaaaccccatccactgtgcacygccattgagcgaaggcagatccgctcaaacccatgcctggggagggcggaagggagggagaaaggayrggaacaaaagctgcagaccctctgttgggggacccccatggcgtggtgtcccygcggtgccgccgtgcccttcccactgccagccagcaccgcggcatcaccgacatgcgcccggcccgcgtgactcgcatacgcaatgcagccatgcttaacaagcgtgagtaattatgccaggcagagggctggggcgtggggggcggtcggggttgtgtgtgttttatgtgttgatttc

SEQ ID NO: 49202 - DNA, 600 bp, Chicken  19866894294974_2
gctaccctagtgctgttgggagccaaatggagcaccaggcaaatgcgtctgaatatgtcctatagcatactgaatcaacgtgacttagggagcactgcatggaatggcagccagtgcgtttgtcagcacggctctgtggtgtgcactgggctatggagacatctccctatcttttagggagtttccccccactgttggatggggacccatccaaaccccatccactgtgcacygccattgagcgaaggcagatccgctcaaacccatgcctggggagggcggaagggagggagaaaggayrggaacaaaagctgcagaccctctgttgggggacccccatggcgtggtgtcccygcggtgccgccgtgcccttcccactgccagccagcaccgcggcatcaccgacatgcgcccggcccgcgtgactcgcatacgcaatgcagccatgcttaacaagcgtgagtaattatgccaggcagagggctggggcgtggggggcggtcggggttgtgtgtgttttatgtgttgatttcttgttttttttttttcttttcttttgcattttctctgttgttgtttttttcttttccttttctcccc

SEQ ID NO: 49203 - DNA, 600 bp, Chicken  19866894294974_3
ctaccctagtgctgttgggagccaaatggagcaccaggcaaatgcgtctgaatatgtcctatagcatactgaatcaacgtgacttagggagcactgcatggaatggcagccagtgcgtttgtcagcacggctctgtggtgtgcactgggctatggagacatctccctatcttttagggagtttccccccactgttggatggggacccatccaaaccccatccactgtgcacygccattgagcgaaggcagatccgctcaaacccatgcctggggagggcggaagggagggagaaaggayrggaacaaaagctgcagaccctctgttgggggacccccatggcgtggtgtcccygcggtgccgccgtgcccttcccactgccagccagcaccgcggcatcaccgacatgcgcccggcccgcgtgactcgcatacgcaatgcagccatgcttaacaagcgtgagtaattatgccaggcagagggctggggcgtggggggcggtcggggttgtgtgtgttttatgtgttgatttcttgttttttttttttcttttcttttgcattttctctgttgttgtttttttcttttccttttctccccc

SEQ ID NO: 49204 - DNA, 600 bp, Chicken  19866894294974_4
atgtcctatagcatactgaatcaacgtgacttagggagcactgcatggaatggcagccagtgcgtttgtcagcacggctctgtggtgtgcactgggctatggagacatctccctatcttttagggagtttccccccactgttggatggggacccatccaaaccccatccactgtgcacygccattgagcgaaggcagatccgctcaaacccatgcctggggagggcggaagggagggagaaaggayrggaacaaaagctgcagaccctctgttgggggacccccatggcgtggtgtcccygcggtgccgccgtgcccttcccactgccagccagcaccgcggcatcaccgacatgcgcccggcccgcgtgactcgcatacgcaatgcagccatgcttaacaagcgtgagtaattatgccaggcagagggctggggcgtggggggcggtcggggttgtgtgtgttttatgtgttgatttcttgttttttttttttcttttcttttgcattttctctgttgttgtttttttcttttccttttctccccccaccctccttcttcccaacccgtagcccgtcgcgttgaaccttggccagctcc

SEQ ID NO: 49205 - DNA, 600 bp, Chicken  19866894294975_1
attttttgagtagtcactttgagagagaagcattaacgtggcaggtttgcatacaatccagggctactgaagtgacctgtgaataacccagcctaaaggctggaagctgtcaagtcaggattactttgaagctctgtctgagcagacagaattaggtagccagggcaaatgcatgcagttactcagggtagggcactgtgttaatgaggctgtgttgcttcaagccactcaaggcttgctccgatctctctcggtgccactggctaagggaactgccctttacttaagtagtcacgtttmttgtttrcaactgggctattccctagtaaagtcagaaaggagctaattctaaacccagtgatttctaagaaggtttttcacagagctttcgaggtataaactkaagtttatgcttgcgctttggggcattttgtttctgttaatactttaaaatatattttgttttactggtaaaattcatggaatgaaatataaaatacaatgatatagatttgatcatggttcaatgagggtgagccataagttggctgcaacctgtgcaatgatcctacagatcatttaagtagccttattaacttt

SEQ ID NO: 49206 - DNA, 600 bp, Chicken  19866894294975_2
gagtagtcactttgagagagaagcattaacgtggcaggtttgcatacaatccagggctactgaagtgacctgtgaataacccagcctaaaggctggaagctgtcaagtcaggattactttgaagctctgtctgagcagacagaattaggtagccagggcaaatgcatgcagttactcagggtagggcactgtgttaatgaggctgtgttgcttcaagccactcaaggcttgctccgatctctctcggtgccactggctaagggaactgccctttacttaagtagtcacgtttmttgtttrcaactgggctattccctagtaaagtcagaaaggagctaattctaaacccagtgatttctaagaaggtttttcacagagctttcgaggtataaactkaagtttatgcttgcgctttggggcattttgtttctgttaatactttaaaatatattttgttttactggtaaaattcatggaatgaaatataaaatacaatgatatagatttgatcatggttcaatgagggtgagccataagttggctgcaacctgtgcaatgatcctacagatcatttaagtagccttattaacttttcattta

SEQ ID NO: 49207 - DNA, 600 bp, Chicken  19866894294975_3
aagctgtcaagtcaggattactttgaagctctgtctgagcagacagaattaggtagccagggcaaatgcatgcagttactcagggtagggcactgtgttaatgaggctgtgttgcttcaagccactcaaggcttgctccgatctctctcggtgccactggctaagggaactgccctttacttaagtagtcacgtttmttgtttrcaactgggctattccctagtaaagtcagaaaggagctaattctaaacccagtgatttctaagaaggtttttcacagagctttcgaggtataaactkaagtttatgcttgcgctttggggcattttgtttctgttaatactttaaaatatattttgttttactggtaaaattcatggaatgaaatataaaatacaatgatatagatttgatcatggttcaatgagggtgagccataagttggctgcaacctgtgcaatgatcctacagatcatttaagtagccttattaacttttcatttatttaacacacagaaaaattatatttttacactatgaccataggaatctttaagtgttcttaaactgttacaggaaaaactgataaactgatttgaa

SEQ ID NO: 49208 - DNA, 600 bp, Chicken  19866894294977_1
gtaatgacaagtcctttattatcacattatgacattgaaaaaaattgcaattatactaataaattaataacagtaataaaatgacagtcataattgcataatatacatgttgtcaacggcatttttgttacatggctggaattcatattttatcttcatatcttacgctatattaaattttcccaatatagcacaggcatgcagtggcttctgaatttctgaaagcctcagcagttggagtaactgcagtaaatgagactttaagacatgacttatcctttacttttatagatttttttwwaaaatgttcaacgaaattgaagaattttgcacttgattacaattaaatgttaggattaattcgtagccatagycctaaagaaaatttaatgtctcttatcagatataatgctggattaaaaaaaaagctgagtgatttagcagtgaactcatgaattgttgcttctcagttcataaaaagaaactttaaacacgcaaagattaaggtttgaaatgtgcattgcagattggtgaggagagggagagttcatggtactgttgtatttcccattatcgtgctgaggatggaggggaaataag

SEQ ID NO: 49209 - DNA, 600 bp, Chicken  19866894294977_2
taatgacaagtcctttattatcacattatgacattgaaaaaaattgcaattatactaataaattaataacagtaataaaatgacagtcataattgcataatatacatgttgtcaacggcatttttgttacatggctggaattcatattttatcttcatatcttacgctatattaaattttcccaatatagcacaggcatgcagtggcttctgaatttctgaaagcctcagcagttggagtaactgcagtaaatgagactttaagacatgacttatcctttacttttatagatttttttwwaaaatgttcaacgaaattgaagaattttgcacttgattacaattaaatgttaggattaattcgtagccatagycctaaagaaaatttaatgtctcttatcagatataatgctggattaaaaaaaaagctgagtgatttagcagtgaactcatgaattgttgcttctcagttcataaaaagaaactttaaacacgcaaagattaaggtttgaaatgtgcattgcagattggtgaggagagggagagttcatggtactgttgtatttcccattatcgtgctgaggatggaggggaaataagt

SEQ ID NO: 49210 - DNA, 591 bp, Chicken  19866894294977_3
aataaaatgacagtcataattgcataatatacatgttgtcaacggcatttttgttacatggctggaattcatattttatcttcatatcttacgctatattaaattttcccaatatagcacaggcatgcagtggcttctgaatttctgaaagcctcagcagttggagtaactgcagtaaatgagactttaagacatgacttatcctttacttttatagatttttttwwaaaatgttcaacgaaattgaagaattttgcacttgattacaattaaatgttaggattaattcgtagccatagycctaaagaaaatttaatgtctcttatcagatataatgctggattaaaaaaaaagctgagtgatttagcagtgaactcatgaattgttgcttctcagttcataaaaagaaactttaaacacgcaaagattaaggtttgaaatgtgcattgcagattggtgaggagagggagagttcatggtactgttgtatttcccattatcgtgctgaggatggaggggaaataagttttgtctcattttacattgtgatatttaagtcctctgctgcatcacataggtgttacctcgtga

SEQ ID NO: 49211 - DNA, 600 bp, Chicken  19866894294984_1
gcaatgcccagtgccgggtttcactgcccatacagtcacacagctgatgacaacacgacaaacacatgctttgcctgcgggatcctcggtgcccggcgcttgaacgaggcacgaccccttccctcctggtgttgtatcgctcccagctatgtttgctttacactttggcaccgaggaaacagcagatggcacggcttcgcctctctccatcacacggcttgcggcaccctcagctgtgccagtgccaccgtgcagcactcctgcccagcgctcctaaagcctcgagttcaggagctcctycttctgacccccaagcagccggctcacccgcagcccctccagcccttggccacggggaccacgcggctccccgcagtgctgcggcgctgagccgggagcgcggcgcggtgccagacgcggtgccaggcacggtgyacggcccccatggggctggcaggggctcggcagcgggagccaaccccccggtgggccgccctgcccgacgcttagcggggcacccgagcaaaactgttcgacatcacttcccagtggggagcccactcaagcaaacaaaccctggctgcattaatctccaccgcc

SEQ ID NO: 49212 - DNA, 600 bp, Chicken  19866894294984_2
atcgctcccagctatgtttgctttacactttggcaccgaggaaacagcagatggcacggcttcgcctctctccatcacacggcttgcggcaccctcagctgtgccagtgccaccgtgcagcactcctgcccagcgctcctaaagcctcgagttcaggagctcctycttctgacccccaagcagccggctcacccgcagcccctccagcccttggccacggggaccacgcggctccccgcagtgctgcggcgctgagccgggagcgcggcgcggtgccagacgcggtgccaggcacggtgyacggcccccatggggctggcaggggctcggcagcgggagccaaccccccggtgggccgccctgcccgacgcttagcggggcacccgagcaaaactgttcgacatcacttcccagtggggagcccactcaagcaaacaaaccctggctgcattaatctccaccgccagagcccgacgggccggtggcggggaggccggagctattaccacgctcccattctccctcctaatcctgacttcacactttaacctgattgagccttgtttggagagctggctccctgcgcgccgccaggggatt

SEQ ID NO: 49213 - DNA, 600 bp, Chicken  19866894295001_1
gagccagtcacatcttgcaaaatactgtatagagaacttcatccacgtttccatgctgtgctttgattcctgtccacacacaccagtggtcctgctttgctagaacagtaggggacatcaagacatgggaacaagaggtcagcagcagacattctcaactactttttgtgcaaggcagagatcctactctgtttctttaaataagtagggccatgacagggctgatgctcaacagactactccaaaaccagcaagtcccacctcttctgatcactggcactggcaccaagcagtatatasaagcccagtacatccgtgctggctgccackcagggtatgagtaccctggggcagaacaacccgctcatgcctggtgtggttcactctttgaatgtgttcattggtgaacactggaacactggcttcctacttaggcccagccagctgctggtggttcacacggcagtgacactgcaagccaggcacagggcagggctgagggagtaatttccttccatacatttggttttcagtactgatgtatggagccacatggtgcaactagaatatattgctgtgtagaaagtgaggcctgtttcc

SEQ ID NO: 49214 - DNA, 600 bp, Chicken  19866894295001_2
agagaacttcatccacgtttccatgctgtgctttgattcctgtccacacacaccagtggtcctgctttgctagaacagtaggggacatcaagacatgggaacaagaggtcagcagcagacattctcaactactttttgtgcaaggcagagatcctactctgtttctttaaataagtagggccatgacagggctgatgctcaacagactactccaaaaccagcaagtcccacctcttctgatcactggcactggcaccaagcagtatatasaagcccagtacatccgtgctggctgccackcagggtatgagtaccctggggcagaacaacccgctcatgcctggtgtggttcactctttgaatgtgttcattggtgaacactggaacactggcttcctacttaggcccagccagctgctggtggttcacacggcagtgacactgcaagccaggcacagggcagggctgagggagtaatttccttccatacatttggttttcagtactgatgtatggagccacatggtgcaactagaatatattgctgtgtagaaagtgaggcctgtttccttttgatgttcctaaggacactatgaagca

SEQ ID NO: 49215 - DNA, 600 bp, Chicken  19866894295005_1
gagcagctcttaagtatttgaaaataaaagtacagtcttggtttcagtcagcatggaacaggagacatcttgcccatgcaggagctctaaatatacattaacatatcaatttagcagtgacagggagcttaaagtccaccttaacctgacagtgtacatgaacaataataaaacacatattaagaatccaccttttcccctgtgatgagtgtgatcagtgcagactgaaggaacaagactcaacagaggatttctgcagtgctggaacacttgggaacactttattctgtcagcacattmggctgggaactaggaggagtgtaacaacaagcatgtgtgacctttctgactcctgaaaacttagaaatcgatagtttaaattccacacaccctacagaaacagacttacttatgacaacatacatagattactgtgacataattgatctagttaagaattctctccatgggaaaacttaaagacattccatttaaagacaatttaaagtctttctaaaggcacatttttccaaattaaactttaaaaactgttgctctgtacaaagcctgcwacacaactttgaaaccaagtcaacaaat

SEQ ID NO: 49216 - DNA, 600 bp, Chicken  19866894295005_2
gggaacactttattctgtcagcacattmggctgggaactaggaggagtgtaacaacaagcatgtgtgacctttctgactcctgaaaacttagaaatcgatagtttaaattccacacaccctacagaaacagacttacttatgacaacatacatagattactgtgacataattgatctagttaagaattctctccatgggaaaacttaaagacattccatttaaagacaatttaaagtctttctaaaggcacatttttccaaattaaactttaaaaactgttgctctgtacaaagcctgcwacacaactttgaaaccaagtcaacaaatcctgagggaagctgcttagataggtttgtcgctgagataaaaatgaccaaatgataaatcatcatgcagtcattgctttctatttgtcaggtgttataaagggaacttgtatatcccacacaagacctcgtttcaaatgcatttatttgatattacctgttacctactgttatatcatggtgacactgcatgtgagtttcctcatccctttgttgaaaaagatggagagctttgtcatggagaggactggtcccagattttactcaggccca

SEQ ID NO: 49217 - DNA, 600 bp, Chicken  19866894295006_1
gcagggtcaccgacccactagaccaggctgccacatccacatctatactgtgaaaacagaggctgaaaaatcattaacaaaatagataagttaattttgtccgtttttagatagagtcccaaatgcccgctaagcaataaagaaaaaaatctgctaaaataaaaaaggaatcatgttaaataagaaaacacgatcaagcagatacacatcattaattaaagtttgcttttataaaaggggactaatttttgtctcccttgctataaaaatggattttcagcatttaaaaaccttcctttrcttataataaagacattctatgaacctgcaaatggaaaacatatcacagggggggaacttccctttctgttcagacccaagcagttaaaacagtggttcaaaactgcaaggctttacagctgtagctgaaagcagctgtcaaacgtgaaggttattttatggagagtaattaatagtctgaatggatgtacgaggtctctcactgttctgcctttgtcacaagaaatcagaaacgcgaagagcatccctgatatcttttgttgcaaagtattcttctcttgcaatcaacattttagcatt

SEQ ID NO: 49218 - DNA, 600 bp, Chicken  19866894295006_2
aacatatcacagggggggaacttccctttctgttcagacccaagcagttaaaacagtggttcaaaactgcaaggctttacagctgtagctgaaagcagctgtcaaacgtgaaggttattttatggagagtaattaatagtctgaatggatgtacgaggtctctcactgttctgcctttgtcacaagaaatcagaaacgcgaagagcatccctgatatcttttgttgcaaagtattcttctcttgcaatcaacattttagcatttaaataaggtaagtgcagatattttaccgacaacccraagaagagcaaataatcaatctgacgaaacatctctgcaacataaggaggagcttgatagaaatactgcattgcaacaaaactttcattaaaaatattggaacactgatctagaaatrtgtctttcagaacaccatagctttgttttcacggatgaagctctggtatgtgaaaattaggctgagagcagcatggacatctaaagcatctgagctgattttatgtacagaaagcaaacactacttgcagacagcacttttttctgtcttaaaccacagcagtcatcactccacagacaata

SEQ ID NO: 49219 - DNA, 600 bp, Chicken  19866894295006_3
tttatggagagtaattaatagtctgaatggatgtacgaggtctctcactgttctgcctttgtcacaagaaatcagaaacgcgaagagcatccctgatatcttttgttgcaaagtattcttctcttgcaatcaacattttagcatttaaataaggtaagtgcagatattttaccgacaacccraagaagagcaaataatcaatctgacgaaacatctctgcaacataaggaggagcttgatagaaatactgcattgcaacaaaactttcattaaaaatattggaacactgatctagaaatrtgtctttcagaacaccatagctttgttttcacggatgaagctctggtatgtgaaaattaggctgagagcagcatggacatctaaagcatctgagctgattttatgtacagaaagcaaacactacttgcagacagcacttttttctgtcttaaaccacagcagtcatcactccacagacaataaaatccatagctaattttccctgttgaatcccctctggaattgtttatttaaaaaagaaataagagtactgcttgtgattaagtccacagaaacaaacagaacaatgaactcaagtga

SEQ ID NO: 49220 - DNA, 599 bp, Chicken  19866894295007_1
  misc_feature (1)..(12): n is any nucleotide
nnnnnnnnnnnntctcatcattctttagcttaaaatatgggaataagaacagtatcttatgattcaggttctcttctgggtgacaggagctgtcaatcatgttagaacaccattctgaaaggactgagttctaaattctgtgaaagtctggcttaaataagcgaatctttaacaccgaaagggatctgccctgttttcacgctttctatatttcttaaaggctgttctactccatgatctcatgcaaagctcaaacgatcttaaccttctcggacactgtgttgctgaaaaagagcagaragagccaagtcgcttgtagtacatttagaaaatgtgcccgagtcctgcaggatcatccaacatggtacatattctatgggactgattagacaaatggctaatgagtacttcaacacttttttaagtctcgcctttatgattatgctcttggatgtggcaggatctttagaatgaaggcagattgcttttgtgctctccttaaagcatatttaaagataattaaaccctacaacaggttgggagtgttcagcactcctaagagttagcttccctgccatgttctttttcctgtttctcat

SEQ ID NO: 49221 - DNA, 600 bp, Chicken  19866894295011_1
gttaagcttttaggagctgcatttggtgctgcagcaccagaaagacagcttggcagatccttaaatccttatgcatgccacactaggtccatactgctgaaccaaggcacctgcctgggccttgaacttatttcacagtcagcagatgagggcttgatgtccaaggctgtgctcagccctactgagctcctatttctctggctatgggatggccctggagacaaccagaatcctgacgtaggcagcttggtttgagtgctgaagacaaggtgaaccctcagccctccttcagcagttccytttgcaaggctggaaarccagttcagcccccagcaacagkactcctgctgacaggagggctgagctccagctgctgcagatttttcttcattgatgttccaaagtaatccagctaagtcaacattttcaaaaagaaatggagcatctcaatattaaaggtgagaacaagatttagacacctgagtaaaattcaattaatgtaaaacattttggggccagtttaaatagttcacccttacttcttccactccacattttttttaataagaacaaaccttgaaagaagttctccttccacag

SEQ ID NO: 49222 - DNA, 600 bp, Chicken  19866894295011_2
tgcatttggtgctgcagcaccagaaagacagcttggcagatccttaaatccttatgcatgccacactaggtccatactgctgaaccaaggcacctgcctgggccttgaacttatttcacagtcagcagatgagggcttgatgtccaaggctgtgctcagccctactgagctcctatttctctggctatgggatggccctggagacaaccagaatcctgacgtaggcagcttggtttgagtgctgaagacaaggtgaaccctcagccctccttcagcagttccytttgcaaggctggaaarccagttcagcccccagcaacagkactcctgctgacaggagggctgagctccagctgctgcagatttttcttcattgatgttccaaagtaatccagctaagtcaacattttcaaaaagaaatggagcatctcaatattaaaggtgagaacaagatttagacacctgagtaaaattcaattaatgtaaaacattttggggccagtttaaatagttcacccttacttcttccactccacattttttttaataagaacaaaccttgaaagaagttctccttccacaggctgctatttcagagga

SEQ ID NO: 49223 - DNA, 600 bp, Chicken  19866894295011_3
aaagacagcttggcagatccttaaatccttatgcatgccacactaggtccatactgctgaaccaaggcacctgcctgggccttgaacttatttcacagtcagcagatgagggcttgatgtccaaggctgtgctcagccctactgagctcctatttctctggctatgggatggccctggagacaaccagaatcctgacgtaggcagcttggtttgagtgctgaagacaaggtgaaccctcagccctccttcagcagttccytttgcaaggctggaaarccagttcagcccccagcaacagkactcctgctgacaggagggctgagctccagctgctgcagatttttcttcattgatgttccaaagtaatccagctaagtcaacattttcaaaaagaaatggagcatctcaatattaaaggtgagaacaagatttagacacctgagtaaaattcaattaatgtaaaacattttggggccagtttaaatagttcacccttacttcttccactccacattttttttaataagaacaaaccttgaaagaagttctccttccacaggctgctatttcagaggagctgcagtaacaatagttcagtc

SEQ ID NO: 49224 - DNA, 600 bp, Chicken  19866894295030_1
ataaggagaattcaagatctgctcttttgtgcaaatttgcctttgaggtaggattctccacgttaagaacctcttcatcttttttaggacattgacaactacagttatcacttttgccattattatttcataactctgtttcacaggtaggaggtagctttggggcagtcatatatttcattatcatgcatttttctttgcagccttgaaaatatattcatttgggagaagaggagagttgtgcaaattggaataaaagaatataaacctgacacacaggttttttaatcagaatacagraaaaaaaaaaaaaaaaaaaagcaagaacgcttgttccctgtggcaatagagcattttaatttcagtaaggagcttaaagaaataccttttcctatgagttggactcgagctttcttgtaataacttgaaatagaaagacctgagttctcacaatgacacttggtaaaagacacacattcctaaaaatttcagctcaaatgttcattttccatagtatggcattcaaactacactgttaaaatggtagtaacagatttcagatatgaaagagggaaggacacagcaaaaatactggtgtat

SEQ ID NO: 49225 - DNA, 599 bp, Chicken  19866894295037_1
  misc_feature (1)..(68): n is any nucleotide
nnnnnnnnnnnnnnnnnnnnnnnnnnnnnnnnnnnnnnnnnnnnnnnnnnnnnnnnnnnnnnnnnnnncatgtctgatagtcatgtaggactgacatccttgttattcaaaagtcattttcaaagcagtgctttctttccagaaagttacttctaagcatttagattcaacacccatgatttatttacagatggggaaactgagctgggaggcactatgaaccatttccccaaattcaatgagccatcatgaagccaaaccagaaccagcacaccggtcttctgagccctggtattgatkcctgtcgtgtgaaatatgctgcattcagaagcagtgtctttaaataagtgcttgagttatgtagggagctttgcaggtgggtgagtgtttggtgggtktctgggatgctgaaagcactgttcaggacagctcccttcagtttgttttctggtctttgtggagtagcttgcatagaggaaggagtgaaaagtgctgtgaaagcaccactacataaaagaactgcatttagacagtggtagcagaaggcacctgaggctcaaggagctctaccattacatgagcagtggactttagaaggg

SEQ ID NO: 49226 - DNA, 600 bp, Chicken  19866894295037_2
cttgttattcaaaagtcattttcaaagcagtgctttctttccagaaagttacttctaagcatttagattcaacacccatgatttatttacagatggggaaactgagctgggaggcactatgaaccatttccccaaattcaatgagccatcatgaagccaaaccagaaccagcacaccggtcttctgagccctggtattgatkcctgtcgtgtgaaatatgctgcattcagaagcagtgtctttaaataagtgcttgagttatgtagggagctttgcaggtgggtgagtgtttggtgggtktctgggatgctgaaagcactgttcaggacagctcccttcagtttgttttctggtctttgtggagtagcttgcatagaggaaggagtgaaaagtgctgtgaaagcaccactacataaaagaactgcatttagacagtggtagcagaaggcacctgaggctcaaggagctctaccattacatgagcagtggactttagaagggatgagtttagaaaagggcgctagcrgctgtctgctgtgttggaaacaaggacgaggacagggtcaaagctgaggacagaggcggatgggaagatrcaag

SEQ ID NO: 49227 - DNA, 600 bp, Chicken  19866894295037_3
tcagaagcagtgtctttaaataagtgcttgagttatgtagggagctttgcaggtgggtgagtgtttggtgggtktctgggatgctgaaagcactgttcaggacagctcccttcagtttgttttctggtctttgtggagtagcttgcatagaggaaggagtgaaaagtgctgtgaaagcaccactacataaaagaactgcatttagacagtggtagcagaaggcacctgaggctcaaggagctctaccattacatgagcagtggactttagaagggatgagtttagaaaagggcgctagcrgctgtctgctgtgttggaaacaaggacgaggacagggtcaaagctgaggacagaggcggatgggaagatrcaagagggaaactactacagatgtcgtgggaagatgagtgggtgagaggatcccaaacgctgttgaatgtttgtgcaccacgttccctctcaaagtgatgtaagaaaagatcaggatacttgagcatttcataaacttcagcaggcacctgtccacatcttttggcatttgaagtacctgcaggaggtttccacagtctttcctgaagtcggtgggatttgtctcttaat

SEQ ID NO: 49228 - DNA, 600 bp, Chicken  19866894295037_4
ggtktctgggatgctgaaagcactgttcaggacagctcccttcagtttgttttctggtctttgtggagtagcttgcatagaggaaggagtgaaaagtgctgtgaaagcaccactacataaaagaactgcatttagacagtggtagcagaaggcacctgaggctcaaggagctctaccattacatgagcagtggactttagaagggatgagtttagaaaagggcgctagcrgctgtctgctgtgttggaaacaaggacgaggacagggtcaaagctgaggacagaggcggatgggaagatrcaagagggaaactactacagatgtcgtgggaagatgagtgggtgagaggatcccaaacgctgttgaatgtttgtgcaccacgttccctctcaaagtgatgtaagaaaagatcaggatacttgagcatttcataaacttcagcaggcacctgtccacatcttttggcatttgaagtacctgcaggaggtttccacagtctttcctgaagtcggtgggatttgtctcttaatttgtttcttaaatggggctcaatttgaggtgtgagagtttttgaagaggttgatgccaacttcctcgctt

SEQ ID NO: 49229 - DNA, 600 bp, Chicken  19866894295039_1
ttaaggctgatatgggaggccgggctgagctgccttttgccttctgagcgtttaagcacaaaaataaaggggaaagtgtgggattttggtcttccgctggagattctcgatgggctgagatgcatcccaggggcccacccgccaggcccgagttctttggtggtgagagaacaggggacttgcttaaaggccacatacttccctcattcccatggcaaccagcccattaaggagatggagattaaacctccccagctggtgcgtgttggccgggcagcggtgtccccctcctcccactcrggccttgctgattccacgggaattgggcacgcgggcagcttcaggaacgtgatgggtaaaaccagcgggcctctcatgacgtgctcagggctccggcctaatgcctgctgccttttccacagccccatgctcacctaccgtgtggatgctgacaaagggttcaacttctccgtgggcgacgacgccttcgtgtgccagaagaagaatcacttccaggtcacggtctacatcggcatgcttggagatcccaagtatgtgaagacccccgagggcctgaagcccttagagtgcttctacctg

SEQ ID NO: 49230 - DNA, 517 bp, Chicken  19866894295050_1
agggccatgggtgactgcagccgtctgtcctctgtgcccagagctgtgagatcagagtctgagcatccacattctccacgcagatgattttgcactacacgtacaaaccagattattgtcagcggagaatcatgtatcacgcagcaagttaaaaaggcaaaacgcttgcccttcaggaatttctagctatggaaaataacagatagagtgtatccacaacaacataagagaaaatgcctcaagagttaaatctgatgcatacgaaatgctgcatgaactacagctcaagatattcgctaygttcgttgaaatctctctcacgcagcattttaaaaggcattaacgtttgttcaagtaatcttttcccagctattctgtattaatagctatttacataataagttattgtaaaagatatatgcataacatatttctttgaagatatgctctgggtaacttggaataaatcctacctcatttaatacagattttctgagacgtgtagaaaaataagagt

SEQ ID NO: 49231 - DNA, 600 bp, Chicken  19866894295052_1
tggcaaggtgcactcatagctcaggtagccctactgtatcctgggctgtatccaaagaaatatggccaggaggtcgaaggaggtgatcctactcctctagtctgtgctggtgagacctcacctggagtactgcatccagatgtggagacctcagtacaggagagacatagacctgatggagtgcgtccagaggcgggccacaaaaaggttccaagggatgaaacacctctcatatgagagcaggctgagagagctggggctgttcagcatggggaaaactccgagaagatgttatagtgrcctttctgtatctaaaggagggatataagaaggaaggggacaaggtctttagtggggtctgttgtgataggacaggaaatggtttcagactaaaaggagatttagaatggatataaggaaaatgtttttttttatgataagggcagtgaagcactggaacaggttacccagggagctggtggataccctatccccggagacatttaaggtcaggctggacagggctctgagcaacctgattgagctgtagatatccttgtttattgcagaggagttggactggatgacatttaagtgtct

SEQ ID NO: 49232 - DNA, 600 bp, Chicken  19866894295052_2
atctaaaggagggatataagaaggaaggggacaaggtctttagtggggtctgttgtgataggacaggaaatggtttcagactaaaaggagatttagaatggatataaggaaaatgtttttttttatgataagggcagtgaagcactggaacaggttacccagggagctggtggataccctatccccggagacatttaaggtcaggctggacagggctctgagcaacctgattgagctgtagatatccttgtttattgcagaggagttggactggatgacatttaagtgtctgttccaacytaaataactctgtgattctatgaccttgtaaataagaatttatcagagttggcattattgtgcatttttataggtatccatgatagttgacagaaggtatcagtaatagcaatgtaaaagttaaaaaactaaaatgttacttgatttgatgttaagatgtttattcctgtagctagtgaatattacatattgtcatggaacacaaagaagctggaaccttcattttcttttgctgctctttgatttgtccctctgttacttctatttctttattttatcatggcaattattaaactgtca

SEQ ID NO: 49233 - DNA, 395 bp, Chicken  19866894295053_1
tttgctcaagacaataacattcataataccctcttgcaaaacaaatgggaatactggataacatggttatagaggtcttcggtgcctaaagctaggtttgaatctggatataaaatgtactctgaattagcacacagcaaagctgaatttccagcatacagaatatagaggtgcctcattgcacctattccaacagtcagagagaacatcctttattccgaagaaatagcctgatcaaaagattaggcacaaacagggagaccaaatcttaataattctgggatggctatgaaaccagcrataggaaatgacagcctgtttgtttggaaacattattttaagtactcagatcacttctgtagtgtcctggcaagaaaagaagtcctttgggggaa

SEQ ID NO: 49234 - DNA, 474 bp, Chicken  19866894295063_1
gtgagcgatctgcaaagaagcagagtgggaggggtctttgacatcattcagagattgcattcggctctcacctgctctgtaatttctatttttggattagggctcagctccccctataccagtaatctgttgagctctattatgaaaagttatgctctttgtctttgtgattgcaagactttggcacaactgacaggttctcagtacatgatgtggatgggcttttgagagaatctgtacagcaaaaggtgctggaatggaagctattggagctccagaccctgagtctatggctcaccyaccaccacaagcacttggcatttattatcagtgtgtgggaacaggagatgaggaaagctgctgctgagacatatgcttgtgtttggaacctccagctgttggcattgatgcagtgtattcttctgaaccttttagctattgtagcagttgctctatgttccagaaaattctaag

SEQ ID NO: 49235 - DNA, 600 bp, Chicken  19866894295071_1
ttgagggctttagctggtttctttttacggtacttaaagctacacatgaactttatagtggaggagagctccagcaccactctctggatagccctctgtttcttaggaagacctgtgagcactgaagttgagcacagctttgctatgcttagcacagtctcttaatgctgcacatgttctctaaatgattttacaatttgatttttcaaatgtgcaatattttttgtatgataatgataaaataaagcattcactggaactgccagtacagaagtagctggacaggttttcttcattgtygtagaaytgtagaatagcttgggttggaagggactgtagagctcatgtagttccaacccccctgctgggaacagggttgctacccagcagatcatgctgcccagggccccatctaacctggccttgaacacctccagagatagggaatccataacttctcttggcagcctgttccagtgcttcatcaccctttccataaggaaaacatttcttcctaacatttaatctaaacctcccctcttttagtttaaaaccgttctctcttgttctgtcaatatcagtccacgtaaaaagttggtc

SEQ ID NO: 49236 - DNA, 600 bp, Chicken  19866894295071_2
ctttagctggtttctttttacggtacttaaagctacacatgaactttatagtggaggagagctccagcaccactctctggatagccctctgtttcttaggaagacctgtgagcactgaagttgagcacagctttgctatgcttagcacagtctcttaatgctgcacatgttctctaaatgattttacaatttgatttttcaaatgtgcaatattttttgtatgataatgataaaataaagcattcactggaactgccagtacagaagtagctggacaggttttcttcattgtygtagaaytgtagaatagcttgggttggaagggactgtagagctcatgtagttccaacccccctgctgggaacagggttgctacccagcagatcatgctgcccagggccccatctaacctggccttgaacacctccagagatagggaatccataacttctcttggcagcctgttccagtgcttcatcaccctttccataaggaaaacatttcttcctaacatttaatctaaacctcccctcttttagtttaaaaccgttctctcttgttctgtcaatatcagtccacgtaaaaagttggtctccctcc

SEQ ID NO: 49237 - DNA, 600 bp, Chicken  19866894295072_1
cccccctcccccccgccttgagatgggacctggcagggcaggggaggtggtggagagagccggcggaagggaaaggggggagttatttcctacttatttatttatttagctctttcctccctcaggtcgccatggtgataccgagctcgctctccctcccatcaagaggagacgggcacccccttcgtgagaaaccctctgtccccactgcccccgctgctgcttttccccatcagaggttgaatatactgatgccacaccgtcccctcagcgtttaagctggacccccgcgccctccgyctccctcgacctggccccgactgcccccaacactgacagcgacaacccagcgctactccagcttcccccagygcagccgcccccgctgtccctccagaagaggagtgagacgggagcagccaaaacagcccctctgttcgcctcactgaagtcatccccagttttgacgctgccgctggggatggagtggttgggccggacgggtcgtccccggactccctgttcatcccctcagggtaccgcctgagacgcccagcgcgaggaccctggagcagcatcggccaagcccgcggcggcagc

SEQ ID NO: 49238 - DNA, 600 bp, Chicken  19866894295072_2
aaggggggagttatttcctacttatttatttatttagctctttcctccctcaggtcgccatggtgataccgagctcgctctccctcccatcaagaggagacgggcacccccttcgtgagaaaccctctgtccccactgcccccgctgctgcttttccccatcagaggttgaatatactgatgccacaccgtcccctcagcgtttaagctggacccccgcgccctccgyctccctcgacctggccccgactgcccccaacactgacagcgacaacccagcgctactccagcttcccccagygcagccgcccccgctgtccctccagaagaggagtgagacgggagcagccaaaacagcccctctgttcgcctcactgaagtcatccccagttttgacgctgccgctggggatggagtggttgggccggacgggtcgtccccggactccctgttcatcccctcagggtaccgcctgagacgcccagcgcgaggaccctggagcagcatcggccaagcccgcggcggcagcgctctgcttggaagcgcggggctcctacgcggaaggctcccacgacggcagctggaaatggggcccctggtg

SEQ ID NO: 49239 - DNA, 600 bp, Chicken  19866894295080_1
tacttctcatcttggtggagtcctaaagaaacactacaatggcacagatctcacttggaattctctggtaaccaatgctaaataaatcctttattactgccatacgggaaaccttttgggatgatcaaagagtttaagatggagagatttatgggcagaatttgcagaattttcgtaaggaaatgcaggatttctcctctgcaaataggaagaaaatactgccatgtaaatcaggttgtaaaatgaacagaaaacaattgtggaaaagaaagcattcgtaatgtaaacacgtcggagacracttcttcattttcccttttgcagagcagggcagtggatgaatatcagctaataggaaacagacgtcttcctcagaagaactacttcaccatcacagaatatatgtggtagctgttgaaaactgctaacgttttctcccctccctccccccgtagtttcaagttcaataaatagtagaaaaataatcctttacttaaaaatctggagatgcactgtcccaggttccatacagcaactgtgggagcaatgacctttctaagagcacaaaactgcagggagcccgacggacccccccgctcc

SEQ ID NO: 49240 - DNA, 599 bp, Chicken  19866894295083_1
  misc_feature (1)..(40): n is any nucleotide
nnnnnnnnnnnnnnnnnnnnnnnnnnnnnnnnnnnnnnnncggggaacacatgaagggaccagccggcatttacagacgtctttactaggcattattcttttattctttttttttctttttttttttttcctgcaaagtggtgtttacatacagttaaaaggcatcgattttagtttagcgccgcacgttctccggggaaagagggggttagaagcgggagaagatctatataaaaggagaaagaaagggggaaaagctgataatacgggtttcagtgctgggctggctcgtcttcttcrctctgcctaagagctcagcggttgccgackcacgcggggatcctacgcgttccgagagctcggcttaaaggggaaaacccacccagctcccgcctcgcagccgcgaccacacgctactctacggggcgaacgcaagttcatgcgggaacgggcgggcgccgcgctagtacatagagagcgcctgctcgcgcattaccactcttttctttttcattcgtcggttctgaaaccaaattttcacttgctggtcgcttaaattcagtctgtttgatagttctttcctcttctgtcggttaata

SEQ ID NO: 49241 - DNA, 599 bp, Chicken  19866894295083_2
  misc_feature (1)..(10): n is any nucleotide
nnnnnnnnnncggggaacacatgaagggaccagccggcatttacagacgtctttactaggcattattcttttattctttttttttctttttttttttttcctgcaaagtggtgtttacatacagttaaaaggcatcgattttagtttagcgccgcacgttctccggggaaagagggggttagaagcgggagaagatctatataaaaggagaaagaaagggggaaaagctgataatacgggtttcagtgctgggctggctcgtcttcttcrctctgcctaagagctcagcggttgccgackcacgcggggatcctacgcgttccgagagctcggcttaaaggggaaaacccacccagctcccgcctcgcagccgcgaccacacgctactctacggggcgaacgcaagttcatgcgggaacgggcgggcgccgcgctagtacatagagagcgcctgctcgcgcattaccactcttttctttttcattcgtcggttctgaaaccaaattttcacttgctggtcgcttaaattcagtctgtttgatagttctttcctcttctgtcggttaataaactcattgaggagaaactcgttttccaat

SEQ ID NO: 49242 - DNA, 599 bp, Chicken  19866894295085_1
  misc_feature (1)..(63): n is any nucleotide
nnnnnnnnnnnnnnnnnnnnnnnnnnnnnnnnnnnnnnnnnnnnnnnnnnnnnnnnnnnnnnncttctcctctcctctttcctattttctgcgtgtctttttcttgttttgtttgtttgttaatcctattggatgctgctcactggaaggactgggaagtttttccttttttgttattgcagacagcattttctcacagttttgctgtgcctatgtagagatccacaggggtactactgctggattgtaactagagctgtagttcaagaacctcaaatctgtgtaaaactgtttgtgggragggaataaagcagtaaaaacatataaacatcaaataagttcttcttaagggctgttgagtgggactctagttctttttttttttcttcttcttttcattctgaagttcaagaaacaagccagtgttcctgaaaataaagaaatccttccaacatccaccaccaacaggttgtctctgagtagttgtgagtgaaagttgcaactttccttcaccagcctttccaccttcatttttttccacacagataactcggttttggtcatcagggtcgctggttacgggtcaaaaccccatcggc

SEQ ID NO: 49243 - DNA, 600 bp, Chicken  19866894295088_1
ttttgcttatgaaattaattcataaagatatcaatgtattaaagattaatgcacaacttgaggtggttgtacattaagtctatatgtagttactctgtacgctttatcatatttgattaaaatgagaaagtagaaaattatttgaattaaagtgacttaaactgtttttaggatttagaatggcatcgcatctttttcatgaaatttgtggttttaaattaggaaattgaagtggacacaagtggtgcagttgttatatatgaagactttacaagagatgcgtatgatgttgggtatcaracttttggaggtaagtcagttggctttgtcaggtaaggttttatagatgtttttttgtgtgtgactctgagtgaatagatttagtgtgtgtgtatkacttctaataattattgcacaacatgactcatttttgattttatgtgtttaggccgtggagaagagcatggtttgtaacatctatccattgcttattctctttacatgcttattttgtctctgcattctaattctcattttggatcctttatccaaatttagtaatttttaaaatagtgtatattttcccactgcttaaaaatt

SEQ ID NO: 49244 - DNA, 585 bp, Chicken  19866894295088_2
gtacgctttatcatatttgattaaaatgagaaagtagaaaattatttgaattaaagtgacttaaactgtttttaggatttagaatggcatcgcatctttttcatgaaatttgtggttttaaattaggaaattgaagtggacacaagtggtgcagttgttatatatgaagactttacaagagatgcgtatgatgttgggtatcaracttttggaggtaagtcagttggctttgtcaggtaaggttttatagatgtttttttgtgtgtgactctgagtgaatagatttagtgtgtgtgtatkacttctaataattattgcacaacatgactcatttttgattttatgtgtttaggccgtggagaagagcatggtttgtaacatctatccattgcttattctctttacatgcttattttgtctctgcattctaattctcattttggatcctttatccaaatttagtaatttttaaaatagtgtatattttcccactgcttaaaaattggtgtaagtacactgaaggaaagtgggagcctcattgtgtggtaccagcttgtatgtaggcacaggcttctatttccccag

SEQ ID NO: 49245 - DNA, 599 bp, Chicken  19866894295089_1
  misc_feature (1)..(47): n is any nucleotide
nnnnnnnnnnnnnnnnnnnnnnnnnnnnnnnnnnnnnnnnnnnnnnnctgcaccccccgtcccctaagcaaatttctttcatcatttccccagtagcaagaacattcaaaaaccccactgcacaggggggctatataggcaccacatgtttgggcaccaaacatcagtaaatgcagaggtaatggaagaatttgctaacagtttcagttgaaaatgtgaattaaaaaacaaacaaacaaaccaaactacacacagctatgtcattaaaaataaagctgccactcaacaggaaataaaaayrtattcatcaaacatttcctccctacttctcattttcacttcaactcaaaatgagaaggataccagtgacaagcacaccataaccatccattaactccgactctcagatcatttacagtatattaactagaaycgctctggcacttcyatacaccggtgtcaacctaaattgctaatacacactgaacagctctcctaaacatagaaataatttacattttaaaaacaaatcaaaaccacaaacaggtggaaacactccaccatgccgtatgagatcgttgttcctccagctgttggtc

SEQ ID NO: 49246 - DNA, 599 bp, Chicken  19866894295089_2
  misc_feature (1)..(46): n is any nucleotide
nnnnnnnnnnnnnnnnnnnnnnnnnnnnnnnnnnnnnnnnnnnnnnctgcaccccccgtcccctaagcaaatttctttcatcatttccccagtagcaagaacattcaaaaaccccactgcacaggggggctatataggcaccacatgtttgggcaccaaacatcagtaaatgcagaggtaatggaagaatttgctaacagtttcagttgaaaatgtgaattaaaaaacaaacaaacaaaccaaactacacacagctatgtcattaaaaataaagctgccactcaacaggaaataaaaayrtattcatcaaacatttcctccctacttctcattttcacttcaactcaaaatgagaaggataccagtgacaagcacaccataaccatccattaactccgactctcagatcatttacagtatattaactagaaycgctctggcacttcyatacaccggtgtcaacctaaattgctaatacacactgaacagctctcctaaacatagaaataatttacattttaaaaacaaatcaaaaccacaaacaggtggaaacactccaccatgccgtatgagatcgttgttcctccagctgttggtca

SEQ ID NO: 49247 - DNA, 600 bp, Chicken  19866894295089_3
tataggcaccacatgtttgggcaccaaacatcagtaaatgcagaggtaatggaagaatttgctaacagtttcagttgaaaatgtgaattaaaaaacaaacaaacaaaccaaactacacacagctatgtcattaaaaataaagctgccactcaacaggaaataaaaayrtattcatcaaacatttcctccctacttctcattttcacttcaactcaaaatgagaaggataccagtgacaagcacaccataaccatccattaactccgactctcagatcatttacagtatattaactagaaycgctctggcacttcyatacaccggtgtcaacctaaattgctaatacacactgaacagctctcctaaacatagaaataatttacattttaaaaacaaatcaaaaccacaaacaggtggaaacactccaccatgccgtatgagatcgttgttcctccagctgttggtcaggatgagagtacatccactaaaataccagcttgggagtataaggaagcaaaaaccatgctaagttatctgagtccaaaaagagagatgctgcatgctttacacacacacacacacacacacacagagagagag

SEQ ID NO: 49248 - DNA, 600 bp, Chicken  19866894295089_4
tttgggcaccaaacatcagtaaatgcagaggtaatggaagaatttgctaacagtttcagttgaaaatgtgaattaaaaaacaaacaaacaaaccaaactacacacagctatgtcattaaaaataaagctgccactcaacaggaaataaaaayrtattcatcaaacatttcctccctacttctcattttcacttcaactcaaaatgagaaggataccagtgacaagcacaccataaccatccattaactccgactctcagatcatttacagtatattaactagaaycgctctggcacttcyatacaccggtgtcaacctaaattgctaatacacactgaacagctctcctaaacatagaaataatttacattttaaaaacaaatcaaaaccacaaacaggtggaaacactccaccatgccgtatgagatcgttgttcctccagctgttggtcaggatgagagtacatccactaaaataccagcttgggagtataaggaagcaaaaaccatgctaagttatctgagtccaaaaagagagatgctgcatgctttacacacacacacacacacacacacagagagagagagagagagagagaga

SEQ ID NO: 49249 - DNA, 600 bp, Chicken  19866894295099_1
atcagggtaggactggtgcagggaatgcccttagatttgagtatcgtcatcaattcagctctaagacatctgtaatggagccgagtttgatagactgccagagtgtgacaaactaagctccagcctcttaaaatcgccagcacaattaattgctacttttttatttatagtcttcagtcttttatcggatactgttaaattcccacttcactgagcaagtccattagtatttaaaggaacaaatagatcatttcaaattataaagcatttcttttattttctgctttcttttttttaatwgtgcaagtcctgattttacattctttatcttaaataacccaaaactggatgatggagttccaggtttctgagctgtttttcctaggtgaccgaagatgcaggttttgctgtgcttaacgtactggctgcctgattgtttgcatttctcataatttctgtgtttgatagaagcaaatgaatggtgacagcagccttctgtgcatttatttttacagggaggtttggaggtaggacccaaaygctgacrgagagccctggtgtcctcatccttggtccctggagtggagatgctggagatgt

SEQ ID NO: 49250 - DNA, 600 bp, Chicken  19866894295099_2
aaatagatcatttcaaattataaagcatttcttttattttctgctttcttttttttaatwgtgcaagtcctgattttacattctttatcttaaataacccaaaactggatgatggagttccaggtttctgagctgtttttcctaggtgaccgaagatgcaggttttgctgtgcttaacgtactggctgcctgattgtttgcatttctcataatttctgtgtttgatagaagcaaatgaatggtgacagcagccttctgtgcatttatttttacagggaggtttggaggtaggacccaaaygctgacrgagagccctggtgtcctcatccttggtccctggagtggagatgctggagatgtgggcccatctgtcatggacagccttgcagggtgctatcaggatgaagatcacagcactcagttggcttcctcaggtaacgctttcctaccactgtacatcagtcagtgtgtcagggttggtggtctctgcacatcttgtatgcacgttggctaattaggagtaattgagtttctccagttctattggctagaaggtgctaaggaagctgacacaattgttacaaacaatttcaactgcca

SEQ ID NO: 49251 - DNA, 600 bp, Chicken  19866894295099_3
tcatttcaaattataaagcatttcttttattttctgctttcttttttttaatwgtgcaagtcctgattttacattctttatcttaaataacccaaaactggatgatggagttccaggtttctgagctgtttttcctaggtgaccgaagatgcaggttttgctgtgcttaacgtactggctgcctgattgtttgcatttctcataatttctgtgtttgatagaagcaaatgaatggtgacagcagccttctgtgcatttatttttacagggaggtttggaggtaggacccaaaygctgacrgagagccctggtgtcctcatccttggtccctggagtggagatgctggagatgtgggcccatctgtcatggacagccttgcagggtgctatcaggatgaagatcacagcactcagttggcttcctcaggtaacgctttcctaccactgtacatcagtcagtgtgtcagggttggtggtctctgcacatcttgtatgcacgttggctaattaggagtaattgagtttctccagttctattggctagaaggtgctaaggaagctgacacaattgttacaaacaatttcaactgccaggctatt

SEQ ID NO: 49252 - DNA, 600 bp, Chicken  19866894295099_4
gagatgtgggcccatctgtcatggacagccttgcagggtgctatcaggatgaagatcacagcactcagttggcttcctcaggtaacgctttcctaccactgtacatcagtcagtgtgtcagggttggtggtctctgcacatcttgtatgcacgttggctaattaggagtaattgagtttctccagttctattggctagaaggtgctaaggaagctgacacaattgttacaaacaatttcaactgccaggctattaattttaattaggttggctttgtctagacatggagctgccttgtcrggtgatgggaacactgtgtggaarctcattaggccaacattctaattctctgccatccctttgcgaacaacctcctgcagatgctggaaaagaagcattcgaaggccagctctgtgacgttggccaagttcacacaagtactcatgttgcctaaataagacccatttaaatacagtagaaatctaaaattgtaccagataacccacagtaaggttgagaacaaagagcacttttgctgcacagtgctttaagatgcgtgtttttgagaaatgaaggcatggagattgcctgtctgatact

SEQ ID NO: 49253 - DNA, 600 bp, Chicken  19866894295099_5
acagccttgcagggtgctatcaggatgaagatcacagcactcagttggcttcctcaggtaacgctttcctaccactgtacatcagtcagtgtgtcagggttggtggtctctgcacatcttgtatgcacgttggctaattaggagtaattgagtttctccagttctattggctagaaggtgctaaggaagctgacacaattgttacaaacaatttcaactgccaggctattaattttaattaggttggctttgtctagacatggagctgccttgtcrggtgatgggaacactgtgtggaarctcattaggccaacattctaattctctgccatccctttgcgaacaacctcctgcagatgctggaaaagaagcattcgaaggccagctctgtgacgttggccaagttcacacaagtactcatgttgcctaaataagacccatttaaatacagtagaaatctaaaattgtaccagataacccacagtaaggttgagaacaaagagcacttttgctgcacagtgctttaagatgcgtgtttttgagaaatgaaggcatggagattgcctgtctgatactaaaaagccacttcagtgagctcag

SEQ ID NO: 49254 - DNA, 600 bp, Chicken  19866894295104_1
taccatacagagagaaagcaaataaaaaaataaacaacaagcagtcttcctacatcaccgaaaattatttttgctctgttactgcagaaacagccagaagagggactatagattaattagcatgctctgagctgacatcaccaacgatgttgctgaggatgcttataaacccaagcactggtctgggcatttcggctctgttattaacaaaagggaagggtaatcattcctgacaaataaaaagcagcgttggtgggagtagatagcagcctttgggaaggagctgcggaaaatggagcrttctgaagcgccatgcttggagcggctagtgcagcccatgcaatattgaagagccaaggggggctgtggggccccagctctctccatgtccttgtggtttgtggcacagtctggggctcactctctgctgctcagctcctgagctgagcatcacttatgctggctgtgaggccgtgtgctgcttgctctgtaccagggacaagcaggaggagatggcagcctttgctcccagccccatgtcagtgggatgctactccactgagactgttttgcagtagggcatcccaacctttcccacca

SEQ ID NO: 49255 - DNA, 600 bp, Chicken  19866894295107_1
ctcttacgagtgcctccaaccctcagagagagttgagctccgatagaagatgggggagaaacagatgaccccagaggaggaaagatcccacaaggctctgccagtccctgtccccactgccccgtggccccatatcaccccacacatgttttaattgaaccacacatggtgtttctccacagctatctgcatcgaccttcacagctgcatggtgatgagtaccacggagaagcctataaatatcaccgatgtgccacacgctggccctcttatgggctctactcttttccatttacttayatgcaagacattttacaggacaagacaattaagcctgacagctggctgacagagaattccacccagcaacggctcacagacactttgcattaagcacagtgacatgatgcagaagaccactacaagccactggtggcagattgcactcggccaattcgaaagctttcctccaacgtttcacctgatttccagtagcaccccactatcacccagcgcttccaccatcccagcataactgccagctcccagcggaggcagtgcatgccccaggggtgcccaaggtcaggttggatggggccc

SEQ ID NO: 49256 - DNA, 600 bp, Chicken  19866894295108_1
gcctgtttaacactgcatgcagaatttcagagctagaaaactgaaaaaaaaaaaagcaggctctcatgatatatagtaatagcagggagcatttctggtcatggacacagttctgtggtatcctataatttatggcactacagaacgaaatgaagactacttgatgctgttttccatattggtcctattcatccctcacttaaactgacgtggatccattgattttgttgaagattttcctgtactataccaacctgtgtttttctaggaaaaaagccatgacttgaaagtctgataccyttaacttttaaaagccacttctagtatttcattaacttttgattatatacatacatatataaaaaaagaatcatctgacttaaaaattgactctatatgtactcaaatttggaaattcatccccacaaccaggaattactgaacaactgaaagatcttctgaaaatcaattctgttatttgtatgtataaatgcaatgagaggggttctgatgtgcatgcttttttcctgtgttctttaaaataattgagatcatcaggaacaatcccctctgctcccaaagagttgatggcggtatctg

SEQ ID NO: 49257 - DNA, 600 bp, Chicken  19866894295109_1
tatgccatatatcttcataaaaacttccttttctggatcacacaggaaacctactgtaaaacccatttcagaatgtcaaggctctgacactattttctgaatcaaattttaaattgattctgttaacagcccttcattctgagaggattgctgcttgccctaaaggcctgcataagggcagaaagaggtgagaggtgtatatgtgccttttggctatccacatttgatgactagggcaactgcagcccgcaggggacaaatggcattcatagatggggaacgtagccccgtgttcctatyctgagtgctgctccagggaagtcatctgcagcaaatgactgtcatatgtccaaccctcttcttgcctttcttagtttagtgcaaagcagctaggttcaaatgttgatttgcatttgagaaaagagacgtattctaatcgcacagcaaagactttcattctgtgactatctagaagcctttgctgttggagctttagcctgttttcctaactgagctttcccgagagcttcaaaaacctctattcatttgccccccttcccttggttgttttgagccaactacgtaatactggccagattt

SEQ ID NO: 49258 - DNA, 600 bp, Chicken  19866894295118_1
tttatctaagcacaaaaacaaccaactgaatttaggacattttcaacataatattcagtaagaatggaaaataaaagtatactagctgttgcactgaccgtgccattaaaccaataagaaatcagtaagtaaggggacaagaacccagaatgataccttttcatcgcactctgaaaacttgtctaacatttctgttttttcttgtaggaggttttgaatcttctcagccaattgcttttcagtcactaggaagaaaaagaaagcttacaataactgtacttcgagtaatgggaaaaaaamcaaaaccagagctwtcacttcagggaacayttgcaagaaaggactacagcacagaccaggatagttgtccacttcctgccaatcagctcattctgcaggagtccgagcacttccagctttcatttaaaggtaggattgaaaacaaaacagtaaagcttattaaacagtgacgcaaagcatttcgctcttgcacctgcttggtgggagctgctcacaaacggcacagctgagcagagtgaggtgctggctatacacacaggaggtacttcaaaagaagtgatagtcaaaatgctggagaag

SEQ ID NO: 49259 - DNA, 600 bp, Chicken  19866894295118_2
aaaacaaccaactgaatttaggacattttcaacataatattcagtaagaatggaaaataaaagtatactagctgttgcactgaccgtgccattaaaccaataagaaatcagtaagtaaggggacaagaacccagaatgataccttttcatcgcactctgaaaacttgtctaacatttctgttttttcttgtaggaggttttgaatcttctcagccaattgcttttcagtcactaggaagaaaaagaaagcttacaataactgtacttcgagtaatgggaaaaaaamcaaaaccagagctwtcacttcagggaacayttgcaagaaaggactacagcacagaccaggatagttgtccacttcctgccaatcagctcattctgcaggagtccgagcacttccagctttcatttaaaggtaggattgaaaacaaaacagtaaagcttattaaacagtgacgcaaagcatttcgctcttgcacctgcttggtgggagctgctcacaaacggcacagctgagcagagtgaggtgctggctatacacacaggaggtacttcaaaagaagtgatagtcaaaatgctggagaagtctcagactgctgc

SEQ ID NO: 49260 - DNA, 600 bp, Chicken  19866894295118_3
tttaggacattttcaacataatattcagtaagaatggaaaataaaagtatactagctgttgcactgaccgtgccattaaaccaataagaaatcagtaagtaaggggacaagaacccagaatgataccttttcatcgcactctgaaaacttgtctaacatttctgttttttcttgtaggaggttttgaatcttctcagccaattgcttttcagtcactaggaagaaaaagaaagcttacaataactgtacttcgagtaatgggaaaaaaamcaaaaccagagctwtcacttcagggaacayttgcaagaaaggactacagcacagaccaggatagttgtccacttcctgccaatcagctcattctgcaggagtccgagcacttccagctttcatttaaaggtaggattgaaaacaaaacagtaaagcttattaaacagtgacgcaaagcatttcgctcttgcacctgcttggtgggagctgctcacaaacggcacagctgagcagagtgaggtgctggctatacacacaggaggtacttcaaaagaagtgatagtcaaaatgctggagaagtctcagactgctgctttgatactcaaggag

SEQ ID NO: 49261 - DNA, 599 bp, Chicken  19866894295132_1
  misc_feature (1)..(202): n is any nucleotide
nnnnnnnnnnnnnnnnnnnnnnnnnnnnnnnnnnnnnnnnnnnnnnnnnnnnnnnnnnnnnnnnnnnnnnnnnnnnnnnnnnnnnnnnnnnnnnnnnnnnnnnnnnnnnnnnnnnnnnnnnnnnnnnnnnnnnnnnnnnnnnnnnnnnnnnnnnnnnnnnnnnnnnnnnnnnnnnnnnnnnnnnnnnnnnnnnnnnnnnnnnacgctgacccgctacgtaatcccaatcctttgtttcccaacaaaaggaatcacagcgcctcatcgttggtgcgcgttcagaccgcgacttaaagcaawmtgaacgccatatgtacacgaaggccgttttcacggctacgagaacctctgaggttagcaggaaagagctccgagctcccccagcacagccacgtgcagcccgccacagctcacaaggcagccgccccgcgccatcatggcggcgcctcctcacctgagcagccccgggtacgcgcccgtcgctcggcaacaaccaaccgccagcgcccggttaacgccgtgcccgctggcagcgggagggcagggccgtgtggtgctgaccagcgactgttcgcatttcagtgcggtgctctgaacgg

SEQ ID NO: 49262 - DNA, 599 bp, Chicken  19866894295132_2
  misc_feature (1)..(201): n is any nucleotide
nnnnnnnnnnnnnnnnnnnnnnnnnnnnnnnnnnnnnnnnnnnnnnnnnnnnnnnnnnnnnnnnnnnnnnnnnnnnnnnnnnnnnnnnnnnnnnnnnnnnnnnnnnnnnnnnnnnnnnnnnnnnnnnnnnnnnnnnnnnnnnnnnnnnnnnnnnnnnnnnnnnnnnnnnnnnnnnnnnnnnnnnnnnnnnnnnnnnnnnnnacgctgacccgctacgtaatcccaatcctttgtttcccaacaaaaggaatcacagcgcctcatcgttggtgcgcgttcagaccgcgacttaaagcaawmtgaacgccatatgtacacgaaggccgttttcacggctacgagaacctctgaggttagcaggaaagagctccgagctcccccagcacagccacgtgcagcccgccacagctcacaaggcagccgccccgcgccatcatggcggcgcctcctcacctgagcagccccgggtacgcgcccgtcgctcggcaacaaccaaccgccagcgcccggttaacgccgtgcccgctggcagcgggagggcagggccgtgtggtgctgaccagcgactgttcgcatttcagtgcggtgctctgaacggc

SEQ ID NO: 49263 - DNA, 600 bp, Chicken  19866894295134_1
taatctgaaccgtgaatggcatttcatttggcagaactagatattttgggtgggacgcgaaactggagaagtgggatggcagaagtgggtgtgttagtacaaagttggtagaggtctgggagctcttcagcaggaggtggtggctgggcagcaagatctgcaggcatggcagtgagaaacccaccaatggacactgaaaaaaggcacctccaggcagaggaggtgcagaggctgctgcagaacgggtgatgggacctgtgggcatggcctcatggcggcaggctcatggggattgggaasggcccccgaggagactgagagcacaggaagtcagccttagggggagtcctgggtctgcacrgtgcagagagcggaggaggtattcctcaaagaagtgactaccacgaagcaaacagaacaatctcaattaaagggcagtagtagcacaggacaataccaaccttaacatattccaggtggtaaagaatagatggcctccaaccaggagaggagcaagttactggaagagatccctgggaggagcagtgggaatgggagtgtgggtgcttgagatgcagcatggaggggaggccctgccgg

SEQ ID NO: 49264 - DNA, 600 bp, Chicken  19866894295134_2
actggagaagtgggatggcagaagtgggtgtgttagtacaaagttggtagaggtctgggagctcttcagcaggaggtggtggctgggcagcaagatctgcaggcatggcagtgagaaacccaccaatggacactgaaaaaaggcacctccaggcagaggaggtgcagaggctgctgcagaacgggtgatgggacctgtgggcatggcctcatggcggcaggctcatggggattgggaasggcccccgaggagactgagagcacaggaagtcagccttagggggagtcctgggtctgcacrgtgcagagagcggaggaggtattcctcaaagaagtgactaccacgaagcaaacagaacaatctcaattaaagggcagtagtagcacaggacaataccaaccttaacatattccaggtggtaaagaatagatggcctccaaccaggagaggagcaagttactggaagagatccctgggaggagcagtgggaatgggagtgtgggtgcttgagatgcagcatggaggggaggccctgccggcactgcctggagcacagtgggtacatgagccctccaggagcacctgcttgagcagcttctg

SEQ ID NO: 49265 - DNA, 600 bp, Chicken  19866894295134_3
cacgaagcaaacagaacaatctcaattaaagggcagtagtagcacaggacaataccaaccttaacatattccaggtggtaaagaatagatggcctccaaccaggagaggagcaagttactggaagagatccctgggaggagcagtgggaatgggagtgtgggtgcttgagatgcagcatggaggggaggccctgccggcactgcctggagcacagtgggtacatgagccctccaggagcacctgcttgagcagcttctgttttggcagctcccagctgtcagaaccaccactctttcagrgcacttggggagtgtgacagcaggtcttccgcagcatcagttgttttatttccgtgaataaggtgattcatgtaggcctaattatgtactagcaacagtagtagaaaaccttgagtactgtgttcagtttggggtgcctcgctacaagaaggacaacaaggacctggaatgtatcccgagaaggtcagcaaagctgtaaggggtttggagcacaagtcttatgaggagcaactgagggaactgggattgttcagaagaggaggctcagggaagaccttactgtactctacaactgccaaa

SEQ ID NO: 49266 - DNA, 599 bp, Chicken  19866894295135_1
  misc_feature (1)..(62): n is any nucleotide
nnnnnnnnnnnnnnnnnnnnnnnnnnnnnnnnnnnnnnnnnnnnnnnnnnnnnnnnnnnnnnatagacgagtttcatacgcttctgtgagtgtgtgttcggtattttctaattacaaggatggttcatatgtgtctttagagaatctgcaaagattgtagagcgtagcaacaaaaagaggttttcatccgtatttgttcgcaatgataagatgggatgttcataggttttgtttatcatcttgttttctggctgtgatttaaagttataggcagccagatgctgacacctattggttcaygaaaagtgagattgttttgcatgactttcattctagaaggcagtacgttttcgtctttcttaaaaataaatctaaatctaactcctaaataaccttatttttctaacatagactgtccacattataaaacctatgccaaaatttcaagggcaaaaatgtagaaatgttgaagtctatgaaagttgactttggggtgaagatttttcatgtagagaataggtgatctccagaggtcctttcctgcccctacggttgtgtgttgttctgtgattctgtaataagaaagcagtgtgggtgac

SEQ ID NO: 49267 - DNA, 600 bp, Chicken  19866894295135_2
gattgttttgcatgactttcattctagaaggcagtacgttttcgtctttcttaaaaataaatctaaatctaactcctaaataaccttatttttctaacatagactgtccacattataaaacctatgccaaaatttcaagggcaaaaatgtagaaatgttgaagtctatgaaagttgactttggggtgaagatttttcatgtagagaataggtgatctccagaggtcctttcctgcccctacggttgtgtgttgttctgtgattctgtaataagaaagcagtgtgggtgactggggccctrtttaacctgctatgtgtccctgttttatttggcagtgtaagtttatcccagagagctgcaaaacaattgggactgggaatggctgtcttgaaattcctttgaatacctcagaaaatagtagttctcatcacctgaaaccacaaacctcctcctagtaactgcagatacttacaaggggatgacaaaatcattagtaatgccagtctgatagtgttcaggcactccartctaaattggccaccgtttagattctagagtggcatactcagatatgactgaaatagttcatgttcaagatgg

SEQ ID NO: 49268 - DNA, 600 bp, Chicken  19866894295135_3
tttcctgcccctacggttgtgtgttgttctgtgattctgtaataagaaagcagtgtgggtgactggggccctrtttaacctgctatgtgtccctgttttatttggcagtgtaagtttatcccagagagctgcaaaacaattgggactgggaatggctgtcttgaaattcctttgaatacctcagaaaatagtagttctcatcacctgaaaccacaaacctcctcctagtaactgcagatacttacaaggggatgacaaaatcattagtaatgccagtctgatagtgttcaggcactccartctaaattggccaccgtttagattctagagtggcatactcagatatgactgaaatagttcatgttcaagatggaatgcaatgcaaagaacatgttggtcatttactgtgaagttttggttatattttgaaggtaacagtagcttgactgactggtaagtgtacctctcttatacttctttgtaggatggaatccatagagaaaatggaatctgattttaaaaactgccacatgtttcttgtaactgtcctcaacaaagctgtctgccgaggctcatttcctcactgtaagtacacgatgc

SEQ ID NO: 49269 - DNA, 599 bp, Chicken  19866894295138_1
  misc_feature (1)..(137): n is any nucleotide
nnnnnnnnnnnnnnnnnnnnnnnnnnnnnnnnnnnnnnnnnnnnnnnnnnnnnnnnnnnnnnnnnnnnnnnnnnnnnnnnnnnnnnnnnnnnnnnnnnnnnnnnnnnnnnnnnnnnnnnnnnnnnnnnnnnnnnnnncctaaaaataaagcctaaagcaaagaaggcattaagtacctcaaccttttacataatctgtataattctagcagtggacccatattttcccatcttccttttgctgctctaatatacctaaataagctgtccttgttgaccttaaccaggaagcctggttccktgccagacaggctttggcttacctaaccctgtcccttcatgctctaacaggaactacattcctgctargacacctgcctgtgcatccactgtttggatgyttactttttacttttgtgtttggtcctgcaagcctcctgtcgcttttcctcgacttcctgctcattgatatgagccactcttgaaactggagatatcaaaatgcattaacaagttcacagactgctagacactcctagagtctgaaaaccactcmgtttcycgtctagacataaaatactgatgtattttattaagcag

SEQ ID NO: 49270 - DNA, 600 bp, Chicken  19866894295138_10
gataggaaaggggtgatctttctggatttcctggaacccagacaaatcatcaactctgactactacatagtgaagtgactaagctgaaggctcgaactttgagcgtcaggccagagaaggtgacaaggacaacaccaggtcccaggcttggagcagagtggctggaaaactgtgtggaggaaatggatctgggggtattggtcaaygcttagctgaacatgagcaagtagttgtgcatccttcatgtcaatgtcagtcctagtcaacaaagtcaagaaatatgacctgattttttttttwaattatttttatgttaaccacaaatctagcaacagacagacaaagacagtgaaacctcaagaaaatgacagaagagtagcatttctctcaacataaatacaatttgtacattattgtactaaaatactaatttgtacattactcttagattactgcatcttttaaatacaacagatattagcaatatcaaagaatttctttattaattttactttttatctaaacgtaatacttttgacattttaattcatgcaattcatttctgcgaaattctacccagagattcaccatcaataaaca

SEQ ID NO: 49271 - DNA, 599 bp, Chicken  19866894295138_2
  misc_feature (1)..(69): n is any nucleotide
nnnnnnnnnnnnnnnnnnnnnnnnnnnnnnnnnnnnnnnnnnnnnnnnnnnnnnnnnnnnnnnnnnnnncctaaaaataaagcctaaagcaaagaaggcattaagtacctcaaccttttacataatctgtataattctagcagtggacccatattttcccatcttccttttgctgctctaatatacctaaataagctgtccttgttgaccttaaccaggaagcctggttccktgccagacaggctttggcttacctaaccctgtcccttcatgctctaacaggaactacattcctgctargacacctgcctgtgcatccactgtttggatgyttactttttacttttgtgtttggtcctgcaagcctcctgtcgcttttcctcgacttcctgctcattgatatgagccactcttgaaactggagatatcaaaatgcattaacaagttcacagactgctagacactcctagagtctgaaaaccactcmgtttcycgtctagacataaaatactgatgtattttattaagcagtatcatatcctcattaagtgatttacagaagtgtaaaaaaaaaaatgcactaacattctatctgagca

SEQ ID NO: 49272 - DNA, 599 bp, Chicken  19866894295138_3
  misc_feature (1)..(37): n is any nucleotide
nnnnnnnnnnnnnnnnnnnnnnnnnnnnnnnnnnnnncctaaaaataaagcctaaagcaaagaaggcattaagtacctcaaccttttacataatctgtataattctagcagtggacccatattttcccatcttccttttgctgctctaatatacctaaataagctgtccttgttgaccttaaccaggaagcctggttccktgccagacaggctttggcttacctaaccctgtcccttcatgctctaacaggaactacattcctgctargacacctgcctgtgcatccactgtttggatgyttactttttacttttgtgtttggtcctgcaagcctcctgtcgcttttcctcgacttcctgctcattgatatgagccactcttgaaactggagatatcaaaatgcattaacaagttcacagactgctagacactcctagagtctgaaaaccactcmgtttcycgtctagacataaaatactgatgtattttattaagcagtatcatatcctcattaagtgatttacagaagtgtaaaaaaaaaaatgcactaacattctatctgagcagttttccctgtgagttcattttgctggttact

SEQ ID NO: 49273 - DNA, 600 bp, Chicken  19866894295138_4
taaataagctgtccttgttgaccttaaccaggaagcctggttccktgccagacaggctttggcttacctaaccctgtcccttcatgctctaacaggaactacattcctgctargacacctgcctgtgcatccactgtttggatgyttactttttacttttgtgtttggtcctgcaagcctcctgtcgcttttcctcgacttcctgctcattgatatgagccactcttgaaactggagatatcaaaatgcattaacaagttcacagactgctagacactcctagagtctgaaaaccactcmgtttcycgtctagacataaaatactgatgtattttattaagcagtatcatatcctcattaagtgatttacagaagtgtaaaaaaaaaaatgcactaacattctatctgagcagttttccctgtgagttcattttgctggttactgtaacaggtcagtaatcatgcgcataatgtccttaaaaatatcacactttctgaagcacattaagaaaagactatgttttgcaggaaagattaaaattgtaaaatcttaagaattgtgctgtatcaggaaaaacactaacttactacaattacagt

SEQ ID NO: 49274 - DNA, 600 bp, Chicken  19866894295138_5
agctgtccttgttgaccttaaccaggaagcctggttccktgccagacaggctttggcttacctaaccctgtcccttcatgctctaacaggaactacattcctgctargacacctgcctgtgcatccactgtttggatgyttactttttacttttgtgtttggtcctgcaagcctcctgtcgcttttcctcgacttcctgctcattgatatgagccactcttgaaactggagatatcaaaatgcattaacaagttcacagactgctagacactcctagagtctgaaaaccactcmgtttcycgtctagacataaaatactgatgtattttattaagcagtatcatatcctcattaagtgatttacagaagtgtaaaaaaaaaaatgcactaacattctatctgagcagttttccctgtgagttcattttgctggttactgtaacaggtcagtaatcatgcgcataatgtccttaaaaatatcacactttctgaagcacattaagaaaagactatgttttgcaggaaagattaaaattgtaaaatcttaagaattgtgctgtatcaggaaaaacactaacttactacaattacagtcatttt

SEQ ID NO: 49275 - DNA, 600 bp, Chicken  19866894295138_6
gtctttgaaatgtttgactagattaggaactctcttctccccattctcagcccccagcacacaccaaggttaccaaacgcatataacattaaagatgcctattttaagagatgtagaagtgaaaacaacttggaaaataagatagactgcctcaaatgtactaaaatgtactaaaacaagatcaaagaaatggaagaaatcttgtgcttagcactatcttgttgacacaaaggtttatggctgacacagtctaaagtatttttttaaatggcaaatacgttctaaaatctgaacaaaccmaaaccatgaagactcgagaaaccggcttaaaatattgctgaattattcgtaaggcaaccacttaccaccaaggacttgatatatttatgagggctgctccaaaaataatacctcctattttattattttggctcacaatgtcagaggcagatgttggtggtgtggcagtagaggttgaaccttcctgccaatattccatcatgttttgttgccatgtgacagatggtatcagaggggcagtctaacaaaatggcacttatcatggaagtaaaggtgcaccactgaattcctccatgtgga

SEQ ID NO: 49276 - DNA, 600 bp, Chicken  19866894295138_7
tcgtaaggcaaccacttaccaccaaggacttgatatatttatgagggctgctccaaaaataatacctcctattttattattttggctcacaatgtcagaggcagatgttggtggtgtggcagtagaggttgaaccttcctgccaatattccatcatgttttgttgccatgtgacagatggtatcagaggggcagtctaacaaaatggcacttatcatggaagtaaaggtgcaccactgaattcctccatgtggaaaaattgcacccactgacattcatcaatgttcgcttaacatttatrgagaccaaacagtggatgggattgacgatgggtggtgtgcttcagcagtgacgtcagcaatgtgaaagatgagccacattccggacaaccatgtgtagctgtcacatcactaaatgaagactctcaatcagctcacccatgtaaatcagtgtatgaggacaagggaactgtgtacagagctgaatattggcttcagtgtatcagaaacagtggtgacaacattacaatattgcaaaatttctgtcaagtgagtcccacaaatgctcacacaggaatagaaagaacactgtatgcaagttt

SEQ ID NO: 49277 - DNA, 600 bp, Chicken  19866894295138_8
agtgtatgaggacaagggaactgtgtacagagctgaatattggcttcagtgtatcagaaacagtggtgacaacattacaatattgcaaaatttctgtcaagtgagtcccacaaatgctcacacaggaatagaaagaacactgtatgcaagtttgtcaggacctattgaaccagtgtaaggctgaaggtgaccatttcctggattgcatcatttctggtaatgagacatggcatcagaggcaaagcagcaattcactgagtggtgatgtgaattcttcaaagaaaaggttccagatacagmtctcagcaggtaatgtcatgtgccctgccttttgggataggaaaggggtgatctttctggatttcctggaacccagacaaatcatcaactctgactactacatagtgaagtgactaagctgaaggctcgaactttgagcgtcaggccagagaaggtgacaaggacaacaccaggtcccaggcttggagcagagtggctggaaaactgtgtggaggaaatggatctgggggtattggtcaaygcttagctgaacatgagcaagtagttgtgcatccttcatgtcaatgtcagtcctagtca

SEQ ID NO: 49278 - DNA, 600 bp, Chicken  19866894295138_9
aagcagcaattcactgagtggtgatgtgaattcttcaaagaaaaggttccagatacagmtctcagcaggtaatgtcatgtgccctgccttttgggataggaaaggggtgatctttctggatttcctggaacccagacaaatcatcaactctgactactacatagtgaagtgactaagctgaaggctcgaactttgagcgtcaggccagagaaggtgacaaggacaacaccaggtcccaggcttggagcagagtggctggaaaactgtgtggaggaaatggatctgggggtattggtcaaygcttagctgaacatgagcaagtagttgtgcatccttcatgtcaatgtcagtcctagtcaacaaagtcaagaaatatgacctgattttttttttwaattatttttatgttaaccacaaatctagcaacagacagacaaagacagtgaaacctcaagaaaatgacagaagagtagcatttctctcaacataaatacaatttgtacattattgtactaaaatactaatttgtacattactcttagattactgcatcttttaaatacaacagatattagcaatatcaaagaatttctttattaa

SEQ ID NO: 49279 - DNA, 600 bp, Chicken  19866894295144_1
tattagacctaagtgaactgtaaaataggaaaacctcagatctgcttggtaaggcagaatgaaattaaaccagttggtgaaccagttttccttctctcgctatgtccttgcaggggcaagttcttttctatgggcttcctgtcagtctggcagagctaccctactgcacagtccattcagccttctggtgcctcagacaaggcttttctctccattccaagggaggttggcaggcatatacttcctcctgcaggggcctacagcctgctgctgctctggctttggaagtttcgctgagcrtcttcttattgctgcagtgcaccctcctgctccctttcagcctcagtaaaacccatcctgccactccctctagtcttcatcgctctctggccacatttatatgactagcagtgagtcagggtgggggaacaattttttttctctccagtgagttagcctgatcttgtgactggttgctaaaatggctcctagggtggcaaagtatctcccacagtgtgctaagcaccttccctcctaggccagtttgtacttttgtattgcctgatgtattttttcttgcttttgtgcttcttgcggtgt

SEQ ID NO: 49280 - DNA, 600 bp, Chicken  19866894295145_1
gcaccctgctaggaatggggttttctctctttgctggagtacaccattgatttatgggaaaataaaaagaaagaaaagcaattaaatcaggcaaactgagacctggctatgggataatgctccaggaaagaaattttatttttgccatcagactataagcaatcagcttagaagatgttttcttgtatatttactctcttatgacaaaaaataaaatttcattgcaagcatgcaaatagctgctcaagaaatgttcagaaaaaaacttttctctaaaaattatgaggtatggcttcagarattcaatagcactgacctgagctttctcatttattttggaagttctacagagctgaataagcagtaaagtgaaagatttataaagaaatatttgcaaataccttaagagggaagggaaaagagattgtaaagcattcgttaatactctgtaaataatataatttttaggtgaatattctgtctctgtcatatataattttgcaaggtgtttggaatagtccgtatgcaaatatgctttaaacaacccatcctaaatctctttttagagccacagagttggcgccagtgtgccaggggtgg

SEQ ID NO: 49281 - DNA, 599 bp, Chicken  19866894295148_1
  misc_feature (1)..(80): n is any nucleotide
nnnnnnnnnnnnnnnnnnnnnnnnnnnnnnnnnnnnnnnnnnnnnnnnnnnnnnnnnnnnnnnnnnnnnnnnnnnnnnnncttaataattattttagctgacctctgaaactaagattatgtaagaagtgtttgtctgaatgaaaaaaactcacaacttactttgatgagatgtgaaggacagtcatctgggatatttcttgggtttttttttttttttctgtaaatgaacctaaattcaattagcatatgaatgtctgcaaagggttgccatctcatttcatactcttcttcctgtctyctaagttttgcaaggaacaggaccaggggaaagaagggaaaatcatttgttgacatggatttaaagatagtaccaaattctcaagatgcctaacttctgagttcttagtttagcagtacctcatgatttgaataaaataaatttttatacatgcagtatcaaaatgcccttcagtgaaggagatgatagaccttaaattactagcagctccttttgtgtagtcattacggtacaaagtttaaaatgtcacacacagtcaagccctgtattgtcagtgaagttttcagcatcatttggat

SEQ ID NO: 49282 - DNA, 599 bp, Chicken  19866894295152_1
  misc_feature (1)..(78): n is any nucleotide
nnnnnnnnnnnnnnnnnnnnnnnnnnnnnnnnnnnnnnnnnnnnnnnnnnnnnnnnnnnnnnnnnnnnnnnnnnnnnnaaaaaagggtggtgtacttagcctcctgatttccagtcccatgccaccagcgtagctgtgttcaaatgtgagccctggagttcctgctgtccctttggagcaggggtcagggacaacagcagtggtttttccatctcttctactgcatcgtgcaacccagtctggggtgtcttaagtcttgagctgggccaagaaacagaattcctatctaagacagaataygctaagaggagctctcttactgtcccagagagcccattggcctgtgtccatttaataacatttctctcttagagctacgttaggaagatcaagtcacgagtctactaacatacctgaaatttctccacccctgctttttgacatgacttaacgttttgtgtgtggcatttcttagatttccatgttctgtggtgtaagcaacacaaattcagccacctcagcagtagtgagattggtgctgtatggtaagcagtgtgaaaggtgtggagccagaggctcctcattcttttgatgttttc

SEQ ID NO: 49283 - DNA, 600 bp, Chicken  19866894295152_2
ttgccagctggtgcttggagccggtgcgttacaggttgtgggattgaaaacaatcactacaaaaaatctaggtatgtctttctgtacttaaggcatcaactgttgtactcctgtctattaaaaagaaaagcaaatccactaaatgcttaaagatgagctatgtttgtgttgtggtactttgtgtggaacacagggtgataaaaccttgcttatttgagggtaaaacatgtacaaaagctaactgcctgtgcaagaggtgcatggaaacccacccagtccctttgctgtctaccagaatgstttgactacaaagctcyactgtgttaggtgaggggaaacaaacaggctggcaggtttgccatggaaatgttttgactgtgggaagtcgcagttactcttccattggtgactttggcatctgtgtgcgctgcgtagtgcttgggactggagatgggtggtgtaggcagagggctcagccacacaccagcctccccctgtgttttgctgagctgtgtcatcccgtctgccctgtggtgctgttttggaacagtgcgtccacagacagctcctgtggcttgtaaccacacgtctgtaaagcac

SEQ ID NO: 49284 - DNA, 600 bp, Chicken  19866894295152_3
gagccggtgcgttacaggttgtgggattgaaaacaatcactacaaaaaatctaggtatgtctttctgtacttaaggcatcaactgttgtactcctgtctattaaaaagaaaagcaaatccactaaatgcttaaagatgagctatgtttgtgttgtggtactttgtgtggaacacagggtgataaaaccttgcttatttgagggtaaaacatgtacaaaagctaactgcctgtgcaagaggtgcatggaaacccacccagtccctttgctgtctaccagaatgstttgactacaaagctcyactgtgttaggtgaggggaaacaaacaggctggcaggtttgccatggaaatgttttgactgtgggaagtcgcagttactcttccattggtgactttggcatctgtgtgcgctgcgtagtgcttgggactggagatgggtggtgtaggcagagggctcagccacacaccagcctccccctgtgttttgctgagctgtgtcatcccgtctgccctgtggtgctgttttggaacagtgcgtccacagacagctcctgtggcttgtaaccacacgtctgtaaagcacaactatttctgtgggtg

SEQ ID NO: 49285 - DNA, 600 bp, Chicken  19866894295152_4
gtgttaggtgaggggaaacaaacaggctggcaggtttgccatggaaatgttttgactgtgggaagtcgcagttactcttccattggtgactttggcatctgtgtgcgctgcgtagtgcttgggactggagatgggtggtgtaggcagagggctcagccacacaccagcctccccctgtgttttgctgagctgtgtcatcccgtctgccctgtggtgctgttttggaacagtgcgtccacagacagctcctgtggcttgtaaccacacgtctgtaaagcacaactatttctgtgggtggcygtgaaccaaaaagtaagtctttgtgtggttgagtgtctcggtgcagccaggtaaattcgggctctgtgtgctgaatccaaactcagatttgagctttagattgtgcagctattcagctgacttgacagcccaaagttgcctgcctgggctgctccagctgctgcagaagcgagggagagctaaatgcacagctccatgctgcaggaaagcctgatgattgtactcaaggaacccctcctccaaattttaaactatttcctgaaatgaagagcctttgcaattggggttgaggcaaatgcc

SEQ ID NO: 49286 - DNA, 599 bp, Chicken  19866894295153_1
  misc_feature (1)..(80): n is any nucleotide
nnnnnnnnnnnnnnnnnnnnnnnnnnnnnnnnnnnnnnnnnnnnnnnnnnnnnnnnnnnnnnnnnnnnnnnnnnnnnnnngaattcgctctcttcacagtgaatattctgtataccatctgtaatggggagggggtcaattgggatcatatttaaattcagcctaccaattattaaatcacaaaatagtattattcttttccaaaaaagcgaacaacaacaaaaaccctcatacctgagaaggatagttgtctacaaaagtgatagcaaattgcaaattaaccttatacttttttttccycctcaacaggttcacagtcagaatgtgaccttacataaaatggaaacctgtgaagaaagtcacagatagcagctgtgggtagtactggaagaatatttatcttcttaagcatcagctttttaaaacgctatggtgatttggaaagtcccaagagtgaactgtgaagttttcttcagctcgttcaatggatttcttaggcatttctacaaatcattgatgtcyagagatgatgtgtgatggaaaaagcaccctgcctgtgygtttatagcccctgttttttggattagtttgctgcattg

SEQ ID NO: 49287 - DNA, 600 bp, Chicken  19866894295153_2
aaaccctcatacctgagaaggatagttgtctacaaaagtgatagcaaattgcaaattaaccttatacttttttttccycctcaacaggttcacagtcagaatgtgaccttacataaaatggaaacctgtgaagaaagtcacagatagcagctgtgggtagtactggaagaatatttatcttcttaagcatcagctttttaaaacgctatggtgatttggaaagtcccaagagtgaactgtgaagttttcttcagctcgttcaatggatttcttaggcatttctacaaatcattgatgtcyagagatgatgtgtgatggaaaaagcaccctgcctgtgygtttatagcccctgttttttggattagtttgctgcattgctgaaccaattttgttttgagggcaaggagtgaatgtgatggatttatcttcagagatgaacaaacatggaaggaatccagtaagtcacaarctagaagatcaaaaaaaggtaaggttattttaacgtgtacttaattctattttaatggattgcaaactcttttaatattaaaactgaaaatcagcgtgcttccatggaaaagrtaatttgccatcattcaa

SEQ ID NO: 49288 - DNA, 600 bp, Chicken  19866894295153_3
tgatagcaaattgcaaattaaccttatacttttttttccycctcaacaggttcacagtcagaatgtgaccttacataaaatggaaacctgtgaagaaagtcacagatagcagctgtgggtagtactggaagaatatttatcttcttaagcatcagctttttaaaacgctatggtgatttggaaagtcccaagagtgaactgtgaagttttcttcagctcgttcaatggatttcttaggcatttctacaaatcattgatgtcyagagatgatgtgtgatggaaaaagcaccctgcctgtgygtttatagcccctgttttttggattagtttgctgcattgctgaaccaattttgttttgagggcaaggagtgaatgtgatggatttatcttcagagatgaacaaacatggaaggaatccagtaagtcacaarctagaagatcaaaaaaaggtaaggttattttaacgtgtacttaattctattttaatggattgcaaactcttttaatattaaaactgaaaatcagcgtgcttccatggaaaagrtaatttgccatcattcaaccagcagtgaactgctgtgagggactgagtttcttcat

SEQ ID NO: 49289 - DNA, 600 bp, Chicken  19866894295153_4
aatatttatcttcttaagcatcagctttttaaaacgctatggtgatttggaaagtcccaagagtgaactgtgaagttttcttcagctcgttcaatggatttcttaggcatttctacaaatcattgatgtcyagagatgatgtgtgatggaaaaagcaccctgcctgtgygtttatagcccctgttttttggattagtttgctgcattgctgaaccaattttgttttgagggcaaggagtgaatgtgatggatttatcttcagagatgaacaaacatggaaggaatccagtaagtcacaarctagaagatcaaaaaaaggtaaggttattttaacgtgtacttaattctattttaatggattgcaaactcttttaatattaaaactgaaaatcagcgtgcttccatggaaaagrtaatttgccatcattcaaccagcagtgaactgctgtgagggactgagtttcttcattgtctagtaattttgtttctaatactgcctgattgcctgctaatttgtgttaacagctccctgaatttgactggaaaattgtttggcgaaagtgttacttcgttgctgtctatcagtgtttccttcatgtc

SEQ ID NO: 49290 - DNA, 600 bp, Chicken  19866894295153_5
tacaaatcattgatgtcyagagatgatgtgtgatggaaaaagcaccctgcctgtgygtttatagcccctgttttttggattagtttgctgcattgctgaaccaattttgttttgagggcaaggagtgaatgtgatggatttatcttcagagatgaacaaacatggaaggaatccagtaagtcacaarctagaagatcaaaaaaaggtaaggttattttaacgtgtacttaattctattttaatggattgcaaactcttttaatattaaaactgaaaatcagcgtgcttccatggaaaagrtaatttgccatcattcaaccagcagtgaactgctgtgagggactgagtttcttcattgtctagtaattttgtttctaatactgcctgattgcctgctaatttgtgttaacagctccctgaatttgactggaaaattgtttggcgaaagtgttacttcgttgctgtctatcagtgtttccttcatgtcatagacctgctgaagcaggctgaggtctgagaggtctttktacttaacacgtatgggtagactcttctaattgcatcctaccaatagttccatataattgggytttgtgataa

SEQ ID NO: 49291 - DNA, 600 bp, Chicken  19866894295153_6
ttaattctattttaatggattgcaaactcttttaatattaaaactgaaaatcagcgtgcttccatggaaaagrtaatttgccatcattcaaccagcagtgaactgctgtgagggactgagtttcttcattgtctagtaattttgtttctaatactgcctgattgcctgctaatttgtgttaacagctccctgaatttgactggaaaattgtttggcgaaagtgttacttcgttgctgtctatcagtgtttccttcatgtcatagacctgctgaagcaggctgaggtctgagaggtctttktacttaacacgtatgggtagactcttctaattgcatcctaccaatagttccatataattgggytttgtgataattgttgctgttcaagtttcatcctttggtaaccaaggcaattaacacatataaattcacatttcctcactatgggaaattctttcgtacatcccacttctataacaaactgttccaaaagattcaccttcctggctcatctgttttactcagactatggtctggaggtttttttttttctactgattatttcatacacttcaatttgatgctttttaacatcttcag

SEQ ID NO: 49292 - DNA, 600 bp, Chicken  19866894295153_7
atggaaaagrtaatttgccatcattcaaccagcagtgaactgctgtgagggactgagtttcttcattgtctagtaattttgtttctaatactgcctgattgcctgctaatttgtgttaacagctccctgaatttgactggaaaattgtttggcgaaagtgttacttcgttgctgtctatcagtgtttccttcatgtcatagacctgctgaagcaggctgaggtctgagaggtctttktacttaacacgtatgggtagactcttctaattgcatcctaccaatagttccatataattgggytttgtgataattgttgctgttcaagtttcatcctttggtaaccaaggcaattaacacatataaattcacatttcctcactatgggaaattctttcgtacatcccacttctataacaaactgttccaaaagattcaccttcctggctcatctgttttactcagactatggtctggaggtttttttttttctactgattatttcatacacttcaatttgatgctttttaacatcttcaggttttacttctgctttcgcatgcacccaatggcaaccagcagagggttcattctggtgtagca

SEQ ID NO: 49293 - DNA, 600 bp, Chicken  19866894295157_1
tttgtgagaggcgagggaagtgcaggtatgggaacagctaagggattgtacctctacaaggtgtatttattactggatagagaaataatagagccaaaataagttaaacactggaacgagcaaaacagatgtgtaagtactaaaattagaattaacgtttggaacatcagatgctattacattctcaaggctttgtcttgaggagcagcctcgtccttgtatagcattcacagccaagggattagtttcaaacactgcaaccacatgagaggtaaaaagatatgtatgcatctactgatkatgggtgattgttagtaacactgccctagttgttaatgaaatactgcctgctactgaacaaattgtttagtgtgcaacccctgaactccagagartattttcttcctttagatttgtgagctatttttccaaaacacagcactgtaagtcctgcattgtcttttctaacatacagcgtattamgagatgagctctcatccctcccggtgtgtacaygtgtgtgtccatctacagaattctgtttgtatgtaaatgcctgaaaaatttggaactaagaacagtgacatgtaaaaccctgat

SEQ ID NO: 49294 - DNA, 600 bp, Chicken  19866894295157_2
aaaataagttaaacactggaacgagcaaaacagatgtgtaagtactaaaattagaattaacgtttggaacatcagatgctattacattctcaaggctttgtcttgaggagcagcctcgtccttgtatagcattcacagccaagggattagtttcaaacactgcaaccacatgagaggtaaaaagatatgtatgcatctactgatkatgggtgattgttagtaacactgccctagttgttaatgaaatactgcctgctactgaacaaattgtttagtgtgcaacccctgaactccagagartattttcttcctttagatttgtgagctatttttccaaaacacagcactgtaagtcctgcattgtcttttctaacatacagcgtattamgagatgagctctcatccctcccggtgtgtacaygtgtgtgtccatctacagaattctgtttgtatgtaaatgcctgaaaaatttggaactaagaacagtgacatgtaaaaccctgatgaaaaagtagctgcttctgaaaaatgggttttgatgaattttgtatgatctctttaaagattctctaatgcatatttcaaaagatgtttcaatac

SEQ ID NO: 49295 - DNA, 600 bp, Chicken  19866894295157_3
ctcaaggctttgtcttgaggagcagcctcgtccttgtatagcattcacagccaagggattagtttcaaacactgcaaccacatgagaggtaaaaagatatgtatgcatctactgatkatgggtgattgttagtaacactgccctagttgttaatgaaatactgcctgctactgaacaaattgtttagtgtgcaacccctgaactccagagartattttcttcctttagatttgtgagctatttttccaaaacacagcactgtaagtcctgcattgtcttttctaacatacagcgtattamgagatgagctctcatccctcccggtgtgtacaygtgtgtgtccatctacagaattctgtttgtatgtaaatgcctgaaaaatttggaactaagaacagtgacatgtaaaaccctgatgaaaaagtagctgcttctgaaaaatgggttttgatgaattttgtatgatctctttaaagattctctaatgcatatttcaaaagatgtttcaatactgtaagttttagatcagctcataactgataatttagacttttccaggactattctcttgtggtatctagcttccaaaccaaaattcaa

SEQ ID NO: 49296 - DNA, 600 bp, Chicken  19866894295157_4
ttgtatagcattcacagccaagggattagtttcaaacactgcaaccacatgagaggtaaaaagatatgtatgcatctactgatkatgggtgattgttagtaacactgccctagttgttaatgaaatactgcctgctactgaacaaattgtttagtgtgcaacccctgaactccagagartattttcttcctttagatttgtgagctatttttccaaaacacagcactgtaagtcctgcattgtcttttctaacatacagcgtattamgagatgagctctcatccctcccggtgtgtacaygtgtgtgtccatctacagaattctgtttgtatgtaaatgcctgaaaaatttggaactaagaacagtgacatgtaaaaccctgatgaaaaagtagctgcttctgaaaaatgggttttgatgaattttgtatgatctctttaaagattctctaatgcatatttcaaaagatgtttcaatactgtaagttttagatcagctcataactgataatttagacttttccaggactattctcttgtggtatctagcttccaaaccaaaattcaaatgtatagtcgttctgaatgaaatcacaggcag

SEQ ID NO: 49297 - DNA, 599 bp, Chicken  19866894295158_1
  misc_feature (1)..(135): n is any nucleotide
nnnnnnnnnnnnnnnnnnnnnnnnnnnnnnnnnnnnnnnnnnnnnnnnnnnnnnnnnnnnnnnnnnnnnnnnnnnnnnnnnnnnnnnnnnnnnnnnnnnnnnnnnnnnnnnnnnnnnnnnnnnnnnnnnnnnnnnctaatggaagatctcaaaccacttccttcatacttcatttctgaaccatcaaaactcagcttctaaagcagaaactgttcaaattgtaggatgaaggttcatttttgtgcctaactgctttctatcattgtcactgtaggcaattctcttttgttgccctatcarcygagataatcttgaaagtccaacaaagtsacaaratttcccaaagctattcctccttgtatacacataatagcttctcacctttcagcataacaaattaagaagaaagaacaactacaaacaacgstgaaatgttgcaattatcctcttaagagcaagtacctccattccaacttcaacacgttcagccctatccccctagagcagatacaggatatatgctgragcaataaaaccttgtcaaggggtttatagatgccagtatcaagaagttgataacacctcgtgaaatattaaat

SEQ ID NO: 49298 - DNA, 599 bp, Chicken  19866894295158_2
  misc_feature (1)..(133): n is any nucleotide
nnnnnnnnnnnnnnnnnnnnnnnnnnnnnnnnnnnnnnnnnnnnnnnnnnnnnnnnnnnnnnnnnnnnnnnnnnnnnnnnnnnnnnnnnnnnnnnnnnnnnnnnnnnnnnnnnnnnnnnnnnnnnnnnnnnnnctaatggaagatctcaaaccacttccttcatacttcatttctgaaccatcaaaactcagcttctaaagcagaaactgttcaaattgtaggatgaaggttcatttttgtgcctaactgctttctatcattgtcactgtaggcaattctcttttgttgccctatcarcygagataatcttgaaagtccaacaaagtsacaaratttcccaaagctattcctccttgtatacacataatagcttctcacctttcagcataacaaattaagaagaaagaacaactacaaacaacgstgaaatgttgcaattatcctcttaagagcaagtacctccattccaacttcaacacgttcagccctatccccctagagcagatacaggatatatgctgragcaataaaaccttgtcaaggggtttatagatgccagtatcaagaagttgataacacctcgtgaaatattaaataa

SEQ ID NO: 49299 - DNA, 599 bp, Chicken  19866894295158_3
  misc_feature (1)..(105): n is any nucleotide
nnnnnnnnnnnnnnnnnnnnnnnnnnnnnnnnnnnnnnnnnnnnnnnnnnnnnnnnnnnnnnnnnnnnnnnnnnnnnnnnnnnnnnnnnnnnnnnnnnnnnnnnnctaatggaagatctcaaaccacttccttcatacttcatttctgaaccatcaaaactcagcttctaaagcagaaactgttcaaattgtaggatgaaggttcatttttgtgcctaactgctttctatcattgtcactgtaggcaattctcttttgttgccctatcarcygagataatcttgaaagtccaacaaagtsacaaratttcccaaagctattcctccttgtatacacataatagcttctcacctttcagcataacaaattaagaagaaagaacaactacaaacaacgstgaaatgttgcaattatcctcttaagagcaagtacctccattccaacttcaacacgttcagccctatccccctagagcagatacaggatatatgctgragcaataaaaccttgtcaaggggtttatagatgccagtatcaagaagttgataacacctcgtgaaatattaaataaatattaaatgatgttataatatatcyac

SEQ ID NO: 49300 - DNA, 599 bp, Chicken  19866894295158_4
  misc_feature (1)..(100): n is any nucleotide
nnnnnnnnnnnnnnnnnnnnnnnnnnnnnnnnnnnnnnnnnnnnnnnnnnnnnnnnnnnnnnnnnnnnnnnnnnnnnnnnnnnnnnnnnnnnnnnnnnnnctaatggaagatctcaaaccacttccttcatacttcatttctgaaccatcaaaactcagcttctaaagcagaaactgttcaaattgtaggatgaaggttcatttttgtgcctaactgctttctatcattgtcactgtaggcaattctcttttgttgccctatcarcygagataatcttgaaagtccaacaaagtsacaaratttcccaaagctattcctccttgtatacacataatagcttctcacctttcagcataacaaattaagaagaaagaacaactacaaacaacgstgaaatgttgcaattatcctcttaagagcaagtacctccattccaacttcaacacgttcagccctatccccctagagcagatacaggatatatgctgragcaataaaaccttgtcaaggggtttatagatgccagtatcaagaagttgataacacctcgtgaaatattaaataaatattaaatgatgttataatatatcyacaagtt

SEQ ID NO: 49301 - DNA, 599 bp, Chicken  19866894295158_5
  misc_feature (1)..(8): n is any nucleotide
nnnnnnnnctaatggaagatctcaaaccacttccttcatacttcatttctgaaccatcaaaactcagcttctaaagcagaaactgttcaaattgtaggatgaaggttcatttttgtgcctaactgctttctatcattgtcactgtaggcaattctcttttgttgccctatcarcygagataatcttgaaagtccaacaaagtsacaaratttcccaaagctattcctccttgtatacacataatagcttctcacctttcagcataacaaattaagaagaaagaacaactacaaacaacgstgaaatgttgcaattatcctcttaagagcaagtacctccattccaacttcaacacgttcagccctatccccctagagcagatacaggatatatgctgragcaataaaaccttgtcaaggggtttatagatgccagtatcaagaagttgataacacctcgtgaaatattaaataaatattaaatgatgttataatatatcyacaagttatcttgaataatactaatatttttgtgaccatcaacctacattgggtgtgacctacatacagacgttctagaaaaatctactgtggaatgac

SEQ ID NO: 49302 - DNA, 600 bp, Chicken  19866894295158_6
atgaaggttcatttttgtgcctaactgctttctatcattgtcactgtaggcaattctcttttgttgccctatcarcygagataatcttgaaagtccaacaaagtsacaaratttcccaaagctattcctccttgtatacacataatagcttctcacctttcagcataacaaattaagaagaaagaacaactacaaacaacgstgaaatgttgcaattatcctcttaagagcaagtacctccattccaacttcaacacgttcagccctatccccctagagcagatacaggatatatgctgragcaataaaaccttgtcaaggggtttatagatgccagtatcaagaagttgataacacctcgtgaaatattaaataaatattaaatgatgttataatatatcyacaagttatcttgaataatactaatatttttgtgaccatcaacctacattgggtgtgacctacatacagacgttctagaaaaatctactgtggaatgacagatacatcatatttcattatgtttaaccacaatgcaattggctttctgcaaatattcacaggatttccaggatataaaatgcaaaaatactgcctgat

SEQ ID NO: 49303 - DNA, 600 bp, Chicken  19866894295158_7
gtsacaaratttcccaaagctattcctccttgtatacacataatagcttctcacctttcagcataacaaattaagaagaaagaacaactacaaacaacgstgaaatgttgcaattatcctcttaagagcaagtacctccattccaacttcaacacgttcagccctatccccctagagcagatacaggatatatgctgragcaataaaaccttgtcaaggggtttatagatgccagtatcaagaagttgataacacctcgtgaaatattaaataaatattaaatgatgttataatatatcyacaagttatcttgaataatactaatatttttgtgaccatcaacctacattgggtgtgacctacatacagacgttctagaaaaatctactgtggaatgacagatacatcatatttcattatgtttaaccacaatgcaattggctttctgcaaatattcacaggatttccaggatataaaatgcaaaaatactgcctgatgtgacaatctcctttcctatcgtcactgtctagtggtcatttgtgtgggaattaagattaattaatcaggagtaaaacaagtatgtagcaactaacaaaaat

SEQ ID NO: 49304 - DNA, 600 bp, Chicken  19866894295162_1
agcagatacccaacctcctctgccgtcctgcacttccctccctaagtcactgcgcctagagctcattattgatgaaaaacacattgtgaatataatcatttaatgttattggctatagcgcataacagtatctggatgagattataaaataaaaggcaaattgcctttttaaagtctattataatttaagggacttaaaagttaatttacatacattaatacaagttaatttacgtctgtcccacttttgccctaagaatttaggtataatacttcttccaatatgaaacctttgttctytactgcagctgtgtgtgaaaatctatagaaagtaggaagaactctctgaatgtactcaaacagatatcttcaccaraatagttgggaaaaatacaaggaatctgatggtcttctctcagtattgcttattttaaatgctactcacaacacttggaggtaaaaaagcattcttacaaacaatgagtttggaaggtgatgatgttcctttgcaaacacaagcagccaacaactagccacgtatatttttcttcctctgcgccacaactatgttcataaggaatatgccttttaatcagagct

SEQ ID NO: 49305 - DNA, 600 bp, Chicken  19866894295162_2
aaacacattgtgaatataatcatttaatgttattggctatagcgcataacagtatctggatgagattataaaataaaaggcaaattgcctttttaaagtctattataatttaagggacttaaaagttaatttacatacattaatacaagttaatttacgtctgtcccacttttgccctaagaatttaggtataatacttcttccaatatgaaacctttgttctytactgcagctgtgtgtgaaaatctatagaaagtaggaagaactctctgaatgtactcaaacagatatcttcaccaraatagttgggaaaaatacaaggaatctgatggtcttctctcagtattgcttattttaaatgctactcacaacacttggaggtaaaaaagcattcttacaaacaatgagtttggaaggtgatgatgttcctttgcaaacacaagcagccaacaactagccacgtatatttttcttcctctgcgccacaactatgttcataaggaatatgccttttaatcagagctagaactcaaaaattggaggctgcaggtctgcatcccaaaaaccagctgcaaagcagataaaagctgcctttctgct

SEQ ID NO: 49306 - DNA, 600 bp, Chicken  19866894295170_1
cctccattcagaaaagtacatttttagaaatgttatatgtgctaactgtgaaggggttactgaactccgttttctatgaacccttaaaacccagaccttaagatgtgcacatgcaccaagtgcccactggagccaattagtctgcataaaacaaaaaagcaggtccccgctgacggtgagcatattgcagccttcagagagtcatgtaaaacaagctcccctgctccccatctgctggaagctttcagctgcctttagtctgagtctacaaaagccatttatccattgtggctctagagrctgcttattgctgcatttccctacagcacctgtggcacctgacttttggtgcctttgctataccacagccactttgctgtatgaaaatcatgcaaggaaagcttgcctgttcactcaaaggcccgtaayggaaagatccaagtgagtggccttgcaggaggacccagctttgctggagtttcttcctatctacatgcagagtcagatagccctgccaagaattaattagagatgttctgagcaagggaaaataaagagtgctttgtagcacactaagctgtgccaactcatgtggaggca

SEQ ID NO: 49307 - DNA, 600 bp, Chicken  19866894295170_2
gagccaattagtctgcataaaacaaaaaagcaggtccccgctgacggtgagcatattgcagccttcagagagtcatgtaaaacaagctcccctgctccccatctgctggaagctttcagctgcctttagtctgagtctacaaaagccatttatccattgtggctctagagrctgcttattgctgcatttccctacagcacctgtggcacctgacttttggtgcctttgctataccacagccactttgctgtatgaaaatcatgcaaggaaagcttgcctgttcactcaaaggcccgtaayggaaagatccaagtgagtggccttgcaggaggacccagctttgctggagtttcttcctatctacatgcagagtcagatagccctgccaagaattaattagagatgttctgagcaagggaaaataaagagtgctttgtagcacactaagctgtgccaactcatgtggaggcatgtgaaaagaaaaatattatgaaagcaatacctattctgtcttcaaaaagctttaatcctcctgtttaacatttcttatgcctgcaggatgggtccctgcatcacccctgtacagccagaagctctgcc

SEQ ID NO: 49308 - DNA, 600 bp, Chicken  19866894295171_1
ggcgtgagaaggccaaaaaggacctggaggagtggaacctgcgtcagaatgagcagatggagaagaaccgagcgaacaacaggtatgttgggatcagcatggcctctagggctgaggctggcagggctcagcgggagcagctgttgcagccagatgtgcctttttgtagtaaccagggagctctgtctccacagtggacccagccttatagagacagggctttgccagaccacgccccagtactgcaggcagctctggtggccgttcagagctgccctggtcccaactgaaggctgggcraacacagcaggatttgaggggctcctgtcccatgcgtgggcctcactttgaggcagggttgggaagctatgcagccctgttgttgctggcaggtttttctgatgctgtgygtggcatgatgaatgggtcatgctctgtgggaggatgctaaccccctctctgtttctctctttctaaccctctgcctgcctgtctgctctgcgttctctctctgtctgtgcctcggggctaggatcgctgacaaagccttttaccagcagccggacgccgatgtgattggctatgtgtatgtgtgtctta

SEQ ID NO: 49309 - DNA, 565 bp, Chicken  19866894295171_2
gctgaggctggcagggctcagcgggagcagctgttgcagccagatgtgcctttttgtagtaaccagggagctctgtctccacagtggacccagccttatagagacagggctttgccagaccacgccccagtactgcaggcagctctggtggccgttcagagctgccctggtcccaactgaaggctgggcraacacagcaggatttgaggggctcctgtcccatgcgtgggcctcactttgaggcagggttgggaagctatgcagccctgttgttgctggcaggtttttctgatgctgtgygtggcatgatgaatgggtcatgctctgtgggaggatgctaaccccctctctgtttctctctttctaaccctctgcctgcctgtctgctctgcgttctctctctgtctgtgcctcggggctaggatcgctgacaaagccttttaccagcagccggacgccgatgtgattggctatgtgtatgtgtgtcttacagaccatattctgccctgcacagtctggggttccttgccccagcactttggctgcccagtcaagggaagggggg

SEQ ID NO: 49310 - DNA, 600 bp, Chicken  19866894295172_1
gttatcccaggaaatggccgttaagcagtggtgaggagggacaaagggcatgttcacctggtgtgtgagatacttggaacagcccggggagagggggttccagatgggaaccaatgtaccaaagcctttctgggaaaaggaggagctgaggagcagcgggggagggaagcgctggcttaggagaagaggcagagaagaggacagctgatactctcctgatgtatcatggtcaaattgctgaattctacactaagtcagaggtgaaaaaggagcgagcaaagcacagcaaggaatgaggamttcctgctccaaatccagctcgttcgcctactcagttttctaatgacaaggctgccaagtatttagtgaatcatatttcccttcactttccacttgactctacagcttcccccatgcatttcactgctagaggtgagtggcactgccaggaaaagagacggtgacagaaggatgctgctttgtgattcttacacagttggggttcaagggctttggttttgttttttgggggtttttttttttgactcttgatatttcagacataaaataaatacgtaacattttgatgctggagggcag

SEQ ID NO: 49311 - DNA, 600 bp, Chicken  19866894295174_1
gtcactgaatgaacaatacttttcggcaagtagtagagcaccataatcatgaggaaggaacagtttgaaagcaggagaggagtatgcatggcttttaggttggcacttcaaagtcctcaggtttcttgagatatccccatgttcgggtaacatggatataaaacgttgcataaatgctccttccctccactctctttctgcattttagccttcaagttgctgtaatctggagaagtttttctttctttcctgtctcctgatacagggaatcctgtatagctcagctcaggcaaataaccstctggcacactcctgtgatgggaccatacaaaggtgggctgtggagaactggggcaactcttctatgtgctgccatgcaaaataaagtgcccaacagaacagttttttgatgatgcaatctcaagattaatttgtacaaacagttagcagaggacacactgaaatgaataatttgcatttgcatatgaaaagagtgagtcagaatgactttgcacctgttgcctattatgcatgtcatatatatttgatattttattttaatacttcatgtttctgttttagtgattattttcatttttt

SEQ ID NO: 49312 - DNA, 600 bp, Chicken  19866894295174_2
atacaaaggtgggctgtggagaactggggcaactcttctatgtgctgccatgcaaaataaagtgcccaacagaacagttttttgatgatgcaatctcaagattaatttgtacaaacagttagcagaggacacactgaaatgaataatttgcatttgcatatgaaaagagtgagtcagaatgactttgcacctgttgcctattatgcatgtcatatatatttgatattttattttaatacttcatgtttctgttttagtgattattttcattttttgagctggtgtgaaaacatatcacaraaaatgctgatactttttatttatgtaagatgcttaaattatacttctgaagttttccccagcattttatttatcttgcagtcataattattcggtgcctcctccgtctgctttgatttaattatggctttatagacaacagtcacagagatgagtctcttcaggttgatcagttgcacagaatgccttccatgctctgtaaagagtttgcttgacacctggcaattaaatgaaatagactttttgtcttgcctgttcctcagggctgggggaatatcaggcatgcagtgatgcagcttg

SEQ ID NO: 49313 - DNA, 600 bp, Chicken  19866894295175_1
cttctctatttttctttaacatcttcccacgtcttctcaggttggtttcttcatcctacttttgcctggaacatgttttatccactcccttgtttcgttctctcctgtacctgttcatgcataatgtgactaaaataaataagctttaagtcaagtttcttccacttggtgtattccatctgattggctctgcaccttgttattcatctgcatgtttttctcgtgcacttgaactacaaaagggttttggtacagagactcctcctttcttcctagttggaatcttggcttctggcttcmtgcccgtggtaaccagctgcttgtatcttaatgtggtgggaggtgtgctcatcaggtgaggtaatccttatggcaaaattccattccttcctccgtgtcktctttcttcagagcttttcccagttcagctgtgccccagtgcaacaggctacgactcaccatattaggctggccttgtcctwtgagtgcctggtggtgattgtccctgtgcaaaagcctttccctttttgttctgtgtcttcctagagctaatcagcagagcccctgactgctttacatttcaggctggcactgctctga

SEQ ID NO: 49314 - DNA, 600 bp, Chicken  19866894295175_2
tctcctgtacctgttcatgcataatgtgactaaaataaataagctttaagtcaagtttcttccacttggtgtattccatctgattggctctgcaccttgttattcatctgcatgtttttctcgtgcacttgaactacaaaagggttttggtacagagactcctcctttcttcctagttggaatcttggcttctggcttcmtgcccgtggtaaccagctgcttgtatcttaatgtggtgggaggtgtgctcatcaggtgaggtaatccttatggcaaaattccattccttcctccgtgtcktctttcttcagagcttttcccagttcagctgtgccccagtgcaacaggctacgactcaccatattaggctggccttgtcctwtgagtgcctggtggtgattgtccctgtgcaaaagcctttccctttttgttctgtgtcttcctagagctaatcagcagagcccctgactgctttacatttcaggctggcactgctctgagaatgctctgtcactccggctagtgacagctggaggaaggaaatgttcctgtgccgcacagtcatgtgcctgagcttcttaaagctgttacaaaataggt

SEQ ID NO: 49315 - DNA, 600 bp, Chicken  19866894295175_3
attggctctgcaccttgttattcatctgcatgtttttctcgtgcacttgaactacaaaagggttttggtacagagactcctcctttcttcctagttggaatcttggcttctggcttcmtgcccgtggtaaccagctgcttgtatcttaatgtggtgggaggtgtgctcatcaggtgaggtaatccttatggcaaaattccattccttcctccgtgtcktctttcttcagagcttttcccagttcagctgtgccccagtgcaacaggctacgactcaccatattaggctggccttgtcctwtgagtgcctggtggtgattgtccctgtgcaaaagcctttccctttttgttctgtgtcttcctagagctaatcagcagagcccctgactgctttacatttcaggctggcactgctctgagaatgctctgtcactccggctagtgacagctggaggaaggaaatgttcctgtgccgcacagtcatgtgcctgagcttcttaaagctgttacaaaataggtcggccttcccaagcttcttttcatgtactgttttcatttacttgatcttgtgtcactaagctgtagttgagtctttgctttc

SEQ ID NO: 49316 - DNA, 600 bp, Chicken  19866894295180_1
acaaagaagttgttaggatatgtagggagaaaattagaaaggcaaaagcccagcttgaattgaatctagcctctgtagtaaaagagaacaaaaacttttttgcaaatatattaccagtaaaagaagagctaaggagaatctccatcctttactgtttgtggtggtgaatgtgaccactgacaataaggaaaaggctgaggtgttcaatgccttctttacacctgtctttaatagtcagaccagttatactcaggaactctaccccctgacttggaagtctcagatggggcagaattcaartggaaaaagttagagacctgctactccacctagactgtcagaagtccatggggccagatggcatccacccaagggcgctgagagagcaggcagaggtgattgccagtgttcctggtcatccagagaggtcccagaggactggaggcttgccagtgtgactctcatctacaagaaatgttgcaaagaggatctggggagctatamgcctgtcaacctgaccttggtgccagggaaggttatagagcagataagcatgtgcaggacagccaggggatcaggtccaaccagcatgggttcatg

SEQ ID NO: 49317 - DNA, 600 bp, Chicken  19866894295180_2
caatgccttctttacacctgtctttaatagtcagaccagttatactcaggaactctaccccctgacttggaagtctcagatggggcagaattcaartggaaaaagttagagacctgctactccacctagactgtcagaagtccatggggccagatggcatccacccaagggcgctgagagagcaggcagaggtgattgccagtgttcctggtcatccagagaggtcccagaggactggaggcttgccagtgtgactctcatctacaagaaatgttgcaaagaggatctggggagctatamgcctgtcaacctgaccttggtgccagggaaggttatagagcagataagcatgtgcaggacagccaggggatcaggtccaaccagcatgggttcatgaaaggcgggttctacttaactaacctgatctcattctgtgattgagtgacccacctggtggatgagggaaaggttgttgacgtggtatacctaggcttcagcaaagtctttgactctgtctaccccagtattctcctggagaagctggcagcctgtggcttggacaggtacattctgctggataaagaactggctcaagggcca

SEQ ID NO: 49318 - DNA, 600 bp, Chicken  19866894295184_1
acagctcttgtccttcctctcccattggcaaattctctgggaaggccacagaggaagtaaagtcattaccaccctcctgagtgcaatttttaaggcttaaaccatgctacattgtatacaagcactggatgagtgtccccaccagtgctctcaagattttacatagatagacacagccccagagaacagagtcgccttcttagaaaaaagcttcaatagattctaagtaacatgatcagaagcatgattagcaagattgtatgcaatcactgaaaaagctgcattaaaaagggagaaaascccatttttttcttctttaacaaacagtagcaagttggcacagtgccaaaatttccattaaaaatcataatgcagttccagtagatctgttatgtccatcactatcattccacaagttgggaacaaattactggcacagcttgagggtattctgtcacacaacaggatggttaggytctccccccatccctccagccacacaaagtcattggagaagtgagaaagagatcaggtgagataatttaatagggattttaaaggaattagagataatacaatataaaaggtatcaattggaga

SEQ ID NO: 49319 - DNA, 600 bp, Chicken  19866894295184_2
ccccagagaacagagtcgccttcttagaaaaaagcttcaatagattctaagtaacatgatcagaagcatgattagcaagattgtatgcaatcactgaaaaagctgcattaaaaagggagaaaascccatttttttcttctttaacaaacagtagcaagttggcacagtgccaaaatttccattaaaaatcataatgcagttccagtagatctgttatgtccatcactatcattccacaagttgggaacaaattactggcacagcttgagggtattctgtcacacaacaggatggttaggytctccccccatccctccagccacacaaagtcattggagaagtgagaaagagatcaggtgagataatttaatagggattttaaaggaattagagataatacaatataaaaggtatcaattggagagagagatgccttctaacctgcaacttaaaatacagaacaccctttagcaaggggcttggactacagaatctgcagagattacttacaatcccctccaattctgtgattgtgtgattgatatcatatcattgtttcacctcttgcagagtagtgcaggcacagcaccaaggctctct

SEQ ID NO: 49320 - DNA, 600 bp, Chicken  19866894295186_1
aggctttcagcttatactgaaaattctgctgtcaccaattcctttctttcctgttcacttttttcctttataaacttaaaagaaccctgcaactgcatccccttgaaacgtcttggggcaatgggaactgtgatggcccagtcaggtttggggtggaaaaaaaaaacagaaaaaaaatatatcagtaagaaaaaaaaagtcatcacaagaccttgagtaattattattgcaacacgagtggcactgttataagagatggctggctgatgtttcctttttcctttggcgacataagaaagytctacaaaagtagcaggctgtgttygcaggacctgcagcacctcatgtcagccagcasatgagctctcaggtaatgctgcacacatacttctcgctttaacaggcacataagcaacaatttgtggaacaaaggctcacatccagcacagaaaagaattcgggtatgttttgcatgtgtatgtttccttgctgtctcactgacaaagaataggtttgtactcaggatttcccaggctgccaaattatccaaatctcatcaaaaatctctctcttgacctccaggactcccagtgacagcca

SEQ ID NO: 49321 - DNA, 600 bp, Chicken  19866894295186_2
ctgctgtcaccaattcctttctttcctgttcacttttttcctttataaacttaaaagaaccctgcaactgcatccccttgaaacgtcttggggcaatgggaactgtgatggcccagtcaggtttggggtggaaaaaaaaaacagaaaaaaaatatatcagtaagaaaaaaaaagtcatcacaagaccttgagtaattattattgcaacacgagtggcactgttataagagatggctggctgatgtttcctttttcctttggcgacataagaaagytctacaaaagtagcaggctgtgttygcaggacctgcagcacctcatgtcagccagcasatgagctctcaggtaatgctgcacacatacttctcgctttaacaggcacataagcaacaatttgtggaacaaaggctcacatccagcacagaaaagaattcgggtatgttttgcatgtgtatgtttccttgctgtctcactgacaaagaataggtttgtactcaggatttcccaggctgccaaattatccaaatctcatcaaaaatctctctcttgacctccaggactcccagtgacagccaaggatgtttgctgtcaaatctgcac

SEQ ID NO: 49322 - DNA, 600 bp, Chicken  19866894295186_3
ttttttcctttataaacttaaaagaaccctgcaactgcatccccttgaaacgtcttggggcaatgggaactgtgatggcccagtcaggtttggggtggaaaaaaaaaacagaaaaaaaatatatcagtaagaaaaaaaaagtcatcacaagaccttgagtaattattattgcaacacgagtggcactgttataagagatggctggctgatgtttcctttttcctttggcgacataagaaagytctacaaaagtagcaggctgtgttygcaggacctgcagcacctcatgtcagccagcasatgagctctcaggtaatgctgcacacatacttctcgctttaacaggcacataagcaacaatttgtggaacaaaggctcacatccagcacagaaaagaattcgggtatgttttgcatgtgtatgtttccttgctgtctcactgacaaagaataggtttgtactcaggatttcccaggctgccaaattatccaaatctcatcaaaaatctctctcttgacctccaggactcccagtgacagccaaggatgtttgctgtcaaatctgcacccaaacggtactcctgcatgcccgtaaggatcc

SEQ ID NO: 49323 - DNA, 599 bp, Chicken  19866894295188_1
  misc_feature (1)..(200): n is any nucleotide
nnnnnnnnnnnnnnnnnnnnnnnnnnnnnnnnnnnnnnnnnnnnnnnnnnnnnnnnnnnnnnnnnnnnnnnnnnnnnnnnnnnnnnnnnnnnnnnnnnnnnnnnnnnnnnnnnnnnnnnnnnnnnnnnnnnnnnnnnnnnnnnnnnnnnnnnnnnnnnnnnnnnnnnnnnnnnnnnnnnnnnnnnnnnnnnnnnnnnnnntatctttaatatcagccttctcatggtgagtaagatcaatttgtttgaattggttcatttgctttattggaaactttaaattcatcaccttttccagaarctccaaagcaggattatactgggcttttgttcttcaaccaccagggaggctatcccttactgattcgatacaacagagttattttttgttattatttattttaagactagcccatagcaatgacatgtgaaaggagctgctgtgttattcaacttcttaataaaaatgtagctccctcttctgctgacccagataattagtggctgatattctaaggaaaaaaatttacacgtgagtcctcaaaacagcagctgatgtcttttcattttctcttgttgcacaaatttgggaacatctac

SEQ ID NO: 49324 - DNA, 600 bp, Chicken  19866894295191_1
agagagttgcctttgcagatatctaggctttgcagattggcacatatttctctgactcatacagaaagaagcacatccagaatgaaaaataggcaataacaaatcatgtgtctagaatatattcctactgggtttcaagtcagttttgtgtaggatagtatgaagacctttctaaataatctgtattattcactaagctgagtgtatggcacaattgaagtttatgtggttcactctttaatttctacatggggcaaaatcagctggtataagagatatgactattgtattcagagaagrgatacaaatgaaatgtgggccaagtggtataatgagttgctgagcagacaatatctattatatttagagtcactgaggatatgctaatagcatcacttctgtatttccctgagagcaaatgataaaattatagattttatttctgaacttagaagaaaagacccctaggaacaaaaacaccccctcacagccttttacaaatgtagagcaattttaattttgaaaatccatatgtgtaaattgatattttaatgattattgagagattttatccttatattgccaagtattaacattgca

SEQ ID NO: 49325 - DNA, 600 bp, Chicken  19866894295194_1
ggcatgagaatctcttttctgatgatgcagagaccaagatctgataactgagatgttgctaagcagctggcatgctcccttgatttcagaagtcttttccaagtgcattagtattacaaatcattacctgcagatcttaaagactcgtttctcagtcataggcctgctaatgtgagctttcaggctcaatttgtgttttgttttatataggccactttccataaagacctgcatttcacatttcactcattgttttcccatttcattatttccagtgcagtttagggtagaaaaagggarctctgtttctgcttttatggaagcaartatttatttttaacatgatgccattcattcctcatttgacgactttttagtgtgtaaaattttgttagagatacagattattaatctgaatgttaggaatattaaatagcatttattaacattgtcattgctggaactgaaggtgttgaactataatgctgttagtatgatgaaggctggatagctctgtgcatgccacatcatgcccactgcacatgcataggttgatatggatggtggtatgctggaactgcacccatgttaccagtcaca

SEQ ID NO: 49326 - DNA, 600 bp, Chicken  19866894295194_2
cagagaccaagatctgataactgagatgttgctaagcagctggcatgctcccttgatttcagaagtcttttccaagtgcattagtattacaaatcattacctgcagatcttaaagactcgtttctcagtcataggcctgctaatgtgagctttcaggctcaatttgtgttttgttttatataggccactttccataaagacctgcatttcacatttcactcattgttttcccatttcattatttccagtgcagtttagggtagaaaaagggarctctgtttctgcttttatggaagcaartatttatttttaacatgatgccattcattcctcatttgacgactttttagtgtgtaaaattttgttagagatacagattattaatctgaatgttaggaatattaaatagcatttattaacattgtcattgctggaactgaaggtgttgaactataatgctgttagtatgatgaaggctggatagctctgtgcatgccacatcatgcccactgcacatgcataggttgatatggatggtggtatgctggaactgcacccatgttaccagtcacaccccttcagttttgtatttggatgccc

SEQ ID NO: 49327 - DNA, 600 bp, Chicken  19866894295198_1
agagagcatcctttgggccctctcttccaggtgctgaggagcacagaggagctgtggatccaacgaccctctcactgcatggatgggctgggacaaattcttgtttgttttctccttttttcactcagtggggaacatatttaaggacacaatgagcttgtctttaggctcgtttttaatgctgcccgtgtatgtgttgtttgcgcctcgatccaggcattaattatgcagaaataattgtctcatctgcagagttattgagcgtgtgattaaaaggcggccggctgagagtgtgcgtcrctggcctgccctgctgcttgtccaggttacagaggtgttggtggcaaccctacagcaaatgcagtgtgggggttggcccttccagctggcttgagctgccatccagcatccagcccaggtatttccatggcacccttctgtgccagctgggtgatgatgtgggttatacagcattgaatacaaacattgcagctcctctgctttggaaagaacacgtcttgcagaggtgctgagggggtttagccttcttgctaccactcattgttaggtactgcatgtaattcctgctgcagacacaaa

SEQ ID NO: 49328 - DNA, 599 bp, Chicken  19866894295207_1
  misc_feature (1)..(214): n is any nucleotide
nnnnnnnnnnnnnnnnnnnnnnnnnnnnnnnnnnnnnnnnnnnnnnnnnnnnnnnnnnnnnnnnnnnnnnnnnnnnnnnnnnnnnnnnnnnnnnnnnnnnnnnnnnnnnnnnnnnnnnnnnnnnnnnnnnnnnnnnnnnnnnnnnnnnnnnnnnnnnnnnnnnnnnnnnnnnnnnnnnnnnnnnnnnnnnnnnnnnnnnnnnnnnnnnnnnnnnctatcaggtttattcaatcacaaaagtattttcctgtctaaggacaacctgtttgaggctttttcttgggcaagaaatgtgacagmataaaaatatccactttaaccacgatttcctgaacagcatgttagtgaatctaaacttccaattagaactacttaaaaacgggcagcagttacagctagtgaatacatggaatgggattcacaaatacagttggaggacagagagrggatctatttagatgatgcagaaggagaatttccactgcagatatgtgctgctgtccggatttgatattttccagccaagaatgggctgtgccagattggcagcccacttgaaactgagcaggaaacagctcaaagggacacagaactccagt

SEQ ID NO: 49329 - DNA, 599 bp, Chicken  19866894295207_2
  misc_feature (1)..(68): n is any nucleotide
nnnnnnnnnnnnnnnnnnnnnnnnnnnnnnnnnnnnnnnnnnnnnnnnnnnnnnnnnnnnnnnnnnnnctatcaggtttattcaatcacaaaagtattttcctgtctaaggacaacctgtttgaggctttttcttgggcaagaaatgtgacagmataaaaatatccactttaaccacgatttcctgaacagcatgttagtgaatctaaacttccaattagaactacttaaaaacgggcagcagttacagctagtgaatacatggaatgggattcacaaatacagttggaggacagagagrggatctatttagatgatgcagaaggagaatttccactgcagatatgtgctgctgtccggatttgatattttccagccaagaatgggctgtgccagattggcagcccacttgaaactgagcaggaaacagctcaaagggacacagaactccagttctgcaaggacagctgtgccagaattgcaatcattagaaagaagtgtatgtgtatacaataaaaakaactaaagacacccaaatctgttatggatacaaacccagcaataagtgaaaactaaagggaaactgtcttaaaaccacaa

SEQ ID NO: 49330 - DNA, 600 bp, Chicken  19866894295207_3
gaactacttaaaaacgggcagcagttacagctagtgaatacatggaatgggattcacaaatacagttggaggacagagagrggatctatttagatgatgcagaaggagaatttccactgcagatatgtgctgctgtccggatttgatattttccagccaagaatgggctgtgccagattggcagcccacttgaaactgagcaggaaacagctcaaagggacacagaactccagttctgcaaggacagctgtgccagaattgcaatcattagaaagaagtgtatgtgtatacaataaaaakaactaaagacacccaaatctgttatggatacaaacccagcaataagtgaaaactaaagggaaactgtcttaaaaccacaaggtaaacatctcaactgggacacactacaaaacctttgtgaaagaggggccaaaccttttctttgctgtccagtaacgcagatatccgaggagtggacgaagatcgatagatggaagcagccttgtctctctgtgcctcacgagtggcagtgacttcactcagtgtgttgtggctgccagtcttccgcagacccaaccgccatgaggagggcgactcatc

SEQ ID NO: 49331 - DNA, 600 bp, Chicken  19866894295209_1
gcatatggtggcttgttgtgtcttttattttgctgcttctcaaagaaaaagaagctagttcatcgggagttgttttctttctttcaagcttgtaagttgtcacaaaattcctgttcttacattcccagtttctgtactgagcaaggtctttttggccagttccagtaaagaatgtagatgctatcctgctagctcaggcatgtaaatccatcacatcgacccttaaagtcctgctcagttttcagctatgttctgcaggcattacatttcacagcatttgcattttcaaaattgaagtcwgttacatgcttgaatgatctgcatttcaaggcatatttttttttttgcctctttcagtgccagagcctgacttgtcaggtgtattcactctgcaccgtatggataggtaccaggtaggctcatggtcacctcttgttcattctgctggggtgatgtgttttcatgctacaggacgctggtactcagaaaagatagagcatcctagctggcctataaataaatactatttaaatactattttgatatttccactattaaaaaaaaaaaaaaaaagaaaaccctcttgatgtctactatttg

SEQ ID NO: 49332 - DNA, 600 bp, Chicken  19866894295218_1
atatgcacgtgaaaccaccccgtgttacacagtgctggccataagaaaccttgccgagactattttaaaacacaggcgttcttcagctgagccttcagatttgcagcctgtaaacttttccttttttcagtgtgcaactgggagaaaaatagacacaattttatcacacagaaccaaggaatacgtgagcattgttgacctaaggatgaaagggtgagaaagaaggaagaaaagagaaggagagaaagaagaaaacaaaagcgaaaacaagcaaaaactaaccaacatttattccaaatmttcttgtttcactgtgactacacatctaatttccaaggtacagtaacaacgttagtaataactttggcttacacaccatatttcatcctgggttcctgcgtgctgtatgagcaccagaggtttagctacacaacattttcccaagtatgattatacatcttttagaaacggggaagcaaaaaacacattcactgtatataagctgggaactgaagttcttccggaagccccacatttgctcatgagaaaggagttaatgggatcccattgcataggtgctgagtgtcccaaggcaatgag

SEQ ID NO: 49333 - DNA, 599 bp, Chicken  19866894295224_1
  misc_feature (1)..(173): n is any nucleotide
nnnnnnnnnnnnnnnnnnnnnnnnnnnnnnnnnnnnnnnnnnnnnnnnnnnnnnnnnnnnnnnnnnnnnnnnnnnnnnnnnnnnnnnnnnnnnnnnnnnnnnnnnnnnnnnnnnnnnnnnnnnnnnnnnnnnnnnnnnnnnnnnnnnnnnnnnnnnnnnnnnnnnnnnnnnnngcagggaatattccacgtgtgtcagggtttcctgcaaaacaaaggagaaagtacagctccccacaataaatatggttacttagaatgcataaaggaaggaagagcctctcatcgtgctgcagatgaragcctgcagagaggaaaataagaccctggtgatggtcagtttggggccagcattgctctctgcaaagccccccgtccaggaagcgcagggccacgtgtttgttcgcaggcagcagaaatcccagtggagaaggggagtgggaaacacatggagcctgaatgatgctaatcagtaccgcaggtgctccaggtctgcggctgcagagggttgttaattgctgcctgtgggccagtgaaacattttccagcgagcgggggccctcccagctcctgccgtgctggggagcagggagccaggca

SEQ ID NO: 49334 - DNA, 524 bp, Chicken  19866894295231_1
tagggcacagcggttctgtgctcccaccctgctgggtgccacagacctgtgggtgttgcgaggctgagggcacttggctccatgcccagcaccaaagtagctaccggctgggcatgggggcttggccagctcctggctgcagagtgggggtcctgcctgcatgcacaagcctgcctgggtcctgggggtgagtgtggccagtaggattaactggttgttttgtagccaggtctccgtaccggacccatccccgggagcagcaatgaagacagaaccaggattgggtgagaaaaatgtttkctctgagtttggggcaaggggagtggggacatgggtagggttggtactggtggatgcatcttgcctactagtgggtgcaaagggcttgggagcatcatccaagaggtttctgtttgtgcagcccccaggacccctgctgccacccctggccctaccagccgcccgccctgggctgtggacccctcatttgctgagcgctacgccccagacaagacgagcacggt

SEQ ID NO: 49335 - DNA, 600 bp, Chicken  19866894295232_1
aaaacagacttctaacacattcctgaggttatctgaattcctgaagttcttctattgcatcaagcacacactaaaaagaagcttcccttgaaagcttagaagtctttcaggcagctaacaataggcatagatgagctcattacgtataatggaactaactcttagcaaaatgtttatattatgcccatactcagttttgtgaatgtgaacacagtggatgaaaaaatggtatttatcgagtacagattttttttttgaagcatgcatgagcatctttcttccaaagcaacaacaacaackaaaaaaaaaaagaatccatcaacgatatgttgatctccagtcagctaatacattttatttattcactctgaaaaacatatattatatrttaaactgtattatactgcatgcaacaaggtaaccatcatactcttcaaaatcccatctcataatgtcaaaaaaattagcttttttctatctccttttgagaaaaaaaataaaaaaatcaagtagataaattacactagttagcttctgtgcagtcatttctactatcattcccaattgcatttacatacaccagcaatataccagcagtat

SEQ ID NO: 49336 - DNA, 600 bp, Chicken  19866894295232_2
aaacagacttctaacacattcctgaggttatctgaattcctgaagttcttctattgcatcaagcacacactaaaaagaagcttcccttgaaagcttagaagtctttcaggcagctaacaataggcatagatgagctcattacgtataatggaactaactcttagcaaaatgtttatattatgcccatactcagttttgtgaatgtgaacacagtggatgaaaaaatggtatttatcgagtacagattttttttttgaagcatgcatgagcatctttcttccaaagcaacaacaacaacakaaaaaaaaaagaatccatcaacgatatgttgatctccagtcagctaatacattttatttattcactctgaaaaacatatattatatrttaaactgtattatactgcatgcaacaaggtaaccatcatactcttcaaaatcccatctcataatgtcaaaaaaattagcttttttctatctccttttgagaaaaaaaataaaaaaatcaagtagataaattacactagttagcttctgtgcagtcatttctactatcattcccaattgcatttacatacaccagcaatataccagcagtata

SEQ ID NO: 49337 - DNA, 600 bp, Chicken  19866894295232_3
aacagacttctaacacattcctgaggttatctgaattcctgaagttcttctattgcatcaagcacacactaaaaagaagcttcccttgaaagcttagaagtctttcaggcagctaacaataggcatagatgagctcattacgtataatggaactaactcttagcaaaatgtttatattatgcccatactcagttttgtgaatgtgaacacagtggatgaaaaaatggtatttatcgagtacagattttttttttgaagcatgcatgagcatctttcttccaaagcaacaacaacaacaakaaaaaaaaagaatccatcaacgatatgttgatctccagtcagctaatacattttatttattcactctgaaaaacatatattatatrttaaactgtattatactgcatgcaacaaggtaaccatcatactcttcaaaatcccatctcataatgtcaaaaaaattagcttttttctatctccttttgagaaaaaaaataaaaaaatcaagtagataaattacactagttagcttctgtgcagtcatttctactatcattcccaattgcatttacatacaccagcaatataccagcagtatat

SEQ ID NO: 49338 - DNA, 600 bp, Chicken  19866894295232_4
tgaaagcttagaagtctttcaggcagctaacaataggcatagatgagctcattacgtataatggaactaactcttagcaaaatgtttatattatgcccatactcagttttgtgaatgtgaacacagtggatgaaaaaatggtatttatcgagtacagattttttttttgaagcatgcatgagcatctttcttccaaagcaacaacaacaacaaaaaaaaaaaagaatccatcaacgatatgttgatctccagtcagctaatacattttatttattcactctgaaaaacatatattatatrttaaactgtattatactgcatgcaacaaggtaaccatcatactcttcaaaatcccatctcataatgtcaaaaaaattagcttttttctatctccttttgagaaaaaaaataaaaaaatcaagtagataaattacactagttagcttctgtgcagtcatttctactatcattcccaattgcatttacatacaccagcaatataccagcagtatattctgagaactgggatgctagatttttattctgtctgggaagtacgtctttttttctttttttttttttttacttctgcatgcaaat

SEQ ID NO: 49339 - DNA, 600 bp, Chicken  19866894295240_1
gtggaaaaaaaaaaaaagtgaaattacccactggagtttttttagacaaaaattagcaatttctaccatcacattttcctcatacattataaatccataaatgagagtgaatgctatgtgtagtcatcagatgatgtttaatcatatgcaagcaacacatcacatcacatcatcatattcatatcacatgtggaaaaagtattgacatcataaaagccagaaaatgtctaagaaaacacactattggcaacgtaatgaaatatatacagtaatatcaacaaaaaacagcagggttagaamaatgttgtaatttcctaccatatactgctatgtaattttcatttcttgtcmtaggaaaaagaaaaaatagaaaaatacaaactagtttacagtgtaactattgtcttcaaataccattcaaccaactttctcactgactcttacataaatatcttgtgtcttgcttttactgacaacctcacagttaccaatcaattaatacattttattaaaagaatgcctgattaaagatgtaagtcataattttatattgataggaagtttatttcacaaaagaacatgtaaacaaaaataaagccc

SEQ ID NO: 49340 - DNA, 600 bp, Chicken  19866894295240_2
attagcaatttctaccatcacattttcctcatacattataaatccataaatgagagtgaatgctatgtgtagtcatcagatgatgtttaatcatatgcaagcaacacatcacatcacatcatcatattcatatcacatgtggaaaaagtattgacatcataaaagccagaaaatgtctaagaaaacacactattggcaacgtaatgaaatatatacagtaatatcaacaaaaaacagcagggttagaamaatgttgtaatttcctaccatatactgctatgtaattttcatttcttgtcmtaggaaaaagaaaaaatagaaaaatacaaactagtttacagtgtaactattgtcttcaaataccattcaaccaactttctcactgactcttacataaatatcttgtgtcttgcttttactgacaacctcacagttaccaatcaattaatacattttattaaaagaatgcctgattaaagatgtaagtcataattttatattgataggaagtttatttcacaaaagaacatgtaaacaaaaataaagccctaggtttggctagaaattgagcatctatttaataaaacatcatgatttgta

SEQ ID NO: 49341 - DNA, 600 bp, Chicken  19866894295244_1
aaccattttcttacctagaacatgtatatacaccttattgcatatttaaacccatttcaacattgaaatcaacagagtttttactgtgtttctccctctctcactttgtataaataagcagccttgaaatgaacatcaaaactaaatggcattgaatataatgaaaaaacattgagtctaatgaagcagaattgctgtgcaaacagggatgcttttatctcattggaatttttatgtccttgtgtgtgtctctgctgcatttttgtaatctgattcgtaagaaatgtctgatttctcttygtaattattaacagagagcaagaccagcactgttatgtgtgcttagcggggtagtgtgaaattaatagcaagttggctgttttagaagcaaatgttggtcatcctcaccttattattgagggttggctataaaatttgagaacatgggatgtcagtaggcctcctaagaacaactaattatacacagccaaaggtcaggtgaaagcataacgtagaagcttcctatttatgagcataacagccttttcctcacaccctttaatgtctttgtccaaataccagcagcaatatcacaagcaa

SEQ ID NO: 49342 - DNA, 600 bp, Chicken  19866894295245_1
atatatatatgaatacaagtatgagtagcattataaaaggtcacatgccgagcagccacataaataccaaatactattctcaatatccttgaacttcaaacagtgcaattcacccagcaccagctggtaagcacttttgtttgttttcctgtgtgtgttcctttccaagagatgagatgctcaattctgctgaaggccagcagtgaaactgtaattacagcggtgttcaaatgaagcaaactgggaatctttccagactctcatccttaaaacacgcaagtaacctagaaagttagatakggactcatgagaacaagagggttatatattgggaaaaggaggcatgtatttgttttctgagtaagttcttctccccctaccagtaaacaacttaaaatttaatttagcaaagtagatcatgttccatcttggggttccaggcaaacctatgacagctgatgagtccagagggctatctgcacgtcttactagtccagaagccacaaacactcttctagtacttcaggaccattctagttctgtttcacaagagactacagactatagaatayggcacctcagaaaaccaacagattaaag

SEQ ID NO: 49343 - DNA, 600 bp, Chicken  19866894295245_2
cacgcaagtaacctagaaagttagatakggactcatgagaacaagagggttatatattgggaaaaggaggcatgtatttgttttctgagtaagttcttctccccctaccagtaaacaacttaaaatttaatttagcaaagtagatcatgttccatcttggggttccaggcaaacctatgacagctgatgagtccagagggctatctgcacgtcttactagtccagaagccacaaacactcttctagtacttcaggaccattctagttctgtttcacaagagactacagactatagaatayggcacctcagaaaaccaacagattaaagtggcgttgaagatggtatcttcagcagacgggaactctgcctcctcctccccrccccttgcctctccccatgctcacccaagatgggaatgtccctgccagggcttctgagggccacttccagcaggtggatgtgacgtggataacccggggagcagcaatattttccagcagctgtacacaaagaacccactgatgacaccttaagttccatagtatcattayrgtttctctgaatcacacccccactgcaattatcgctcttgccctagc

SEQ ID NO: 49344 - DNA, 600 bp, Chicken  19866894295245_3
tttctgagtaagttcttctccccctaccagtaaacaacttaaaatttaatttagcaaagtagatcatgttccatcttggggttccaggcaaacctatgacagctgatgagtccagagggctatctgcacgtcttactagtccagaagccacaaacactcttctagtacttcaggaccattctagttctgtttcacaagagactacagactatagaatayggcacctcagaaaaccaacagattaaagtggcgttgaagatggtatcttcagcagacgggaactctgcctcctcctccccrccccttgcctctccccatgctcacccaagatgggaatgtccctgccagggcttctgagggccacttccagcaggtggatgtgacgtggataacccggggagcagcaatattttccagcagctgtacacaaagaacccactgatgacaccttaagttccatagtatcattayrgtttctctgaatcacacccccactgcaattatcgctcttgccctagctcttacacgataggagagcagcagctaggtcagacgtggaatctgacagagcaagtcgcttcccacctgaagtgaaattca

SEQ ID NO: 49345 - DNA, 600 bp, Chicken  19866894295245_4
aggaccattctagttctgtttcacaagagactacagactatagaatayggcacctcagaaaaccaacagattaaagtggcgttgaagatggtatcttcagcagacgggaactctgcctcctcctccccrccccttgcctctccccatgctcacccaagatgggaatgtccctgccagggcttctgagggccacttccagcaggtggatgtgacgtggataacccggggagcagcaatattttccagcagctgtacacaaagaacccactgatgacaccttaagttccatagtatcattayrgtttctctgaatcacacccccactgcaattatcgctcttgccctagctcttacacgataggagagcagcagctaggtcagacgtggaatctgacagagcaagtcgcttcccacctgaagtgaaattcattcctaaagtttagatattgtttcaatttgtctgaagggaagtgtttgtctgagaagtgcaagtataaaatacttccccatttcagttcacagtgtgtggcaaaacagaacacaccaacgtggaacacttcatttgcccctgtgaatattttgcacagtattttacataga

SEQ ID NO: 49346 - DNA, 600 bp, Chicken  19866894295245_5
ggaccattctagttctgtttcacaagagactacagactatagaatayggcacctcagaaaaccaacagattaaagtggcgttgaagatggtatcttcagcagacgggaactctgcctcctcctccccrccccttgcctctccccatgctcacccaagatgggaatgtccctgccagggcttctgagggccacttccagcaggtggatgtgacgtggataacccggggagcagcaatattttccagcagctgtacacaaagaacccactgatgacaccttaagttccatagtatcattayrgtttctctgaatcacacccccactgcaattatcgctcttgccctagctcttacacgataggagagcagcagctaggtcagacgtggaatctgacagagcaagtcgcttcccacctgaagtgaaattcattcctaaagtttagatattgtttcaatttgtctgaagggaagtgtttgtctgagaagtgcaagtataaaatacttccccatttcagttcacagtgtgtggcaaaacagaacacaccaacgtggaacacttcatttgcccctgtgaatattttgcacagtattttacatagat

SEQ ID NO: 49347 - DNA, 571 bp, Chicken  19866894295248_1
ctcaataagtgagagggcctcaggtgttggggaggagattcagctgtccctgtgtcactatggcctaaggcagaaggtgtttgtgctggcatggcactcccaggtccaagcagggagtgtagccaggaatgctgtgctctgggacatgaccatgggtccactattgtgacatcttcctttttcttccaccacagaaaccaagaattctgcctggccatgcagagaagggcagtggcaattcagccagaccaacaggtcctcggtagatcagactgatggagggatcagtgatcagaaggraaaaaaaattgtggttaataaatcactctggtacacaggggataagagcatgcacagggttttcttttcacagaaagaactaaaaaccattacatggaatctgaggagaaagcatcatgttcaaatatcgtatgaagaaaggcttgagtcatagagagcctctccayattagtatgtattacaaatactactgaacatctctcaattattttgtctcatttgagagggacttcaaattcccttctttcaatacctcaaacatgacacttat

SEQ ID NO: 49348 - DNA, 404 bp, Chicken  19866894295248_2
gacatcttcctttttcttccaccacagaaaccaagaattctgcctggccatgcagagaagggcagtggcaattcagccagaccaacaggtcctcggtagatcagactgatggagggatcagtgatcagaaggaaaaaaaaattgtggttaataaatcactctggtacacaggggataagagcatgcacagggttttcttttcacagaaagaactaaaaaccattacatggaatctgaggagaaagcatcatgttcaaatatcgtatgaagaaaggcttgagtcatagagagcctctccayattagtatgtattacaaatactactgaacatctctcaattattttgtctcatttgagagggacttcaaattcccttctttcaatacctcaaacatgacacttat

SEQ ID NO: 49349 - DNA, 600 bp, Chicken  19866894295249_1
attataaatgagatgctacaactcagcatttttatccagttctcaaacgtaagagatttgttaatgataaatatattaacgccattagcatttctgagaaatgggatgattgagagacctcgggatgtacgcacggcgtaatggcacggcgcgggctgctgatggatgggagggtgctgagctctcctcaaagcctcccagcgaggacccaaatctccttagcaatactgggaggcaaatgccacatttcagcgatgtcttccattttgctttgggctccatccatcaccccactttaascaggcatttccataccccatccctctcygcccgcccccgcrtggggctgtaacctggtttgctacctgcagcccaaagtaacacgtttaacctttttttatgagccatagttattgcttccaaaggccaccctttcaaaagctcctccaaacagacattygtcttctctacatttccagtgtttccagtacagagtctctaaaccaatacatctcacatcatttcagctttcccagctgcgggacccagattggatttaagctgagctccggctcccattacgctctaygtgtcccgaga

SEQ ID NO: 49350 - DNA, 600 bp, Chicken  19866894295249_2
tttttatccagttctcaaacgtaagagatttgttaatgataaatatattaacgccattagcatttctgagaaatgggatgattgagagacctcgggatgtacgcacggcgtaatggcacggcgcgggctgctgatggatgggagggtgctgagctctcctcaaagcctcccagcgaggacccaaatctccttagcaatactgggaggcaaatgccacatttcagcgatgtcttccattttgctttgggctccatccatcaccccactttaascaggcatttccataccccatccctctcygcccgcccccgcrtggggctgtaacctggtttgctacctgcagcccaaagtaacacgtttaacctttttttatgagccatagttattgcttccaaaggccaccctttcaaaagctcctccaaacagacattygtcttctctacatttccagtgtttccagtacagagtctctaaaccaatacatctcacatcatttcagctttcccagctgcgggacccagattggatttaagctgagctccggctcccattacgctctaygtgtcccgagatggtgcctgcatggctccattggctgca

SEQ ID NO: 49351 - DNA, 600 bp, Chicken  19866894295249_3
ctcaaacgtaagagatttgttaatgataaatatattaacgccattagcatttctgagaaatgggatgattgagagacctcgggatgtacgcacggcgtaatggcacggcgcgggctgctgatggatgggagggtgctgagctctcctcaaagcctcccagcgaggacccaaatctccttagcaatactgggaggcaaatgccacatttcagcgatgtcttccattttgctttgggctccatccatcaccccactttaascaggcatttccataccccatccctctcygcccgcccccgcrtggggctgtaacctggtttgctacctgcagcccaaagtaacacgtttaacctttttttatgagccatagttattgcttccaaaggccaccctttcaaaagctcctccaaacagacattygtcttctctacatttccagtgtttccagtacagagtctctaaaccaatacatctcacatcatttcagctttcccagctgcgggacccagattggatttaagctgagctccggctcccattacgctctaygtgtcccgagatggtgcctgcatggctccattggctgcagtgggacagctgt

SEQ ID NO: 49352 - DNA, 600 bp, Chicken  19866894295249_4
gatggatgggagggtgctgagctctcctcaaagcctcccagcgaggacccaaatctccttagcaatactgggaggcaaatgccacatttcagcgatgtcttccattttgctttgggctccatccatcaccccactttaascaggcatttccataccccatccctctcygcccgcccccgcrtggggctgtaacctggtttgctacctgcagcccaaagtaacacgtttaacctttttttatgagccatagttattgcttccaaaggccaccctttcaaaagctcctccaaacagacattygtcttctctacatttccagtgtttccagtacagagtctctaaaccaatacatctcacatcatttcagctttcccagctgcgggacccagattggatttaagctgagctccggctcccattacgctctaygtgtcccgagatggtgcctgcatggctccattggctgcagtgggacagctgtgatttatcctcaccgatgatcacttcgatttgcccaaaggaacccctccttgggacggttgtaagtagggctataaacatatttcacacccttctcccccagtggaagaggtaaaaata

SEQ ID NO: 49353 - DNA, 600 bp, Chicken  19866894295249_5
cccactttaascaggcatttccataccccatccctctcygcccgcccccgcrtggggctgtaacctggtttgctacctgcagcccaaagtaacacgtttaacctttttttatgagccatagttattgcttccaaaggccaccctttcaaaagctcctccaaacagacattygtcttctctacatttccagtgtttccagtacagagtctctaaaccaatacatctcacatcatttcagctttcccagctgcgggacccagattggatttaagctgagctccggctcccattacgctctaygtgtcccgagatggtgcctgcatggctccattggctgcagtgggacagctgtgatttatcctcaccgatgatcacttcgatttgcccaaaggaacccctccttgggacggttgtaagtagggctataaacatatttcacacccttctcccccagtggaagaggtaaaaatatagaggatggctttatcctatcagcctccggttgttttctctaatatttatttcagaagtcctgtgcagaaaccactttgtgcagagaggagataaacctgcttttgagctaattgcaaatcactttta

SEQ ID NO: 49354 - DNA, 600 bp, Chicken  19866894295254_1
attgctttaactctggaattactctcccttacagaacaactcagagtgcttctcttattcttgctggttagcaaagaatagttttggacatgcatttacatgcaaaaccacaaggacaataccagtcagcactgcaatctcattcacacccttctcccatccccctgaaaagaaaaaaaacaacaacaaaacaaacagacaaaccagtatgatttgaatcaaacctgcacaagaaccaaaggttctttactttttcttccagtgtttgctttgctttcaaatataattggtttgtggagrggatgcagaggagtcaagctgcatgatggctgtgtggagataaatgcatttgctcttcttctaaagaaagcacaaattctacctaaaatataggatgaacctaaactttaaaacaaccaatactccacaaagtagaacataagaaacatgcactaaatgacaatctagaaccaagtcgaacaacttgaagaggactaaattatgcacatcagccacacagcctacaagcmgttcaagccagtactcttgaatgacagacagttcagttatatttcaaccactatcacctttttgagacct

SEQ ID NO: 49355 - DNA, 600 bp, Chicken  19866894295254_2
aagaaccaaaggttctttactttttcttccagtgtttgctttgctttcaaatataattggtttgtggagrggatgcagaggagtcaagctgcatgatggctgtgtggagataaatgcatttgctcttcttctaaagaaagcacaaattctacctaaaatataggatgaacctaaactttaaaacaaccaatactccacaaagtagaacataagaaacatgcactaaatgacaatctagaaccaagtcgaacaacttgaagaggactaaattatgcacatcagccacacagcctacaagcmgttcaagccagtactcttgaatgacagacagttcagttatatttcaaccactatcacctttttgagacctcttagaaaattggcagaataccagaagtctgatgaagggcaaccatggcacctaacttgaaagaacagggtgaggaaaaatgacttaaaaggagattaaaaaacaccagtgtacaccagtccagttgtggtggtttcacatccacagttagtgaaactccaccacattgctccctcactcccattcctcaaaggaagaggaaagaaaaaatacaatgaagaaaactctat

SEQ ID NO: 49356 - DNA, 600 bp, Chicken  19866894295259_1
aactaacctgataaaaggcaatgttcagtttgcagctttatctgcagcctgactccactgcagcacacttggtgtcagcacagtgcagcaagagagcaggaatgagacagcaggagtgagacagcagcagtcagacaacatacgcataagcaagaaacttatttgtcgtgctgctcctgtagatgcttctcaagggagagaagagctgctcagtacctctggggcatccagaagaagtggctgtaattaccagtctcatatttatcatagctgtgcaaacttggtaacagtatttaacayatggcccgtggtcacagccagacctctgtgccctgcccaaacggatctgagatgcaaccagcagttacgaagctcagcacatctcatctcagtcacgtataggttcaacccagagaaggataggcccagtgcagkcatgctttcaaaaccttgggaatcacttgttttgtatcacagaatgactgcagcctggcataagagcactagcttatgcactccttaaccttgtactacgtagctcacctgtatctgcaagttccagtcctctcatctttctgagaaagaggtaacaaggatgat

SEQ ID NO: 49357 - DNA, 600 bp, Chicken  19866894295259_2
caacatacgcataagcaagaaacttatttgtcgtgctgctcctgtagatgcttctcaagggagagaagagctgctcagtacctctggggcatccagaagaagtggctgtaattaccagtctcatatttatcatagctgtgcaaacttggtaacagtatttaacayatggcccgtggtcacagccagacctctgtgccctgcccaaacggatctgagatgcaaccagcagttacgaagctcagcacatctcatctcagtcacgtataggttcaacccagagaaggataggcccagtgcagkcatgctttcaaaaccttgggaatcacttgttttgtatcacagaatgactgcagcctggcataagagcactagcttatgcactccttaaccttgtactacgtagctcacctgtatctgcaagttccagtcctctcatctttctgagaaagaggtaacaaggatgatcagaggcgtttctccatttcacagaaaacaatatactggtctcccagtgtctggaaaccctgacatggaaaacatggaaaaaactgaagaaagtaacaaagggaaggagtaaaaattataaaaaaatgaaactac

SEQ ID NO: 49358 - DNA, 600 bp, Chicken  19866894295278_1
catttcaaggcaaaactcaaaagccaaggttatcatcaagcaagcccagggaagctgtgactgaagtacagacactggtagaatgatacgtggcccaagaaagtgaagtctgaatttttatatggctatcaaagctcttactatctattctgtatcccattttaaaataaatgttctgtcttaaaaaaaatttgagagtgtatcatctaattcaacggctacccatatcacagtaatgctattgctatcccaattctgatgtctagaaagatcttcaaagcaagaagaggaaagcagatstatctccacacttaaaccactgggcaagggacattctaagtagttaaatgtaagtttcccttgctcttcccagggagccagagaagttatacctgatgaagcacraccaaatttcaaaggctttgtgtgttaccttatcaaatgagccgatctagtcaatgatgggaatgttttcactgcttgaaagtcataactattaaattacttctcagtgaaaagattgaatcttgacatatttaagacttagcacttaacttttagaattttttgttgtgttcaggtgagctaaaagcacaaagg

SEQ ID NO: 49359 - DNA, 600 bp, Chicken  19866894295278_2
aagtctgaatttttatatggctatcaaagctcttactatctattctgtatcccattttaaaataaatgttctgtcttaaaaaaaatttgagagtgtatcatctaattcaacggctacccatatcacagtaatgctattgctatcccaattctgatgtctagaaagatcttcaaagcaagaagaggaaagcagatstatctccacacttaaaccactgggcaagggacattctaagtagttaaatgtaagtttcccttgctcttcccagggagccagagaagttatacctgatgaagcacraccaaatttcaaaggctttgtgtgttaccttatcaaatgagccgatctagtcaatgatgggaatgttttcactgcttgaaagtcataactattaaattacttctcagtgaaaagattgaatcttgacatatttaagacttagcacttaacttttagaattttttgttgtgttcaggtgagctaaaagcacaaaggtaattgtaacagaattatttctcaagtcttcacaatttcactgagactacttgagccccagtaagtgatatggctttccctttaaacataaaagttgaaaagatt

SEQ ID NO: 49360 - DNA, 600 bp, Chicken  19866894295278_3
taagacttagcacttaacttttagaattttttgttgtgttcaggtgagctaaaagcacaaaggtaattgtaacagaattatttctcaagtcttcacaatttcactgagactacttgagccccagtaagtgatatggctttccctttaaacataaaagttgaaaagattttacaagtttaactttattaaaactggggagaaaaaaaaagctttaaccattagagaaattaaaatgataaatgaatcaatcttttctagcaaacagtactaattaggtcatacctcatttctttattagcraaatactttggtgtttaatcatcattacataataatttgtcttctccaatctctatagacaatgcagacttgggcagtgtactttcaaatggttccacacragagaaaccccacaatcagctgtctgaatcaaccaaaggattctgcctttataacatatttttgttgtacattctgtgttcatttgataacaagagtagagaaatgcagataaaacttccagagggatgctaagggaaaagttacagaaatgaaacatctctaaatgaagtctgaaatctttagtaagacacaaggtga

SEQ ID NO: 49361 - DNA, 537 bp, Chicken  19866894295278_4
cactgagactacttgagccccagtaagtgatatggctttccctttaaacataaaagttgaaaagattttacaagtttaactttattaaaactggggagaaaaaaaaagctttaaccattagagaaattaaaatgataaatgaatcaatcttttctagcaaacagtactaattaggtcatacctcatttctttattagcraaatactttggtgtttaatcatcattacataataatttgtcttctccaatctctatagacaatgcagacttgggcagtgtactttcaaatggttccacacragagaaaccccacaatcagctgtctgaatcaaccaaaggattctgcctttataacatatttttgttgtacattctgtgttcatttgataacaagagtagagaaatgcagataaaacttccagagggatgctaagggaaaagttacagaaatgaaacatctctaaatgaagtctgaaatctttagtaagacacaaggtgaagcacagcatatggcatagtatcattttggagaacatc

SEQ ID NO: 49362 - DNA, 600 bp, Chicken  19866894295283_1
agctgttctgattctatgaataacacttgtcagacagacacataaggagatacagagtttgacgctcctcttttcttaccccaacatgaattaaaaataacaaggtagaattaaaagggccttgttgctaggaatcctgcacaacggatgagtcagaccttcagcctccttcttcaccatacgaaatacataagcacagctaaaaaaatcttgatgctccaaaaagcgaggcagcaataccaacaagggataggcatctaagaaattactaaaataagttttgggtgggtgaagaataaragaacaggaacacatctcccctctgacaatcagcgtagtgtgactgctgtctgtctttgtcagtcagatgactgttatctccaccagagaccaagttttatacacccagcatcygtgggacacctacactgaaggtgctggttcccactcacatgtttgatggtgcatcatggtatgatgtcttcatggagagagatattgcaccactcatacaaacagatttctttgacttttgtaacttgtactgtcttttgtgccaggatttcttgtacttttgtaggaaaagtctcttctaaagaa

SEQ ID NO: 49363 - DNA, 600 bp, Chicken  19866894295283_2
aagggccttgttgctaggaatcctgcacaacggatgagtcagaccttcagcctccttcttcaccatacgaaatacataagcacagctaaaaaaatcttgatgctccaaaaagcgaggcagcaataccaacaagggataggcatctaagaaattactaaaataagttttgggtgggtgaagaataaragaacaggaacacatctcccctctgacaatcagcgtagtgtgactgctgtctgtctttgtcagtcagatgactgttatctccaccagagaccaagttttatacacccagcatcygtgggacacctacactgaaggtgctggttcccactcacatgtttgatggtgcatcatggtatgatgtcttcatggagagagatattgcaccactcatacaaacagatttctttgacttttgtaacttgtactgtcttttgtgccaggatttcttgtacttttgtaggaaaagtctcttctaaagaaataaaaacataaggtttaagcactgtagaaaaaagcatctgggaatatatcggcaagaagaatatgtctcctaccaagtagaatcatgaatatcttgatcaggatcatcgagtc

SEQ ID NO: 49364 - DNA, 600 bp, Chicken  19866894295297_1
cactccaaaaaagacctgggagtgctggtggatggcaagttggatatgatcctgcaatgtgccctcacagctcagaaagccaaccatgtcctggaaccatgtcctgggctgcatccaaagaaatgtgggaggtgatcctgcccttttgctctgtgctggtgagaccttacctggagtactgcatccaactgtggagtcctcagtacaggagagacatggacctgctggtgcacaaacagaggagggacacaaatgttccaacggatgaaacacatctcctatgagaacagactgagagarctggggctgttcaacttggagaaggctctggggagatctgagagcagccattcagtgtctcaatgggggctgtaagaaagaagggggcagaatctttagcaaggtttgttgtgatatgacaaggggaaacagtttcaagcaaaaagagaagatttaggttggacataaggaagaagtttttttacaataagagtagtgaggcactggtacaggctgcccgtagaggtggtggatgcccagttcttggagacgtataaggtcaggttgttcagggctctgaccaacctgatctagcagtag

SEQ ID NO: 49365 - DNA, 600 bp, Chicken  19866894295298_1
taacggcctcacactgtgccaggggagggtcaggctggatattaggaaacatttttttcccagaaagagcagtgttgcagtggcacagctgcccagggaggtggtggggtcactgtccctggaggtgtcccagagccatggagatgtggcactgagggatgtgggcagtgggcacagtggggtgggctggggttggacttggggatcttggagctctttcccaaccttcatgattctatgattctttctccttctcactactcatgaacaaaattaaagcttaaggtgatgtggagcatygtgctcagcgyggcacgctgtgtgttctgtaggactccacatgttcctgttttggtcttgcatggtgtcagacatctcccaacatctttgcatgaagtcacagcccaggaaagcagtgggagctggcagcaaggactcgcttggctcaacccagcatctgtgcctcaacctctccttgcagagacttcctgtgggctgtccaaaaagcagacaactattttggggaaacaaagctcaaattcacatctcaccccatggaaatktgaagaggaagaaagaaaacatggggaagaggggtga

SEQ ID NO: 49366 - DNA, 600 bp, Chicken  19866894295298_2
cactgtgccaggggagggtcaggctggatattaggaaacatttttttcccagaaagagcagtgttgcagtggcacagctgcccagggaggtggtggggtcactgtccctggaggtgtcccagagccatggagatgtggcactgagggatgtgggcagtgggcacagtggggtgggctggggttggacttggggatcttggagctctttcccaaccttcatgattctatgattctttctccttctcactactcatgaacaaaattaaagcttaaggtgatgtggagcatygtgctcagcgyggcacgctgtgtgttctgtaggactccacatgttcctgttttggtcttgcatggtgtcagacatctcccaacatctttgcatgaagtcacagcccaggaaagcagtgggagctggcagcaaggactcgcttggctcaacccagcatctgtgcctcaacctctccttgcagagacttcctgtgggctgtccaaaaagcagacaactattttggggaaacaaagctcaaattcacatctcaccccatggaaatktgaagaggaagaaagaaaacatggggaagaggggtgaggggcgaaatc

SEQ ID NO: 49367 - DNA, 600 bp, Chicken  19866894295298_3
atgaacaaaattaaagcttaaggtgatgtggagcatygtgctcagcgyggcacgctgtgtgttctgtaggactccacatgttcctgttttggtcttgcatggtgtcagacatctcccaacatctttgcatgaagtcacagcccaggaaagcagtgggagctggcagcaaggactcgcttggctcaacccagcatctgtgcctcaacctctccttgcagagacttcctgtgggctgtccaaaaagcagacaactattttggggaaacaaagctcaaattcacatctcaccccatggaaatktgaagaggaagaaagaaaacatggggaagaggggtgaggggcgaaatcaaatctcggaatcgtgccgaagagaagtgataaaagatcatgcaacaatgaggggaattcatagaggaaacatggagctgtcttcttctggacaagtgtggtccagctccttggctatcactctaggagcccagaagttaaaaaggcaagaatgtccccagagagatcagaaaggacagcatcctctgaagctccattatgtgctggatgcaaatgaagcccggtgccatgaaagccccactgtttctctgc

SEQ ID NO: 49368 - DNA, 599 bp, Chicken  19866894295299_1
  misc_feature (1)..(1): n is any nucleotide
nctctcctttctattttttttttttaagacagaaattcagtgagcagtttgcagttggtagtgctccactgtggttcagcaagaaagcaactacactgagttcaataatgaccagactatttaatgaaggagagcttcagtcattttcttttaatattcaacacatcagctgaaatacttcctgttctcttggtaaatactggccttcatctttggcgtatggactctccatacttagaatcagtaatcaaaccctgtctcaaattttatctagaaaaacatattttaaagtttcaaagwctaagttaaaagaaaaaattacgtatccaaataatgaataagagctctagatttttgttttcttttttaatgaggcttcagaatagcgtttttgtgctgatgggccagggaggttgtttgtggcatagagtagtccaatgctaacaatatatactgtcaaaattaaaatgctggtgcagtaaatttaaatgactgtcatatagtgtgtgtatggtatctgaatgtagaaacttactaatctccagttagtgatcatatgtgataccttagtattttctaaagaaatttgcaaccttagc

SEQ ID NO: 49369 - DNA, 600 bp, Chicken  19866894295300_1
tcctacagcccttcccaaagccgtgcttttgaggctgggaggcatcagttgaagctgcaggaccctgcagaagccactggggcccggtgcaggttttccagctgagctgggctctgcagcctgacccacttggcctctttgccttgcaggatgctgctgtgcgcgcgccaggagtgccgccccaccgagtggatcatgcagaaggttctgagattcagctccctgttcttccccactgcttactcagtacccgtggaaacggtggcaagggcaatggtggccagcgtgctgcagccgagyggggagaaggtggaggtgctggagaacaaagccatccatcagcggggaaaggcagcgccgcagccgggcacatagagctaaaggcgtgggcaacaagttggctgaccttccagatgcttttctgggctgaggatgaatgtatgggataatagtggggggggtttgcgtggataattgggagctggggtgcaaatccgggtaagcgtcttatgattgaaacaattccttgaactgagacctcgaataaaaccctgtgatggcctgagccagctgtgttggaattctgccttccacctgcat

SEQ ID NO: 49370 - DNA, 600 bp, Chicken  19866894295300_2
taaaggcgtgggcaacaagttggctgaccttccagatgcttttctgggctgaggatgaatgtatgggataatagtggggggggtttgcgtggataattgggagctggggtgcaaatccgggtaagcgtcttatgattgaaacaattccttgaactgagacctcgaataaaaccctgtgatggcctgagccagctgtgttggaattctgccttccacctgcatgttgccagcatctcccggtgccaccttaggaaacacattgggcatgtggttggggcacagctgtccccaggcaccagygcccttcacatggctacgatcccagcagctgcagagcacccatgtcctcatgctctgctacgtggcaaaggaggcaggcctattgggctgcctaggacccccttgcatcccagcccgtgcgccacagccattctcaggcctcctgcagggtcaaggaccgtggtggctccgcagctgggagctttacgtgactcctgcgctcccggctggctgcgggcccggtggctttccagggttttctcttcttcgacctccccgtggtccctgtgtcagtgactcggatggggagaagagatgggt

SEQ ID NO: 49371 - DNA, 599 bp, Chicken  19866894295303_1
  misc_feature (1)..(65): n is any nucleotide
nnnnnnnnnnnnnnnnnnnnnnnnnnnnnnnnnnnnnnnnnnnnnnnnnnnnnnnnnnnnnnnnnacgataaacacgaacgtgatcagcagcgtttggggcacgcatctggccaggctgctgtcatctcacgtacccagctgacagcgaggagcaatcactgctgcagccaggaccacactacagccacattggtctgcaaacagaaacctgtctttgtttcccctctgttttggcagcaaccgactttcttcctgacggctcaagataacgcggatacatgcagaatcacagagtcgtygtgattggaaaacacctctcaggtcagcgagtccaacagtcagcccacccccaccgtgcccactaaacacagccycragtgccacrgctccatgtgccacagctccatatggagtcactgcatctcagaccgaggacaaaacgycgctctgcctgccaggacagcgkccgcttcgggtcacgctatcccaaatccctccaaaagctccaaccgtacctctgtgaaacctcagggctcagaaacagcgactcgaaggggacmcatacgaggctcagagcccgaggacagagggaccaaaa

SEQ ID NO: 49372 - DNA, 600 bp, Chicken  19866894295303_2
cgaacgtgatcagcagcgtttggggcacgcatctggccaggctgctgtcatctcacgtacccagctgacagcgaggagcaatcactgctgcagccaggaccacactacagccacattggtctgcaaacagaaacctgtctttgtttcccctctgttttggcagcaaccgactttcttcctgacggctcaagataacgcggatacatgcagaatcacagagtcgtygtgattggaaaacacctctcaggtcagcgagtccaacagtcagcccacccccaccgtgcccactaaacacagccycragtgccacrgctccatgtgccacagctccatatggagtcactgcatctcagaccgaggacaaaacgycgctctgcctgccaggacagcgkccgcttcgggtcacgctatcccaaatccctccaaaagctccaaccgtacctctgtgaaacctcagggctcagaaacagcgactcgaaggggacmcatacgaggctcagagcccgaggacagagggaccaaaaggtcttcccttggatttttcttccttagagctaagcctgcatttcagccggtcggagccggactcggtgctccaac

SEQ ID NO: 49373 - DNA, 600 bp, Chicken  19866894295303_3
aacgtgatcagcagcgtttggggcacgcatctggccaggctgctgtcatctcacgtacccagctgacagcgaggagcaatcactgctgcagccaggaccacactacagccacattggtctgcaaacagaaacctgtctttgtttcccctctgttttggcagcaaccgactttcttcctgacggctcaagataacgcggatacatgcagaatcacagagtcgtygtgattggaaaacacctctcaggtcagcgagtccaacagtcagcccacccccaccgtgcccactaaacacagccycragtgccacrgctccatgtgccacagctccatatggagtcactgcatctcagaccgaggacaaaacgycgctctgcctgccaggacagcgkccgcttcgggtcacgctatcccaaatccctccaaaagctccaaccgtacctctgtgaaacctcagggctcagaaacagcgactcgaaggggacmcatacgaggctcagagcccgaggacagagggaccaaaaggtcttcccttggatttttcttccttagagctaagcctgcatttcagccggtcggagccggactcggtgctccaaccc

SEQ ID NO: 49374 - DNA, 600 bp, Chicken  19866894295303_4
agcagcgtttggggcacgcatctggccaggctgctgtcatctcacgtacccagctgacagcgaggagcaatcactgctgcagccaggaccacactacagccacattggtctgcaaacagaaacctgtctttgtttcccctctgttttggcagcaaccgactttcttcctgacggctcaagataacgcggatacatgcagaatcacagagtcgtygtgattggaaaacacctctcaggtcagcgagtccaacagtcagcccacccccaccgtgcccactaaacacagccycragtgccacrgctccatgtgccacagctccatatggagtcactgcatctcagaccgaggacaaaacgycgctctgcctgccaggacagcgkccgcttcgggtcacgctatcccaaatccctccaaaagctccaaccgtacctctgtgaaacctcagggctcagaaacagcgactcgaaggggacmcatacgaggctcagagcccgaggacagagggaccaaaaggtcttcccttggatttttcttccttagagctaagcctgcatttcagccggtcggagccggactcggtgctccaacccgggacacgg

SEQ ID NO: 49375 - DNA, 600 bp, Chicken  19866894295303_5
agcgaggagcaatcactgctgcagccaggaccacactacagccacattggtctgcaaacagaaacctgtctttgtttcccctctgttttggcagcaaccgactttcttcctgacggctcaagataacgcggatacatgcagaatcacagagtcgtygtgattggaaaacacctctcaggtcagcgagtccaacagtcagcccacccccaccgtgcccactaaacacagccycragtgccacrgctccatgtgccacagctccatatggagtcactgcatctcagaccgaggacaaaacgycgctctgcctgccaggacagcgkccgcttcgggtcacgctatcccaaatccctccaaaagctccaaccgtacctctgtgaaacctcagggctcagaaacagcgactcgaaggggacmcatacgaggctcagagcccgaggacagagggaccaaaaggtcttcccttggatttttcttccttagagctaagcctgcatttcagccggtcggagccggactcggtgctccaacccgggacacggtgtgattcagtgatggcacaaagaacaccggctcgtgttgcccgggtgcttgcgatta

SEQ ID NO: 49376 - DNA, 600 bp, Chicken  19866894295303_6
gccaggaccacactacagccacattggtctgcaaacagaaacctgtctttgtttcccctctgttttggcagcaaccgactttcttcctgacggctcaagataacgcggatacatgcagaatcacagagtcgtygtgattggaaaacacctctcaggtcagcgagtccaacagtcagcccacccccaccgtgcccactaaacacagccycragtgccacrgctccatgtgccacagctccatatggagtcactgcatctcagaccgaggacaaaacgycgctctgcctgccaggacagcgkccgcttcgggtcacgctatcccaaatccctccaaaagctccaaccgtacctctgtgaaacctcagggctcagaaacagcgactcgaaggggacmcatacgaggctcagagcccgaggacagagggaccaaaaggtcttcccttggatttttcttccttagagctaagcctgcatttcagccggtcggagccggactcggtgctccaacccgggacacggtgtgattcagtgatggcacaaagaacaccggctcgtgttgcccgggtgcttgcgattattcgggcaggggcaggggcagta

SEQ ID NO: 49377 - DNA, 600 bp, Chicken  19866894295303_7
tcaagataacgcggatacatgcagaatcacagagtcgtygtgattggaaaacacctctcaggtcagcgagtccaacagtcagcccacccccaccgtgcccactaaacacagccycragtgccacrgctccatgtgccacagctccatatggagtcactgcatctcagaccgaggacaaaacgycgctctgcctgccaggacagcgkccgcttcgggtcacgctatcccaaatccctccaaaagctccaaccgtacctctgtgaaacctcagggctcagaaacagcgactcgaaggggacmcatacgaggctcagagcccgaggacagagggaccaaaaggtcttcccttggatttttcttccttagagctaagcctgcatttcagccggtcggagccggactcggtgctccaacccgggacacggtgtgattcagtgatggcacaaagaacaccggctcgtgttgcccgggtgcttgcgattattcgggcaggggcaggggcagtagaaacactgcctttgaaccgcgatcgtttcagaaggagatggctgacgggggaacacagcggcagttcgacaggcgctgagccccgccgtatct

SEQ ID NO: 49378 - DNA, 600 bp, Chicken  19866894295317_1
gagctcacatgctggggataagtgatcagtgctgctctgggaaggagttccatgcaggagattcaaagcacagtgcttgtcccatgaacatagttcggtgtagggcagcaaaggggaggtaggagtgggaaaagagccagggcatcattacttatcagggagaagaaccttaaaagcgaaggtcaggcattctaaaggatccgcagtaaaagccgttgcaagaagagggaggaggttgaggctgaacctgactggaagactggaagctccagtatatgcatagatgcatacatgcagctrtagtgggggtggcttctggaacacagccttggctgctgttgcttctaggggcagaggacatgaacccagtgttgacttctccattcagtgcgcttctgctttattgttctgtgcatttattctgctgcttccgcttctgttctttttcttatggcttgtctctaccacagggctgtctgccaatgggccaggcgacataccaagtaaggatgaagcaaaaccagaaggactgcacatcaatggacctactggtggcaagaaaacccctcacacagatctggatacaaatgggtatgaaac

SEQ ID NO: 49379 - DNA, 599 bp, Chicken  19866894295329_1
  misc_feature (1)..(60): n is any nucleotide
nnnnnnnnnnnnnnnnnnnnnnnnnnnnnnnnnnnnnnnnnnnnnnnnnnnnnnnnnnnncatcagggtatgaaaagtgcactcaagcttcaaaaactcaatgacaacttgcgctctacccagagcttttttttggcaaatattgaaaaagccactcctagaacacagcatgtcattttttaattcagttatgtttccacttgaagaggcaagccaaaacaaaatattccttcctcagaagcatcacgggaataagttccctcccagcttcaataattatcaggaaaaaaaaaaacaaaygtttcttgactccctattacactgaaattacagcctcctcattaggacaaactcgtattctgcttctctgttcacataactcacrgatgcaaaactgcaggtccactgagaccagcagacagagttcacagctgcagaggtcctcccctaccacagaaagataagggagtgtgtggagtcaggatcgtgccagtarcagtacaactcttctcggctgagttctgactaccctctgaccatttctttacagtttaggtctccaggctcaggtgagttctatcatagatgtatagagtaat

SEQ ID NO: 49380 - DNA, 600 bp, Chicken  19866894295329_2
agcttcaaaaactcaatgacaacttgcgctctacccagagcttttttttggcaaatattgaaaaagccactcctagaacacagcatgtcattttttaattcagttatgtttccacttgaagaggcaagccaaaacaaaatattccttcctcagaagcatcacgggaataagttccctcccagcttcaataattatcaggaaaaaaaaaaacaaaygtttcttgactccctattacactgaaattacagcctcctcattaggacaaactcgtattctgcttctctgttcacataactcacrgatgcaaaactgcaggtccactgagaccagcagacagagttcacagctgcagaggtcctcccctaccacagaaagataagggagtgtgtggagtcaggatcgtgccagtarcagtacaactcttctcggctgagttctgactaccctctgaccatttctttacagtttaggtctccaggctcaggtgagttctatcatagatgtatagagtaattgcagttaacaacagaggaaattcaaacarctgttgtcaagtccttcacagctacaacatttgattcctcactaaagaggaggaaa

SEQ ID NO: 49381 - DNA, 600 bp, Chicken  19866894295329_3
ccacttgaagaggcaagccaaaacaaaatattccttcctcagaagcatcacgggaataagttccctcccagcttcaataattatcaggaaaaaaaaaaacaaaygtttcttgactccctattacactgaaattacagcctcctcattaggacaaactcgtattctgcttctctgttcacataactcacrgatgcaaaactgcaggtccactgagaccagcagacagagttcacagctgcagaggtcctcccctaccacagaaagataagggagtgtgtggagtcaggatcgtgccagtarcagtacaactcttctcggctgagttctgactaccctctgaccatttctttacagtttaggtctccaggctcaggtgagttctatcatagatgtatagagtaattgcagttaacaacagaggaaattcaaacarctgttgtcaagtccttcacagctacaacatttgattcctcactaaagaggaggaaaaaaagaggggatatttaaactttcaattacaattagtactatctaggtttgtatagaaaacaaacttagtttggaatttctttagtcataaggccttaaaaattgggaaaa

SEQ ID NO: 49382 - DNA, 575 bp, Chicken  19866894295329_4
acagcctcctcattaggacaaactcgtattctgcttctctgttcacataactcacrgatgcaaaactgcaggtccactgagaccagcagacagagttcacagctgcagaggtcctcccctaccacagaaagataagggagtgtgtggagtcaggatcgtgccagtarcagtacaactcttctcggctgagttctgactaccctctgaccatttctttacagtttaggtctccaggctcaggtgagttctatcatagatgtatagagtaattgcagttaacaacagaggaaattcaaacarctgttgtcaagtccttcacagctacaacatttgattcctcactaaagaggaggaaaaaaagaggggatatttaaactttcaattacaattagtactatctaggtttgtatagaaaacaaacttagtttggaatttctttagtcataaggccttaaaaattgggaaaatgtatattggaaaatattttccaagtatcacataaacacagtgttaaaatgcagtcatcttactaattggcagagtgagatatctagacaaattctttcagcattata

SEQ ID NO: 49383 - DNA, 600 bp, Chicken  19866894295330_1
ataccatgagaatggaaagaaggatgcgtacccatgatcacaaataatcttaatctccttctttgtgctacttctgtaaataattagatattgctacggtcttgtttctgcaagctcccgcagcgcacgagacgtgctgtgtgcaggcatacctgcctcagatagcaccagcgagctgaaaactgcattgagatataatagcacaatgctgtgtgtgtgagtgcctggggaggaggggaggctgcgtgttcctgggccacattaatagtagggctaccctgcacatagcagaaaggcacragtttgcgtaagtttaaaagcttgcttgaaaagggcgcgctgatcataattgctaaaggggtagagcttctctcagcaaacaattctcagtgccacatagttgtgttgagcactgctcctgtgagtgaggtgctgcgggacggggctccgtggtgctagccgccgatgtgcagcgctgtgctattgtttggctgaaagagcttgaggcagcgaagaatctattattgatgataattcagagttcctcacattctcactaccttaagtcagagctcattctccagcttccatgtgaagggc

SEQ ID NO: 49384 - DNA, 600 bp, Chicken  19866894295331_1
cttgtagtactcagagcattggtgtagctgttccatgacagaacaggtggtcgttttccctccctgccagcttctggggcagggggagagtcaggcctcataaatggccggggagggagagccttttgcaaacaagtcacactttggtaagacattctgactgaaatcatctcctagttcctgtttacacttgcaagttttgtcatcctggtgtagctatacctgtaaactcctcccacataaggagagcattttttgcctgtcaaatgtgatccagggctggcaaagtctggattgaasagcaaaacacctttatagttggtttaattgtgtctacactagggcttttgttgaagtarttgtgtcatgaaaatcaccccacaggacacaaactcttgaagtgaaaactcaaatcttaaatattggcttctaagccagacattagtatgctttagaacaattaaggaaaaccagggtcgatttggaggagggttctggccacaaccgcattgtcagcagagacatagctacgtcccattcaacatcatgttaactaaccaaggatctggtgtggtacaatctaatttgattcttacatag

SEQ ID NO: 49385 - DNA, 600 bp, Chicken  19866894295331_2
ctccctgccagcttctggggcagggggagagtcaggcctcataaatggccggggagggagagccttttgcaaacaagtcacactttggtaagacattctgactgaaatcatctcctagttcctgtttacacttgcaagttttgtcatcctggtgtagctatacctgtaaactcctcccacataaggagagcattttttgcctgtcaaatgtgatccagggctggcaaagtctggattgaasagcaaaacacctttatagttggtttaattgtgtctacactagggcttttgttgaagtarttgtgtcatgaaaatcaccccacaggacacaaactcttgaagtgaaaactcaaatcttaaatattggcttctaagccagacattagtatgctttagaacaattaaggaaaaccagggtcgatttggaggagggttctggccacaaccgcattgtcagcagagacatagctacgtcccattcaacatcatgttaactaaccaaggatctggtgtggtacaatctaatttgattcttacatagctgctgttgagtagggaccaagcaatctaccttaaactgtatcatacattaawagggct

SEQ ID NO: 49386 - DNA, 600 bp, Chicken  19866894295331_3
aagtarttgtgtcatgaaaatcaccccacaggacacaaactcttgaagtgaaaactcaaatcttaaatattggcttctaagccagacattagtatgctttagaacaattaaggaaaaccagggtcgatttggaggagggttctggccacaaccgcattgtcagcagagacatagctacgtcccattcaacatcatgttaactaaccaaggatctggtgtggtacaatctaatttgattcttacatagctgctgttgagtagggaccaagcaatctaccttaaactgtatcatacattaawagggctagggtgaaatttgctttatttgagcttctttcgcattggtttaacctacatatttcttccratacatattacgttggtgatcagctccatgaagtctattgagtcatttttcattttaggcttttcgtgttcattttccctctttgacaacatgaaatgtaagcatatacaagctaccaatgaagaagaaatatctgtcatttcartgggtacccctctggatctttaaataccaactacctaaaatttttttagtagtttaaattaaacaattaacaagcacaaacatagtag

SEQ ID NO: 49387 - DNA, 600 bp, Chicken  19866894295331_4
tattggcttctaagccagacattagtatgctttagaacaattaaggaaaaccagggtcgatttggaggagggttctggccacaaccgcattgtcagcagagacatagctacgtcccattcaacatcatgttaactaaccaaggatctggtgtggtacaatctaatttgattcttacatagctgctgttgagtagggaccaagcaatctaccttaaactgtatcatacattaawagggctagggtgaaatttgctttatttgagcttctttcgcattggtttaacctacatatttcttccratacatattacgttggtgatcagctccatgaagtctattgagtcatttttcattttaggcttttcgtgttcattttccctctttgacaacatgaaatgtaagcatatacaagctaccaatgaagaagaaatatctgtcatttcartgggtacccctctggatctttaaataccaactacctaaaatttttttagtagtttaaattaaacaattaacaagcacaaacatagtagattatcagtacaaataacactaacatgtcttctctgtatcagtttctaaaggatgtcattagccaca

SEQ ID NO: 49388 - DNA, 600 bp, Chicken  19866894295331_5
ctggtgtggtacaatctaatttgattcttacatagctgctgttgagtagggaccaagcaatctaccttaaactgtatcatacattaawagggctagggtgaaatttgctttatttgagcttctttcgcattggtttaacctacatatttcttccratacatattacgttggtgatcagctccatgaagtctattgagtcatttttcattttaggcttttcgtgttcattttccctctttgacaacatgaaatgtaagcatatacaagctaccaatgaagaagaaatatctgtcatttcartgggtacccctctggatctttaaataccaactacctaaaatttttttagtagtttaaattaaacaattaacaagcacaaacatagtagattatcagtacaaataacactaacatgtcttctctgtatcagtttctaaaggatgtcattagccacactcatattagtttccccagtagaccataattcagccttgcctttctaatagtccaccacatcttaattacttttctttcacttcagtgttgctaggtttcctcaaaaatgcaaatgctgcccttcagaaaacaataacacgaatt

SEQ ID NO: 49389 - DNA, 600 bp, Chicken  19866894295334_1
cctggcacacagaggtgctgctggaaggacatggctgcctctctcccttccccctaaatactgtagcttctccactggctgcattagctccctgccacctctgtcctcatccctttggcctactggaggtcaaacacccattaaaaaataggactgtgcttattttgcacgtcattatgtgctaatcatatttagcaatgtggtaattagcttaccactgaggagcgtgaaggtccattgtaggagggtaatagcatgagaaacaagttagatacagtctggggtcccacacattatctkatgtccatttgatgatgggggggtgggaaaacagttcatatgacagtcttgagatagagagaaatcaacatcagaggggaccttgcaaattaatgctttttgatgtgtaaaagtggcctacaagcaaaagccccattttgggagcaattgcaaatgaatccatttttggtgctgtgtgcatgcactgtatattcaaattccaccccgcttgcaagtagagccaggggcatttattgggcctgctgtggtatcaaacctgagagctagcctatgctagctctgcctttcactgctcactac

SEQ ID NO: 49390 - DNA, 600 bp, Chicken  19866894295337_1
aaaactgctagtaattgaaagggaatgcaagtagttgtaatcaactgacagtgttttcattttatctaggaaactatctgtggtttgtgtggaaactataatggcaatatgaaagatgattttgaaacccgaagcaagtatgtggcatcaaatgaactggaatttgtgaattcttggaaagagaatcctctctgtggggatgtatactttgtagtggacccctgtagcaagaatccttatcgtaaagcttgggcagaaaagacatgttccatcatcaacagtcaagtcttttctgcctgycacaataaggtaagaattagttaggccttctctttatctataggtataatgtgcattctcacaaaatgttcacactccagcacttgattttctcttacctaaaatgttctaatagaacatatataaaatatctcctggctctcattcatgttaatcttcatcctctctaatttacactttaccagtccttttgtggacaaaatccacacacgaacattaactgattgattaaargtactggaatgagaaagaagaaagaattcagtatcagaaattagtcactcwrttgaggctggaaaa

SEQ ID NO: 49391 - DNA, 600 bp, Chicken  19866894295337_2
ccttatcgtaaagcttgggcagaaaagacatgttccatcatcaacagtcaagtcttttctgcctgycacaataaggtaagaattagttaggccttctctttatctataggtataatgtgcattctcacaaaatgttcacactccagcacttgattttctcttacctaaaatgttctaatagaacatatataaaatatctcctggctctcattcatgttaatcttcatcctctctaatttacactttaccagtccttttgtggacaaaatccacacacgaacattaactgattgattaaargtactggaatgagaaagaagaaagaattcagtatcagaaattagtcactcwrttgaggctggaaaaggttttcgagatcatcaagtccaacccttaacctaacctcccaagtcccatctctaaaccatcttccttagtgtcatgcccacatgtctctctaatgcctccagggatggcaacttcactacttccctgggcagcccattccagtgtttgactaccctctccatgaagagattcttcctgatatccaagctaatcctcacctgactcaacctgagaccatttcctcacatccta

SEQ ID NO: 49392 - DNA, 598 bp, Chicken  19866894295337_3
gtcttttctgcctgycacaataaggtaagaattagttaggccttctctttatctataggtataatgtgcattctcacaaaatgttcacactccagcacttgattttctcttacctaaaatgttctaatagaacatatataaaatatctcctggctctcattcatgttaatcttcatcctctctaatttacactttaccagtccttttgtggacaaaatccacacacgaacattaactgattgattaaargtactggaatgagaaagaagaaagaattcagtatcagaaattagtcactcwrttgaggctggaaaaggttttcgagatcatcaagtccaacccttaacctaacctcccaagtcccatctctaaaccatcttccttagtgtcatgcccacatgtctctctaatgcctccagggatggcaacttcactacttccctgggcagcccattccagtgtttgactaccctctccatgaagagattcttcctgatatccaagctaatcctcacctgactcaacctgagaccatttcctcacatcctatcacttctcacttgaagaaggaaattaacactctcctcactgcagcttc

SEQ ID NO: 49393 - DNA, 597 bp, Chicken  19866894295337_4
tcttttctgcctgycacaataaggtaagaattagttaggccttctctttatctataggtataatgtgcattctcacaaaatgttcacactccagcacttgattttctcttacctaaaatgttctaatagaacatatataaaatatctcctggctctcattcatgttaatcttcatcctctctaatttacactttaccagtccttttgtggacaaaatccacacacgaacattaactgattgattaaargtactggaatgagaaagaagaaagaattcagtatcagaaattagtcactcwrttgaggctggaaaaggttttcgagatcatcaagtccaacccttaacctaacctcccaagtcccatctctaaaccatcttccttagtgtcatgcccacatgtctctctaatgcctccagggatggcaacttcactacttccctgggcagcccattccagtgtttgactaccctctccatgaagagattcttcctgatatccaagctaatcctcacctgactcaacctgagaccatttcctcacatcctatcacttctcacttgaagaaggaaattaacactctcctcactgcagcttc

SEQ ID NO: 49394 - DNA, 600 bp, Chicken  19866894295340_1
caccaaaaaaagctcagtttgaatgataaaaaggtaaaacacgccagacttcaggtaaatgttgtgagagatgcttcaattgataataactgaggtcgatcacagaaaaatacttagggcttttttcatttgggggggcggatttggctgttaaaaatagtgcttgtaagagaaccttttaaaatcctgtgcaaaatgcattcagtgacatttgcaagtgcaaagttcatttcatctccgcctagattggctgggggtggggtaacgggctgctcagagcactgggcatgctccatccgygcagccttttacgcagatgctcacatcacaccgtgcyggtagcctatgccaaattgccattttacatctcaagggtaaacagctggaaaacgcgagggaaaactggacaggctggtacagcatctcactgctgtcgcacacgtctgctgccagccctgctccatgctacgcacagccctgaatwcagaaacgtgcctgttgagcaggaattaaccccctcatcactgctcrtattcrtctgacatgggcagatgagaaaagcaaggatgttgtaacatagcgcttaatgcctaaatattt

SEQ ID NO: 49395 - DNA, 600 bp, Chicken  19866894295340_2
aacacgccagacttcaggtaaatgttgtgagagatgcttcaattgataataactgaggtcgatcacagaaaaatacttagggcttttttcatttgggggggcggatttggctgttaaaaatagtgcttgtaagagaaccttttaaaatcctgtgcaaaatgcattcagtgacatttgcaagtgcaaagttcatttcatctccgcctagattggctgggggtggggtaacgggctgctcagagcactgggcatgctccatccgygcagccttttacgcagatgctcacatcacaccgtgcyggtagcctatgccaaattgccattttacatctcaagggtaaacagctggaaaacgcgagggaaaactggacaggctggtacagcatctcactgctgtcgcacacgtctgctgccagccctgctccatgctacgcacagccctgaatwcagaaacgtgcctgttgagcaggaattaaccccctcatcactgctcrtattcrtctgacatgggcagatgagaaaagcaaggatgttgtaacatagcgcttaatgcctaaatatttgatgctagcagggcaaaaggaaacatttcatttctgc

SEQ ID NO: 49396 - DNA, 600 bp, Chicken  19866894295340_3
tcctgtgcaaaatgcattcagtgacatttgcaagtgcaaagttcatttcatctccgcctagattggctgggggtggggtaacgggctgctcagagcactgggcatgctccatccgygcagccttttacgcagatgctcacatcacaccgtgcyggtagcctatgccaaattgccattttacatctcaagggtaaacagctggaaaacgcgagggaaaactggacaggctggtacagcatctcactgctgtcgcacacgtctgctgccagccctgctccatgctacgcacagccctgaatwcagaaacgtgcctgttgagcaggaattaaccccctcatcactgctcrtattcrtctgacatgggcagatgagaaaagcaaggatgttgtaacatagcgcttaatgcctaaatatttgatgctagcagggcaaaaggaaacatttcatttctgcattttgctttccatcctttcataagctaacatgggaataacatacaaaagcatgattatccagaatatttacaattctggataaaaaaaattctggaggaaaaaagatccttggagcttgactgaagtgcttgccttaaatatgagt

SEQ ID NO: 49397 - DNA, 600 bp, Chicken  19866894295340_4
tcatctccgcctagattggctgggggtggggtaacgggctgctcagagcactgggcatgctccatccgygcagccttttacgcagatgctcacatcacaccgtgcyggtagcctatgccaaattgccattttacatctcaagggtaaacagctggaaaacgcgagggaaaactggacaggctggtacagcatctcactgctgtcgcacacgtctgctgccagccctgctccatgctacgcacagccctgaatwcagaaacgtgcctgttgagcaggaattaaccccctcatcactgctcrtattcrtctgacatgggcagatgagaaaagcaaggatgttgtaacatagcgcttaatgcctaaatatttgatgctagcagggcaaaaggaaacatttcatttctgcattttgctttccatcctttcataagctaacatgggaataacatacaaaagcatgattatccagaatatttacaattctggataaaaaaaattctggaggaaaaaagatccttggagcttgactgaagtgcttgccttaaatatgagttcacagttacaagaaaaagagagagtagagatcagagctgagggcag

SEQ ID NO: 49398 - DNA, 600 bp, Chicken  19866894295340_5
ccgcctagattggctgggggtggggtaacgggctgctcagagcactgggcatgctccatccgygcagccttttacgcagatgctcacatcacaccgtgcyggtagcctatgccaaattgccattttacatctcaagggtaaacagctggaaaacgcgagggaaaactggacaggctggtacagcatctcactgctgtcgcacacgtctgctgccagccctgctccatgctacgcacagccctgaatwcagaaacgtgcctgttgagcaggaattaaccccctcatcactgctcrtattcrtctgacatgggcagatgagaaaagcaaggatgttgtaacatagcgcttaatgcctaaatatttgatgctagcagggcaaaaggaaacatttcatttctgcattttgctttccatcctttcataagctaacatgggaataacatacaaaagcatgattatccagaatatttacaattctggataaaaaaaattctggaggaaaaaagatccttggagcttgactgaagtgcttgccttaaatatgagttcacagttacaagaaaaagagagagtagagatcagagctgagggcagtggcca

SEQ ID NO: 49399 - DNA, 600 bp, Chicken  19866894295348_1
ctgcatcacaatgagcagttgtacaagcactgcagtgcattggatcctggtattaaggaggggtcatgcttcaatcagcccaatcattggttcacgctgtgaaggggtggagtgtatggtaactgttgagtcacgacctgaaccactgattgagcacctggggaaaggacctggtcagccctgggagcacagatgagggcaattcttgtgtgtgactgtaaggggtggagcctggctgcacctctcttagacctcttttaagggctgactgccactgtgaaaggctctctttctggagaygccgcctttgtggaattttcccctgtgagcctggatcttcggcaacaggtgagcagtcctttttcctttccttataacacctttctattgcgttagtttctctgtcattacacctcttgtatcacctttctgttgtgttgaactttctgattgttacagttttgttagatttttatgatggatattcagaagaaaataaaaacactttgttctgttacttgcaggaagtagcagttaaacctgtttgcagctctgttgtagcgtttctttttacttctgttctctaaacattaagactgc

SEQ ID NO: 49400 - DNA, 571 bp, Chicken  19866894295354_1
gtcactcactattgaattcctaactcaggagccatctccaaaacctaaaggaactgctgctctgagcacaagaggcttttaatgagtcattagtcacctcgtggtcacatggactctggggcagaacaggaggcagtttcactctcatgaaaccacctcatcagtacagaaaaaaggaacaactttaagcattaaacaatgccatgacttaaggaatgaacagaatgttttgaaaatgcaaattcaaagcaactctactgtaattagagcaccaacaaaactgcaagatgtttgtctccrcacattcatttctttcattcatcctcagacacagccacgtacagagctctagtttcacagtataaacccactcctacatacattcccaaaataatttgcatgtattaccaacaaacaaacacacaagttttcaggccgcccccagatgcggcagacaaaaagaggacttgtcactgctgcctaagggattacagaacacagttccaagaagagtgtgagcctcagtgctgtacatttcacacaaggtgcagttaggctgacaattaaaaac

SEQ ID NO: 49401 - DNA, 600 bp, Chicken  19866894295356_1
aagtctggctatgcaaattatggacatatgggtggagtggctgatgctggcaaaatcctttgtagtcttgcttgtgtcatcttactgccatccatcacacttccacatagtggcaggagatgtcagcagaagctgttgctgcaccttaaaataaacttggtgtgtgctctgcattcaggtgaaaactagcttcaagcaaagaaatcagagcgtaaaggaacagtagcactcagctttgttagtgcagctctctcatctctctcctactatataagcatgtaatacaaacagttctaaatrtctaaccctactaatttcttttggaagctctggtatcaaactgttttttagatctgctctaaatgtagactaatcccaatgaattcatcatgaagcagagcagaattcagcttagttrtatacatattttatcagtcatactggaaaggcaattaaaactctaatttttgtgctaattcctctgttattttgctttkaagaaattgtctccgggagtacagatttattcaaaggtattttttgttgctgttttttgttagtttttgttgtgtttgtctagcaaaaagctaggttaaagtc

SEQ ID NO: 49402 - DNA, 600 bp, Chicken  19866894295356_2
gatgtcagcagaagctgttgctgcaccttaaaataaacttggtgtgtgctctgcattcaggtgaaaactagcttcaagcaaagaaatcagagcgtaaaggaacagtagcactcagctttgttagtgcagctctctcatctctctcctactatataagcatgtaatacaaacagttctaaatrtctaaccctactaatttcttttggaagctctggtatcaaactgttttttagatctgctctaaatgtagactaatcccaatgaattcatcatgaagcagagcagaattcagcttagttrtatacatattttatcagtcatactggaaaggcaattaaaactctaatttttgtgctaattcctctgttattttgctttkaagaaattgtctccgggagtacagatttattcaaaggtattttttgttgctgttttttgttagtttttgttgtgtttgtctagcaaaaagctaggttaaagtctgtacaaaattacaaatgcttataattgtttgtttgtttgtttttaactcactctgaaggcattgacattggagaacataaaatgatgtggaatgtaaacagaaacatccttcattgt

SEQ ID NO: 49403 - DNA, 557 bp, Chicken  19866894295356_3
aaagaaatcagagcgtaaaggaacagtagcactcagctttgttagtgcagctctctcatctctctcctactatataagcatgtaatacaaacagttctaaatrtctaaccctactaatttcttttggaagctctggtatcaaactgttttttagatctgctctaaatgtagactaatcccaatgaattcatcatgaagcagagcagaattcagcttagttrtatacatattttatcagtcatactggaaaggcaattaaaactctaatttttgtgctaattcctctgttattttgctttkaagaaattgtctccgggagtacagatttattcaaaggtattttttgttgctgttttttgttagtttttgttgtgtttgtctagcaaaaagctaggttaaagtctgtacaaaattacaaatgcttataattgtttgtttgtttgtttttaactcactctgaaggcattgacattggagaacataaaatgatgtggaatgtaaacagaaacatccttcattgtcaggggaacattaatgcagaagtatgttccatcagt

SEQ ID NO: 49404 - DNA, 600 bp, Chicken  19866894295369_1
ctgctactgcttcaaggagcaattcagtgaaagctgggctggatcataataccagttatcaggtactccactgccaaatgcacatcttgtttcacagcatctgttagacttctcagagttaatgcatttgggttacaaatgaggcatctataatggtctttttttttggtacttgtcttggtctctcaagaagcaaatttattttactctttgcagcactgtttacagagctgactgccttagaagccttgatcacagtagaaaatttgcatgcaaagtatagaagtaatgtgggatccyatgtwtgctgatctacaggctaaaccaagtttctgtggggaaggattaggccagggaagagcttgtgtatcctttcttctgcctcrtgcactcgggagtgatcagagttagtgcagtgccaaaagctctgttgttctcagaatatatgttatgagacacttctttttttgtgcattgtccagcgctgctctacttacggctatatgttggaggttgatttaatccttggtatttactgttccatgagattttgtgccacagtaacagaagccacagtcttgcaaagttgtgttttcccta

SEQ ID NO: 49405 - DNA, 600 bp, Chicken  19866894295369_2
actgcttcaaggagcaattcagtgaaagctgggctggatcataataccagttatcaggtactccactgccaaatgcacatcttgtttcacagcatctgttagacttctcagagttaatgcatttgggttacaaatgaggcatctataatggtctttttttttggtacttgtcttggtctctcaagaagcaaatttattttactctttgcagcactgtttacagagctgactgccttagaagccttgatcacagtagaaaatttgcatgcaaagtatagaagtaatgtgggatccyatgtwtgctgatctacaggctaaaccaagtttctgtggggaaggattaggccagggaagagcttgtgtatcctttcttctgcctcrtgcactcgggagtgatcagagttagtgcagtgccaaaagctctgttgttctcagaatatatgttatgagacacttctttttttgtgcattgtccagcgctgctctacttacggctatatgttggaggttgatttaatccttggtatttactgttccatgagattttgtgccacagtaacagaagccacagtcttgcaaagttgtgttttccctactgaa

SEQ ID NO: 49406 - DNA, 600 bp, Chicken  19866894295369_3
ttgtttcacagcatctgttagacttctcagagttaatgcatttgggttacaaatgaggcatctataatggtctttttttttggtacttgtcttggtctctcaagaagcaaatttattttactctttgcagcactgtttacagagctgactgccttagaagccttgatcacagtagaaaatttgcatgcaaagtatagaagtaatgtgggatccyatgtwtgctgatctacaggctaaaccaagtttctgtggggaaggattaggccagggaagagcttgtgtatcctttcttctgcctcrtgcactcgggagtgatcagagttagtgcagtgccaaaagctctgttgttctcagaatatatgttatgagacacttctttttttgtgcattgtccagcgctgctctacttacggctatatgttggaggttgatttaatccttggtatttactgttccatgagattttgtgccacagtaacagaagccacagtcttgcaaagttgtgttttccctactgaataaaaggagggaagaacttggtctttgaagtttccaatattcagcagagctccagtggctcttcatcaagtcagcctatct

SEQ ID NO: 49407 - DNA, 600 bp, Chicken  19866894295370_1
tacttgcagctgaaaaataaataccaagaataagtcatgcatttttcatctcgagtggagtgcagggaggcgagcagtctaaatgtttaaagtgagccctctggtaggcagcacttctactaaagcagagcttctctctgatcaggatcacttgctggccactgagattaatggtcacccacagcccctgtccggctgagcggctctgaactgtgtataggttcccagattgttgttagcacagtttcctccttctcttctacgcacctttcctcatcagaggtaatgtgcctatcagcygtggaagcacttctgccttcagctgttcccagaaagtggccaaaacacctgctggtgctgatggctttggagaaaagaaaatcaaatgttgtctcggccagaaggcggctcaattagctcttcctgctggggataattagacctgaggctgtgctgctgggaggaatcggtcctcagcatcgatactaaatgaattaggactttgttggcaacagaggggaacttatcaggacttgacaggcaacagcagagcactccaactttaaaaataaatacacaaaaatcacatggagttcacct

SEQ ID NO: 49408 - DNA, 570 bp, Chicken  19866894295370_2
agctcttcctgctggggataattagacctgaggctgtgctgctgggaggaatcggtcctcagcatcgatactaaatgaattaggactttgttggcaacagaggggaacttatcaggacttgacaggcaacagcagagcactccaactttaaaaataaatacacaaaaatcacatggagttcacctttggaacaccgtcatgtttcactgggaaacgtatttaaatgagaatgtccaaatatgtgcttgattttaaatacgaattacaggccaggctggatgtggctctgggcagcctggkctgctggttggcgaccctgcacatagcagggggttggaactggatgagcrytgtgggccttttcaacccaggccgttctatggttacttctccaaagcacggctcagcagcaggacggatgacgctgctcgttcctggcttgcactgaccaagtgggatggggaaggctcaatggctgtgcctggtgcttgtgggagagctttgggcatgttgccttggggactgctcccaggcaattaaaacatgtcatgcaccatctctgtggggcga

SEQ ID NO: 49409 - DNA, 520 bp, Chicken  19866894295370_3
atcggtcctcagcatcgatactaaatgaattaggactttgttggcaacagaggggaacttatcaggacttgacaggcaacagcagagcactccaactttaaaaataaatacacaaaaatcacatggagttcacctttggaacaccgtcatgtttcactgggaaacgtatttaaatgagaatgtccaaatatgtgcttgattttaaatacgaattacaggccaggctggatgtggctctgggcagcctggkctgctggttggcgaccctgcacatagcagggggttggaactggatgagcrytgtgggccttttcaacccaggccgttctatggttacttctccaaagcacggctcagcagcaggacggatgacgctgctcgttcctggcttgcactgaccaagtgggatggggaaggctcaatggctgtgcctggtgcttgtgggagagctttgggcatgttgccttggggactgctcccaggcaattaaaacatgtcatgcaccatctctgtggggcga

SEQ ID NO: 49410 - DNA, 519 bp, Chicken  19866894295370_4
tcggtcctcagcatcgatactaaatgaattaggactttgttggcaacagaggggaacttatcaggacttgacaggcaacagcagagcactccaactttaaaaataaatacacaaaaatcacatggagttcacctttggaacaccgtcatgtttcactgggaaacgtatttaaatgagaatgtccaaatatgtgcttgattttaaatacgaattacaggccaggctggatgtggctctgggcagcctggkctgctggttggcgaccctgcacatagcagggggttggaactggatgagcrytgtgggccttttcaacccaggccgttctatggttacttctccaaagcacggctcagcagcaggacggatgacgctgctcgttcctggcttgcactgaccaagtgggatggggaaggctcaatggctgtgcctggtgcttgtgggagagctttgggcatgttgccttggggactgctcccaggcaattaaaacatgtcatgcaccatctctgtggggcga

SEQ ID NO: 49411 - DNA, 600 bp, Chicken  19866894295376_1
atagtacgcacagagctagctttaacttgtccatactcttttccaataccagaaggagcaaggttagcgtgaagtgctatggctatgttcattcattgccctcaactattacttctgtgacctgccatccaaaaatcagcaaggcttcatttctttgcttagggaaacatgcaacaatattatgctttgaacttactatttggctttgtgaattatttgcatttttgcaacatggagatttctaagggacatgaacattacgcatctatgctgtttatttttcactgaaattaatattcytggcataaatcacattaaaattcttgctgcatcattcacagaaagagaagcagcaatcaacatttagttagctgtgctgcttgaaccagagatctctgaaatagtggtgttttgctgtatctacactttccctatcttttgcagaagaatatttgagatattcatagtgttgtggacttaaacatctagcatgaaaaaaaaagtgttttaacttaaccctggctgactgggaaagcaaagtatgtactgacaattgcttatatcagccagctaacatctgcagtattctttgattctcta

SEQ ID NO: 49412 - DNA, 495 bp, Chicken  19866894295376_2
gcttgaaccagagatctctgaaatagtggtgttttgctgtatctacactttccctatcttttgcagaagaatatttgagatattcatagtgttgtggacttaaacatctagcatgaaaaaaaaagtgttttaacttaaccctggctgactgggaaagcaaagtatgtactgacaattgcttatatcagccagctaacatctgcagtattctttgattctctaagtgtctcaatgaagaatttgttataaatgccattttgcaaatgggaattgaacgtgtaatactatgacaactacgtygtaaactgtcagtgattcaactcattttggtaccaaaggttttgggtgctcaagatagagcatgggtgttacaaatgtatttgagcatgttttttaaaagcactggaacaccaaagagaaagcactggaactatgtagagaattaggtaaataatcagattagaaccaggtgtttaaccttcagattctccaaag

SEQ ID NO: 49413 - DNA, 600 bp, Chicken  19866894295377_1
catgttgcacactgataatatgttagctttccatctgccaaggcaatgctctggaccagttcttctgtgaaatcccccacatcctcaagctctcctgcacagactcctaactcagggaagcgtgacttcttatttttattgcctttttagcatttgggtattttgttttcattgtggtgttttatgtgcagatcttcaggattacgtcaaggatgccctttcagcagggacagcacaaagccttttccacgtgcctccctcacctggctgttgtctccctttctgttgtcactgacatgrttgtctgcccaaagcccacctccatctcttcccctggccctggtcttgcagttctgtactctctggtgcctccagcagcgaaccctgtcatctacagcatgaggaaccaggagctcaaggatgtagtgaggaaactacttggaaagcattggtaaggtactcaataatcttatgcaacagccagggtataacagaaaatgttaagaaaatctttccttgttttttgtctctattattatttctcttttcatgcaagtggaacactgcagttaagggctatgagattttttagaaaaggtg

SEQ ID NO: 49414 - DNA, 600 bp, Chicken  19866894295391_1
ctcagaaaacaaccaaacaaacaaacaaaaaatatatcagagaaatatgtattttagaagattataagctccaaaattagcaaacactaatatttagtttgtgagaattacaattaaagcatcttgaatgccccttttaagaatgctgaataaatcataattttctgcattaagttcttcatacttctaaaatgtgttacttttcttcagcaatatggtctcttgcagcagaagtttggaaatatgtaggagaggtaatatggaaatatggagaggtagtcaggggcagatgtgtcccaragatgtgtatctttgttcagtattttcagttgagtatttgtacaatagtagggcacagagtagctttcttttrgagtagttatgttgtcttgtagtcttttgagcttccgtgctgagacaagtaggtatgattgcaaaaagtgtacttacagaaaggttttttttttttttttyccactaaaaacacttataatggaacataaaaatgtacatgattatttataagccatcatatctcatacagatagtatttatgggttgtttgaatggttaaaataagcagcaatagactgcaagaag

SEQ ID NO: 49415 - DNA, 600 bp, Chicken  19866894295391_2
aaattagcaaacactaatatttagtttgtgagaattacaattaaagcatcttgaatgccccttttaagaatgctgaataaatcataattttctgcattaagttcttcatacttctaaaatgtgttacttttcttcagcaatatggtctcttgcagcagaagtttggaaatatgtaggagaggtaatatggaaatatggagaggtagtcaggggcagatgtgtcccaragatgtgtatctttgttcagtattttcagttgagtatttgtacaatagtagggcacagagtagctttcttttrgagtagttatgttgtcttgtagtcttttgagcttccgtgctgagacaagtaggtatgattgcaaaaagtgtacttacagaaaggttttttttttttttttyccactaaaaacacttataatggaacataaaaatgtacatgattatttataagccatcatatctcatacagatagtatttatgggttgtttgaatggttaaaataagcagcaatagactgcaagaagaatatttaaagccaaaaaaacaacaaatatatgcagcacacagcattcctgtgcaaagcaaattggtcttttc

SEQ ID NO: 49416 - DNA, 600 bp, Chicken  19866894295391_3
ttcttcatacttctaaaatgtgttacttttcttcagcaatatggtctcttgcagcagaagtttggaaatatgtaggagaggtaatatggaaatatggagaggtagtcaggggcagatgtgtcccaragatgtgtatctttgttcagtattttcagttgagtatttgtacaatagtagggcacagagtagctttcttttrgagtagttatgttgtcttgtagtcttttgagcttccgtgctgagacaagtaggtatgattgcaaaaagtgtacttacagaaaggttttttttttttttttyccactaaaaacacttataatggaacataaaaatgtacatgattatttataagccatcatatctcatacagatagtatttatgggttgtttgaatggttaaaataagcagcaatagactgcaagaagaatatttaaagccaaaaaaacaacaaatatatgcagcacacagcattcctgtgcaaagcaaattggtcttttctcatttctgtttacaaccagctattcatagactaaactccagtaagttgtggagtttctgatgtcctctctctatatacaaacagtgcattcactataaac

SEQ ID NO: 49417 - DNA, 600 bp, Chicken  19866894295391_4
gaagaatatttaaagccaaaaaaacaacaaatatatgcagcacacagcattcctgtgcaaagcaaattggtcttttctcatttctgtttacaaccagctattcatagactaaactccagtaagttgtggagtttctgatgtcctctctctatatacaaacagtgcattcactataaacacaatgagggaggtaggaaatagaaccccacaataagaccctgaagaactgacccctcacatgaagaagtggttgataaagcaaaccagtaggagtgacaaaaggtaagacaagcttaaagygctaatgatttaagcaagaaaatatcatcttactctctgatttctgcaatatggatgcctacaaagatttcattttcaaccaaaaacagaagctcatttagaagtgagttctgtaaaaaagattttctgtttgcatatgtaattgataagtgccctacagtactaaacagaatcactttggttttaacttaggtttcagtgtttacaaagcttccagactatttcctatgaactacaaaagctgttttatgttccatgactttctattgcacaagttttatgagagttgagtacacagta

SEQ ID NO: 49418 - DNA, 600 bp, Chicken  19866894295393_1
tgctgagcagacgctgtctgtgtctgcctgggagcatctccgtgtcgctgtccccaagaggtgagcgccctgcccatggctctgggatggctcccacccacaccctgagcagtttggtggctgcctctcaccatagaacagcgcggtggcctccttgatgggctccggtatcttctccaggctggggatggctgcgccctggaggcaagcagaggggattcagcatttcccactcagcgcctgtctgggagcatcactgccagatgggtgctcagcaagggtcaagccaaagacagtgaygcttgatcctaattgctgtgatgctcaaccctaaaacctgccccttcatgggaggggaagggctggatggccctcagaagccactcctgccacctctcacatgccagcaccatcctgtatatgggyttgatgcagcacccaggtgagcaggggttggaaaatagaaagaaagaatgaaaatgtgggaaaacaaarcccaaaaccaaacagaagaagaaaagaatagaggaggtgatgtgacaaccccatgcctgctgcaggccctcccccattggtggtcatccctggggccaccccgag

SEQ ID NO: 49419 - DNA, 600 bp, Chicken  19866894295393_2
ctcaccatagaacagcgcggtggcctccttgatgggctccggtatcttctccaggctggggatggctgcgccctggaggcaagcagaggggattcagcatttcccactcagcgcctgtctgggagcatcactgccagatgggtgctcagcaagggtcaagccaaagacagtgaygcttgatcctaattgctgtgatgctcaaccctaaaacctgccccttcatgggaggggaagggctggatggccctcagaagccactcctgccacctctcacatgccagcaccatcctgtatatgggyttgatgcagcacccaggtgagcaggggttggaaaatagaaagaaagaatgaaaatgtgggaaaacaaarcccaaaaccaaacagaagaagaaaagaatagaggaggtgatgtgacaaccccatgcctgctgcaggccctcccccattggtggtcatccctggggccaccccgagtcatggagccgtgagccgtggggttacctctgcatctggacgatgcacggcggagagggcctggatggtgctgaggtcgtgctccagtttggccaccaactccttctgccccgccagccccgacac

SEQ ID NO: 49420 - DNA, 600 bp, Chicken  19866894295393_3
gccctggaggcaagcagaggggattcagcatttcccactcagcgcctgtctgggagcatcactgccagatgggtgctcagcaagggtcaagccaaagacagtgaygcttgatcctaattgctgtgatgctcaaccctaaaacctgccccttcatgggaggggaagggctggatggccctcagaagccactcctgccacctctcacatgccagcaccatcctgtatatgggyttgatgcagcacccaggtgagcaggggttggaaaatagaaagaaagaatgaaaatgtgggaaaacaaarcccaaaaccaaacagaagaagaaaagaatagaggaggtgatgtgacaaccccatgcctgctgcaggccctcccccattggtggtcatccctggggccaccccgagtcatggagccgtgagccgtggggttacctctgcatctggacgatgcacggcggagagggcctggatggtgctgaggtcgtgctccagtttggccaccaactccttctgccccgccagccccgacacggcctccgtcagctggatctgcagctccgcacagcgcactgcaaaacagagccggggccgtcacctggg

SEQ ID NO: 49421 - DNA, 600 bp, Chicken  19866894295396_1
ctcgggtgcagaacggggctggcagattgcaagtatacctatagcatggagctcactctgggtggagcaaaaggcagataaaatgcataaatgaaagctaaatgcctacttctggggtaattgttctgcattattacgcttgtggtcacatactggattgtgcttccaaagaagtcgtggagtttctgtgctccagaggtgttcaagcctcaactggactcagcctgaagtggagttggccctgcgttgagcagggactgctccgagcaatttccggaggtgccttccaacaccagctcytttctgattctgtgagaataatacttctacattaaggcagccatccacctatatttgtagtatgatttctcctaagacaaggcatgatttacccaaaaacataaccagctcctacacaatggatgtccccacaaaatatttgtcctttttttttttttttttttttttgagcttctgccacatagaagccagatgtggttttgctgatttaggcttttagtagataatgcattataactaaaatcctgaattctcctttaagtcaaggaggaagtttgtgaatttcttcctgttgtgctt

SEQ ID NO: 49422 - DNA, 600 bp, Chicken  19866894295396_2
tttttttttttttgagcttctgccacatagaagccagatgtggttttgctgatttaggcttttagtagataatgcattataactaaaatcctgaattctcctttaagtcaaggaggaagtttgtgaatttcttcctgttgtgctttagctcggcaggcagctgggcaccatagagctgtttgctcactaccccctcccagtgggacgggggagagaattagaggggggagtcttagaacaaaggaaagcaatgctggctgtcctgagcacacgtccagtgtcagaacaaggcagggtgcragaaatttgtcacgggttttttgctgcttaccaatcggtggtatcactgtgttgaagtcagtggaggctttgccatcagtgtgaatgcatctgctttaatactacaatgaaaagtaggtcacatcagttcttcagctcttgtcttcttcatttgtatttcttgtctatatgtgctgactgcttatgtggtataaaaatgttaatcatgaaatccagactaaatctgaattctctgaagtttaagtgtgcttggatggacgattttaatactaatttcatcttttatggaaatattgttgt

SEQ ID NO: 49423 - DNA, 600 bp, Chicken  19866894295400_1
aggccaagcacatgaactgaatttgatctttatgagttctctgccatttctaccttttcaggttaatgacaattttaagtatgcaaacagctgacttaaaaaataaaaataaaaaatatatatatcttagaaagctgaagatttaatatgtgaagccagaccttttccgttgtctggactcaagcattactctgtgactcatcttctggagtaaactcaaagccatttttcataaatattcaagcaccctcatctttcatattctttcctgcttcatttctagcacaggaaactatcttrtgctatcactctccttcatactgacaggataaaattaatgctatgatactaaaatattatttgggcttaagtggacatttatatttttaatcctgtaatcttaatataggatttcaattctaacactagtgtctagtctgttattttttcccttgatttaaatatgtgaaccttaatgtcaaccagacaaactaccagcagttcttagaatacctcattgctccaagtgatggatcaacatttaaccaaaagaaaaatcatatttaaaaaaaaaccctgagatataaaattataaataca

SEQ ID NO: 49424 - DNA, 600 bp, Chicken  19866894295401_1
ttgttttctactactccaactaattaaaaataaaggtgaataagcaagcatcagccactgagatagaatttaccttcttggctatttggctaaaacagttcaaggtccaggaaatccaaagactttctaattcatcatatagtaaggttgttaccactgtttacaaaggaagtttcccatacagaatgttaggcccaccagcatctctcctgcattcaagtgctgccacatgagacagatatagatcccacctgagggtaagttgtattaggaaagagccatctctgacagagaaaggaragcagcacttgtggatgacggcaataatgaaacagtgataagtattttccaaactgcctttacaagttgaggttctgagtactagttattactgaattgttctttcgcaactttacagtaaattattacttgcataagccacaataaacaatcaatgcaaacactcttaaatgatacatttgatttttacgattagtggagctttctcaatctctgattgtcctatgcgaagttcaggaaatggacaacagtctctggagttctgcagaaatctggacagatttaattttctgactcaga

SEQ ID NO: 49425 - DNA, 599 bp, Chicken  19866894295415_1
  misc_feature (1)..(20): n is any nucleotide
nnnnnnnnnnnnnnnnnnnnaacctttatggcccgttggcgctgtatcgtgaggatgcagcgtgcagtgacagcggggacgggatgtgggtgtggggctggcacggggcgggcacccaccgctccccgcagggggggctctcggctgcgccgtcccgcgctgtctcagccgtgaagaacatcaacctgccggagatcccacgcaacatcaacatcggggacatcaacatcaaagtgcccaacctatcacagttcatgtgagtgtcccggcgtggggggccggatctgaggctgactcttyttgggattcctcagtgcagaaacgtgcycacggctgtggtggagccgcggtggtgccgctcctcccggtgtggggctctctgcctgcctgtgtcccccagcccaccccgctcctgctggggccctgtgaagttggcacctatgtcacagggcagggcagcgggctgggagctgccagcgtgccctgctgtgccaggagcacgggcatgtgagcagtgagcgtgtccttctccaaataaaccgctgtgtgaacctgcctgtggtgtgtgctgctgggacggggctgcgggtctggccggt

SEQ ID NO: 49426 - DNA, 600 bp, Chicken  19866894295415_2
tggcccgttggcgctgtatcgtgaggatgcagcgtgcagtgacagcggggacgggatgtgggtgtggggctggcacggggcgggcacccaccgctccccgcagggggggctctcggctgcgccgtcccgcgctgtctcagccgtgaagaacatcaacctgccggagatcccacgcaacatcaacatcggggacatcaacatcaaagtgcccaacctatcacagttcatgtgagtgtcccggcgtggggggccggatctgaggctgactcttyttgggattcctcagtgcagaaacgtgcycacggctgtggtggagccgcggtggtgccgctcctcccggtgtggggctctctgcctgcctgtgtcccccagcccaccccgctcctgctggggccctgtgaagttggcacctatgtcacagggcagggcagcgggctgggagctgccagcgtgccctgctgtgccaggagcacgggcatgtgagcagtgagcgtgtccttctccaaataaaccgctgtgtgaacctgcctgtggtgtgtgctgctgggacggggctgcgggtctggccggtaggggggaaatggggcagtgggtgctgcc

SEQ ID NO: 49427 - DNA, 600 bp, Chicken  19866894295416_1
tgtgtttagtggatttatgtatgtgctttttttctccttctcattacttgtgagcaaaaagttgagaacaactcaggagtctggcctggggcactgtggcaatggtgctatttttttttttttcccctgaggagatgcttcgtgtggtgttgcagagtagtaagcagtcagaggaagatgcactgatgtgttgatgcaagtctgtgcccctgtccctcaggattggtaagctgacttccctgggagatgggcactgctggcttcgttgtcttgataggactagtggacttgtttgggggyaaaaaaaatatcctgaattgccctagtgtcaatcaacagaagctaaatgaatatatatggcagctctttgcaatcattttctttcctagaaatacagaaataagactgctgtttaatagctccagtgaatgctgtcactgtggtgaargaggcctttctggatctgttttctgaagggtctctgctttcatcttctttataatggaatctagcaacaaaytctgtatttttgcccatctcccttgttcttcctcaaagttagacttgtagttccagtgggtgttgctgtaatgcacccag

SEQ ID NO: 49428 - DNA, 600 bp, Chicken  19866894295416_2
gttgcagagtagtaagcagtcagaggaagatgcactgatgtgttgatgcaagtctgtgcccctgtccctcaggattggtaagctgacttccctgggagatgggcactgctggcttcgttgtcttgataggactagtggacttgtttgggggaaaaaaaaatatcctgaattgccctagtgtcaatcaacagaagctaaatgaatatatatggcagctctttgcaatcattttctttcctagaaatacagaaataagactgctgtttaatagctccagtgaatgctgtcactgtggtgaargaggcctttctggatctgttttctgaagggtctctgctttcatcttctttataatggaatctagcaacaaaytctgtatttttgcccatctcccttgttcttcctcaaagttagacttgtagttccagtgggtgttgctgtaatgcacccagagtcttagagcaatttaacattacttaaatgtgtttgtagmgatgttgctcttaatagaatttggcttgaagtaaatttgaagcgaaattgctttcatttttttccctgtcagcttatgtgactgtttattgagggaaattataactg

SEQ ID NO: 49429 - DNA, 600 bp, Chicken  19866894295416_3
gattggtaagctgacttccctgggagatgggcactgctggcttcgttgtcttgataggactagtggacttgtttgggggaaaaaaaaatatcctgaattgccctagtgtcaatcaacagaagctaaatgaatatatatggcagctctttgcaatcattttctttcctagaaatacagaaataagactgctgtttaatagctccagtgaatgctgtcactgtggtgaargaggcctttctggatctgttttctgaagggtctctgctttcatcttctttataatggaatctagcaacaaaytctgtatttttgcccatctcccttgttcttcctcaaagttagacttgtagttccagtgggtgttgctgtaatgcacccagagtcttagagcaatttaacattacttaaatgtgtttgtagmgatgttgctcttaatagaatttggcttgaagtaaatttgaagcgaaattgctttcatttttttccctgtcagcttatgtgactgtttattgagggaaattataactggtgtcacgtaagttttcagggttttttttcttctttcctccccacgttcttatagaagagcttaaagtttct

SEQ ID NO: 49430 - DNA, 600 bp, Chicken  19866894295416_4
gctaaatgaatatatatggcagctctttgcaatcattttctttcctagaaatacagaaataagactgctgtttaatagctccagtgaatgctgtcactgtggtgaargaggcctttctggatctgttttctgaagggtctctgctttcatcttctttataatggaatctagcaacaaaytctgtatttttgcccatctcccttgttcttcctcaaagttagacttgtagttccagtgggtgttgctgtaatgcacccagagtcttagagcaatttaacattacttaaatgtgtttgtagmgatgttgctcttaatagaatttggcttgaagtaaatttgaagcgaaattgctttcatttttttccctgtcagcttatgtgactgtttattgagggaaattataactggtgtcacgtaagttttcagggttttttttcttctttcctccccacgttcttatagaagagcttaaagtttcttatttacaagtacaggcagtctttaagcacaagtagtgtgaactgttagtgatggctgtgtagcaaccccagggctgctgtacttggctttggctgagagtcatttcatttctgcgggttg

SEQ ID NO: 49431 - DNA, 600 bp, Chicken  19866894295416_5
ctgaagggtctctgctttcatcttctttataatggaatctagcaacaaaytctgtatttttgcccatctcccttgttcttcctcaaagttagacttgtagttccagtgggtgttgctgtaatgcacccagagtcttagagcaatttaacattacttaaatgtgtttgtagmgatgttgctcttaatagaatttggcttgaagtaaatttgaagcgaaattgctttcatttttttccctgtcagcttatgtgactgtttattgagggaaattataactggtgtcacgtaagttttcagggmtttttttcttctttcctccccacgttcttatagaagagcttaaagtttcttatttacaagtacaggcagtctttaagcacaagtagtgtgaactgttagtgatggctgtgtagcaaccccagggctgctgtacttggctttggctgagagtcatttcatttctgcgggttgttgtgacctgaagctgtgctgtagagaagatgttacataaggaaaaagaccttgaaggaaaaaaatgcgactccaagtcaactcttgtctcagcagtaagggatgagcacatgtgggaatttctgcttt

SEQ ID NO: 49432 - DNA, 600 bp, Chicken  19866894295416_6
agtacaggcagtctttaagcacaagtagtgtgaactgttagtgatggctgtgtagcaaccccagggctgctgtacttggctttggctgagagtcatttcatttctgcgggttgttgtgacctgaagctgtgctgtagagaagatgttacataaggaaaaagaccttgaaggaaaaaaatgcgactccaagtcaactcttgtctcagcagtaagggatgagcacatgtgggaatttctgctttctccagtgttttggctgtagaggggcagagaggctctcatctatctccctctgctgcrgcagtgcagcccatcggttaccacgtactgtgatgccaagtggatgaggctcgaaacttctgttctgaattatacgcaggactctggcacagaagagctatgtgtgatctcagtgaagctgtctgggagtcattgctgatcttttctcatctaggaagaatctgtaatagaagtactgcctaatattagctgtaataggtttgcacacactttccacgtgctgttcagcacttgattttatcccattacgttgtgctgatatcttacctggtgctgcttgaagtgctgttctttatattg

SEQ ID NO: 49433 - DNA, 600 bp, Chicken  19866894295416_7
ggctattaaaactaagaatcttgttatcagttaatggatacatgttgggggttggacacacatggagcattagttgatacacaacatggttgtacataactaaggtattttttgatctctgctttcctcacttccctcattatcagtgatgaaaaccgaatgccacagaaattattaccatttaacaaatattaatgctgttttaatactggaacattgcatattaaacataattcccgtgtattttgttgtgtttgacaacacattctgtagcaaggcaatttctcatgaagatgctayggatgctttctgaagtttggaaaactatagataaattcaagaagtgaatggagaaaaccagtcatcaaggttgactgccaagtgagatagcagcacgtgcaatgtgcttacagagtggtctgttgctgtacaggcgaatgcatgcttgtaattacattgggaagtattagagctcacactgttttaggaacttgttcttctatagccattttgaagaattgctcttgttgagttaatcaacctgcttgtctgccataaattctagggagaagaaaactgctggtacgtgtctcttaatgc

SEQ ID NO: 49434 - DNA, 600 bp, Chicken  19866894295418_1
gaagcagtgcttccgccacatctgtgagacaggtttataacaccctgtgatggaatgtgctggggatgttttcctacctaaggtggcatcgtctacttaaagcatgacacagttgtgttcgtttatgaaggggctctgactcgaggcccagatttcatactcggtaatcacattcttacctttgtaactgttgttgaacacagcattttctttgctccatttttatcctggtgtctttgacagaacacgatagcaccgtgaggtagctgctgtgcgtatgtgggttttactaccatagcrgagacatttgcaaggctggtggcaggccagaaaaaaattgtgtgagtagagctcaggcttgttatcttctcagtcacgttaatgtgctggagcaagcgtcctcccactgctctgatagatgcactgacaactttagaaagctacaaaactggagatgatgcggttgaaggatgcctctggaagccagcagtacgtttgtacagcatctggcacagctggcttgaataaggggatcctcagtaagcttggcattaagctcctttggtgggtgacttccctctgctgctgggataggtgccc

SEQ ID NO: 49435 - DNA, 600 bp, Chicken  19866894295423_1
tgaatagttattaatccttcctcagtggaggagaatgtgattctttgaatagatctagcagtctcactttacagttttattcaattctgtagttggttcaagagccacgttatatcacacagattgttttgcaacactaacacggagacaagcacagctcaagaacatcgttctcagcttccttcctataaacatgctcacagaagccatcactcctctggaataagaacagggaatgcagttagcatttaggattttcttcttcccatgattctttgtatctgaggtttctcactgtaygttaagggaaatatgagaacagttaagggacattgctctatgaatacgcctgatcttgagggctagtggaattagctttggaagccagctaactgctggagctggccaaggggactgatggaaaaggaggtaatccagcagaggtatgctgttctttgggttttcttcccctgtcactagcccaagtggccattctcactatagcaccatttccaaatatgggaaaatagacaaacaggacaattaggaaaaaaaaaaaccacacaaaaaggctttttctagaaatctgcttagagaggc

SEQ ID NO: 49436 - DNA, 599 bp, Chicken  19866894295434_1
  misc_feature (1)..(81): n is any nucleotide
nnnnnnnnnnnnnnnnnnnnnnnnnnnnnnnnnnnnnnnnnnnnnnnnnnnnnnnnnnnnnnnnnnnnnnnnnnnnnnnnntaccccaagataacagagcagcagccaataggttccattcttccaactcacctccaacatacactcctgccccagacgccttcctgcatggccatcagcaaagattgacccacagaggtcttcaggatcagcctttcatagtggtgcatgctcttcatgttcacaggccaagatgcaccccatctgaaggtgcatcacaacagcagcacaccacagcayagggcatcacacccaagggggccttgtgatggcactcagcccagccgcgggaccaaattgcaacagggtcctataaaaacaatgctcccacatgaaaggttccagcaagaagcaaacatctgggagaaagcacattctggaggagactagaaacagaagcaggcttaaaggagccaaatcccatctggctgatggcagaagcaagggtccaggctgctttcttggggaaacagctgtagcacttcctctgcatatgtgcagaaagcacctgaacatggtatctgaaggggcaatatgta

SEQ ID NO: 49437 - DNA, 600 bp, Chicken  19866894295434_2
gaagccataaatttactggaagtgaaggtgcagcagcaataacaagtcattgtgcacaaaacagctgcatgcaaagcttccctccagctcccacatgctgagcaaagtgcccccatatcaggatgtatccatgcatacgtgaaatttattttctcaccctacagtatgcagctgcttctgcccaggtctcccccgtagcctccagcctccccaaaccggctttctcttccctgttcccactacatctgcaatctcacattaagatgcagtcagctaccatgcacagagcccctgtccccrtccccacacagtccagatcccagagctagtaggctgctggggtgagaagacgaagatctccttgtacacagggccatgygtccccacagcagccctgaggcagctacctgcctgcattgtgaggccccagcaccaccactgcacctgctctgtggtgttatcagcctctcaggctgcaaaactggcagtctactaatagcatgagtcacgcagaaagtctcatatccttctccagttcaaagtgtttcctagaactgcactgagaggccttgaagactcgactgtttactgaaattaaaa

SEQ ID NO: 49438 - DNA, 600 bp, Chicken  19866894295434_3
ccctccagctcccacatgctgagcaaagtgcccccatatcaggatgtatccatgcatacgtgaaatttattttctcaccctacagtatgcagctgcttctgcccaggtctcccccgtagcctccagcctccccaaaccggctttctcttccctgttcccactacatctgcaatctcacattaagatgcagtcagctaccatgcacagagcccctgtccccrtccccacacagtccagatcccagagctagtaggctgctggggtgagaagacgaagatctccttgtacacagggccatgygtccccacagcagccctgaggcagctacctgcctgcattgtgaggccccagcaccaccactgcacctgctctgtggtgttatcagcctctcaggctgcaaaactggcagtctactaatagcatgagtcacgcagaaagtctcatatccttctccagttcaaagtgtttcctagaactgcactgagaggccttgaagactcgactgtttactgaaattaaaaattcccctcctgctcttgcacagagctgcctgaaacatgtctgtgttttgctttatctcacgtctaaaatctcctcagc

SEQ ID NO: 49439 - DNA, 599 bp, Chicken  19866894295450_1
  misc_feature (1)..(159): n is any nucleotide
nnnnnnnnnnnnnnnnnnnnnnnnnnnnnnnnnnnnnnnnnnnnnnnnnnnnnnnnnnnnnnnnnnnnnnnnnnnnnnnnnnnnnnnnnnnnnnnnnnnnnnnnnnnnnnnnnnnnnnnnnnnnnnnnnnnnnnnnnnnnnnnnnnnnnnnnnnnnnnnaaggcactgacatccagcagtactggggagcctttagccagctggtgcggggacagaccgggtgagtgttggtcaagctggagttggactccatcagggaatatttggacttggcgagccctgggagatggcaaagcgccrggcaccaaggagagagaaggaacgtgctgccagtggatgcgagaggcagcgccagcggggcgtcccctgcttcaaggggcacttctcctgtctcacccagggcagcctctctccccatttcttttggttggattctgaaggctttgatccgttggcacaccacatctgcctggccagagcgagacacggaggccaaggggagctcctgcttggaaatagagaatgggaaaggtggtgtcaagcaagaggaacacccttggaaagcccagtgagcacaagggaaaaccaacaagtccata

SEQ ID NO: 49440 - DNA, 496 bp, Chicken  19866894295450_2
ttgatccgttggcacaccacatctgcctggccagagcgagacacggaggccaaggggagctcctgcttggaaatagagaatgggaaaggtggtgtcaagcaagaggaacacccttggaaagcccagtgagcacaagggaaaaccaacaagtccataggacctcaacaagcacgggaacaacctcaagggacaccagagcttgccagacagaggaaggaatagatattggcatcccacctatgggtgtgggttcctgctgagtccaccaagagcctcagtagagtccttgaactgctcagsagggtcacaactctccagtgccacctgttggacacaagaaaaagtaagtagagattaccttctagtgaggatgcaggaatcactcacccctttccaaggaccagggcacatcccacactgcaatcaaggaggtcaggaaaggcatcaccatgtgctggataagtctccaatactagaaggaaagaaactttcatat

SEQ ID NO: 49441 - DNA, 600 bp, Chicken  19866894295462_1
gcaccagcacttccctgcctatccccatgtctgggaccagtcaagctctgctttgcaaaccctgtatttatgtccccatctcatgcgtcactgctgcttttatgcatccataagtaagcatcgagagctgctcccaggcctggcaggttgggccaacatcactccatcctcattcgccaaaacaaaatgggtgttcaaccctctctgccttctgggatgtatccaagcccaacagggatgggacctgagcctttcccacagctgctcggtaccataagcacaactaccagcaagagatgrcaccccagccaaaccatcacagctttcccatctacgagggttgctcagtagaacagctccatcttgttcctcactggaacaggagcagagcgtgcatgggcacggtgcaagcagagcaaacaacacaaacctccgcatctcccacatgcgactccaccaaggggtgctgcaaacaaacagagctccaaccactcatcacagatgcttgaagaacacccactgaatcctccctctcggttcatctcgctccagggggtgcagaaaggtgcagcccaccctgtgctgcacctgcccaagcag

SEQ ID NO: 49442 - DNA, 600 bp, Chicken  19866894295462_2
cagctccatcttgttcctcactggaacaggagcagagcgtgcatgggcacggtgcaagcagagcaaacaacacaaacctccgcatctcccacatgcgactccaccaaggggtgctgcaaacaaacagagctccaaccactcatcacagatgcttgaagaacacccactgaatcctccctctcggttcatctcgctccagggggtgcagaaaggtgcagcccaccctgtgctgcacctgcccaagcagtgctgccctggggggcatgggaggtatttgcagcaccaggaggaggcacctcrcctggctcagcaccaaccatggtacttttccatctcccgtggggaccagagatctttgggtgtatgtcatctggatgggcagggctgctcatattttggagccctaagctaggagttacacctacattcgtttttatttttgctttagatatcttctccggtccaattatagattaatcacattttatctagcatccgtttctcccccgcctccttccccacccccatcagagaaggaaagaaagaaacaaacgtgttattaattggctgcagtttttctgctgggttcttctctgtgca

SEQ ID NO: 49443 - DNA, 503 bp, Chicken  19866894295466_1
ggggcagtgatgggctctactcacagaggccactgccactgttccctgctaccaaacccttgcttcataaactcaatacatatgtacttagagcctgacttaaagaagcatgaaggtttatcaattcgtcatggctttccattgtattttatgcttttcagaactgttgccaaaattgaataatctctgcaattaatctgttgataagcaaatgtttgttatgtcttaatgaaggaatttattgttaatgttaacactggctactatttatgggcagaattccttgttcaattgtaccasataagggtaccttcgtctgctgasttcagaactgctcccactgttaggcaacctggcagtcatgccctttccttgcatagcaacattctaacataagttttattatgtccagaamgatccactacagcagtagatctcttttcctccctttctttaactgttttccatttttggttgcaattatacatttgggtttgtgtcca

SEQ ID NO: 49444 - DNA, 479 bp, Chicken  19866894295466_2
agaggccactgccactgttccctgctaccaaacccttgcttcataaactcaatacatatgtacttagagcctgacttaaagaagcatgaaggtttatcaattcgtcatggctttccattgtattttatgcttttcagaactgttgccaaaattgaataatctctgcaattaatctgttgataagcaaatgtttgttatgtcttaatgaaggaatttattgttaatgttaacactggctactatttatgggcagaattccttgttcaattgtaccasataagggtaccttcgtctgctgasttcagaactgctcccactgttaggcaacctggcagtcatgccctttccttgcatagcaacattctaacataagttttattatgtccagaamgatccactacagcagtagatctcttttcctccctttctttaactgttttccatttttggttgcaattatacatttgggtttgtgtcca

SEQ ID NO: 49445 - DNA, 388 bp, Chicken  19866894295466_3
gtttatcaattcgtcatggctttccattgtattttatgcttttcagaactgttgccaaaattgaataatctctgcaattaatctgttgataagcaaatgtttgttatgtcttaatgaaggaatttattgttaatgttaacactggctactatttatgggcagaattccttgttcaattgtaccasataagggtaccttcgtctgctgasttcagaactgctcccactgttaggcaacctggcagtcatgccctttccttgcatagcaacattctaacataagttttattatgtccagaamgatccactacagcagtagatctcttttcctccctttctttaactgttttccatttttggttgcaattatacatttgggtttgtgtcca

SEQ ID NO: 49446 - DNA, 599 bp, Chicken  19866894295467_1
  misc_feature (1)..(62): n is any nucleotide
nnnnnnnnnnnnnnnnnnnnnnnnnnnnnnnnnnnnnnnnnnnnnnnnnnnnnnnnnnnnnntgattgaagtcaacctatgcagcctctacatctagtcaaatacagttaataatcaccaggtcatactagagaacactgaatttcaggaattactctgttgaatggttttcttttggaatttgaaggaaaaaaatacctttattttagcagctctgttcaagataccctatcaacacattaatcaaataatataattattgtcatcttcagtaattgtttctttgaataagtataattktttgagttttccaatgatagaygtctgaaataattttcttttgtctcctttttcccatttttttttatagttgctagacatttatcatatttaaacagtttgagtaataattctatttgatataaatccaagtgcaaattcatcttcattttttctggattttgtcaaagctcaatagtgaaactgatacctgaactcaaaatttataaaacatatggctactcccataatttgcaacttgacactattcttcattattaacataggctaacatatattctggttgtgtatccattaaa

SEQ ID NO: 49447 - DNA, 599 bp, Chicken  19866894295467_2
  misc_feature (1)..(40): n is any nucleotide
nnnnnnnnnnnnnnnnnnnnnnnnnnnnnnnnnnnnnnnntgattgaagtcaacctatgcagcctctacatctagtcaaatacagttaataatcaccaggtcatactagagaacactgaatttcaggaattactctgttgaatggttttcttttggaatttgaaggaaaaaaatacctttattttagcagctctgttcaagataccctatcaacacattaatcaaataatataattattgtcatcttcagtaattgtttctttgaataagtataattktttgagttttccaatgatagaygtctgaaataattttcttttgtctcctttttcccatttttttttatagttgctagacatttatcatatttaaacagtttgagtaataattctatttgatataaatccaagtgcaaattcatcttcattttttctggattttgtcaaagctcaatagtgaaactgatacctgaactcaaaatttataaaacatatggctactcccataatttgcaacttgacactattcttcattattaacataggctaacatatattctggttgtgtatccattaaatatggatggaaagaataattct

SEQ ID NO: 49448 - DNA, 599 bp, Chicken  19866894295477_1
  misc_feature (1)..(17): n is any nucleotide
nnnnnnnnnnnnnnnnnttgttaaatctcagtaaatggttcttgctgaacttgggaaatgttgtgttagggactattgggaaatactcctcccacaaactcatgggaagatgttattgcctgtgggggctgttttcttgtctactacatgctctttattcaaatacataacctttctatttatctatattgcattcctctgaaatagaaaaccactgcctaatgtgtgctgctgtggcagctggtacagaggagcaagcatagtataacctcagctggtcccctgctctgtggtggcacygtgacttgcacggacttgcacgtgtctctgttgacatgtcatcatgtggtttaatgctccaagccacctaggcgtaattcacttctgccaggtgttgtcaagggaatggtgagcatatttcactttcccttccatcyattggcacttcaggacacaaggcttttgggttatgcagaaatgctcttgagaccctgaattcaaccattgtatactrtttctgatttygtagctgagtataaacgttgctgatatctgtacttaatctttactctttgctggagctgattgacagaaaaaat

SEQ ID NO: 49449 - DNA, 600 bp, Chicken  19866894295477_2
tgtctactacatgctctttattcaaatacataacctttctatttatctatattgcattcctctgaaatagaaaaccactgcctaatgtgtgctgctgtggcagctggtacagaggagcaagcatagtataacctcagctggtcccctgctctgtggtggcacygtgacttgcacggacttgcacgtgtctctgttgacatgtcatcatgtggtttaatgctccaagccacctaggcgtaattcacttctgccaggtgttgtcaagggaatggtgagcatatttcactttcccttccatcyattggcacttcaggacacaaggcttttgggttatgcagaaatgctcttgagaccctgaattcaaccattgtatactrtttctgatttygtagctgagtataaacgttgctgatatctgtacttaatctttactctttgctggagctgattgacagaaaaaatacctttatcaaaagcatactcctttgatgtggccacataaaaatctgctttcagcaccttcaaaaggcgtaaggagtgcaaattgataagtgctgtattttgattatatatgtattttggttaataagctctacttac

SEQ ID NO: 49450 - DNA, 600 bp, Chicken  19866894295477_3
ctgcctaatgtgtgctgctgtggcagctggtacagaggagcaagcatagtataacctcagctggtcccctgctctgtggtggcacygtgacttgcacggacttgcacgtgtctctgttgacatgtcatcatgtggtttaatgctccaagccacctaggcgtaattcacttctgccaggtgttgtcaagggaatggtgagcatatttcactttcccttccatcyattggcacttcaggacacaaggcttttgggttatgcagaaatgctcttgagaccctgaattcaaccattgtatactrtttctgatttygtagctgagtataaacgttgctgatatctgtacttaatctttactctttgctggagctgattgacagaaaaaatacctttatcaaaagcatactcctttgatgtggccacataaaaatctgctttcagcaccttcaaaaggcgtaaggagtgcaaattgataagtgctgtattttgattatatatgtattttggttaataagctctacttactgtatttctttcatttttgttatacattcctaactgagatttcagaactgttgagtgcatgtccttttccttctgca

SEQ ID NO: 49451 - DNA, 600 bp, Chicken  19866894295477_4
gtgctgctgtggcagctggtacagaggagcaagcatagtataacctcagctggtcccctgctctgtggtggcacygtgacttgcacggacttgcacgtgtctctgttgacatgtcatcatgtggtttaatgctccaagccacctaggcgtaattcacttctgccaggtgttgtcaagggaatggtgagcatatttcactttcccttccatcyattggcacttcaggacacaaggcttttgggttatgcagaaatgctcttgagaccctgaattcaaccattgtatactrtttctgatttygtagctgagtataaacgttgctgatatctgtacttaatctttactctttgctggagctgattgacagaaaaaatacctttatcaaaagcatactcctttgatgtggccacataaaaatctgctttcagcaccttcaaaaggcgtaaggagtgcaaattgataagtgctgtattttgattatatatgtattttggttaataagctctacttactgtatttctttcatttttgttatacattcctaactgagatttcagaactgttgagtgcatgtccttttccttctgcagtctgagttat

SEQ ID NO: 49452 - DNA, 600 bp, Chicken  19866894295482_1
agacaggggtaagtaaaatagccacgcagtggcacagaattggatctcttcatggatgttcctttaaaagcattccctcgctgggcagtaatatctcaccagtgtaggcacacataaaacatctgacaagcttgataaagggttatcatatatcagaacaagccattagatgactgagttgtaaagtgtagcttggggatgtggtttattgtaaaactttgtcctggctacttctgcagaacaatttacttgagtacatgaatgctccttatgtgcatcaacactcacagctctgaggcswggaagtggcagggagggatttgttttccttctgccagatcccaaaattgcttcttggaaataccagcggtccatttgcaggctggtaatgtcacccataagagtttcctcatccagcgtgagcccagccacaccactcctccaggtgctgctttaggctgctcagcagcagagggcaaatgacttctgagagtcttttgacaaagggttagggttgaggttggcttggactgagccacatgcgacatgggaaagggagctgtgggcaaacccaggtgagtgaagcttgttttcccaatg

SEQ ID NO: 49453 - DNA, 600 bp, Chicken  19866894295482_2
gacaggggtaagtaaaatagccacgcagtggcacagaattggatctcttcatggatgttcctttaaaagcattccctcgctgggcagtaatatctcaccagtgtaggcacacataaaacatctgacaagcttgataaagggttatcatatatcagaacaagccattagatgactgagttgtaaagtgtagcttggggatgtggtttattgtaaaactttgtcctggctacttctgcagaacaatttacttgagtacatgaatgctccttatgtgcatcaacactcacagctctgaggcswggaagtggcagggagggatttgttttccttctgccagatcccaaaattgcttcttggaaataccagcggtccatttgcaggctggtaatgtcacccataagagtttcctcatccagcgtgagcccagccacaccactcctccaggtgctgctttaggctgctcagcagcagagggcaaatgacttctgagagtcttttgacaaagggttagggttgaggttggcttggactgagccacatgcgacatgggaaagggagctgtgggcaaacccaggtgagtgaagcttgttttcccaatgg

SEQ ID NO: 49454 - DNA, 599 bp, Chicken  19866894295484_1
  misc_feature (1)..(46): n is any nucleotide
nnnnnnnnnnnnnnnnnnnnnnnnnnnnnnnnnnnnnnnnnnnnnnattagagggggatatgggtgtatttaggtgcaacttttcctgctgcctttcccaggagggtcagcatagatgccctcctgcaacattcccaccccaccccactgctctggccccagacatgccccaggaatgcccacagggtgcccagggcagcacaggtggctctggctgggtgcacctggctgcagggcaatgcagcctcacatgcagggctgccaggagcttggcaggcggaggcgagaggcagcagatgygggctgtcagacggagcagatgcctcattagccacagcaccgtgctgcagcagccccgctcctgcccagctgtgctgaggggcagccagcagcagcctgcactggagaaatgaagttgttctttgcttctcccctttgttttctcctcctttccctgtgctgtgcaacagctctctgtgttcttcctcctcatcctcatcacatcaccattgcaaccatcctggcttagcccctgggcattgctgcatggagaaaaagcctgggagccaaaaagtgatcgattcctcactgcaaccatt

SEQ ID NO: 49455 - DNA, 600 bp, Chicken  19866894295490_1
gctttgtatatggtgatcgcattttgtagctctcccgtatagaaatgctttgtgatgcacagaaactagggagattgtgctaagattagcaaatctattcccatgttttcaaaaaataaatttaggcccaatctgaatcaaaatactgatcctaagtgaggtggtaaatgtgttttcccttacagtatttgatagatgaatggggaatatacagtttattatgtaattctactacttgaaattaagtgaatggatgcaaacaaagaagatcatttctctccataagcattcattgtgcartatctggtggtcttacctctgagagactgtaactaatgttgataaatgtttgtgttcttcctttgcagctttggtccacagacaattggttgtaccagagcatgtcaaatcccacgtaaaaatatagcaatagatcattggttttagggatagagttcagacaagtcaatttatttccattagaagatgaatcttaacttaaaactctgggggctacaaatactttgtccattatgttctcagtcattccggtgtgctttgctgtaacttaaggtgtttccactcatctgctttgcagct

SEQ ID NO: 49456 - DNA, 600 bp, Chicken  19866894295499_1
ttgttacagctctcttgaatgcagtatctgttcatttgttcaatattagattatggtaatcttaaaaatattcccttaaccttgcttcagtcaggactcagaagaataatctgcttcatgtgtggtacttcaggcagttaattaaatgaagcataagctatattatttacctagactgtctttttgtgtctgccaataatgtttaatgtttcaaaattaaattggccagaggaatggaagaatgtgctcagtggcttattatcctctaataagacattccttcgcttcacaaattcatamtcttcccaattctccattgtcttgcaccacttctatgccagaaaagcaacctgctgtgtgttgcaaaagcagacatgaacagacaccagcactgtggaagctctgatagtggtacaccagctctgagcaggctgcctgtgcctcttgggaaaaagcaacactgctgagtttgtaccttaatacaaaatctctgttcagtcctaaacctgacatgcctygacatgtgagcaagactacagctgatctgctataaagcaaataataaggtcatggttctgtctttgacaactattctactct

SEQ ID NO: 49457 - DNA, 600 bp, Chicken  19866894295499_2
aaattggccagaggaatggaagaatgtgctcagtggcttattatcctctaataagacattccttcgcttcacaaattcatamtcttcccaattctccattgtcttgcaccacttctatgccagaaaagcaacctgctgtgtgttgcaaaagcagacatgaacagacaccagcactgtggaagctctgatagtggtacaccagctctgagcaggctgcctgtgcctcttgggaaaaagcaacactgctgagtttgtaccttaatacaaaatctctgttcagtcctaaacctgacatgcctygacatgtgagcaagactacagctgatctgctataaagcaaataataaggtcatggttctgtctttgacaactattctactctgaccagttagaaacagctgggaacttagctggaactctgatctgtgagtaccaaagattccatgcaaactcatcttctacaagagtattccccaggtttcacccaggtttaacccttcagaaaaatctggaggatgcagatttcttcctgtgtatcttgatgttgtaaatgtgagctgactggtgtccacttctgattggttgagtaggactgcatat

SEQ ID NO: 49458 - DNA, 600 bp, Chicken  19866894295502_1
ggttaacacagctgtgttaatccctctagcatcacactttcccaaagccatcgtaacatcctggttagctaaaaggagagaggcagagaagtgcttggggacaggtgtctgctagagactgatcgactactcagggagaagaggagcctttaagcacaggtgttccctaacagggttcctctttatccccagccgcattgcaaggggaggtgctgggcaaggaggtggctatggagaagaagtgaaggcactgctcaggtttcatctgatagagcaaacagtaagtctcttgcctggtgraagagatggatgatgtgattttttgttgcttgggtagggctgttagggcaaggtgtaaggtataatctactctgctccactttcctacccctctgtgctcttcctacagctcctgctggccacagaagctggaggtggattcagcttgcaggaggtggaggacaaaagcagggaatgtgaatttaaagcaattcatcttaattggtggttgctgacgtgtgtccattctacaagtatatccttctggtttactatctgggcaggttattttcatcctgaacttatcactgaattccgcaa

SEQ ID NO: 49459 - DNA, 600 bp, Chicken  19866894295504_1
ggccccgcagggcaaaaggaaaaaagtctgcagagaatgaagtatttttttcccctgtttcccaacgtctgcagctatgcagcaatcctccgcctctctttccagatgcacttggaacaatgattaaagttatcctcaaacaatataaatagatctgcaatataaatagagcggccgtgctgctggacggggctggggatgaggagcagaggctgcagcccagaaaggagtgccatcagcagcctgtgggggcagggagctgggccgctatggggcagagcagcacacgggtgcatcacygaatcctaaccacgctccactgaggaaacacgcgtgacagcgtcgcaatctggcaagagacaaaaggaaacagctgaaacctcttccaattttaaagtctttccatgtttccacctgcattattgatggaggagagcagcagtgccacggccgcagtcccagtggccagcagtgactgcctacacagcacaccgtgcagccgggatgtgggggatgtgatggggcaaggaccccgacagcaagccacgaaggaccagaaaaactcaaatggattgccagggaagttcccagcgttgccct

SEQ ID NO: 49460 - DNA, 599 bp, Chicken  19866894295508_1
  misc_feature (1)..(64): n is any nucleotide
nnnnnnnnnnnnnnnnnnnnnnnnnnnnnnnnnnnnnnnnnnnnnnnnnnnnnnnnnnnnnnnngaataaggaaagcagagaggcaggaagggtctgacttctgaaataaataacggtgattttatatatatatatatatatatatatatataattcaagaataacaatcttatctattctaaatatataaatatttgttttagatccataaaatcctttgcagcaattactgtacagaaacttgtggctttgccatagaacgcttaaggtgccatcagtatcctttttacagctacccytttatttattgctgtgttaggaaggcagaggtcaggaaagacaatacgaagtggtctgctcactagcaaaacactgacactttggaggctatatcttaatttctccacaaattggtcctgagtcaacaatatactttagcaaactcctatcgttatgcactgaatatgccctaggatatatgcatccctgtactgaatctggagatgaatgtcctgtcattactgtactggtatacacatctttactgtttcttctaatttccttagaagacagggattcacaacatgctactacrgag

SEQ ID NO: 49461 - DNA, 598 bp, Chicken  19866894295508_2
cccytttatttattgctgtgttaggaaggcagaggtcaggaaagacaatacgaagtggtctgctcactagcaaaacactgacactttggaggctatatcttaatttctccacaaattggtcctgagtcaacaatatactttagcaaactcctatcgttatgcactgaatatgccctaggatatatgcatccctgtactgaatctggagatgaatgtcctgtcattactgtactggtatacacatctttactgtttcttctaatttccttagaagacagggattcacaacatgctactacrgagtctgtaattcagataatcagaggaccaacatagtgaccatatttgtcaaacaagagacatccagtttgggctagaaagctacaaatgaggtcatagttaggtgtacactagaagaacttgcaaatttgtagccattgaccctgttccccacagaaaacatcaatatctaaatgattatacttatgaacagtctaattaaagtcctgtttttttacatagaatattattaatattaaacttaaaatatatattctaaatactctaaattatctgaaacatttatcttatatatttc

SEQ ID NO: 49462 - DNA, 600 bp, Chicken  19866894295518_1
aaaacagtggctttagaaaaactgtgggaagaaagctcaaagttcttgggtaagttgtgatctttctagtaatgaattgctttgtttgataacagtcaaaggaatacttctatcttaaataaaattagcaaactcaagttttgcagatacaaaaataaaagccactttagtgattattattactgtggctgttctaaaatctcagctttctggagctgtactcttgttttattacttgattgttaagaaaatactttgtggtgaaggtttaaagataatcattattaattggagtatacrgttacttagtctagtgtgcgttcaagaataactatcagggtttagcaagaaagatctgttggtttgggtaacatacctagcatgtcttcccagttatatctgttttagtaggagatcacaaggataggatgcytgttttctcgaaccttgtgacccttaggggatcaaatcagccttgaactaaaagagtgagattggaaacaccatgttctgactttccccactctgctcccactcatactgctcatctgtactcatcatatacttgctgtgtagcaggtggttgtgatttcaagcagg

SEQ ID NO: 49463 - DNA, 600 bp, Chicken  19866894295518_2
tcaagttttgcagatacaaaaataaaagccactttagtgattattattactgtggctgttctaaaatctcagctttctggagctgtactcttgttttattacttgattgttaagaaaatactttgtggtgaaggtttaaagataatcattattaattggagtatacrgttacttagtctagtgtgcgttcaagaataactatcagggtttagcaagaaagatctgttggtttgggtaacatacctagcatgtcttcccagttatatctgttttagtaggagatcacaaggataggatgcytgttttctcgaaccttgtgacccttaggggatcaaatcagccttgaactaaaagagtgagattggaaacaccatgttctgactttccccactctgctcccactcatactgctcatctgtactcatcatatacttgctgtgtagcaggtggttgtgatttcaagcaggaagattgaggtgaagcagttgttttcatacctggctctgtgggggctaatacattcatctagtagttgatctgatgattttgtcttactgaaaagtgaatggtaatgcattttctttgtttctgtgataactg

SEQ ID NO: 49464 - DNA, 600 bp, Chicken  19866894295521_1
cctgtactcagcattcagactccagctctgtcactatcagaactgccttttacagatcacctaagaggaatgtgccgagcactagctgaaagacttattgtactactaataaggagggtttaaataccattacaattctgacttgtacttttaaatgtcaagaaatccgaagttaaggccctgccttccttctccctaagtactgccgaggcacactcagattacaggctgcagcagctactggatcacacagcacttttggcagctccagctttttgctcaagcacctttcccagaagyttggtcagcacaagggctgcagagaaggtttaaactctgaattataaatcctgataagcctaactcttcagactattcctttcagtcattgataaaaaacaacttggtgagtacatacatttaaataaggcaaccactgatcttcagttcccaaggggcttgtgggatagaattttaagatccacagagtgaatgtaagtttatatttgaaaattaaaaccacaaaaggctgtataaaaaatccttatgatcaaaaattgtagagcatcagtgtgtattactaacacacaaatgcagacc

SEQ ID NO: 49465 - DNA, 600 bp, Chicken  19866894295521_2
tactactaataaggagggtttaaataccattacaattctgacttgtacttttaaatgtcaagaaatccgaagttaaggccctgccttccttctccctaagtactgccgaggcacactcagattacaggctgcagcagctactggatcacacagcacttttggcagctccagctttttgctcaagcacctttcccagaagyttggtcagcacaagggctgcagagaaggtttaaactctgaattataaatcctgataagcctaactcttcagactattcctttcagtcattgataaaaaayaacttggtgagtacatacatttaaataaggcaaccactgatcttcagttcccaaggggcttgtgggatagaattttaagatccacagagtgaatgtaagtttatatttgaaaattaaaaccacaaaaggctgtataaaaaatccttatgatcaaaaattgtagagcatcagtgtgtattactaacacacaaatgcagacccttcattttatgggagagcagcctcctagtttggacacaacaatcttcaaaactgtttgttcttttctttgcattattttttaaaactagaattaaccag

SEQ ID NO: 49466 - DNA, 600 bp, Chicken  19866894295528_1
tgcaccaaggcaacagagggaaggcacttcaggctactactatgtgatgagggatgcagagacactgccattgtgcctgaccttgtagagcacttcaatgcatcccagaaggattcctcacttctccacctgctggtggtctttaatgcacatcaatgttataaacagcaacaacgcattttcaacaaccccaaagaaacccagaacaatagggatcagagtgggtacacagctacatggggaccttgcatgttccttcctgacaagccacagcctttctggatgcagttatagagcacrgtgaggaatccaactgaactgacgtggaaggacaggcgtccatggtggtcacagacacctactgctgacaytcartaggacaccaagttaatacacccaacttctctgacaactgctgcagaacttattcggctcagacgaaggcagcctgctagccatacagcttatctcactgcacaatcaattaggtgggtcttttataacgagctgcttttttccccttgtggttgcagtgaacactcccaagacctgatgatgaaaccactggaacacacacacactgctgctcccatgagttac

SEQ ID NO: 49467 - DNA, 600 bp, Chicken  19866894295528_2
tgtgcctgaccttgtagagcacttcaatgcatcccagaaggattcctcacttctccacctgctggtggtctttaatgcacatcaatgttataaacagcaacaacgcattttcaacaaccccaaagaaacccagaacaatagggatcagagtgggtacacagctacatggggaccttgcatgttccttcctgacaagccacagcctttctggatgcagttatagagcacrgtgaggaatccaactgaactgacgtggaaggacaggcgtccatggtggtcacagacacctactgctgacaytcartaggacaccaagttaatacacccaacttctctgacaactgctgcagaacttattcggctcagacgaaggcagcctgctagccatacagcttatctcactgcacaatcaattaggtgggtcttttataacgagctgcttttttccccttgtggttgcagtgaacactcccaagacctgatgatgaaaccactggaacacacacacactgctgctcccatgagttacacaggtgtatttgtccagtggaacttaacctttatattcaggagaacagataagcaaaaagccagcctacc

SEQ ID NO: 49468 - DNA, 600 bp, Chicken  19866894295528_3
cctgaccttgtagagcacttcaatgcatcccagaaggattcctcacttctccacctgctggtggtctttaatgcacatcaatgttataaacagcaacaacgcattttcaacaaccccaaagaaacccagaacaatagggatcagagtgggtacacagctacatggggaccttgcatgttccttcctgacaagccacagcctttctggatgcagttatagagcacrgtgaggaatccaactgaactgacgtggaaggacaggcgtccatggtggtcacagacacctactgctgacaytcartaggacaccaagttaatacacccaacttctctgacaactgctgcagaacttattcggctcagacgaaggcagcctgctagccatacagcttatctcactgcacaatcaattaggtgggtcttttataacgagctgcttttttccccttgtggttgcagtgaacactcccaagacctgatgatgaaaccactggaacacacacacactgctgctcccatgagttacacaggtgtatttgtccagtggaacttaacctttatattcaggagaacagataagcaaaaagccagcctaccagtc

SEQ ID NO: 49469 - DNA, 600 bp, Chicken  19866894295531_1
aatcactcagagcagccatcgcactggaaacctgcgatttcaaacatggtatttgctactgtcctttaacagactttttccagtgactcacagaggctgtgaagtcctctaatgacatgtcagagctacccgaacaaggacctctgtccttacgtccctccaaggtgattatgtttgattgtctctgctggcgttaccttgggaaacaggactaagagacaagacaggtctacttcatgattcccacctatagagctcttcttccttcagggttgagatttcccacccggccgcttacasggctcacagtgcagccatctctgactgaggaccatttcattacatttttctgatcccctttgtttccatgctggcgtccccaggaatcaaactcagctcagtgcctcagtgccatttcatttccagmactttctgttgaaaatatttttctttctacacagttgaaaatatgtctgcacttaaccctctgtgcacagacatccatctagagcccgaagaagaacgttcaaaaagccattcacaacaaccacagacagataaaagacatctattcaaatagcatacctgtacatatttatt

SEQ ID NO: 49470 - DNA, 600 bp, Chicken  19866894295531_2
acccgaacaaggacctctgtccttacgtccctccaaggtgattatgtttgattgtctctgctggcgttaccttgggaaacaggactaagagacaagacaggtctacttcatgattcccacctatagagctcttcttccttcagggttgagatttcccacccggccgcttacasggctcacagtgcagccatctctgactgaggaccatttcattacatttttctgatcccctttgtttccatgctggcgtccccaggaatcaaactcagctcagtgcctcagtgccatttcatttccagmactttctgttgaaaatatttttctttctacacagttgaaaatatgtctgcacttaaccctctgtgcacagacatccatctagagcccgaagaagaacgttcaaaaagccattcacaacaaccacagacagataaaagacatctattcaaatagcatacctgtacatatttatttggccttatttgaccaaaaaaaaccccattaatttaaacctagagtagaaaatgtctattggtagagattcaagtagttgtttgatcatattcttctcacctcaagagaaacaagcccagacacatc

SEQ ID NO: 49471 - DNA, 599 bp, Chicken  19866894295535_1
  misc_feature (1)..(81): n is any nucleotide
nnnnnnnnnnnnnnnnnnnnnnnnnnnnnnnnnnnnnnnnnnnnnnnnnnnnnnnnnnnnnnnnnnnnnnnnnnnnnnnnnacgtacacgtacagctgaggacatgctcccacagcacaggccagcaggtaggcatcctgctcatccccacaagtgtcagccccagagcgaggtctgacagggagctggaataaagtagaggaattaagaacctgccagtctgaacttccctggtgcacctgtacttaacagtggtaaaagccaactatgcaccaaccagagaggtgctgggctcatgcragagtctgctgtgcctccccctgctrtacatccaactgtttggtgttttcttagcatggagccaggaagagagtgacagctctcagctctgtgagstgatgtggctatgggcagcagggacatcccccagsaaggcactgacccmtctgacctctgcacaagaagagaggagtgggtccagaggctttgagtggggccagacacatggaataatcaatggcaatgaacaagggctaggacatgagctcaaacgcagatccctgcaggagggagattggtaataagcctcatcacagctc

SEQ ID NO: 49472 - DNA, 599 bp, Chicken  19866894295535_2
  misc_feature (1)..(55): n is any nucleotide
nnnnnnnnnnnnnnnnnnnnnnnnnnnnnnnnnnnnnnnnnnnnnnnnnnnnnnnacgtacacgtacagctgaggacatgctcccacagcacaggccagcaggtaggcatcctgctcatccccacaagtgtcagccccagagcgaggtctgacagggagctggaataaagtagaggaattaagaacctgccagtctgaacttccctggtgcacctgtacttaacagtggtaaaagccaactatgcaccaaccagagaggtgctgggctcatgcragagtctgctgtgcctccccctgctrtacatccaactgtttggtgttttcttagcatggagccaggaagagagtgacagctctcagctctgtgagstgatgtggctatgggcagcagggacatcccccagsaaggcactgacccmtctgacctctgcacaagaagagaggagtgggtccagaggctttgagtggggccagacacatggaataatcaatggcaatgaacaagggctaggacatgagctcaaacgcagatccctgcaggagggagattggtaataagcctcatcacagctctcacacagcagtctgaccacaggaaa

SEQ ID NO: 49473 - DNA, 600 bp, Chicken  19866894295535_3
tgaggacatgctcccacagcacaggccagcaggtaggcatcctgctcatccccacaagtgtcagccccagagcgaggtctgacagggagctggaataaagtagaggaattaagaacctgccagtctgaacttccctggtgcacctgtacttaacagtggtaaaagccaactatgcaccaaccagagaggtgctgggctcatgcragagtctgctgtgcctccccctgctrtacatccaactgtttggtgttttcttagcatggagccaggaagagagtgacagctctcagctctgtgagstgatgtggctatgggcagcagggacatcccccagsaaggcactgacccmtctgacctctgcacaagaagagaggagtgggtccagaggctttgagtggggccagacacatggaataatcaatggcaatgaacaagggctaggacatgagctcaaacgcagatccctgcaggagggagattggtaataagcctcatcacagctctcacacagcagtctgaccacaggaaacatgggtgtgccacatcagaactggccttggtcacaggcgcatgacctactgctttcacgtgttctcagcc

SEQ ID NO: 49474 - DNA, 600 bp, Chicken  19866894295535_4
ggcatcctgctcatccccacaagtgtcagccccagagcgaggtctgacagggagctggaataaagtagaggaattaagaacctgccagtctgaacttccctggtgcacctgtacttaacagtggtaaaagccaactatgcaccaaccagagaggtgctgggctcatgcragagtctgctgtgcctccccctgctrtacatccaactgtttggtgttttcttagcatggagccaggaagagagtgacagctctcagctctgtgagstgatgtggctatgggcagcagggacatcccccagsaaggcactgacccmtctgacctctgcacaagaagagaggagtgggtccagaggctttgagtggggccagacacatggaataatcaatggcaatgaacaagggctaggacatgagctcaaacgcagatccctgcaggagggagattggtaataagcctcatcacagctctcacacagcagtctgaccacaggaaacatgggtgtgccacatcagaactggccttggtcacaggcgcatgacctactgctttcacgtgttctcagcctcctttaagcaagctgaagtcttcattttcccctg

SEQ ID NO: 49475 - DNA, 600 bp, Chicken  19866894295535_5
ccccacaagtgtcagccccagagcgaggtctgacagggagctggaataaagtagaggaattaagaacctgccagtctgaacttccctggtgcacctgtacttaacagtggtaaaagccaactatgcaccaaccagagaggtgctgggctcatgcragagtctgctgtgcctccccctgctrtacatccaactgtttggtgttttcttagcatggagccaggaagagagtgacagctctcagctctgtgagstgatgtggctatgggcagcagggacatcccccagsaaggcactgacccmtctgacctctgcacaagaagagaggagtgggtccagaggctttgagtggggccagacacatggaataatcaatggcaatgaacaagggctaggacatgagctcaaacgcagatccctgcaggagggagattggtaataagcctcatcacagctctcacacagcagtctgaccacaggaaacatgggtgtgccacatcagaactggccttggtcacaggcgcatgacctactgctttcacgtgttctcagcctcctttaagcaagctgaagtcttcattttcccctggaacataaatagta

SEQ ID NO: 49476 - DNA, 599 bp, Chicken  19866894295537_1
  misc_feature (1)..(18): n is any nucleotide
nnnnnnnnnnnnnnnnnntaatggtttagctgagtaaggactagaaaacagggtgcttaaaggagcttgaaaggcagaagatctgtagacatgacagaatctcaatattacttcatttaaaatgagcgatagatgacacagggtaggcactgagatgcagaaggcataacttaacaggggtgataggtgcagaagagtaaatctttaaaaatcttatatattgttaatgaagaaaatcattatgctttgaagaattaacctacacggcattttccaaggaactagctaatggacatgggygttatcttttcatagtctttaaaatcccaataaacaatgcccagtccaacagtgggtttttacccctattaatagcatgcaatggaggtctcagtaaataacctgcgttcagattcacctccaaagaccacagaagatacaccaactctccaacagagaaacgggcgctgtcttattttctaccatctcatattgctcagtgctgcttcctgaaaggctttttgtactgtgaaaacaattcactgtttgttaccttttttgtgtgccctgaagggattttaggctaatactctcagata

SEQ ID NO: 49477 - DNA, 600 bp, Chicken  19866894295537_2
atgaaaaaacatgcaatagttttcaggaagcagcaaagacatctctgagctatccaaaagctgattttatcatggcagcttacatctagggaagaacaaacatgtgcttatttttgtaaatgtgttttcggaatgaaataaaactccagggaaatggcaaacagtccttctgactgataatgaccctgcacagtattctcctttttttagacctcaggaaaaacaggaatctgttctgcaattagaacatcacttgtgaattttttgacttcacgaagtaacacactttacatacctttytcctggctctcagctctcccaacttctctttccatgctctgcattcagagctcctcctcttgcatcagctcccagagttacccaggaaaacaatacctatggttgggcaggtcttccctgaatttaaccagaagagggagagaaacgtccccttctcacaaacagatatgccttgccatccatctctcatgtatacacaagatcaagacaatacagacaaaatccaaaggaatcaatgagtatctggattctattggtttaaaaagaacataaagggtaatagggttttaacatcttgca

SEQ ID NO: 49478 - DNA, 600 bp, Chicken  19866894295543_1
caaatctcacccccctagaaatacccctcacaggagaaatagctgagggattcagtggataggtgactcatggaaacctcagtgatgaatgggaaggaaaataacctagtttttcacgctgccatgtgacttgtcaaagaagacgaagtggcaaacctttatggaaaaggagattttccaaatgtgtcaaaaatgtcatcagggacagccatatctgactatataagctgagaaagcgttgtcctttctggaaaatgtccaccctcagggtgaggaggtgaacagcccaacaccacaatkctcctatgtaggtgcaactgggagaatcttgactgataartgtaatcttgcaggacatacagctgtcttctatttttcttttgcagttttattacttcaaacatgttttaatcagtgtatgacaaaatgaaatgttgcttatcagttatccctatttttcacagcaatgaactgatttactgtcactgggaagacattaggcaccataattctgatcattacaattgctggatacctcccagagtaccacgtgctgcagatggatcagggtgccccaacatcagtaagggaacgtccatt

SEQ ID NO: 49479 - DNA, 600 bp, Chicken  19866894295543_2
agctgagggattcagtggataggtgactcatggaaacctcagtgatgaatgggaaggaaaataacctagtttttcacgctgccatgtgacttgtcaaagaagacgaagtggcaaacctttatggaaaaggagattttccaaatgtgtcaaaaatgtcatcagggacagccatatctgactatataagctgagaaagcgttgtcctttctggaaaatgtccaccctcagggtgaggaggtgaacagcccaacaccacaatkctcctatgtaggtgcaactgggagaatcttgactgataartgtaatcttgcaggacatacagctgtcttctatttttcttttgcagttttattacttcaaacatgttttaatcagtgtatgacaaaatgaaatgttgcttatcagttatccctatttttcacagcaatgaactgatttactgtcactgggaagacattaggcaccataattctgatcattacaattgctggatacctcccagagtaccacgtgctgcagatggatcagggtgccccaacatcagtaagggaacgtccatttgtctgcaaacacgagctgtaagccaataagtttgtttac

SEQ ID NO: 49480 - DNA, 506 bp, Chicken  19866894295545_1
taagctaaaacgtttgaatttaaaatttgttccaattaaccccatcagacttagctagagaaatgtgagttagctagagaaatgtgagttgaacagttcctccagagttaaagtgaattgcagagccttgcctttttcttcatagaatcatagaaccataaaatggattgggttggaagggacctcaaaggtcatctagttccaactctcctgccatggacatggttgccaactgctacatcaagctctagatcaggttgcccagggaaaagatatttggaaattctagcaaatattaaygggtaggatatggtagctaggagcaaaataaagaggccttaaaagcaagctgatctgaagctggtgcctccgttgtaggaactctgtcttttggataatatttcagttacattttcaaacagataaaaaaaaatgaatttgaaacattcattccaaatctaattttaaaatcatcttcaatagaaattctacttttagatgcagaa

SEQ ID NO: 49481 - DNA, 600 bp, Chicken  19866894295547_1
atgagacctgagaagtacgaaagcacattttctcaaatctgaccagagcagattgcagttaatagcattgttgtggctgtaatggtgttagtgtgtacctgggcaaggctagtaaattacctgatacaattatggcaggctagactttcagctgaaatcatgcctgcttgttctaactacatcagttctattaaactgcattaattctctctcatggcaggttttgctgtcctgtcaatgagggatggctactgctgtgggcacatactggactatatggatcaaggtttcatgtgaaayggccattatggcgtttcagcaccgatctcacaactcttggtaatggcgagcaggttgtcacttgtggagtcatttttgttactaggcaaaaaactggaaatcctccttaatcattgtccctgaagttgtccagtgctttctcaagattctgggatgttggttgctggctgtgtctcaattctgttatttttatcctggcttctgaaattcttcttgcaggcttatgtggatactgatttactcttaatttcctggcctactctgttcccttgtgcttttgtgaactgttcatcagctttc

SEQ ID NO: 49482 - DNA, 600 bp, Chicken  19866894295547_2
aaaactggaaatcctccttaatcattgtccctgaagttgtccagtgctttctcaagattctgggatgttggttgctggctgtgtctcaattctgttatttttatcctggcttctgaaattcttcttgcaggcttatgtggatactgatttactcttaatttcctggcctactctgttcccttgtgcttttgtgaactgttcatcagctttcaggccccatgacagaggcagtcacacctcagggcaaagcagtaagcatggaatcaaaccaccactgaattcttctgtcgcaactactgrgtaatacgggtttgattcagagctaatagcaaagcaaggtggtgtaactgaacaagcaaaggttttctaaaggtagtgccctcttcaccctgctattcaagggatagagcaggattgctctaaggttgggaattagtgagagagttctttttcagtcctccaggtagctgataaaactggcacaaatgcaggaaagcttttagggaggtgtcaagtgtgggaatgcagtctgctggataatacgctgcacttgggctttgggattagaagatcccactgccaactttttaatgcagtagc

SEQ ID NO: 49483 - DNA, 600 bp, Chicken  19866894295553_1
agtgataccaaaatgtccctagctcagattcattctccttttctaatagaatcccttgaccacagaaagtgctacttttcctaaagtctgtttttaggggtatgtggatggtttttttttttgttgtcagtattggagtttatgcctgcagaagttgctgagcaaataaggaggagaaattacagagtataatgtgtgcaaggggagtgtagtggtagtaagaagtcacagcctgaagcagtgattgagcacctggtggaaggcagggccaagccaggggagctcaggtgcatgcaatgyagctgagtgactggaagggctggagccaggatccacctcttcccagacctcacttaagggttggcagtggaggtgagggtctctcttgctggagatccctgcccacctgaggccttccaagagaagcactctcctttgtttctgtgtccactggtgctgcatttcagcatatcctcacctgctgcagcctaggacttggctactctgctakcattgctgcagtttccattgtgttacagtgttatagggagttcttgtcaccttgcttttttagttagttcctgggaataatgttcaggt

SEQ ID NO: 49484 - DNA, 588 bp, Chicken  19866894295553_2
gtggtagtaagaagtcacagcctgaagcagtgattgagcacctggtggaaggcagggccaagccaggggagctcaggtgcatgcaatgyagctgagtgactggaagggctggagccaggatccacctcttcccagacctcacttaagggttggcagtggaggtgagggtctctcttgctggagatccctgcccacctgaggccttccaagagaagcactctcctttgtttctgtgtccactggtgctgcatttcagcatatcctcacctgctgcagcctaggacttggctactctgctakcattgctgcagtttccattgtgttacagtgttatagggagttcttgtcaccttgcttttttagttagttcctgggaataatgttcaggtgggaacgtactggagattagggtattgttctgatacatggaaagcacactagatacgacatgcttttcttagttgtgctctctggtgaacttttgttaattaaatttatttattctggatggataatactttaatataatggcaaaaagctatagagcttccctctcagcttttgatactatttgtgtaagattttgtt

SEQ ID NO: 49485 - DNA, 600 bp, Chicken  19866894295556_1
caactatgagatagaaaacatgaattgggtttactattgcttctgggctaaattggtgatatcaatatgaaatgatctgcagtaggttattttgcactgacatggaagtagaaacgtattcacactactttccatgctgaatgcaggagactgtggaagaggaagttgcaaaagggctcagaaataattcggtagataaaaatgcagatttcaatgtaagaaggcaagttctctggcttagacctgtctgacctgaactgtttggaggaggttaatacagtgcttgagcaatacgccatmgacaagttttatattggctaagccaagctgtctcagctgctgaacaaaaggctattgttttctaacacagtaagaattttgtcccagctgggaacaaagctagagagattcatttctatttcatttgagctgaacacaagaaaccttcaggaaaagcatatttatacatttaatcctgcctagagagttggattgtgagagtggttccaggatatgttccttgacattgttgaaagagtattagtgcactgttggtgtagrtgcttcattcttctctaytgggatttattttttttcccc

SEQ ID NO: 49486 - DNA, 600 bp, Chicken  19866894295556_2
ttggaggaggttaatacagtgcttgagcaatacgccatmgacaagttttatattggctaagccaagctgtctcagctgctgaacaaaaggctattgttttctaacacagtaagaattttgtcccagctgggaacaaagctagagagattcatttctatttcatttgagctgaacacaagaaaccttcaggaaaagcatatttatacatttaatcctgcctagagagttggattgtgagagtggttccaggatatgttccttgacattgttgaaagagtattagtgcactgttggtgtagrtgcttcattcttctctaytgggatttattttttttccccaaaagaaagcaagtttcttaatacagaagatctgtgataaaaataaaaggtagatatgcagaggtaacgatgcagcattggaaagtgaggtccattgggatgagagcagaaacttatgggctaggcaattacatagctgtcacataaggcacgtctacgaaaacaggagaggrgtcctaggagattcttaaactacctacaactgttttagtttaaaagcttttctatttaaagcctcttcagtggcacacaggagattcc

SEQ ID NO: 49487 - DNA, 600 bp, Chicken  19866894295556_3
gtgcttgagcaatacgccatmgacaagttttatattggctaagccaagctgtctcagctgctgaacaaaaggctattgttttctaacacagtaagaattttgtcccagctgggaacaaagctagagagattcatttctatttcatttgagctgaacacaagaaaccttcaggaaaagcatatttatacatttaatcctgcctagagagttggattgtgagagtggttccaggatatgttccttgacattgttgaaagagtattagtgcactgttggtgtagrtgcttcattcttctctaytgggatttattttttttccccaaaagaaagcaagtttcttaatacagaagatctgtgataaaaataaaaggtagatatgcagaggtaacgatgcagcattggaaagtgaggtccattgggatgagagcagaaacttatgggctaggcaattacatagctgtcacataaggcacgtctacgaaaacaggagaggrgtcctaggagattcttaaactacctacaactgttttagtttaaaagcttttctatttaaagcctcttcagtggcacacaggagattccctaacatccttcggcatt

SEQ ID NO: 49488 - DNA, 496 bp, Chicken  19866894295556_4
tcctgcctagagagttggattgtgagagtggttccaggatatgttccttgacattgttgaaagagtattagtgcactgttggtgtagrtgcttcattcttctctaytgggatttattttttttccccaaaagaaagcaagtttcttaatacagaagatctgtgataaaaataaaaggtagatatgcagaggtaacgatgcagcattggaaagtgaggtccattgggatgagagcagaaacttatgggctaggcaattacatagctgtcacataaggcacgtctacgaaaacaggagaggrgtcctaggagattcttaaactacctacaactgttttagtttaaaagcttttctatttaaagcctcttcagtggcacacaggagattccctaacatccttcggcattcctattctgagagctgccctgtgctatcccaggactgagaagaaaacatttcaagtacgttaaggcgaccttaattactaccctttctcc

SEQ ID NO: 49489 - DNA, 600 bp, Chicken  19866894295559_1
tctgctgagtaactgcgtattttgaaagggtttttatttcctctttcagctttgttttattcacccttcttaggacttgcaagtttttttgctgtagaatagatatttgatatacctcatatttatcttgtgttctgtggatgttcacagatgcaaaaagagtgcagttagcacagtgcaacacttgtattctgttcccaggtagtttttagaggtactgactgatttatccatctttcatttttgcattttacattgaaagctgcacacagccctctcagtttttaagttttattaccrgattcctcatgttcagaaattcattttggttgtttacagatcaccatccatatttttctaatagatttgcatacctccaaattctgtgtatgtttgcttaaaataatgtttgtttttgattgcggtttcaaagaatgttggaagcacccacaagaacatcaactagaaaagctgcatagcgctgtgtggaggttgagctgtttattcctctataacaaaaaaagatgctattttgcaaaataaatatgtggttcgtgaggttgtcaaagaacaaaaagctctttactgtttctgagaaaa

SEQ ID NO: 49490 - DNA, 600 bp, Chicken  19866894295560_1
tgttcagccactgaatgttgtgtttgctgtggacgtgcatcttaagtatgaagtggatggtgcttttggctttcaggttactgtcttgtggatgtctggagactagtaggtagcactgaggggagagaactgatgcactgatctatctctttccaaatataggagatacgagaggaatgagcctctctgacatagtttgagggtgggactgctgcatgatgttggacgaaatattttggctttcttactctattttcttcactgctaagtgagttgtgctctatgaatataggcctgaaraatctgttgaccttgcttacccattgttgctgcttacagtctcggcctgatgtcttggtgaatgtagtgctggatatttagtgaggtagggctgggaagcagtacaaataatctgtgacagggctgctttgtgtgtcattccaataggcttcttactactcggctgctgcaaagcttcatatcagcagcctctgcagatgttctctgtgtgtgtgtgtgtgcacgcgcatgtgatgctgtgtgtgtacggggccatgagaatgtgatgaagctacctgaatttcacgtccatttactttt

SEQ ID NO: 49491 - DNA, 571 bp, Chicken  19866894295562_1
actgcatgggcctatcggtggtgtgcaggttcacaccttgactgtggtgttaccttttcatcagcggttttctctgtgcccttctccagtttgcttctcccagggatttttagatgcagtcactgccctctcagactgagcagacacatgggagcttaaattattcctgggtgtttgcagtttgccactttaaatccctcctcagattatgcctctcacccctatttcccaccttggactgaagctcggtgtcgtgatcttgtctcccttttgaatacaggggctttgtgtttcccttgygcttctcctgagctcctcctgaggtggaaaccttcaagaggtcagggaaatgaggaaccatctgccttcatagcctggcagcttgttctgggggagatttccatgttgttttctcagcagctggcattgaaatcttgccaggaccaagtccctgggtatcccaaagcgatggggccatcagggcccaggtccagtgaatgctttgtgtagagacctcctgctgatgaggccatccatgcagttccagaaattctagctaattgcacaagag

SEQ ID NO: 49492 - DNA, 600 bp, Chicken  19866894295567_1
gacaccgggcttcctggccctgtgcctgcatcctgtgctcactgcctatcagccaggaaaccagtgctggccgtggcagggacgtgcgaggccacgtgaagtcctgcaaacaaatgcaaaccaagaatagtaaggacaaagtgctagaaaaattgctgatgggagttggagattgattaattacagatattttgtacattcagctgcaaagggggatgcctcctatactctccctgcagatactgttcctgtttaatatctactgttgtgttacactcaagcacttcgtgatttttcaaraagtttcattcaggaagtgagatctgagatcctttggagcctctgttactctttgaaacagctgttagattacttcctaccccaggacagaatgtccgttccttgctaagctctgtgtgctcagtttccatccattgtgttagtatatacggccaacataaaatgcagatttcaatgacctgtaacaagccattctgcccaccttccaaacttctcttttcctcatgtggtggctgtgggagctgacacgttgaggctaattgcagaacttttggcacaggctctttcaaatgacaaaag

SEQ ID NO: 49493 - DNA, 600 bp, Chicken  19866894295571_1
gtttttcttcttatcctgttttgtgggatgaatgcatttatttactttaaggacttccttccttcaattaaattgttttgtgtagcatccctgagtgaatttgaaagtataaatgcttatgttgttgcatctgggaataaaaaaggagacagaaatgggagtgaggaagaaagaacaaactgtgttgaagttaacaagtttttaaggccactgcaatatttagaatatctcagttagaagagatattccaagttctcatcctctcttcacagggcattccttcagccctgttatgtttgrttgccctcctttggatgctttctgggaccttaacagcccttttatattgaagagatcagaactgcatgcagtattcaaggtgaggctgcactaatgctaaatataatggaagaatttctagactgactggctatgctgtgtttcatgcagtaatcattttaaaatactccttcgttaaaaaatgaatttattgtgcatggctgttgtcagaaatgaaaatacaggggagctttgggcgagtccctgaaacacagagctttcctctgagagttccagcagcatggccaggagacaactgtt

SEQ ID NO: 49494 - DNA, 600 bp, Chicken  19866894295572_1
agtgaccacaagtatgttggtaggaattttttaagtaaaacagtttcctattgcaaaatgtacaaagttttacttcggtcacataactatcctgcttactcagaaagctggtgtcacagttgtaacaagatgttgatgggaaaaggtactatttcttctgaacacaaaagtagctgatgactgtagcatgtcaggaaatagcagagcccagcagaaggaaggcttctgacaggcagaagatatatgaaggaagaggatttctcaggctagtaagcagaaacctggctatctagctgtggraaggatgagagaataaagactgaagacaagaaaaatgaagaccatgcacaacatatctgtacacatttatatactgctgtcactgagcttttttcattttcaataaaggcatcatagaaacaaacaaaaatctatccaatttgctatgtcaaaattcatgtacaaaaacattttcctgtgacaataatttgtaatggaggaattcattatgcttcctctgtatattttacatcctctactttcctatgcccgactgagctcamcacttgtttctgtctccccattctccttgcttccaat

SEQ ID NO: 49495 - DNA, 550 bp, Chicken  19866894295572_2
aggctagtaagcagaaacctggctatctagctgtggraaggatgagagaataaagactgaagacaagaaaaatgaagaccatgcacaacatatctgtacacatttatatactgctgtcactgagcttttttcattttcaataaaggcatcatagaaacaaacaaaaatctatccaatttgctatgtcaaaattcatgtacaaaaacattttcctgtgacaataatttgtaatggaggaattcattatgcttcctctgtatattttacatcctctactttcctatgcccgactgagctcamcacttgtttctgtctccccattctccttgcttccaatataacaaatctttttttccagggtgtcagaaacccaattcttctctcccatacaagctctctgtaatggctgagaaatgcagcaaaacacatccaagtagaatttcagatgcactatttatttttgtgtttcatgtgctcacaggtagataatggaatattaagcttaatataggatggctctattgctttctgaagtacaaccgttaaagct

SEQ ID NO: 49496 - DNA, 600 bp, Chicken  19866894295575_1
ctaccttgccttttattccttttcctttccttgcctgacctgaccttgccgtgcctggtcttgccctgctttgccttgccctgcctggctttgcatacctagcctggcctcagaaggcctatcctttcctggcctgcctggcctggcctgaccttgcattgcctggcctggccgggcctggcctttcttcgttgagcatagcctggcctggccagttccggccagggctggccatacctggcccagccttaccttgccgtgaaagacctcgcctggccttgcctggccttgcctggcctkgccttgcctggccttgccttgccttgcttgaccttgccttgctcttcctggcctggtttggcctggccttgccttgcctttccttgccgttttttgcactgcttggccttgcctgtccttcctttgccttgagttgtttggccttgcctgcgattgccttgccttgcctggcctggcctttcctggcctttcctgacctttccgtgcctgcgattgccttgcattattttgccttgccatgcattcctggcctggcctggccttgccctgactttcctctcctttccttgacttgccggg

SEQ ID NO: 49497 - DNA, 600 bp, Chicken  19866894295593_1
ttgggctattcccatgagcctgattctgctgctgcacaatggttgggagctcagcttcttatcagcaagaagatcagaatttccccacttcagctgggcagagtgccaaaagaactaggagtaaataccagcataatcaatgttacattttatcccatccctaacccatgcatcaacttaaatccttgtggctattattatatttaatgccaataacctagtaataatcttattacagctgtagcttcaatgaagtacttaaaacgtcacaaaggcttgtaaagtgtaatcaatttaacsgtcgattatcagatttggggtgttttccatatacatggctaataaatcctgaaatgtattttaaaagcccaacaacaaataaagatgatgaggctataaaagaccttatttatttaagatactttcatggctaaaaaagccagcaagtacatctggcctttgtgtaaactttgaagcctgcaatgacgaaaaagtcccacaaaatatatccctggacttctacattttcaagaatagaacaagcttgtctggcagcatttacctgagaatgagtactcagccaaaagcagaaacaagagt

SEQ ID NO: 49498 - DNA, 599 bp, Chicken  19866894295597_1
  misc_feature (1)..(170): n is any nucleotide
nnnnnnnnnnnnnnnnnnnnnnnnnnnnnnnnnnnnnnnnnnnnnnnnnnnnnnnnnnnnnnnnnnnnnnnnnnnnnnnnnnnnnnnnnnnnnnnnnnnnnnnnnnnnnnnnnnnnnnnnnnnnnnnnnnnnnnnnnnnnnnnnnnnnnnnnnnnnnnnnnnnnnnnnnnctgggctgaaagtctcctgtgtatagaaccattaatacgaaatgacatataagcaaagggaatagttgagtagatattattttgatttctggtatggatcaccagttttagaccacagttgtctgcgagygttccatgtggggaaagcctgttagcttcaattaaaattttacacagagaatgtgtggcagtgcaagtcttytaatgaagagattgaacgtattactatgagctttcttcgtagtggagataactccacttcctcagctcattcccactgcacattatttagcgttaggaatattgtatttagcttcatcctataaaggggttattacatacaaaatatatgtgattaaaatgaattcttrtttcgtcagccatgtattagttctatgttctgtctttgataacactgcatatatttgs

SEQ ID NO: 49499 - DNA, 599 bp, Chicken  19866894295597_2
  misc_feature (1)..(98): n is any nucleotide
nnnnnnnnnnnnnnnnnnnnnnnnnnnnnnnnnnnnnnnnnnnnnnnnnnnnnnnnnnnnnnnnnnnnnnnnnnnnnnnnnnnnnnnnnnnnnnnnnnctgggctgaaagtctcctgtgtatagaaccattaatacgaaatgacatataagcaaagggaatagttgagtagatattattttgatttctggtatggatcaccagttttagaccacagttgtctgcgagygttccatgtggggaaagcctgttagcttcaattaaaattttacacagagaatgtgtggcagtgcaagtcttytaatgaagagattgaacgtattactatgagctttcttcgtagtggagataactccacttcctcagctcattcccactgcacattatttagcgttaggaatattgtatttagcttcatcctataaaggggttattacatacaaaatatatgtgattaaaatgaattcttrtttcgtcagccatgtattagttctatgttctgtctttgataacactgcatatatttgsagatactgttggttaatatttaagtaaaaaaattaaattgtttcagtaatcagttgtttataaaaaaactat

SEQ ID NO: 49500 - DNA, 600 bp, Chicken  19866894295597_3
agatattattttgatttctggtatggatcaccagttttagaccacagttgtctgcgagygttccatgtggggaaagcctgttagcttcaattaaaattttacacagagaatgtgtggcagtgcaagtcttytaatgaagagattgaacgtattactatgagctttcttcgtagtggagataactccacttcctcagctcattcccactgcacattatttagcgttaggaatattgtatttagcttcatcctataaaggggttattacatacaaaatatatgtgattaaaatgaattcttrtttcgtcagccatgtattagttctatgttctgtctttgataacactgcatatatttgsagatactgttggttaatatttaagtaaaaaaattaaattgtttcagtaatcagttgtttataaaaaaactatattttaataagacttcactttatttggaatgaacttctagggtttttttgtttgtttgtttgttttaatttttacttttttatttcccttctttacctgaagataaaaggaggcttctctgtctctagtggtaatattgggcaagatcctcccatcctaagagaaatttt

SEQ ID NO: 49501 - DNA, 600 bp, Chicken  19866894295597_4
ygttccatgtggggaaagcctgttagcttcaattaaaattttacacagagaatgtgtggcagtgcaagtcttytaatgaagagattgaacgtattactatgagctttcttcgtagtggagataactccacttcctcagctcattcccactgcacattatttagcgttaggaatattgtatttagcttcatcctataaaggggttattacatacaaaatatatgtgattaaaatgaattcttrtttcgtcagccatgtattagttctatgttctgtctttgataacactgcatatatttgsagatactgttggttaatatttaagtaaaaaaattaaattgtttcagtaatcagttgtttataaaaaaactatattttaataagacttcactttatttggaatgaacttctagggtttttttgtttgtttgtttgttttaatttttacttttttatttcccttctttacctgaagataaaaggaggcttctctgtctctagtggtaatattgggcaagatcctcccatcctaagagaaatttttcagattttcattttgacctgcaatttattatcacatccaatacacttcaattgcctt

SEQ ID NO: 49502 - DNA, 600 bp, Chicken  19866894295598_1
ctgccttttattttcccatcccctgaagaaggccgtgctaccagcaggcctggaaacgctgcgtttgatgcctgctggagcacccaaagatggatggtccatgggggacctcagcggggcttgggtcagcctccagctgcagaacccactgctctggggcagtgacaacactgcccagctgctccaggcaagtatttcccaggaaatactgaggtgatgggccaaggaccactctacccctgcatccccatcatttgctgccatgcacgaaatggtggcccatccctagggcggcatttragctcagggatgctgttactctacgttttctttggcagaagatcatccccaaagcatccccaagcatggggctgagcggcctcacaccggagctccagcactgggggggtcgatgggtcccagccccgtgctggggtggctgcagggctgatggctgtggggctggtgcctgcttggggccactcggttctcctggctccatccttctgagaatgctctggtggctgttcgtgagcctggaggaaggcccacgctgggctgctgccaggctttgattacaaatggcctttttaagccatt

SEQ ID NO: 49503 - DNA, 600 bp, Chicken  19866894295599_1
tacacttctctggggtcatttggaaactctctgcacttacacttccctttgcctctaccaagcctgtgctggtcactcagatataccacactgtaaagagcaaagcacccataaggttcatgtaggggagctaagaaagaacatgcgatgctcccaaggaatggagatacactgaatttcacttattcagctctgccagggagagatacggttcaaaataaggctaaatgaatgattaaaacctgcagtttggtgatcattttaattgaaacttcagtggaataaaggggaaaaatatcrtcttttttcagtcaaaagttaaatacacatttggtctggaaggcaatctaggcatcagtgaaaggcagggaaaagaaaggactgatgccctcataaccacgtgtcacaggacattctctgttagctcartagacrcttcgactttactctggctaagtcacaaacacgagatttttatccaaatttacagtgcattttcagatttgctggccatgcccatgaacaagaaggtgcctcttttgtttcgagaagcccttgaactgccagcatcccaaggrccatgctggaggtctgctcgcc

SEQ ID NO: 49504 - DNA, 600 bp, Chicken  19866894295599_2
gctaagaaagaacatgcgatgctcccaaggaatggagatacactgaatttcacttattcagctctgccagggagagatacggttcaaaataaggctaaatgaatgattaaaacctgcagtttggtgatcattttaattgaaacttcagtggaataaaggggaaaaatatcrtcttttttcagtcaaaagttaaatacacatttggtctggaaggcaatctaggcatcagtgaaaggcagggaaaagaaaggactgatgccctcataaccacgtgtcacaggacattctctgttagctcartagacrcttcgactttactctggctaagtcacaaacacgagatttttatccaaatttacagtgcattttcagatttgctggccatgcccatgaacaagaaggtgcctcttttgtttcgagaagcccttgaactgccagcatcccaaggrccatgctggaggtctgctcgccctctgcctcacagttgccctggacattcactgccagccatggacatgtgcttacagtgggcttcacaatgagtcaccccaacatccaatttcccagtcctttcctccatgttgttaatcttattcactg

SEQ ID NO: 49505 - DNA, 600 bp, Chicken  19866894295599_3
aaagaacatgcgatgctcccaaggaatggagatacactgaatttcacttattcagctctgccagggagagatacggttcaaaataaggctaaatgaatgattaaaacctgcagtttggtgatcattttaattgaaacttcagtggaataaaggggaaaaatatcrtcttttttcagtcaaaagttaaatacacatttggtctggaaggcaatctaggcatcagtgaaaggcagggaaaagaaaggactgatgccctcataaccacgtgtcacaggacattctctgttagctcartagacrcttcgactttactctggctaagtcacaaacacgagatttttatccaaatttacagtgcattttcagatttgctggccatgcccatgaacaagaaggtgcctcttttgtttcgagaagcccttgaactgccagcatcccaaggrccatgctggaggtctgctcgccctctgcctcacagttgccctggacattcactgccagccatggacatgtgcttacagtgggcttcacaatgagtcaccccaacatccaatttcccagtcctttcctccatgttgttaatcttattcactgactccc

SEQ ID NO: 49506 - DNA, 600 bp, Chicken  19866894295599_4
ggaataaaggggaaaaatatcrtcttttttcagtcaaaagttaaatacacatttggtctggaaggcaatctaggcatcagtgaaaggcagggaaaagaaaggactgatgccctcataaccacgtgtcacaggacattctctgttagctcartagacrcttcgactttactctggctaagtcacaaacacgagatttttatccaaatttacagtgcattttcagatttgctggccatgcccatgaacaagaaggtgcctcttttgtttcgagaagcccttgaactgccagcatcccaaggrccatgctggaggtctgctcgccctctgcctcacagttgccctggacattcactgccagccatggacatgtgcttacagtgggcttcacaatgagtcaccccaacatccaatttcccagtcctttcctccatgttgttaatcttattcactgactcccacctcgcatcattctgtttacaaatgctcctggctgactcgaggctcctcacacatctccctctcccaaaatacgatacactttattttagagatgtttaagagctcacgcaggtggtagccatcagaaatagctccctgtta

SEQ ID NO: 49507 - DNA, 600 bp, Chicken  19866894295600_1
acttctgcttgaagtacttcgaatgggaaatattcttgcaggtttaaaattactcatgttataaattaatggcaagtgttatcatactatgttacagatttggagttatataatttcatgtaaggattggaaaattctgcttagaacttttctgggcgacataggagaatttgttaaggggataagtatccaacctgaatttatgaaatcaaagtaagtattaaaaagcttatatgattgagattgttaaggaatgggcaaatcatttgcatcaagaaatcgacatctgaatgaaatgtktatctttcagagtaccagaaatcagttcatgcactgcatcttaaaataagtagttaaaatgaaacatgagttagcacataaaattgttacagataaggctagtttaattccagagtattctggaagtgtgaaataatttcagatgagccatgttttaaaataatcacgtataatcagcttgttggtagcaactatccattcaattcagatgctgatttaatgtgagattgctcctctgattaaaaaaaaaagagatgaaaatagacttttgggaaggaatcatgaaaggcatttagggtc

SEQ ID NO: 49508 - DNA, 600 bp, Chicken  19866894295603_1
gtctcaccacagccctccctggggtcagagtttgggcacactgtgctgccagacatccctcacctcagcctgcagtgacacacaactgtgccacacacaaaatgacctgagcttcaaaaaggactgagcgtcttggtggagtgtgcagcaattcagaagggatttaaagagcagggaggaaagacatgcactaaatacaataaacacaaccattgcaaaggcattggattgcacagaatatccaaggacaaaaaggagagagcagtaaagaagctgctgggaagagaaatgccagtcacwatgccttttcctgaagaaagggcatgtgcaggcaaaggatggctctgtgagtggcatttccattatctcaagaaatgaaaygggacagggtttctgtgtgctgttgtgagcaccatttgccagcgttgtagcaatctagtgaattcattttcccatttgttgtaaacacactgacacagcagacgtgtgactaacattgctcgagtctgtcaggacaasggttactgctgcacttccttctgacggagactgaagctctgcggctgagtccaccgctctgagctctgagcccactgctgc

SEQ ID NO: 49509 - DNA, 600 bp, Chicken  19866894295603_2
acaactgtgccacacacaaaatgacctgagcttcaaaaaggactgagcgtcttggtggagtgtgcagcaattcagaagggatttaaagagcagggaggaaagacatgcactaaatacaataaacacaaccattgcaaaggcattggattgcacagaatatccaaggacaaaaaggagagagcagtaaagaagctgctgggaagagaaatgccagtcacwatgccttttcctgaagaaagggcatgtgcaggcaaaggatggctctgtgagtggcatttccattatctcaagaaatgaaaygggacagggtttctgtgtgctgttgtgagcaccatttgccagcgttgtagcaatctagtgaattcattttcccatttgttgtaaacacactgacacagcagacgtgtgactaacattgctcgagtctgtcaggacaasggttactgctgcacttccttctgacggagactgaagctctgcggctgagtccaccgctctgagctctgagcccactgctgctgtttgctttctctcaggctcaggtttcatttttcagtgagttttagatatttaatctcaagataatgatctaaaccaaca

SEQ ID NO: 49510 - DNA, 546 bp, Chicken  19866894295603_3
ggcattggattgcacagaatatccaaggacaaaaaggagagagcagtaaagaagctgctgggaagagaaatgccagtcacwatgccttttcctgaagaaagggcatgtgcaggcaaaggatggctctgtgagtggcatttccattatctcaagaaatgaaaygggacagggtttctgtgtgctgttgtgagcaccatttgccagcgttgtagcaatctagtgaattcattttcccatttgttgtaaacacactgacacagcagacgtgtgactaacattgctcgagtctgtcaggacaasggttactgctgcacttccttctgacggagactgaagctctgcggctgagtccaccgctctgagctctgagcccactgctgctgtttgctttctctcaggctcaggtttcatttttcagtgagttttagatatttaatctcaagataatgatctaaaccaacaacattctttcaatcttcagttgctgtcaatgtcaattcagcactgagccttttccaaataatacagtaagaacgatttttaccc

SEQ ID NO: 49511 - DNA, 600 bp, Chicken  19866894295605_1
tcatttggaagaggaaagcagatcactcctcctacagagctgtattttacataacaattctgtgctatccttatctggttccaacacctaatgagaccagggttcaatattcattctagaatatctggcctaccgagtattctgagaatataattaacacgtccctttttcaccctttgtaatctttgctgcataacatagtttgaaaaaagatgccagctctgcaaatcaattttctgacttttgggtcagcatataaatttttataaaaattcgtaacttatttttaagtgaatctgkttttttttgtttgtttgtttgtttttttttacacctgctcctggtttatacaatgtctacatggaaaaacaaatagcagcttctcattttcatgcagtggcagatacacttgctattatactcctgcagctgagaccaactctgagatctatcagaaatacctgctaactgtagagacaaaaatatcttctggcctctttattactgatctatatgccttacagagccagcactacaagtgaaaattgagctgcactgcaatcaggctcaagtaccctctgaactttaacagctgtccat

SEQ ID NO: 49512 - DNA, 600 bp, Chicken  19866894295609_1
ccagcaggtcttcgtgggaaagagatcttgtcaaatgaacctgattttgctctttagtgaatgcaggctgagttgtaaaagcactgcgtgcacacgcagcctgtgcagtcggagcgctcagtgcttcgtgacgctctggttttaaaagatagtactacatggtgccaacgaagcacactgaataggctgggagctggctggcagatcccaaacagagcagggaactgcagagaggtgttctcagcgagctccaggggagcgtgcttggggtgatgggggagaaaacagaatccttgctcygaaaatgagtggatgacagaaagatgggtgcaacagtaaacactgaggggcaaagagagaaatgtgggatgcctgatggtgctgagctgagcgtgctgaggctgcccagcaccgtggaatggatcccagccacgttcaggggcagagatttgtcccagcgagggaggggctccgggggtcaccacgggtgaacagccctgcacaaggccctaatgtggtgctgcggcaaaaagggctgatgtggttcttgtgggagaggggaggtacctaggtgtgctgctgagggtggcaggagagccc

SEQ ID NO: 49513 - DNA, 600 bp, Chicken  19866894295613_1
tccaatgtactaggaatacagtgcttacccagactgaaggaatgtcagcaaaaatcccgtaacaatggggaactccgtctgctcccctgctactatgcaattgtttgtagttgttgaaagagccttaaagctgatcaacggtaaggcttccacagaatgagcttgaatcctgatgacttatggaaattatttaaagctctgtggtatacttttagtatagggccaagctttctgcactgctaatgaaatctgtagcatctgaactggaaaactttactgcaaactcttatccaacaggtkcatttttgcacatagtgcatgtatgaaagaaaactttaagtcagtatatacatcatgacaataagaagtttatttgggttttggttttaggttttttgttgttgttttgttttgatttttgtttcaaagaacagtatgtctagattctgatgctaggtagcaatccacgacacaatgcccagacatgggtcagggaacagcatatgccagggatcattcccaacacccagcatcagcccttggttctccctgcaaaagagtttccaaagtatttgcaccatgtgacacttcttcataccc

SEQ ID NO: 49514 - DNA, 599 bp, Chicken  19866894295615_1
  misc_feature (1)..(140): n is any nucleotide
nnnnnnnnnnnnnnnnnnnnnnnnnnnnnnnnnnnnnnnnnnnnnnnnnnnnnnnnnnnnnnnnnnnnnnnnnnnnnnnnnnnnnnnnnnnnnnnnnnnnnnnnnnnnnnnnnnnnnnnnnnnnnnnnnnnnnnnnnnnncccccaacagaaccatggcttgaccaggggtccacagcgcacacaaacttcttttttcccctttggatcaagcagcagcagcaacatcacgcttgcggagaagcagagctgcacagcaggccggctcctgggatggcggggaaggcagacccaacgcacrcagcagcrgtgccaggcacgaagcaggtccggtgggggcaccgaagcagcgcccaccctgcccccaagggccccgtggtttcatttctcccttctcatttttctattgagatgctactgagagttcagctcctgtgcagcatttacagtgggagagcaaagatgcgcacagaaacgtaaccgctggagcccatatgtgtccccatacattgcacgcagcaatactgagatgagctgtaaggctgtgcgatggcgccagcagaagcgtctcactgtcgctctcaggtgttgtctgagccg

SEQ ID NO: 49515 - DNA, 599 bp, Chicken  19866894295615_2
  misc_feature (1)..(132): n is any nucleotide
nnnnnnnnnnnnnnnnnnnnnnnnnnnnnnnnnnnnnnnnnnnnnnnnnnnnnnnnnnnnnnnnnnnnnnnnnnnnnnnnnnnnnnnnnnnnnnnnnnnnnnnnnnnnnnnnnnnnnnnnnnnnnnnnnnnncccccaacagaaccatggcttgaccaggggtccacagcgcacacaaacttcttttttcccctttggatcaagcagcagcagcaacatcacgcttgcggagaagcagagctgcacagcaggccggctcctgggatggcggggaaggcagacccaacgcacrcagcagcrgtgccaggcacgaagcaggtccggtgggggcaccgaagcagcgcccaccctgcccccaagggccccgtggtttcatttctcccttctcatttttctattgagatgctactgagagttcagctcctgtgcagcatttacagtgggagagcaaagatgcgcacagaaacgtaaccgctggagcccatatgtgtccccatacattgcacgcagcaatactgagatgagctgtaaggctgtgcgatggcgccagcagaagcgtctcactgtcgctctcaggtgttgtctgagccgacaaacac

SEQ ID NO: 49516 - DNA, 599 bp, Chicken  19866894295618_1
  misc_feature (1)..(195): n is any nucleotide
nnnnnnnnnnnnnnnnnnnnnnnnnnnnnnnnnnnnnnnnnnnnnnnnnnnnnnnnnnnnnnnnnnnnnnnnnnnnnnnnnnnnnnnnnnnnnnnnnnnnnnnnnnnnnnnnnnnnnnnnnnnnnnnnnnnnnnnnnnnnnnnnnnnnnnnnnnnnnnnnnnnnnnnnnnnnnnnnnnnnnnnnnnnnnnnnnnnccgtggcaccatgtccccattgtcactcacccaggatgagggccaccaccattggtgccatgaggcaggagcagcttggggacaacgagaatgcagtggggacarggagtgaccagagaggcaatctcatttcctctttggggacgggatggagacatgaagtctccacctcatgtgataaatagccgtcatgtgtggtggcacttttggtttcccagtgacaaacagagagcactgcacagagcccccattgctgtgccccacgcaggctgtcacctctcaagtccccaaggagcccccatcatgtggccttgcactctgtcccccataggatgccagacacactatacatggctccaatgggctgtcccacatggcatgccacgtgccatccccagcacatc

SEQ ID NO: 49517 - DNA, 496 bp, Chicken  19866894295623_1
acaatagttactttatccctacattagcctgggaaggcctcatctgctcaaaagcagagaccataaggaagggtgaatgcacttcaaaagaagggacacagataatttctgaatatctgcattcccctcatttattttgccaccttcctgcacctgtagctgttgaaggaagaagccctttgtagtacagtcactgaatgggcttgagcaccatccctgctgacaaaaagaggatgcagaccagtgccaaacagagcgcaagaagtgcagttcaccagaactcagtgttagtctcaaccrgacaagggctgggcaatcactccatttaaggcatctatccactccctctgctccttatcgttctcacacagaaacaaaaagtctctcgctggcgtgaccatggtgatccctgatttcctcttctttacagatattccctggggcaagccagctcgtacttcatagccctcaactctccttccaataaaaacttggc

SEQ ID NO: 49518 - DNA, 600 bp, Chicken  19866894295627_1
agtgctgggccacagcgttatgtgctgcccacagcaggctcagtgcaagatgcttccctgttaaaaatgctcaaacgtcctgagttcagttgttcagctgctgatattcaggtgtgtatacagcagtgtgcaggcttgcggtggtgttgattggcagctctgtaagctcttcatgaaaagatgttgatgcatgagctggaaagctgaaagagacactgctcccttacaaagggatcctacagacaccctagcagggacttgaggcttctgctactgctggttgtcctgtgctgctctccrgagggctgactcagtgcagaaatcttgctttgaaaagtgtgatctgaagcatctgagtgtcacttcagactttgcttgggaagggagaagaagagaaaggtgagctggggaatcagagcagtggggcggcttccaagggaagttgtaaagcagtctttgtcttgtgcctgtcatcagctagtcacaaagaggctttgctttgttactataatttttctttttcagtgacagacattaaagttgaaaaaagataagtagtgagtcttgtagcaagtctgaaaacgggggtcagactgtaac

SEQ ID NO: 49519 - DNA, 600 bp, Chicken  19866894295647_1
attagcacaatgatagcaactgcgaaagttgtgtcaaaatatcaactctgattttctttttcctgagaagcttacagtgaacagttctttgcacgatcagattttcttttattttcttgagttgcaaagaagaactttcaatgcaatatcattctctcagcaaaatgagtccttggagtccttctctttttttgttgttctactttttcttttttcagacttctatttctctctcatttgaattatttttctagatatttatcattatttcttgtttgtgtatgtatttgagtcactgtmttttaaatcttaatgcttaaagtaatctggaatggaggaattcattttaataccttttatcaaataacacagtaagtgaaaatcaatttattttatgtaattcatcctaagtagccatttatttgctatttcattgtataaaactttctcaagcttcctgtattacttcattagaagtcgatcgatgtgtaaaagtaaggcatagctcagaaggcaaaaggagcatgcggctggaaagaaagtgtgccagactcatgtctgatcagtagtgctgttgataacctcatttgggtcatcatc

SEQ ID NO: 49520 - DNA, 599 bp, Chicken  19866894295648_1
  misc_feature (1)..(123): n is any nucleotide
nnnnnnnnnnnnnnnnnnnnnnnnnnnnnnnnnnnnnnnnnnnnnnnnnnnnnnnnnnnnnnnnnnnnnnnnnnnnnnnnnnnnnnnnnnnnnnnnnnnnnnnnnnnnnnnnnnnnnnnnnnnccgaagggcccaaggagctaggatagaacagaattaggacagctgacttaaactggccaaagagacattcccatactgtatgacatcatgcagatacagttttgaaagaagtgggaattgatctcactctcttccactgcttggggtggctagctgagcattggttgggggatagtragtaattgcttgtgcatcacttgttaatttaggtatatatttatgtgtgtgtgtgtgtgtgtgtrtatatacataatcactcmtaattagtcataattactatcctttttcttttctctgtcttagtgaacagttttatctaaacctgtgagttctacttcttttttcttttctttccttctgttctctccaccatcccactgggaagggtgcaagagactgtttggtaattaactacctgctgggttaaatcacaacaggagttttttctgtttctgtcactatcttgcaaaaaagtt

SEQ ID NO: 49521 - DNA, 599 bp, Chicken  19866894295648_2
  misc_feature (1)..(58): n is any nucleotide
nnnnnnnnnnnnnnnnnnnnnnnnnnnnnnnnnnnnnnnnnnnnnnnnnnnnnnnnnnccgaagggcccaaggagctaggatagaacagaattaggacagctgacttaaactggccaaagagacattcccatactgtatgacatcatgcagatacagttttgaaagaagtgggaattgatctcactctcttccactgcttggggtggctagctgagcattggttgggggatagtragtaattgcttgtgcatcacttgttaatttaggtatatatttatgtgtgtgtgtgtgtgtgtgtrtatatacataatcactcmtaattagtcataattactatcctttttcttttctctgtcttagtgaacagttttatctaaacctgtgagttctacttcttttttcttttctttccttctgttctctccaccatcccactgggaagggtgcaagagactgtttggtaattaactacctgctgggttaaatcacaacaggagttttttctgtttctgtcactatcttgcaaaaaagttaatgctgctgttagcatgaagctttacctttcttctgtttgaatgcaggactacttgtcttgtcc

SEQ ID NO: 49522 - DNA, 599 bp, Chicken  19866894295648_3
  misc_feature (1)..(40): n is any nucleotide
nnnnnnnnnnnnnnnnnnnnnnnnnnnnnnnnnnnnnnnnccgaagggcccaaggagctaggatagaacagaattaggacagctgacttaaactggccaaagagacattcccatactgtatgacatcatgcagatacagttttgaaagaagtgggaattgatctcactctcttccactgcttggggtggctagctgagcattggttgggggatagtragtaattgcttgtgcatcacttgttaatttaggtatatatttatgtgtgtgtgtgtgtgtgtgtrtatatacataatcactcmtaattagtcataattactatcctttttcttttctctgtcttagtgaacagttttatctaaacctgtgagttctacttcttttttcttttctttccttctgttctctccaccatcccactgggaagggtgcaagagactgtttggtaattaactacctgctgggttaaatcacaacaggagttttttctgtttctgtcactatcttgcaaaaaagttaatgctgctgttagcatgaagctttacctttcttctgtttgaatgcaggactacttgtcttgtcctctagatgttgtttgtta

SEQ ID NO: 49523 - DNA, 599 bp, Chicken  19866894295652_1
  misc_feature (1)..(122): n is any nucleotide
nnnnnnnnnnnnnnnnnnnnnnnnnnnnnnnnnnnnnnnnnnnnnnnnnnnnnnnnnnnnnnnnnnnnnnnnnnnnnnnnnnnnnnnnnnnnnnnnnnnnnnnnnnnnnnnnnnnnnnnnnncgacacggtgagctcgttgccgggcagcggcggtgcaagcggaaggtgaggcggggctgagcgggcctcgagccgggggcgatgaggcgagacgaggcggcgtgtgggggtatcgctagaacctggatacggtcttggggagctcctcacaatacgtaggttatgttgtggatgagaygagctgacacggagggctgtgtgagcaaagagcgttacrtgattgcaatatcttttcttctttgctgttatttctttgatgttaggtctgtgaggagcacaggttactaactttttgtcacaggatgtcttcgattacatgaactcagtagaaatctgttaatctgtgtgcagcagtttctgtrccgaaaggacaaggttctccttgtcttgcagtagtttgttgtcagcatagctggccttcacacyggtacatacggtgatatttgtccaaactacttgccccgtccctggggacac

SEQ ID NO: 49524 - DNA, 599 bp, Chicken  19866894295652_2
  misc_feature (1)..(83): n is any nucleotide
nnnnnnnnnnnnnnnnnnnnnnnnnnnnnnnnnnnnnnnnnnnnnnnnnnnnnnnnnnnnnnnnnnnnnnnnnnnnnnnnnnncgacacggtgagctcgttgccgggcagcggcggtgcaagcggaaggtgaggcggggctgagcgggcctcgagccgggggcgatgaggcgagacgaggcggcgtgtgggggtatcgctagaacctggatacggtcttggggagctcctcacaatacgtaggttatgttgtggatgagaygagctgacacggagggctgtgtgagcaaagagcgttacrtgattgcaatatcttttcttctttgctgttatttctttgatgttaggtctgtgaggagcacaggttactaactttttgtcacaggatgtcttcgattacatgaactcagtagaaatctgttaatctgtgtgcagcagtttctgtrccgaaaggacaaggttctccttgtcttgcagtagtttgttgtcagcatagctggccttcacacyggtacatacggtgatatttgtccaaactacttgccccgtccctggggacactcaaggtgaggctggacggggctctgagcacctgatcta

SEQ ID NO: 49525 - DNA, 600 bp, Chicken  19866894295652_3
gggcctcgagccgggggcgatgaggcgagacgaggcggcgtgtgggggtatcgctagaacctggatacggtcttggggagctcctcacaatacgtaggttatgttgtggatgagaygagctgacacggagggctgtgtgagcaaagagcgttacrtgattgcaatatcttttcttctttgctgttatttctttgatgttaggtctgtgaggagcacaggttactaactttttgtcacaggatgtcttcgattacatgaactcagtagaaatctgttaatctgtgtgcagcagtttctgtrccgaaaggacaaggttctccttgtcttgcagtagtttgttgtcagcatagctggccttcacacyggtacatacggtgatatttgtccaaactacttgccccgtccctggggacactcaaggtgaggctggacggggctctgagcacctgatctagctgtaggtgtccctgtttgttgcagggagttgggytagrtgaatttcaggagttccttccaactcaaatgattccgttctgcttgttctacaacagtataacaatagtctygaggaggaaaatcaagacttagcaaaagacaaat

SEQ ID NO: 49526 - DNA, 600 bp, Chicken  19866894295652_4
atacggtcttggggagctcctcacaatacgtaggttatgttgtggatgagaygagctgacacggagggctgtgtgagcaaagagcgttacrtgattgcaatatcttttcttctttgctgttatttctttgatgttaggtctgtgaggagcacaggttactaactttttgtcacaggatgtcttcgattacatgaactcagtagaaatctgttaatctgtgtgcagcagtttctgtrccgaaaggacaaggttctccttgtcttgcagtagtttgttgtcagcatagctggccttcacacyggtacatacggtgatatttgtccaaactacttgccccgtccctggggacactcaaggtgaggctggacggggctctgagcacctgatctagctgtaggtgtccctgtttgttgcagggagttgggytagrtgaatttcaggagttccttccaactcaaatgattccgttctgcttgttctacaacagtataacaatagtctygaggaggaaaatcaagacttagcaaaagacaaatgctaacagcagaagtcgtcttggcttagagccatggttggactccatctccaggcttggtatca

SEQ ID NO: 49527 - DNA, 567 bp, Chicken  19866894295652_5
tttgatgttaggtctgtgaggagcacaggttactaactttttgtcacaggatgtcttcgattacatgaactcagtagaaatctgttaatctgtgtgcagcagtttctgtrccgaaaggacaaggttctccttgtcttgcagtagtttgttgtcagcatagctggccttcacacyggtacatacggtgatatttgtccaaactacttgccccgtccctggggacactcaaggtgaggctggacggggctctgagcacctgatctagctgtaggtgtccctgtttgttgcagggagttgggytagrtgaatttcaggagttccttccaactcaaatgattccgttctgcttgttctacaacagtataacaatagtctygaggaggaaaatcaagacttagcaaaagacaaatgctaacagcagaagtcgtcttggcttagagccatggttggactccatctccaggcttggtatcaagattaaggttttagagcctgctcagtgcttgtctgctttcccgtctgagctgctcgagttctctagtaaccccagtaagaaaggaggcagtt

SEQ ID NO: 49528 - DNA, 563 bp, Chicken  19866894295652_6
atgttaggtctgtgaggagcacaggttactaactttttgtcacaggatgtcttcgattacatgaactcagtagaaatctgttaatctgtgtgcagcagtttctgtrccgaaaggacaaggttctccttgtcttgcagtagtttgttgtcagcatagctggccttcacacyggtacatacggtgatatttgtccaaactacttgccccgtccctggggacactcaaggtgaggctggacggggctctgagcacctgatctagctgtaggtgtccctgtttgttgcagggagttgggytagrtgaatttcaggagttccttccaactcaaatgattccgttctgcttgttctacaacagtataacaatagtctygaggaggaaaatcaagacttagcaaaagacaaatgctaacagcagaagtcgtcttggcttagagccatggttggactccatctccaggcttggtatcaagattaaggttttagagcctgctcagtgcttgtctgctttcccgtctgagctgctcgagttctctagtaaccccagtaagaaaggaggcagtt

SEQ ID NO: 49529 - DNA, 491 bp, Chicken  19866894295652_7
gaaatctgttaatctgtgtgcagcagtttctgtrccgaaaggacaaggttctccttgtcttgcagtagtttgttgtcagcatagctggccttcacacyggtacatacggtgatatttgtccaaactacttgccccgtccctggggacactcaaggtgaggctggacggggctctgagcacctgatctagctgtaggtgtccctgtttgttgcagggagttgggytagrtgaatttcaggagttccttccaactcaaatgattccgttctgcttgttctacaacagtataacaatagtctygaggaggaaaatcaagacttagcaaaagacaaatgctaacagcagaagtcgtcttggcttagagccatggttggactccatctccaggcttggtatcaagattaaggttttagagcctgctcagtgcttgtctgctttcccgtctgagctgctcgagttctctagtaaccccagtaagaaaggaggcagtt

SEQ ID NO: 49530 - DNA, 600 bp, Chicken  19866894295655_1
caaactgagatcaaaatggatggatcctacaaaaagcatttctatgtaaaagagaattcaaggctttagtttgaacattcaccagaagcaagcagcaagtgttactcgattcaaacagcaaactcagtacaaaacaggttccaaggaatgcagaaacaaagaactgtaaatctctctgctgtgccaagttgcatcccatggattataaagaatcatatcctgaattcctcgctttgtcttacctcaggcaaaattctcactggcttaaatactgttgggtcccaaaatatcaagcctatyctgataggaacccataaaaacctaagtcatgatcctttgacccccaccagtgcatgtgcacatatcatatgtggacaagagastgcaaaatatttctctgtgtgctgctgcaggagcagcaacagcttctgcacatattcagtggctgcttgaccaaacacctgcctcttccaacayagagatgttcatccatccccatgctcaggtrgtggataccagattcatgggaatgcgccctggatatgcaggacagctctgactcggagaaatactgaagtgcttggagggtcctactcactc

SEQ ID NO: 49531 - DNA, 600 bp, Chicken  19866894295655_2
agaagcaagcagcaagtgttactcgattcaaacagcaaactcagtacaaaacaggttccaaggaatgcagaaacaaagaactgtaaatctctctgctgtgccaagttgcatcccatggattataaagaatcatatcctgaattcctcgctttgtcttacctcaggcaaaattctcactggcttaaatactgttgggtcccaaaatatcaagcctatyctgataggaacccataaaaacctaagtcatgatcctttgacccccaccagtgcatgtgcacatatcatatgtggacaagagastgcaaaatatttctctgtgtgctgctgcaggagcagcaacagcttctgcacatattcagtggctgcttgaccaaacacctgcctcttccaacayagagatgttcatccatccccatgctcaggtrgtggataccagattcatgggaatgcgccctggatatgcaggacagctctgactcggagaaatactgaagtgcttggagggtcctactcactcgtccaaagcaattgcattctcaagtgccttcctgatgaatggaataaaaatcagcactggtcagttcctggctgccttctccr

SEQ ID NO: 49532 - DNA, 600 bp, Chicken  19866894295655_3
gctgtgccaagttgcatcccatggattataaagaatcatatcctgaattcctcgctttgtcttacctcaggcaaaattctcactggcttaaatactgttgggtcccaaaatatcaagcctatyctgataggaacccataaaaacctaagtcatgatcctttgacccccaccagtgcatgtgcacatatcatatgtggacaagagastgcaaaatatttctctgtgtgctgctgcaggagcagcaacagcttctgcacatattcagtggctgcttgaccaaacacctgcctcttccaacayagagatgttcatccatccccatgctcaggtrgtggataccagattcatgggaatgcgccctggatatgcaggacagctctgactcggagaaatactgaagtgcttggagggtcctactcactcgtccaaagcaattgcattctcaagtgccttcctgatgaatggaataaaaatcagcactggtcagttcctggctgccttctccraatcttccaccccttcaggccagagcctgacgagtgwttctgcaatggcgttccagcctgggaactgctgctcccagccatcccctggcttgtg

SEQ ID NO: 49533 - DNA, 600 bp, Chicken  19866894295655_4
agaatcatatcctgaattcctcgctttgtcttacctcaggcaaaattctcactggcttaaatactgttgggtcccaaaatatcaagcctatyctgataggaacccataaaaacctaagtcatgatcctttgacccccaccagtgcatgtgcacatatcatatgtggacaagagastgcaaaatatttctctgtgtgctgctgcaggagcagcaacagcttctgcacatattcagtggctgcttgaccaaacacctgcctcttccaacayagagatgttcatccatccccatgctcaggtrgtggataccagattcatgggaatgcgccctggatatgcaggacagctctgactcggagaaatactgaagtgcttggagggtcctactcactcgtccaaagcaattgcattctcaagtgccttcctgatgaatggaataaaaatcagcactggtcagttcctggctgccttctccraatcttccaccccttcaggccagagcctgacgagtgwttctgcaatggcgttccagcctgggaactgctgctcccagccatcccctggcttgtggcagaaagactgccttacccttgactcccct

SEQ ID NO: 49534 - DNA, 600 bp, Chicken  19866894295655_5
tgcaaaatatttctctgtgtgctgctgcaggagcagcaacagcttctgcacatattcagtggctgcttgaccaaacacctgcctcttccaacayagagatgttcatccatccccatgctcaggtrgtggataccagattcatgggaatgcgccctggatatgcaggacagctctgactcggagaaatactgaagtgcttggagggtcctactcactcgtccaaagcaattgcattctcaagtgccttcctgatgaatggaataaaaatcagcactggtcagttcctggctgccttctccraatcttccaccccttcaggccagagcctgacgagtgwttctgcaatggcgttccagcctgggaactgctgctcccagccatcccctggcttgtggcagaaagactgccttacccttgactcccctatcagcagacatactctatttgagaacgttcatactgaagacacaccgaagtctcacatattacgctcactgacacagagatacaactttatccagcttttttggtattctgcaaatagactagaagcagaggattcgtttccgactaaaatatcacctaatcaccacaagcaat

SEQ ID NO: 49535 - DNA, 600 bp, Chicken  19866894295655_6
aacagcttctgcacatattcagtggctgcttgaccaaacacctgcctcttccaacayagagatgttcatccatccccatgctcaggtrgtggataccagattcatgggaatgcgccctggatatgcaggacagctctgactcggagaaatactgaagtgcttggagggtcctactcactcgtccaaagcaattgcattctcaagtgccttcctgatgaatggaataaaaatcagcactggtcagttcctggctgccttctccraatcttccaccccttcaggccagagcctgacgagtgwttctgcaatggcgttccagcctgggaactgctgctcccagccatcccctggcttgtggcagaaagactgccttacccttgactcccctatcagcagacatactctatttgagaacgttcatactgaagacacaccgaagtctcacatattacgctcactgacacagagatacaactttatccagcttttttggtattctgcaaatagactagaagcagaggattcgtttccgactaaaatatcacctaatcaccacaagcaatactgctgagtttgaagagattttaattcccttgaggg

SEQ ID NO: 49536 - DNA, 600 bp, Chicken  19866894295657_1
aacaacgttcagtaattaaatcatccactgttctagtgagcacaaaacagggttgaatgtgctctgagtgtaatgctctatagccaacaagattaatcaacacaaaataataacattactctaaattaaccaaaaaaatcaatataacaatcttgttgtcctgttctaaatactacgtactcaatgtttcctctggaagtcttaatttcaaattgccttgattacatacacaattactattatttgacaatattactggcacaggtgccaggtctctgcacacaagttgaggtatcagcwaacatcacaaaatttgttgaaaatttttgtgccttggastaaggaaaccttagccattatagtttagaagacttaaagacttcagacttaaagaaatacctcaattcagattcagaacagatgtaaaactatacttcctaactttgggccatgtaatgccagcacaaagtactactgcaatcagaattgagatcaatgagaacaacccttcacaacagcactaagtaagatgaaagatcaracactagcagaaggtgccaaattcaaaattcaggacatactttaatctacggtaacttg

SEQ ID NO: 49537 - DNA, 600 bp, Chicken  19866894295657_2
gcacaaaacagggttgaatgtgctctgagtgtaatgctctatagccaacaagattaatcaacacaaaataataacattactctaaattaaccaaaaaaatcaatataacaatcttgttgtcctgttctaaatactacgtactcaatgtttcctctggaagtcttaatttcaaattgccttgattacatacacaattactattatttgacaatattactggcacaggtgccaggtctctgcacacaagttgaggtatcagcwaacatcacaaaatttgttgaaaatttttgtgccttggastaaggaaaccttagccattatagtttagaagacttaaagacttcagacttaaagaaatacctcaattcagattcagaacagatgtaaaactatacttcctaactttgggccatgtaatgccagcacaaagtactactgcaatcagaattgagatcaatgagaacaacccttcacaacagcactaagtaagatgaaagatcaracactagcagaaggtgccaaattcaaaattcaggacatactttaatctacggtaacttgaacacagcagagggacatggtctatgacattaaaaaaca

SEQ ID NO: 49538 - DNA, 600 bp, Chicken  19866894295657_3
atttgacaatattactggcacaggtgccaggtctctgcacacaagttgaggtatcagcwaacatcacaaaatttgttgaaaatttttgtgccttggastaaggaaaccttagccattatagtttagaagacttaaagacttcagacttaaagaaatacctcaattcagattcagaacagatgtaaaactatacttcctaactttgggccatgtaatgccagcacaaagtactactgcaatcagaattgagatcaatgagaacaacccttcacaacagcactaagtaagatgaaagatcaracactagcagaaggtgccaaattcaaaattcaggacatactttaatctacggtaacttgaacacagcagagggacatggtctatgacattaaaaaacataaccaagctttgagtgcggtatttgtgcagtacattgatcaatagtgacactaaatattaatagaaaagcagataaakaaattttacaatcaaattgtttgtattgtttctaagcccttaaattaaaaggtttgagaaatcaaatctagtgagtccaacatgtaaattatcaatttggagaaatgatctttggtttagtgt

SEQ ID NO: 49539 - DNA, 600 bp, Chicken  19866894295657_4
agatgtaaaactatacttcctaactttgggccatgtaatgccagcacaaagtactactgcaatcagaattgagatcaatgagaacaacccttcacaacagcactaagtaagatgaaagatcaracactagcagaaggtgccaaattcaaaattcaggacatactttaatctacggtaacttgaacacagcagagggacatggtctatgacattaaaaaacataaccaagctttgagtgcggtatttgtgcagtacattgatcaatagtgacactaaatattaatagaaaagcagataaakaaattttacaatcaaattgtttgtattgtttctaagcccttaaattaaaaggtttgagaaatcaaatctagtgagtccaacatgtaaattatcaatttggagaaatgatctttggtttagtgtaacaacatccatgctttgccacacaaagccaaaaaaaaaaaaaaaaatagctcaatacttctggtaactgtgctacactactcaatacttacctctgatgacagcaatacttaggagtcttctgctttcatacatgatattggttaaaagtttaagctacaaaggttacaaaaggtt

SEQ ID NO: 49540 - DNA, 599 bp, Chicken  19866894295661_1
  misc_feature (1)..(111): n is any nucleotide
nnnnnnnnnnnnnnnnnnnnnnnnnnnnnnnnnnnnnnnnnnnnnnnnnnnnnnnnnnnnnnnnnnnnnnnnnnnnnnnnnnnnnnnnnnnnnnnnnnnnnnnnnnnnnnncagaggtacaaagctgagttacgtttgaagcagaaatgctaagttatggcttgaactagtgattgagcactcggaggaaaggtggggccaacccaggggagctcaggtgcagtgcaatgctcctgagtgaccagaaggggtgcagccaggatccatcccctcccagacctcatttcagagttggcagtrggtgagggtgttttgctggagatccctgcctagctgaggctttccaaagataaccagtttttttcttttgtttctctttctatgactgttgcrtttgggcttaccctcacttrctgtagcctgggactttgccaccccgctatcattgctgwactttccattgcattatgatgttacaacatcttatgaagagttaaatacaaaatagtaattayaaaaattacttcttaattttgaagtcctctagactactttattaattatcaactattgaaagtatctgatgattccatcctgtg

SEQ ID NO: 49541 - DNA, 599 bp, Chicken  19866894295661_2
  misc_feature (1)..(18): n is any nucleotide
nnnnnnnnnnnnnnnnnncagaggtacaaagctgagttacgtttgaagcagaaatgctaagttatggcttgaactagtgattgagcactcggaggaaaggtggggccaacccaggggagctcaggtgcagtgcaatgctcctgagtgaccagaaggggtgcagccaggatccatcccctcccagacctcatttcagagttggcagtrggtgagggtgttttgctggagatccctgcctagctgaggctttccaaagataaccagtttttttcttttgtttctctttctatgactgttgcrtttgggcttaccctcacttrctgtagcctgggactttgccaccccgctatcattgctgwactttccattgcattatgatgttacaacatcttatgaagagttaaatacaaaatagtaattayaaaaattacttcttaattttgaagtcctctagactactttattaattatcaactattgaaagtatctgatgattccatcctgtgaaagatccctgattatctgctttcctttgagtaggcacctgagtgtgccaattgacactggtagtacttacactgccttagatgttagctgag

SEQ ID NO: 49542 - DNA, 600 bp, Chicken  19866894295661_3
gaggtacaaagctgagttacgtttgaagcagaaatgctaagttatggcttgaactagtgattgagcactcggaggaaaggtggggccaacccaggggagctcaggtgcagtgcaatgctcctgagtgaccagaaggggtgcagccaggatccatcccctcccagacctcatttcagagttggcagtrggtgagggtgttttgctggagatccctgcctagctgaggctttccaaagataaccagtttttttcttttgtttctctttctatgactgttgcrtttgggcttaccctcacttrctgtagcctgggactttgccaccccgctatcattgctgwactttccattgcattatgatgttacaacatcttatgaagagttaaatacaaaatagtaattayaaaaattacttcttaattttgaagtcctctagactactttattaattatcaactattgaaagtatctgatgattccatcctgtgaaagatccctgattatctgctttcctttgagtaggcacctgagtgtgccaattgacactggtagtacttacactgccttagatgttagctgaggcataagtgtttccaaaatct

SEQ ID NO: 49543 - DNA, 600 bp, Chicken  19866894295661_4
agttatggcttgaactagtgattgagcactcggaggaaaggtggggccaacccaggggagctcaggtgcagtgcaatgctcctgagtgaccagaaggggtgcagccaggatccatcccctcccagacctcatttcagagttggcagtrggtgagggtgttttgctggagatccctgcctagctgaggctttccaaagataaccagtttttttcttttgtttctctttctatgactgttgcrtttgggcttaccctcacttrctgtagcctgggactttgccaccccgctatcattgctgwactttccattgcattatgatgttacaacatcttatgaagagttaaatacaaaatagtaattayaaaaattacttcttaattttgaagtcctctagactactttattaattatcaactattgaaagtatctgatgattccatcctgtgaaagatccctgattatctgctttcctttgagtaggcacctgagtgtgccaattgacactggtagtacttacactgccttagatgttagctgaggcataagtgtttccaaaatcttgcctaatttagctcaacctgaatgtattactaaagaat

SEQ ID NO: 49544 - DNA, 600 bp, Chicken  19866894295661_5
aggtgcagtgcaatgctcctgagtgaccagaaggggtgcagccaggatccatcccctcccagacctcatttcagagttggcagtrggtgagggtgttttgctggagatccctgcctagctgaggctttccaaagataaccagtttttttcttttgtttctctttctatgactgttgcrtttgggcttaccctcacttrctgtagcctgggactttgccaccccgctatcattgctgwactttccattgcattatgatgttacaacatcttatgaagagttaaatacaaaatagtaattayaaaaattacttcttaattttgaagtcctctagactactttattaattatcaactattgaaagtatctgatgattccatcctgtgaaagatccctgattatctgctttcctttgagtaggcacctgagtgtgccaattgacactggtagtacttacactgccttagatgttagctgaggcataagtgtttccaaaatcttgcctaatttagctcaacctgaatgtattactaaagaatgaactctgtgtggtaatttttttcctaatgtgtacaccactgctatgatacggtgtggttttc

SEQ ID NO: 49545 - DNA, 600 bp, Chicken  19866894295662_1
taaatcaaataaagactgaaaaaatactgcactgcaagtaataacatttgcttccatctgatcattttcaaatctaaccacaggatttgtaagacatattccttggaagggtcttggttctcctcattaaactttgccggctgtgtttccttgacgtgatgattttaatatatgcaccttaaaaccacatctatttctacatttggtttgttgcccagcagtaaaaagaaaatatgtcataaattttagagaacattgaacttgctggtgttgagcaagattatgttttccaattacgtrtgatttactaacctcgctaatagacaacttcattttccagagatgtcttaaatcttaaaatcaattttaacaacatattaagaactctctctctcccctccgacatatttccttttttatgattcttcatgttttaaatacttttttccttctccaatcactttatcagatgagatcacaaccctcactgtccactaagagacacttttttcctccgcctgacaaccttctgggctggcttcatagaatcatagaatggcctgggttgaaaaggaccgccgtgataatcgagtttcaaac

SEQ ID NO: 49546 - DNA, 600 bp, Chicken  19866894295663_1
ctagattatttgcagagaagcaaaccaactcaactaaaatcccctccaccaaaaagaaaaacacaacaacaaaaccgcagcaaacccacagaaacagggcagaggaaagcaaacacacaggagaatggaaataaatagtgatattactgtttgactcaagagtattaagctgtcaaggttccacattagatagaagtggacaggactgcactaaagaaaggctacagtgcacactgaatatcttcctcaagccctattcctattcagccacattttccctgtaagcattctcaattgtgygtgaggtgacttcagcacacactcaggcccgctgcgcatctgcttgcttcacccaggagcagcacatatgagggggaattcttgctgtccagagtcatgaatctgctcttcaaagccaagtttagttgacagatggatgatgtcagtgacagcaactcccttaccatccactttgtagcccttctgccacaraatgtctctggagagagaatgaggccactgaccagagatgagggaacgaaattagtggctygtgccatggcaggtaaggctaagatgtayagagtagatctgcttcag

SEQ ID NO: 49547 - DNA, 600 bp, Chicken  19866894295663_2
gaagtggacaggactgcactaaagaaaggctacagtgcacactgaatatcttcctcaagccctattcctattcagccacattttccctgtaagcattctcaattgtgygtgaggtgacttcagcacacactcaggcccgctgcgcatctgcttgcttcacccaggagcagcacatatgagggggaattcttgctgtccagagtcatgaatctgctcttcaaagccaagtttagttgacagatggatgatgtcagtgacagcaactcccttaccatccactttgtagcccttctgccacaraatgtctctggagagagaatgaggccactgaccagagatgagggaacgaaattagtggctygtgccatggcaggtaaggctaagatgtayagagtagatctgcttcaggctctccaaaggtttgttggactggaccatcttcagctcacttcagcactgctttcatytctacctgcaatggggaaccaggyattttccagaatgccacttctacagctgcagcttaaagctaggccccacttctatttgcaccccaatctcattgccctgatgtagcagacagtttctgttatggtgcag

SEQ ID NO: 49548 - DNA, 600 bp, Chicken  19866894295663_3
ctattcctattcagccacattttccctgtaagcattctcaattgtgygtgaggtgacttcagcacacactcaggcccgctgcgcatctgcttgcttcacccaggagcagcacatatgagggggaattcttgctgtccagagtcatgaatctgctcttcaaagccaagtttagttgacagatggatgatgtcagtgacagcaactcccttaccatccactttgtagcccttctgccacaraatgtctctggagagagaatgaggccactgaccagagatgagggaacgaaattagtggctygtgccatggcaggtaaggctaagatgtayagagtagatctgcttcaggctctccaaaggtttgttggactggaccatcttcagctcacttcagcactgctttcatytctacctgcaatggggaaccaggyattttccagaatgccacttctacagctgcagcttaaagctaggccccacttctatttgcaccccaatctcattgccctgatgtagcagacagtttctgttatggtgcagtatcaattttcatgtagcttccttttcccaatatacatcttagacattgccatctgttcag

SEQ ID NO: 49549 - DNA, 600 bp, Chicken  19866894295663_4
aagcattctcaattgtgygtgaggtgacttcagcacacactcaggcccgctgcgcatctgcttgcttcacccaggagcagcacatatgagggggaattcttgctgtccagagtcatgaatctgctcttcaaagccaagtttagttgacagatggatgatgtcagtgacagcaactcccttaccatccactttgtagcccttctgccacaraatgtctctggagagagaatgaggccactgaccagagatgagggaacgaaattagtggctygtgccatggcaggtaaggctaagatgtayagagtagatctgcttcaggctctccaaaggtttgttggactggaccatcttcagctcacttcagcactgctttcatytctacctgcaatggggaaccaggyattttccagaatgccacttctacagctgcagcttaaagctaggccccacttctatttgcaccccaatctcattgccctgatgtagcagacagtttctgttatggtgcagtatcaattttcatgtagcttccttttcccaatatacatcttagacattgccatctgttcagattcttgcagctcagtgtccaactcccca

SEQ ID NO: 49550 - DNA, 600 bp, Chicken  19866894295663_5
cagcacatatgagggggaattcttgctgtccagagtcatgaatctgctcttcaaagccaagtttagttgacagatggatgatgtcagtgacagcaactcccttaccatccactttgtagcccttctgccacaraatgtctctggagagagaatgaggccactgaccagagatgagggaacgaaattagtggctygtgccatggcaggtaaggctaagatgtayagagtagatctgcttcaggctctccaaaggtttgttggactggaccatcttcagctcacttcagcactgctttcatytctacctgcaatggggaaccaggyattttccagaatgccacttctacagctgcagcttaaagctaggccccacttctatttgcaccccaatctcattgccctgatgtagcagacagtttctgttatggtgcagtatcaattttcatgtagcttccttttcccaatatacatcttagacattgccatctgttcagattcttgcagctcagtgtccaactccccacctcctccctgtccttctgggctgccctgaaccaatcctcctcttggttactcactgctcctgtagcgagttattct

SEQ ID NO: 49551 - DNA, 600 bp, Chicken  19866894295663_6
ttgctgtccagagtcatgaatctgctcttcaaagccaagtttagttgacagatggatgatgtcagtgacagcaactcccttaccatccactttgtagcccttctgccacaraatgtctctggagagagaatgaggccactgaccagagatgagggaacgaaattagtggctygtgccatggcaggtaaggctaagatgtayagagtagatctgcttcaggctctccaaaggtttgttggactggaccatcttcagctcacttcagcactgctttcatytctacctgcaatggggaaccaygyattttccagaatgccacttctacagctgcagcttaaagctaggccccacttctatttgcaccccaatctcattgccctgatgtagcagacagtttctgttatggtgcagtatcaattttcatgtagcttccttttcccaatatacatcttagacattgccatctgttcagattcttgcagctcagtgtccaactccccacctcctccctgtccttctgggctgccctgaaccaatcctcctcttggttactcactgctcctgtagcgagttattctgaatgcctacaagatgagctag

SEQ ID NO: 49552 - DNA, 600 bp, Chicken  19866894295663_7
gctgtccagagtcatgaatctgctcttcaaagccaagtttagttgacagatggatgatgtcagtgacagcaactcccttaccatccactttgtagcccttctgccacaraatgtctctggagagagaatgaggccactgaccagagatgagggaacgaaattagtggctygtgccatggcaggtaaggctaagatgtayagagtagatctgcttcaggctctccaaaggtttgttggactggaccatcttcagctcacttcagcactgctttcatytctacctgcaatggggaaccaggyattttccagaatgccacttctacagctgcagcttaaagctaggccccacttctatttgcaccccaatctcattgccctgatgtagcagacagtttctgttatggtgcagtatcaattttcatgtagcttccttttcccaatatacatcttagacattgccatctgttcagattcttgcagctcagtgtccaactccccacctcctccctgtccttctgggctgccctgaaccaatcctcctcttggttactcactgctcctgtagcgagttattctgaatgcctacaagatgagctagac

SEQ ID NO: 49553 - DNA, 600 bp, Chicken  19866894295666_1
tgttttctctttcatcctctgctctgcctaaacccatctcaggttcaggttggcttcttttaggagtgggacaaacataccaagaaagcactcatcctcaagcagttataggtcagaagcagacaaatactaattataactattacattttttttttaatggttcaagaaattagcaacccatctgactaaaagtgccttactcacatcgtggattagagctcatgttcttcttttggaaccacagtgacctacctatggtcagattgcagtgttgctgttccatgcaatgaccatgccrtgagagagaggctagtgcagactgggaacgaggattttcttttcagtagctaacactggaaatacaagagaaaacttgaatatctggatcttgaatacgggtaaatgcatcatcagcttagtgtgaaatagcacaacagactcaaataagaagctataagacaactgggttaaacttaattggaagggtaaaatgcatactgttcatatctgtttaaaagttagtgttattgctgaagattgcagtgagcagttggtttttttttcttgctaaggttaacaagcgatgtaagtctagcac

SEQ ID NO: 49554 - DNA, 599 bp, Chicken  19866894295667_1
  misc_feature (1)..(85): n is any nucleotide
nnnnnnnnnnnnnnnnnnnnnnnnnnnnnnnnnnnnnnnnnnnnnnnnnnnnnnnnnnnnnnnnnnnnnnnnnnnnnnnnnnnnncatggtgtattgtgtgaatagccgtgtgggtggtattttttttcccaatagttaaatatgaacccaagtcatatataggagtgaaacgtaaattttaaggcagaaattttgataataactttttgcataagtcatgtagggagccaaacatacagtatgccatcaagaggctccaccagcatttgcagtatcttctgggctcttcaggacatgaygcttggcacaccgaggaagggaataaccccaaaaggactaggaagtgaagccatcccatttcagcccaaatataagtgccgacgcaactgaagttggaaggtcagcggcttaaatactgcctcttcaccctttgccccacacctcctacctgcctgccctaggctttcagctttttaacaaaggcggtagaggctattacagaggaagagaatagaaatctcaccgttgttgtttggaagaacccgaaggttttcaaattctagcatggtataagaggagtccaaggagtcgacgtaat

SEQ ID NO: 49555 - DNA, 600 bp, Chicken  19866894295668_1
gggtggaggaaaaaatgttctctgttgtctctgaacagccgagctcattgtttgaaataccatttgaaatatccactgaccttggggttggaggaggaaagtagtcagactatacctggaaagaagccctaaacccttttagcagaactaattaatatggagactaaaacactgcaggcatgtggaagtcctgtgcataggatgggggcaagggcttattcatccattgtctggtgaataaagcttgtcttgttggtcagccctactttgctatgctctttgtatgctgcgagttctagytgatgattttgcctcatctttgtctcccttttccatgaaaggtgctgaaccaaacagaggatcaccgccaaagagttctgcaggcagctgctaaaaatattcgggtctggttcatcaaagtgcgcaagatgaaggccatctaccataccctgaatctgtgcaatattgacgtgacacagaagtgcttgattgctgaagtctggtgtcccgtagctgacctcgattctatccagtttgctctcaggagaggcactgtgagtaactgctgcactgctcctgtccgcttctgttcaagcagac

SEQ ID NO: 49556 - DNA, 555 bp, Chicken  19866894295675_1
agtcagaccactgtgcttttcctggccgagatagagttaattatcttcagtagttgctggtatggtgccacattctggacttaagagaaaataacaatgacattgctgatgttttagtgtaaacacagctcaacagcaacaactaagtcaacaacttatctgcttcttgtgtttacagcctgtaaggccaacagtatcctgggctgcatcaacagaatggtggcagaaggacagaggggggattgtcaccctctcctctgtccctctgcggccccatctggagtgctgcattcaggccckgggccactcagcacaagaagtatgtggaactgatggaacaaggccagaggaggaccataaagatgctcagaggctgcagaacctctactgtgcaaagaggctgagggagctgggggtgcgcagcctggagagaatgctctggggagacctcattgcagcctttccgtactggaaaggagcctaaaagcaggtagaaagtgacttcttagaagggcagatagagataggacaaagggggaatggctttgtactaaa

SEQ ID NO: 49557 - DNA, 600 bp, Chicken  19866894295676_1
gaattcccttcaacctttaaaaaatgcttccttctaattttccaccattgcgtgaccctgattctccagaagttggagtgcttgcctatctaatacttgggttggataaaaagggagcagagtgagatactgattttactcataccgaggggaaagtccagaaaaatattctgcaactgtttagtaggaatatgagcttacttttcagaaaaacaaacaaacaaacaaaccaacaaacaaaaacaacaaaaaagcaactttgagcatatataagagattagttagccttgttctgcaaasggggaaagtcagtattgcacaaaactaaaartagcaaagaagaatgtgaacagaactcctcctctagctgtggatgctgaggccacctggatgaagcacatttatcaagtgctaaagtatatcgcgtgcattaacatagaaacaaatgtactaagtgggtatttgtattagcatttgggaataaaacatttcatttttactgacaagcactgttttttttgttgttgttgctgttttttggcagatagacgaaaaaaccccactttagggattacataaactaaaatttaccatttttgc

SEQ ID NO: 49558 - DNA, 600 bp, Chicken  19866894295676_2
ttctaattttccaccattgcgtgaccctgattctccagaagttggagtgcttgcctatctaatacttgggttggataaaaagggagcagagtgagatactgattttactcataccgaggggaaagtccagaaaaatattctgcaactgtttagtaggaatatgagcttacttttcagaaaaacaaacaaacaaacaaaccaacaaacaaaaacaacaaaaaagcaactttgagcatatataagagattagttagccttgttctgcaaasggggaaagtcagtattgcacaaaactaaaartagcaaagaagaatgtgaacagaactcctcctctagctgtggatgctgaggccacctggatgaagcacatttatcaagtgctaaagtatatcgcgtgcattaacatagaaacaaatgtactaagtgggtatttgtattagcatttgggaataaaacatttcatttttactgacaagcactgttttttttgttgttgttgctgttttttggcagatagacgaaaaaaccccactttagggattacataaactaaaatttaccatttttgcctaaacccgaatgtatttttttggcagcaga

SEQ ID NO: 49559 - DNA, 599 bp, Chicken  19866894295681_1
  misc_feature (1)..(51): n is any nucleotide
nnnnnnnnnnnnnnnnnnnnnnnnnnnnnnnnnnnnnnnnnnnnnnnnnnncgggaatctaacaaatattcttctcagtatccttcagctgtactacgctcccttgtaactaatgttctctctctaaccaaagccagtcccaccataggaatttccatgattctagaaatgcctcagcacgctctgatccttcagatgctctcagaaagcacaattttgatttcttagcaccactaggctaagcattctttccactgaagggaaaatagcacttttgtcctcttctctccttcacttacrcctgatatcctagaaggactcttcctcagcctcctcactacatgtagtttcctgaagagtgctgtgatgactctgcaggctgcatctccacttggccmcaaaattgggtcctgggacacrtgctcacatacatacacaaacacccaaggatgyaaagcctttctcccagccaaacacagcgctgctgctctctgcttcacatgtgcagtggttatgggaacacaaaatggagtcttccagttccattgctttctgactggtttcttacagggaaggaatgctccatcacgaatccaaaa

SEQ ID NO: 49560 - DNA, 600 bp, Chicken  19866894295681_2
ctcccttgtaactaatgttctctctctaaccaaagccagtcccaccataggaatttccatgattctagaaatgcctcagcacgctctgatccttcagatgctctcagaaagcacaattttgatttcttagcaccactaggctaagcattctttccactgaagggaaaatagcacttttgtcctcttctctccttcacttacrcctgatatcctagaaggactcttcctcagcctcctcactacatgtagtttcctgaagagtgctgtgatgactctgcaggctgcatctccacttggccmcaaaattgggtcctgggacacrtgctcacatacatacacaaacacccaaggatgyaaagcctttctcccagccaaacacagcgctgctgctctctgcttcacatgtgcagtggttatgggaacacaaaatggagtcttccagttccattgctttctgactggtttcttacagggaaggaatgctccatcacgaatccaaaaggaaacaggaacgagactacacaaaagcaacttctgtcctgagggaggccatgggataatcaaagaagtatgtgagaattctcagctagtctcgatgta

SEQ ID NO: 49561 - DNA, 600 bp, Chicken  19866894295681_3
tctctaaccaaagccagtcccaccataggaatttccatgattctagaaatgcctcagcacgctctgatccttcagatgctctcagaaagcacaattttgatttcttagcaccactaggctaagcattctttccactgaagggaaaatagcacttttgtcctcttctctccttcacttacrcctgatatcctagaaggactcttcctcagcctcctcactacatgtagtttcctgaagagtgctgtgatgactctgcaggctgcatctccacttggccmcaaaattgggtcctgggacacrtgctcacatacatacacaaacacccaaggatgyaaagcctttctcccagccaaacacagcgctgctgctctctgcttcacatgtgcagtggttatgggaacacaaaatggagtcttccagttccattgctttctgactggtttcttacagggaaggaatgctccatcacgaatccaaaaggaaacaggaacgagactacacaaaagcaacttctgtcctgagggaggccatgggataatcaaagaagtatgtgagaattctcagctagtctcgatgtattgcagacagggacaggacatg

SEQ ID NO: 49562 - DNA, 600 bp, Chicken  19866894295681_4
tccatgattctagaaatgcctcagcacgctctgatccttcagatgctctcagaaagcacaattttgatttcttagcaccactaggctaagcattctttccactgaagggaaaatagcacttttgtcctcttctctccttcacttacrcctgatatcctagaaggactcttcctcagcctcctcactacatgtagtttcctgaagagtgctgtgatgactctgcaggctgcatctccacttggccmcaaaattgggtcctgggacacrtgctcacatacatacacaaacacccaaggatgyaaagcctttctcccagccaaacacagcgctgctgctctctgcttcacatgtgcagtggttatgggaacacaaaatggagtcttccagttccattgctttctgactggtttcttacagggaaggaatgctccatcacgaatccaaaaggaaacaggaacgagactacacaaaagcaacttctgtcctgagggaggccatgggataatcaaagaagtatgtgagaattctcagctagtctcgatgtattgcagacagggacaggacatggccacttggaggataaaaatctatgttttcaaa

SEQ ID NO: 49563 - DNA, 397 bp, Chicken  19866894295684_1
ttggttgtgtttacttagactgaactagatgattattttataggacagcattattagtttctgaactgcagacagtggtgtttttcttttcctgtgtgagtgttgttggcttcttttaaacattcctccctgtgttgtatcagtcaaacagtataattcagcttaaaatactgaccagcacaaaggctgtctgccttgttttagaatcgtaacatatccagtcaacattttacaatgctaatcctttctactgtattttaaacagcagtcagacccaattacgtagtaatagtctaatarttaatatgctctagctcaagcatattataaaattacacgttttttagtttagtttttattatcgtggataagaaacagtcatagaatcatagaatca

SEQ ID NO: 49564 - DNA, 599 bp, Chicken  19866894295686_1
  misc_feature (1)..(66): n is any nucleotide
nnnnnnnnnnnnnnnnnnnnnnnnnnnnnnnnnnnnnnnnnnnnnnnnnnnnnnnnnnnnnnnnnngaattctagccctcctgaggcccttcttttcctggcagcaattcactatgtaaagaggctgggtatttataattatgctcaaagtggccactttgaaaatctatatgtctctaggctccctgtacatcataatgtcaactctgtgaatggaggcatccatcaggggcctcacatcacagacctcggagctgtgataaacacccgggaaatgctcgctgaaccccacgtcccacwgctgcctgctggggaacagagctgcttttcatggggtgccaatggggctcctccaggagggacaacgccaggtgagacactgatcagygatgggatgagtacctccagycagagccttccttcctctctgcccccactgggaagagggacccaacggagccaccccccccagttctgcatcacctccttgagaagtggggccggcgttggttcccacgggaggacggaacgctgctccctgctgaccacgcaggcttccctaacactttgcccaggctcttcttaaaaatttattgctc

SEQ ID NO: 49565 - DNA, 600 bp, Chicken  19866894295686_2
cttcttttcctggcagcaattcactatgtaaagaggctgggtatttataattatgctcaaagtggccactttgaaaatctatatgtctctaggctccctgtacatcataatgtcaactctgtgaatggaggcatccatcaggggcctcacatcacagacctcggagctgtgataaacacccgggaaatgctcgctgaaccccacgtcccacwgctgcctgctggggaacagagctgcttttcatggggtgccaatggggctcctccaggagggacaacgccaggtgagacactgatcagygatgggatgagtacctccagycagagccttccttcctctctgcccccactgggaagagggacccaacggagccaccccccccagttctgcatcacctccttgagaagtggggccggcgttggttcccacgggaggacggaacgctgctccctgctgaccacgcaggcttccctaacactttgcccaggctcttcttaaaaatttattgctctgttgcaacgtgaaaaataagacagagaagtaatcattagtataactataactccccgtgcaatagccccacttgtaaattgagattta

SEQ ID NO: 49566 - DNA, 600 bp, Chicken  19866894295686_3
cactatgtaaagaggctgggtatttataattatgctcaaagtggccactttgaaaatctatatgtctctaggctccctgtacatcataatgtcaactctgtgaatggaggcatccatcaggggcctcacatcacagacctcggagctgtgataaacacccgggaaatgctcgctgaaccccacgtcccacwgctgcctgctggggaacagagctgcttttcatggggtgccaatggggctcctccaggagggacaacgccaggtgagacactgatcagygatgggatgagtacctccagycagagccttccttcctctctgcccccactgggaagagggacccaacggagccaccccccccagttctgcatcacctccttgagaagtggggccggcgttggttcccacgggaggacggaacgctgctccctgctgaccacgcaggcttccctaacactttgcccaggctcttcttaaaaatttattgctctgttgcaacgtgaaaaataagacagagaagtaatcattagtataactataactccccgtgcaatagccccacttgtaaattgagatttatgattgcagctgccgatattt

SEQ ID NO: 49567 - DNA, 599 bp, Chicken  19866894295696_1
  misc_feature (1)..(20): n is any nucleotide
nnnnnnnnnnnnnnnnnnnncgtgcgacagaaacagtctattgaaacacgagtccgtaaatgctaaccaatatatagatgccaaagcaagtcgtgtattgtttgggcttgcttccctgaagtctgaatccttgaagatattgttgtacctgaagactgtatttatatagcactagaagaaaataatctacttactgttacactttggcgtccctctgagagtgatatgcctactgcagctataacgctgctctgcaggcaccagtgcagctctgaaatggaaactggcggctcctgcccwtagcagaggctcaggaacatgaaacaaaacgtgtctttgaagtatgctacaaaatatcaataggcttctaatttatttactgcatcagtacggataatgctctgtgggcagcttcaacaatggtttattatcctacctkaaaaatgctaaaggaattagcgggttactttgctgctcctggtgcttgttcgttgtcctgggaaaagtgtttagggttgattggaagtttacccttyggcagaaaatgagggctttaaaatttgagggctgactaaggaatcagaggtgcaaaaggcagt

SEQ ID NO: 49568 - DNA, 600 bp, Chicken  19866894295696_2
ttgttgtacctgaagactgtatttatatagcactagaagaaaataatctacttactgttacactttggcgtccctctgagagtgatatgcctactgcagctataacgctgctctgcaggcaccagtgcagctctgaaatggaaactggcggctcctgcccwtagcagaggctcaggaacatgaaacaaaacgtgtctttgaagtatgctacaaaatatcaataggcttctaatttatttactgcatcagtacggataatgctctgtgggcagcttcaacaatggtttattatcctacctkaaaaatgctaaaggaattagcgggttactttgctgctcctggtgcttgttcgttgtcctgggaaaagtgtttagggttgattggaagtttacccttyggcagaaaatgagggctttaaaatttgagggctgactaaggaatcagaggtgcaaaaggcagtgttatttatttattccttattttcaaaagaatttaatatcaagataaaggaatatataacttgttcctggaagactaccttgggagcagatacacttaggtatgtatattgaatgctgttttggagtagaatgccagtag

SEQ ID NO: 49569 - DNA, 600 bp, Chicken  19866894295696_3
agctataacgctgctctgcaggcaccagtgcagctctgaaatggaaactggcggctcctgcccwtagcagaggctcaggaacatgaaacaaaacgtgtctttgaagtatgctacaaaatatcaataggcttctaatttatttactgcatcagtacggataatgctctgtgggcagcttcaacaatggtttattatcctacctkaaaaatgctaaaggaattagcgggttactttgctgctcctggtgcttgttcgttgtcctgggaaaagtgtttagggttgattggaagtttacccttyggcagaaaatgagggctttaaaatttgagggctgactaaggaatcagaggtgcaaaaggcagtgttatttatttattccttattttcaaaagaatttaatatcaagataaaggaatatataacttgttcctggaagactaccttgggagcagatacacttaggtatgtatattgaatgctgttttggagtagaatgccagtaggaatgctaatagactactgcatattacagatgttcagtgaggtctcagacccctcttcttatttctgtgctcttctaaagtgccatgtccaggttct

SEQ ID NO: 49570 - DNA, 600 bp, Chicken  19866894295704_1
atttctgccataaacagctccttcatttggaaaccaggaggaaaaagctcagcccatcacaaagtgaccatgggtcattagactgacatacctgtgagataaagcaggtgagaccccaatttagagcagcaacccatagctgcctggagactttccgattattttatgtgccctgtttaagaagaatgaagactcaagcatcaacacggaagagctttctggtagcagagatggcaacagaatggtgacattgacccatcaaatgacagcacagtgcttgcagaacggaagggattcacyagaaggttttgtgggctgttgtttattttttaataagagacagagctgtgtgatccccagcagcagtcttaagactacaaattacagtttctcagccaagatcagtaacagtagccaaaggattcaatctagagcacaaggagtaaaaagcaaagaagagcaccagcataaacgatagctttagagaatgtggttgctcattcctgctgcttcccagcaacaacggaagactgcctacatgagctctcactgttattctctcctccatcggtggtttgtgctcaactgttcaacggcagt

SEQ ID NO: 49571 - DNA, 600 bp, Chicken  19866894295707_1
tcttcactgccttcattagagtcattagaggcagaggaagtggcagagaaggggtaaggaaggaccagtgaagtaagcagatgaggaggacaatgtgcagcacagaacaacgaatgtctgggctcagtgggaaggcagagccctttccagagctccacgctgttcaggaagggctgcctggaaataggagggtaagaaggatgaagccggagaaaggagaaagaatccaggtgcttgactcagcctgaatcagggctgaggctgaggagatgcaggtgccagaagtttgtgtgggagggytgcctccccyatagtctcttttcttctcaaacttgtgcttctttcacagacctctgccttcacccagaacaggcagtgcatttcctgttggcctccttgacctcttgtgttggggttgttgcgtggctgtttttgttaaacctgttgctctccagtctgaaaacgccgctccttttctctakatttgatcagagctgtacagctggagagattctgtgcatttcgtgttttgctggtagcattgcagcacagctctccagcacatggagcctgagtccggcacacaggaagcagtgagca

SEQ ID NO: 49572 - DNA, 600 bp, Chicken  19866894295707_2
cttcattagagtcattagaggcagaggaagtggcagagaaggggtaaggaaggaccagtgaagtaagcagatgaggaggacaatgtgcagcacagaacaacgaatgtctgggctcagtgggaaggcagagccctttccagagctccacgctgttcaggaagggctgcctggaaataggagggtaagaaggatgaagccggagaaaggagaaagaatccaggtgcttgactcagcctgaatcagggctgaggctgaggagatgcaggtgccagaagtttgtgtgggagggytgcctccccyatagtctcttttcttctcaaacttgtgcttctttcacagacctctgccttcacccagaacaggcagtgcatttcctgttggcctccttgacctcttgtgttggggttgttgcgtggctgtttttgttaaacctgttgctctccagtctgaaaacgccgctccttttctctakatttgatcagagctgtacagctggagagattctgtgcatttcgtgttttgctggtagcattgcagcacagctctccagcacatggagcctgagtccggcacacaggaagcagtgagcatgccattcta

SEQ ID NO: 49573 - DNA, 600 bp, Chicken  19866894295707_3
aataggagggtaagaaggatgaagccggagaaaggagaaagaatccaggtgcttgactcagcctgaatcagggctgaggctgaggagatgcaggtgccagaagtttgtgtgggagggytgcctccccyatagtctcttttcttctcaaacttgtgcttctttcacagacctctgccttcacccagaacaggcagtgcatttcctgttggcctccttgacctcttgtgttggggttgttgcgtggctgtttttgttaaacctgttgctctccagtctgaaaacgccgctccttttctctakatttgatcagagctgtacagctggagagattctgtgcatttcgtgttttgctggtagcattgcagcacagctctccagcacatggagcctgagtccggcacacaggaagcagtgagcatgccattctaagattagaacaagtagcccacgggctgtgtcctcccgaaactgccagctgcaggctctccaattacgctatgccttttgcaataggaaaagtcctttctcagatcctttctggcaactgaactgctgtcctctgtccagttttttttctacagggctgttttttgttttgtt

SEQ ID NO: 49574 - DNA, 600 bp, Chicken  19866894295710_1
aactgattcattcgtgggcctctgtaatctttcctcttccttcacgtgtgcagagcatatgaaatcaagaatagacttgcagagtgggtcagatccaatgtcaaatgctgatcattgtcaatgactgaaacaatggccagcaattataaactgcagctggaagatctaaaatatatagaaaagaaatcagataagctatcagcgtgacaggagagattaaaaacacacatttactctttcagtggccaaaacagcagcaggagaaagcctaagaaaaaaagtgaagagataaaaacaaawttttcacaaattaacagtagaaatatcagctaataaggaggcgaactatcactgatttagaaatgaagggcaatgcaaatggcaacaccatttaaaaattttgtagccacgtaaaccttcttcttaagaacataattatggcaacacttaggaagcaattcacttccatggtaactggaaaaatacaactagtggtgcaaggaaagtagtataatttaatcatatttcgctttgtctcagctcagtatcactataaattgaagcatctttttttccattcagaataaattctaataatat

SEQ ID NO: 49575 - DNA, 600 bp, Chicken  19866894295712_1
catctttttctctcttgccctcggtgtcagtgtatttggctgtgtctgtccaactctcctttgggacagattggctctaccttctggtctatttttctacccttaagtaagtggtcatgcttttacagcttaggttgcactgctgtttgtaagaaaaatggggaatacccagggatttcatcaaattatttgctcaagtgagaagcagactagaaattctatttttatcagttatgacctgctcactgatttagtgtacactgtgttttaatctcattctgcttttcctggcatttattyattgattaatttaataaatcagtataacttaagaatagaaagaagaatttatatggcctggtcaacctagtctgacgtccagttttctgctgtatttataaatctgaatgtgtctcacagcagcctccagcctttgtttcttttgcttttattccctagaatacagatcccctttagtactcttcattttttcttcataaagaayagaaatcaaattactgcttcatcttttttataggcttaagaagattaaactctaaatcttggtagctctcctcttcaagctctcgcttattccag

SEQ ID NO: 49576 - DNA, 600 bp, Chicken  19866894295712_2
cagactagaaattctatttttatcagttatgacctgctcactgatttagtgtacactgtgttttaatctcattctgcttttcctggcatttattyattgattaatttaataaatcagtataacttaagaatagaaagaagaatttatatggcctggtcaacctagtctgacgtccagttttctgctgtatttataaatctgaatgtgtctcacagcagcctccagcctttgtttcttttgcttttattccctagaatacagatcccctttagtactcttcattttttcttcataaagaayagaaatcaaattactgcttcatcttttttataggcttaagaagattaaactctaaatcttggtagctctcctcttcaagctctcgcttattccagtgctctttaaaatgtgtaaaccagatgttggcatgagttgttatcaatatttttgtataaaatcagctccttgctgcagcatggaactggagatgcttatgttctgtttggttcatgatggctgtaacttgataactgctcttttccagagaaaagctcttcagtctttatttcttccactgaaatatgtatgcctctgttaaaa

SEQ ID NO: 49577 - DNA, 600 bp, Chicken  19866894295712_3
ctgcttcatcttttttataggcttaagaagattaaactctaaatcttggtagctctcctcttcaagctctcgcttattccagtgctctttaaaatgtgtaaaccagatgttggcatgagttgttatcaatatttttgtataaaatcagctccttgctgcagcatggaactggagatgcttatgttctgtttggttcatgatggctgtaacttgataactgctcttttccagagaaaagctcttcagtctttatttcttccactgaaatatgtatgcctctgttaaaacacagtttgtctygccacataggcactgtttacaaagcaatccaagttattctctctgaccgctctgtcttaattcccattccttccttcctgcagcttaattttttgtggttcctcctagctttcaaagctctttctgttgtcttggctacagttttatccatttccatatttttccgtagcatagccaaattaactttgcagcaggcagctatgtggtgttgtttaaaggacttcttagtactaatgagcctcttgctgacctgattcagattctgttacctgaaaaaatgtgctgttatcttccacgtaa

SEQ ID NO: 49578 - DNA, 599 bp, Chicken  19866894295716_1
  misc_feature (1)..(43): n is any nucleotide
nnnnnnnnnnnnnnnnnnnnnnnnnnnnnnnnnnnnnnnnnnnctgcctggagttgctgcattgctctttgcttgctgcaccaataggactcaaaccactgtctgcagagcagctcatgcttactcaaccaggatctgctttttcatctcgcatttgacaagttaaccagcttagatagattgaaacgtgcccaccattaggttctgctctgctaaaccaacctcattcaaatactggttttaattaacaagtgcaatctttgtgcattaagtgttgcgattgcttttaatttgcatagracccacggaggtagctctgcagattgtcagcggatcacaggctgaaccagggcaggatgtgtgtctgaatgctccttccttttgctccagcaaacccacactctacttggctgcctcagtagatcccactgtaattaatggagggccactgctaatgttatgagcaaaagctgctttcccattaatcatctgtctgatgtgttttgcacctgcagcacgggttagatttgaccagatagtggcctaatttgcaacttaatctctgtgaactgattaaagcatgtgctggttagggagat

SEQ ID NO: 49579 - DNA, 600 bp, Chicken  19866894295716_2
ccacactctacttggctgcctcagtagatcccactgtaattaatggagggccactgctaatgttatgagcaaaagctgctttcccattaatcatctgtctgatgtgttttgcacctgcagcacgggttagatttgaccagatagtggcctaatttgcaacttaatctctgtgaactgattaaagcatgtgctggttagggagatctcaatttctacagtggaaagcttctcattagatgagctgtgatgaggtagaaatgagctgtaaggaaggcaaggaagagctggcccaggaacagyaggggtgggcagarcaccttcgttagctcctgctaccctttgctgccttgggcttaggcttactcggtattgatccatagatattctgcctttgtagtcaagctgtgaagttcagctaaatcatgttggcattcaggttttcagacctacccacctatgcaacatggtgtaataatcctgtaaaatgtagaagctggctggtgcagttctttctctttccaagccatgcatcttcagtttgagatgatattctctgggcgtgtctgtgtcacgaactgaagcatttgcagctacagaact

SEQ ID NO: 49580 - DNA, 600 bp, Chicken  19866894295716_3
gctgcctcagtagatcccactgtaattaatggagggccactgctaatgttatgagcaaaagctgctttcccattaatcatctgtctgatgtgttttgcacctgcagcacgggttagatttgaccagatagtggcctaatttgcaacttaatctctgtgaactgattaaagcatgtgctggttagggagatctcaatttctacagtggaaagcttctcattagatgagctgtgatgaggtagaaatgagctgtaaggaaggcaaggaagagctggcccaggaacagyaggggtgggcagarcaccttcgttagctcctgctaccctttgctgccttgggcttaggcttactcggtattgatccatagatattctgcctttgtagtcaagctgtgaagttcagctaaatcatgttggcattcaggttttcagacctacccacctatgcaacatggtgtaataatcctgtaaaatgtagaagctggctggtgcagttctttctctttccaagccatgcatcttcagtttgagatgatattctctgggcgtgtctgtgtcacgaactgaagcatttgcagctacagaacttctaacttgctaaa

SEQ ID NO: 49581 - DNA, 600 bp, Chicken  19866894295722_1
aaaagccctgccaacgtttaaatgctcagcagcttcccaagtacttccattctcattttggaaaagggacttgggattttattcatcaagaccactgcttcttcatctctctattcccccaaatttactattaagcgaagagcaaaagggctcaggataatgttaggaaaaaaatacttcgaagctttatcttaaaatgctgctctttgcttttgtaatggaagttaggatgtctgaaagatgaaagctgctatgccctaccatcagaattccttcccatcgcagagcaggagctctacyattcaccgccggacactgcttccagggagcacttaggtacagccacgcgtggctttgatgtttcattagggtgacatctggtagctgtaaagctggatggggaacaaagatgagccaaatatagcttgtctcaaaatacctctgcagcggaacattgcgtctggatcttaggaggcatatctgttatagacatcaacagaaataagctaacatacattgagattgtcttctgttcttacagagcatatctagacaagcattaaagagcttgactgcagtttttaaagattgtaggctggg

SEQ ID NO: 49582 - DNA, 600 bp, Chicken  19866894295723_1
gttctgtatgcagcaataaaaatcctcaactgtcctacattgcagtgggtttgtggtcaccagatgcggttcacctttctcaaagtgggaggagagtccttggggaaaagctagtagggctcattgggaagtctttaaactaggtctgaagagcaacatgagcatagttagccctcccatgataaggtgtgggatggcaagctatgctagagggacagggttctagcaggggccttgaagaacctgctgccttgagaggtgctggcaacactgcagcgcatacaaaatcctatattacartgtagtgactactggggcaacaggagaagacagtggggaaaaacaagggaagtacttagaaggaattaaagagttactgtttaaggaagtgacaagaccagctgcccagctgaagtgcctctacaacartgcaggtactttgggaaacaaacagtaggatctggaagctactgtgcaactagaagactgtgatatagttgccatctccaaaatctggtgggatgactcccatgactggtkcgtagctatcaatgactacaagctgttaagaaggcaaggaaggagaggaggggggtgttg

SEQ ID NO: 49583 - DNA, 600 bp, Chicken  19866894295723_2
agtctttaaactaggtctgaagagcaacatgagcatagttagccctcccatgataaggtgtgggatggcaagctatgctagagggacagggttctagcaggggccttgaagaacctgctgccttgagaggtgctggcaacactgcagcgcatacaaaatcctatattacartgtagtgactactggggcaacaggagaagacagtggggaaaaacaagggaagtacttagaaggaattaaagagttactgtttaaggaagtgacaagaccagctgcccagctgaagtgcctctacaacartgcaggtactttgggaaacaaacagtaggatctggaagctactgtgcaactagaagactgtgatatagttgccatctccaaaatctggtgggatgactcccatgactggtkcgtagctatcaatgactacaagctgttaagaaggcaaggaaggagaggaggggggtgttgctatctacatcaggaaaggaatagaatgtgaagagctgttgttaaagaatagtcatgagcaagtcaaaagcctatgggtgaaagagatcaaggcagaaaagggagccttgtgactgttggctactgcag

SEQ ID NO: 49584 - DNA, 600 bp, Chicken  19866894295723_3
aacctgctgccttgagaggtgctggcaacactgcagcgcatacaaaatcctatattacartgtagtgactactggggcaacaggagaagacagtggggaaaaacaagggaagtacttagaaggaattaaagagttactgtttaaggaagtgacaagaccagctgcccagctgaagtgcctctacaacartgcaggtactttgggaaacaaacagtaggatctggaagctactgtgcaactagaagactgtgatatagttgccatctccaaaatctggtgggatgactcccatgactggtkcgtagctatcaatgactacaagctgttaagaaggcaaggaaggagaggaggggggtgttgctatctacatcaggaaaggaatagaatgtgaagagctgttgttaaagaatagtcatgagcaagtcaaaagcctatgggtgaaagagatcaaggcagaaaagggagccttgtgactgttggctactgcaggccactcagtcaagtcaagcctgttgatgaggctatctacctccagctacaggaggtaacacgattgcaagagctcatcctgctggggtacttcaaccacctagacgtctg

SEQ ID NO: 49585 - DNA, 600 bp, Chicken  19866894295724_1
ttgcctagttcagtgctgtctgcctctggttgttctgaccagacagataatgcagtgccttgtactaaatcacgtcacagggagagtgttgaaatgtggtctgggtgcaggatgcatctgcagggagaaggtttctgcatgcagcaacgtgcacatgaaataaatgggagtaacaagatctgcctgacccccagcatccagcctgcccctcttttccctgctccccccccctgtgctgctgctgtgcccctggctgtgctgctgctggtgtgacctgagccagggatcagcctggggcckcatgctgctgtcgcagccccacgtggaagcagcgctgctggctgagctgagtcaggttgccacctcttggtaaggtgacattacaggatgtctgcccacaggcttcggtggccttttctttgggaggggaaaggaggggaggaggtttcctttgcgagggcaaaaggctttaaacaaagcctaaattctgcagctgctggctaagttaaaaaaagaagcgctggcactctgtgctcatttcccagctcctcctgacccagagatgtgaccatcctttctggtgcctttcctttgtgctgc

SEQ ID NO: 49586 - DNA, 600 bp, Chicken  19866894295731_1
gcctgagagctgaaggccagagccatcagctgaaggagatgcaggaactgaatacgtatggaagggggagggagaaaggaaggggtttttcccttgttaaatatttaccaccccaggctggtgatatgatatttcctgccctctaggaattcccagggactggtaaggttgaccagaaaggtatgagggcttcctgaggagtcttccagctccctaccatcctcccaaggagtaacttgaggcacttctatctcctacaggcagctcagggtctgtatgaaacctcacaactagatgatytttaaggtccattccaacccaagcaattctatgattctatgatttgaaggtgacctcagtcctgatctacagtagaactgaagctctccaggctcatgtctsttccaagttaccttcttctttagtctgagtggcagctgaaggaggtcactgctttgggtacagaaagtaaaatgtcccttgagctgggatatgccactgaggatatctgagagtcctcttctagaaggctgtgccctgaggtttgtcacctgctcccagttcaaccagggctgaaattcagatgtttctgttattgcc

SEQ ID NO: 49587 - DNA, 545 bp, Chicken  19866894295731_2
atttaccaccccaggctggtgatatgatatttcctgccctctaggaattcccagggactggtaaggttgaccagaaaggtatgagggcttcctgaggagtcttccagctccctaccatcctcccaaggagtaacttgaggcacttctatctcctacaggcagctcagggtctgtatgaaacctcacaactagatgatytttaaggtccattccaacccaagcaattctatgattctatgatttgaaggtgacctcagtcctgatctacagtagaactgaagctctccaggctcatgtctsttccaagttaccttcttctttagtctgagtggcagctgaaggaggtcactgctttgggtacagaaagtaaaatgtcccttgagctgggatatgccactgaggatatctgagagtcctcttctagaaggctgtgccctgaggtttgtcacctgctcccagttcaaccagggctgaaattcagatgtttctgttattgcccggagtctcaaggtaccatgctgatgagctccaggtccatcccttgg

SEQ ID NO: 49588 - DNA, 600 bp, Chicken  19866894295737_1
agatctagtcagaaaaactaataattcctatatgtatactgggtaaaagatgtcataaaggaaattgaaaacctaagcaaagcaattattaggtgaaagaaaataagaatctcttttctctatgataaaaaataaaatggcagtagcagaatcaattggctctagtggaattcatcaagtccctcataatgtttgtcttcattctcaagattgtacctgtagcccttgcaaaagactctcaagtttcaagaaaactaattcatttcaacatttcattcaggaaatctgttttccctacarctgtactgtatcttctcactctcccttcctcttgctctctcatctaggcaacattatctccctgccttattttctgctgtgtgtatgagattcccaccattactccaaaaaaatataaaacactaagttgttcctaacaatcttccagtccagtaatgtcattcctgatatcattaaagtagcgcttctctattaccaccctcaaagcatcagtgttgacaaagacagagccaaaggaggcagaaagtgattattctagtttatgttagcagcaattagcaatggaatagaattagtcag

SEQ ID NO: 49589 - DNA, 599 bp, Chicken  19866894295743_1
  misc_feature (1)..(76): n is any nucleotide
nnnnnnnnnnnnnnnnnnnnnnnnnnnnnnnnnnnnnnnnnnnnnnnnnnnnnnnnnnnnnnnnnnnnnnnnnnnnaacttgatgcatttgtattcctctgcatgtgtaagcagcttagcaagataaattctgagactaaatgtcacataatttattaagtttatttattatataagcaatagtatttattcttcatttatttatctaagatgttagattaccttagagctcatttctgtttttccagaatgggagattaatcaataaaattctgtataaagttgcaaaatttccatccrtggagattttcaaaactcaactgatctgagcaacctgagctggctttgaatctgkccctgtcttcagcaggcagttggaccagccatcctctggaggtcctctccaacctgatttttatagtgattctcttcagagaatacagactattaagaagtgttgctatcactgaaatagaattccccatgttttatggtataaattgaaatttactcacagwagtctttatcatgttcagcagtcacctmgctcctgttgctgaaggataccctatgcagtcctgaaactttaagccattggt

SEQ ID NO: 49590 - DNA, 599 bp, Chicken  19866894295743_2
  misc_feature (1)..(21): n is any nucleotide
nnnnnnnnnnnnnnnnnnnnnaacttgatgcatttgtattcctctgcatgtgtaagcagcttagcaagataaattctgagactaaatgtcacataatttattaagtttatttattatataagcaatagtatttattcttcatttatttatctaagatgttagattaccttagagctcatttctgtttttccagaatgggagattaatcaataaaattctgtataaagttgcaaaatttccatccrtggagattttcaaaactcaactgatctgagcaacctgagctggctttgaatctgkccctgtcttcagcaggcagttggaccagccatcctctggaggtcctctccaacctgatttttatagtgattctcttcagagaatacagactattaagaagtgttgctatcactgaaatagaattccccatgttttatggtataaattgaaatttactcacagwagtctttatcatgttcagcagtcacctmgctcctgttgctgaaggataccctatgcagtcctgaaactttaagccattggtctgtaattaaccataatacttttgccttcatctgctttctatataagcttggtgt

SEQ ID NO: 49591 - DNA, 600 bp, Chicken  19866894295743_3
ttaccttagagctcatttctgtttttccagaatgggagattaatcaataaaattctgtataaagttgcaaaatttccatccrtggagattttcaaaactcaactgatctgagcaacctgagctggctttgaatctgkccctgtcttcagcaggcagttggaccagccatcctctggaggtcctctccaacctgatttttatagtgattctcttcagagaatacagactattaagaagtgttgctatcactgaaatagaattccccatgttttatggtataaattgaaatttactcacagwagtctttatcatgttcagcagtcacctmgctcctgttgctgaaggataccctatgcagtcctgaaactttaagccattggtctgtaattaaccataatacttttgccttcatctgctttctatataagcttggtgttatacctacagagtgagaactgaaggacagggacattaggttgttgctcaagtatagtctattgatcatatgtatcacattgtggtttaccacatatatttaagaaagttgcattctctttcccctaattatcgtgtggtctttttaagatgggattattctca

SEQ ID NO: 49592 - DNA, 600 bp, Chicken  19866894295743_4
agaatgggagattaatcaataaaattctgtataaagttgcaaaatttccatccrtggagattttcaaaactcaactgatctgagcaacctgagctggctttgaatctgkccctgtcttcagcaggcagttggaccagccatcctctggaggtcctctccaacctgatttttatagtgattctcttcagagaatacagactattaagaagtgttgctatcactgaaatagaattccccatgttttatggtataaattgaaatttactcacagwagtctttatcatgttcagcagtcacctmgctcctgttgctgaaggataccctatgcagtcctgaaactttaagccattggtctgtaattaaccataatacttttgccttcatctgctttctatataagcttggtgttatacctacagagtgagaactgaaggacagggacattaggttgttgctcaagtatagtctattgatcatatgtatcacattgtggtttaccacatatatttaagaaagttgcattctctttcccctaattatcgtgtggtctttttaagatgggattattctcattgtttactatagttctgttgttgtaca

SEQ ID NO: 49593 - DNA, 599 bp, Chicken  19866894295745_1
  misc_feature (1)..(44): n is any nucleotide
nnnnnnnnnnnnnnnnnnnnnnnnnnnnnnnnnnnnnnnnnnnnataatggtagacatggaaacctaagtaatttgaccaactggtagggattacatctaaaatttatttggattttattgttttctactttacatatatataaatctctgctaatttcattatgcttgccttttgaataaaatcaactgtaataggcttacagctccatttaaatacatttctgcagactccatgcataatggatgttatataaagtattactgtctcaaactggatatcccaaagatccttgatattkcactgtacttaaaattaacactttcccaaagatgaccataacggagtttaatttttacttattacagtatkgcccctttcccagccaccgcaacatactctgtgaatagagcacagaaatacaaaaggcttaattagtttgtatgatgacatatggtagcacagggatagcctggatttacatgcataggctgtagtgtatctggggagctctaatctgatgggagatgctgtatgctctggagctccctgtagatgttgcagcctacaaagagactttttagctgtggacatccaggt

SEQ ID NO: 49594 - DNA, 600 bp, Chicken  19866894295745_2
atttgaccaactggtagggattacatctaaaatttatttggattttattgttttctactttacatatatataaatctctgctaatttcattatgcttgccttttgaataaaatcaactgtaataggcttacagctccatttaaatacatttctgcagactccatgcataatggatgttatataaagtattactgtctcaaactggatatcccaaagatccttgatattkcactgtacttaaaattaacactttcccaaagatgaccataacggagtttaatttttacttattacagtatkgcccctttcccagccaccgcaacatactctgtgaatagagcacagaaatacaaaaggcttaattagtttgtatgatgacatatggtagcacagggatagcctggatttacatgcataggctgtagtgtatctggggagctctaatctgatgggagatgctgtatgctctggagctccctgtagatgttgcagcctacaaagagactttttagctgtggacatccaggtaattatttaggtgttagtgacttaggggcttcttgcagtagccttagatttcaatgcttgttgcaggaaaay

SEQ ID NO: 49595 - DNA, 600 bp, Chicken  19866894295745_3
gcccctttcccagccaccgcaacatactctgtgaatagagcacagaaatacaaaaggcttaattagtttgtatgatgacatatggtagcacagggatagcctggatttacatgcataggctgtagtgtatctggggagctctaatctgatgggagatgctgtatgctctggagctccctgtagatgttgcagcctacaaagagactttttagctgtggacatccaggtaattatttaggtgttagtgacttaggggcttcttgcagtagccttagatttcaatgcttgttgcaggaaaaycttyccagttaacagagattaaatcagcaaggatcagcgtggtttgttgatttattaatgacatgtaattaactggcaagtaataaattgtacattaagattcagtaccagtagtacgatagataacccacaagattagacacgcacaaaatatttccatacaacttcagatttctaaatactcttttataactgaatctaaggcaatatgtatgccacttccttctcctaactgattggcagtgttgggaacacatcttctctggggatgtgctggtcctgtcacatacacctccagct

SEQ ID NO: 49596 - DNA, 598 bp, Chicken  19866894295745_4
ctttcccagccaccgcaacatactctgtgaatagagcacagaaatacaaaaggcttaattagtttgtatgatgacatatggtagcacagggatagcctggatttacatgcataggctgtagtgtatctggggagctctaatctgatgggagatgctgtatgctctggagctccctgtagatgttgcagcctacaaagagactttttagctgtggacatccaggtaattatttaggtgttagtgacttaggggcttcttgcagtagccttagatttcaatgcttgttgcaggaaaaycttyccagttaacagagattaaatcagcaaggatcagcgtggtttgttgatttattaatgacatgtaattaactggcaagtaataaattgtacattaagattcagtaccagtagtacgatagataacccacaagattagacacgcacaaaatatttccatacaacttcagatttctaaatactcttttataactgaatctaaggcaatatgtatgccacttccttctcctaactgattggcagtgttgggaacacatcttctctggggatgtgctggtcctgtcacatacacctccagctgg

SEQ ID NO: 49597 - DNA, 600 bp, Chicken  19866894295748_1
ctgatgcatatgttctttagataaagtacaaaatcttttcttacaaataagaacagtttcctcaaagaaatataggattgagctctgcacatctctgaggaatgtcctaaatgactgaggaaacaagaaaaggctgattaaaagaaaaaagcttcaattagaacatggtatcttggtaatcaaacaataatagcaaaggaaattcagaaaaagcatacaacaatttaatgggggcattcttgacaaagtactttattttgtctagtaaagggtatatacagcagtttaaagaggtttttstaatgtacagtattttcaatatttgctatggtaggaatactatactactgacgggttttgctttctaattttctaaaaaacagtcataatttctgagtatattcactacaatgtatattttttgtttattttccttagaaataaataaaagaaattgtgatctaaatacatgctaggctgttttcatttgcaattataaaagaaagagataatacagaagaacgggtattctttggaatatgagcctaaccatagggactaaaccataaaaataactttttctatagcctagtacatgct

SEQ ID NO: 49598 - DNA, 600 bp, Chicken  19866894295752_1
tcacatcacctctgtgaagccatgattctccacctgtcacgaagtacatgcttcttaagacagaaatggaaagccagggagttgccaacacttttcacaaggttttgtaccctgaaagatataaatggtaagctaagcaagtagactgtgggatcaagaactccagtactcctagtttccacttcacaggtgggatcctgatcccctaaatcgtaacatataaaaatctaaactccagagcaggctacccctttcagaatttctgtttttgtgttccctgtctactgagattgcaagttyttgtacagctaagtgaaatgactgagacatgcacagaagagttagtcctggggaggtggtgtctctgcctcaacatttttagtacaccctttagggaagcaagcctattcttgtatttttgggtatatgttaatggcctgaaaattagacaagccaagattcatttaattaatagcaacagtgccatccaaagcttgattctaattagtacgtaggatttctagattagaggacacagaacaaaggtttgggagccagctgtttggattttgtaggaaatttatatagggatcataaatg

SEQ ID NO: 49599 - DNA, 600 bp, Chicken  19866894295753_1
cagaagtataaatggtttcaaaatggattatggagagcaggtccagaggtgaccatgaaagtgaatagcctgggtgttatgaaggtgtattgctgtcaagaacagggaagtaagaagcataacagagctgctctcaactagtgcctttcacattaaagacacatacaagtttatacatgcagtagcacagtatttcaatgagaaaatgtccctggctcttttccagcaaaatttcatcaaaaaaaggtatgttcccatagacactttggttttgacaaaactggctcttttctcctaaaraaaataaataaaatccagccagttcttatcctccatgtaactgaaaaacctggggcaatttccttctcaaaygcttgagccctggaaaagttccagtscagccaacaaagacatggcagagttcagaagacaaaccagccaccaagactctgcatacatgggaacagtcagttgtagtggctgcttaccaacatgggacagctcacattgcactttgagtaggtgaatttatacaacaatacggaattcacagcttttaactatatcattctctgaaaagaatttgagttcaatttttca

SEQ ID NO: 49600 - DNA, 600 bp, Chicken  19866894295753_2
ggtgttatgaaggtgtattgctgtcaagaacagggaagtaagaagcataacagagctgctctcaactagtgcctttcacattaaagacacatacaagtttatacatgcagtagcacagtatttcaatgagaaaatgtccctggctcttttccagcaaaatttcatcaaaaaaaggtatgttcccatagacactttggttttgacaaaactggctcttttctcctaaaraaaataaataaaatccagccagttcttatcctccatgtaactgaaaaacctggggcaatttccttctcaaaygcttgagccctggaaaagttccagtscagccaacaaagacatggcagagttcagaagacaaaccagccaccaagactctgcatacatgggaacagtcagttgtagtggctgcttaccaacatgggacagctcacattgcactttgagtaggtgaatttatacaacaatacggaattcacagcttttaactatatcattctctgaaaagaatttgagttcaatttttcaaaaatggaggtcagattctttatttacttttcccctctgttacaatggcaaaacaaacagagcaaaggagaa

SEQ ID NO: 49601 - DNA, 600 bp, Chicken  19866894295753_3
agaacagggaagtaagaagcataacagagctgctctcaactagtgcctttcacattaaagacacatacaagtttatacatgcagtagcacagtatttcaatgagaaaatgtccctggctcttttccagcaaaatttcatcaaaaaaaggtatgttcccatagacactttggttttgacaaaactggctcttttctcctaaaraaaataaataaaatccagccagttcttatcctccatgtaactgaaaaacctggggcaatttccttctcaaaygcttgagccctggaaaagttccagtscagccaacaaagacatggcagagttcagaagacaaaccagccaccaagactctgcatacatgggaacagtcagttgtagtggctgcttaccaacatgggacagctcacattgcactttgagtaggtgaatttatacaacaatacggaattcacagcttttaactatatcattctctgaaaagaatttgagttcaatttttcaaaaatggaggtcagattctttatttacttttcccctctgttacaatggcaaaacaaacagagcaaaggagaaaatatactatatatgaattctctttc

SEQ ID NO: 49602 - DNA, 509 bp, Chicken  19866894295761_1
tgactggtagactgatggccaggagcaccctgatcatagtgatgggctggaattccaggatgtaagtaaggacaagagttgtgttagtaggactagattcaaaggtgagactaaaggaacaatcacagcggggtcatttccacttctgctgctgcagtggaacagctccatgcctgcaggtggaaatagaaaagccctgtaaatcatagaatcatacactggtttgagttggaagggacccttttggtcatctagtccaactaccctgaaatgaacatggacacctacagcttgatcagrttgctgagagccttgtccagcctgaccttgaaggtgtccaaggatggggcatccaccacctctctgggcaacctgttccagtgctttattgtaagataaacttttttcttctctccaaattatctcctctgattgagtgtagtatttatttggccaatttttggcctaagcaattggccactgcttgtgttcctttttccagaaaaaaa

SEQ ID NO: 49603 - DNA, 600 bp, Chicken  19866894295765_1
agacctcatattgatgttattaatgatgatctgaggaatgcattcagtttaggggatggggaaaagggaaagaaggggaagaatgaaggagaagcaaaataaatcctcagtgtccaaaaatttttccttgtgtccgatatgaggaaacagtatgtcacctccacagaagattaaacgaggtaagaagaaagatgtaaagcagagctgcatgttggcagaatcttttcagtcttcccattatcagccaaaccttttcttgtcctcctcctgcccagcatctcaccactaccaagaagctasttctatggagcatcttaaatatttcatgcagccttcagacttgcaatttttctctccccatctgcttcccctgctgaaatttcagcaggccaaaggcccttggaagcctgcctgggcaagggctccctcaactctcttttccctcaatccacttcccttcactctgctctcctgccctattaagcttcctattttcccttcttctccattctgcctccagagtaatcatctctcaatttcttctccttgctttcacacttcctcccagttcctttctaaactttagcctcttcatctcct

SEQ ID NO: 49604 - DNA, 600 bp, Chicken  19866894295765_2
ctctcctgccctattaagcttcctattttcccttcttctccattctgcctccagagtaatcatctctcaatttcttctccttgctttcacacttcctcccagttcctttctaaactttagcctcttcatctcctttttgattcattttatgttttattttcattcttaatgagccattgcctgaggtcagtattaataatccacacttcagacacccattaaatccctcagtaatctagtatgggcatgaggatctcagcagtctgatgtgcaggagagaaacccattggcaaagttgcrcagggaacctacagatatagaggacaggtgagggcagcctgggacaggagggtgtcagggtctccaaggagatggggtttggcctcttttccccatgtaacagcaataggacaagaggtaatgcctttaagctgcaccaagggaggttcaggttggatggtaggagaaaattctcagaaagagtggtgctgcactggcacaggctgcccaggaaggtggagtcaccatccctggtggtgttccagaaccacgttcagtccttccttacagattattcctctgttagatgctcaggtaata

SEQ ID NO: 49605 - DNA, 600 bp, Chicken  19866894295767_1
tgtggcacaagcaataaaccctgtcctgaacaacacaagcacaagtgggctcctttcacaacatacaggaaagcatcactagcacctggaccataactacatccagagggagtgagggcatctttcaggccgtgacattcatctgccttcaccgagagacacaaataaatatgtatctaaataaatacagaaacacacccatcaaccagcatctctctgtctctctctccagcttactctgcaatgctcagaccctggcactgtgtgccctttgacctcttgcctacagcactgaaaatytgagaatttcaaaaataaagggaggagccccattaacccattaacagatccaccctttggaggggcagtgtccctccctcacctgccaggcttgccctgccacagccaactttcttytcctgaaagccaacagccatgcactgccccatctcctcccccaggagaggcacagacacacatctgtggccatggcacaacaaatgtggccacagcacttcctacaaggccatcaccatggctctagcacagtactgtggttggcactgatcccccctttctctgccatcctgactccaggat

SEQ ID NO: 49606 - DNA, 600 bp, Chicken  19866894295767_2
gcatctttcaggccgtgacattcatctgccttcaccgagagacacaaataaatatgtatctaaataaatacagaaacacacccatcaaccagcatctctctgtctctctctccagcttactctgcaatgctcagaccctggcactgtgtgccctttgacctcttgcctacagcactgaaaatytgagaatttcaaaaataaagggaggagccccattaacccattaacagatccaccctttggaggggcagtgtccctccctcacctgccaggcttgccctgccacagccaactttcttytcctgaaagccaacagccatgcactgccccatctcctcccccaggagaggcacagacacacatctgtggccatggcacaacaaatgtggccacagcacttcctacaaggccatcaccatggctctagcacagtactgtggttggcactgatcccccctttctctgccatcctgactccaggatgcagaaagctgtgtgcacccagccatcctgccctggaacagcaattaaatgccacgagcccatrgggaaatgagtggtagtgggatgcctttgcaacccctgccaacagcccatcct

SEQ ID NO: 49607 - DNA, 600 bp, Chicken  19866894295767_3
gcagtgtccctccctcacctgccaggcttgccctgccacagccaactttcttytcctgaaagccaacagccatgcactgccccatctcctcccccaggagaggcacagacacacatctgtggccatggcacaacaaatgtggccacagcacttcctacaaggccatcaccatggctctagcacagtactgtggttggcactgatcccccctttctctgccatcctgactccaggatgcagaaagctgtgtgcacccagccatcctgccctggaacagcaattaaatgccacgagcccatrgggaaatgagtggtagtgggatgcctttgcaacccctgccaacagcccatcctttgggataaagcccacatactgggggtcccgctgttcccacagggacagtatttgctaccaagggagaagacacaggcaactctgtggctcacagcaaatccctgtggagatattcccctttttccaaacagggccccacgcccactgcactgacagtgatggggcagtggtgcccacagtgacagcaagggacaaagaccctcacttagggcagggttccccaaaggatgggaacagcagaacata

SEQ ID NO: 49608 - DNA, 599 bp, Chicken  19866894295772_1
  misc_feature (1)..(187): n is any nucleotide
nnnnnnnnnnnnnnnnnnnnnnnnnnnnnnnnnnnnnnnnnnnnnnnnnnnnnnnnnnnnnnnnnnnnnnnnnnnnnnnnnnnnnnnnnnnnnnnnnnnnnnnnnnnnnnnnnnnnnnnnnnnnnnnnnnnnnnnnnnnnnnnnnnnnnnnnnnnnnnnnnnnnnnnnnnnnnnnnnnnnnnnnnnnatacattgaatctgctgtcagttgggtggcttaaggctggtcccatgcaatccttacttctttggagctctgccagcgcaaggtgtgcgggcgcatcccctctgccagcaccyggagccgagctgggccacccaawgagccccagcctggctaacctggctctgggaaacaaggaactaaaaccaggtccagctttcactcagcacttcttccctgcacagaacctgcagaacaattactttcccactcctgtggcaccgtctgctattttaaagtaaatactcaagtcagtatttttttcagtattcagcacacatacaagcaaagacttccaggacagcgagyaaagctcctgctgtccagagtttctttcattgcccagggatgtgagcagctggaaaaagtgtttcca

SEQ ID NO: 49609 - DNA, 599 bp, Chicken  19866894295772_2
  misc_feature (1)..(164): n is any nucleotide
nnnnnnnnnnnnnnnnnnnnnnnnnnnnnnnnnnnnnnnnnnnnnnnnnnnnnnnnnnnnnnnnnnnnnnnnnnnnnnnnnnnnnnnnnnnnnnnnnnnnnnnnnnnnnnnnnnnnnnnnnnnnnnnnnnnnnnnnnnnnnnnnnnnnnnnnnnnnnnnnnnnnatacattgaatctgctgtcagttgggtggcttaaggctggtcccatgcaatccttacttctttggagctctgccagcgcaaggtgtgcgggcgcatcccctctgccagcaccyggagccgagctgggccacccaawgagccccagcctggctaacctggctctgggaaacaaggaactaaaaccaggtccagctttcactcagcacttcttccctgcacagaacctgcagaacaattactttcccactcctgtggcaccgtctgctattttaaagtaaatactcaagtcagtatttttttcagtattcagcacacatacaagcaaagacttccaggacagcgagyaaagctcctgctgtccagagtttctttcattgcccagggatgtgagcagctggaaaaagtgtttccacatataagaggctactccaaaat

SEQ ID NO: 49610 - DNA, 600 bp, Chicken  19866894295772_3
tgcaatccttacttctttggagctctgccagcgcaaggtgtgcgggcgcatcccctctgccagcaccyggagccgagctgggccacccaawgagccccagcctggctaacctggctctgggaaacaaggaactaaaaccaggtccagctttcactcagcacttcttccctgcacagaacctgcagaacaattactttcccactcctgtggcaccgtctgctattttaaagtaaatactcaagtcagtatttttttcagtattcagcacacatacaagcaaagacttccaggacagcgagyaaagctcctgctgtccagagtttctttcattgcccagggatgtgagcagctggaaaaagtgtttccacatataagaggctactccaaaatacacaggaaaccaattttatacagctgtctacccctctattttgattaacaaggcaacttacttaaacagcttcagtcatacgtggttaattgtcatccttcaaatgaacacccacaagctcctgaccgtgcaaagattatgcattgcataccaggagaacactcctggccctcacgcagtaacagctctttaaagtttgatataagcag

SEQ ID NO: 49611 - DNA, 600 bp, Chicken  19866894295772_4
agtttctttcattgcccagggatgtgagcagctggaaaaagtgtttccacatataagaggctactccaaaatacacaggaaaccaattttatacagctgtctacccctctattttgattaacaaggcaacttacttaaacagcttcagtcatacgtggttaattgtcatccttcaaatgaacacccacaagctcctgaccgtgcaaagattatgcattgcataccaggagaacactcctggccctcacgcagtaacagctctttaaagtttgatataagcagggtgaatgatccagctcrttcgatatatttcatacttcacaccaaataaaatactgagtatgcacagtgttaggaagtgggatattactgccatttgattacagtgctaagaagagtgtaaatgagtatttgctgccctaagaagctgtactttcctgccttgagttggcatataatctttctacaggacagacgtggcaagtacaatacagctgagaacgacgcatcgctacgtctctgccagaaggtttctgtgtagagtacagtacagttatgatatagttaagcttaagtgtctaacttgccagagattcagat

SEQ ID NO: 49612 - DNA, 600 bp, Chicken  19866894295774_1
tggccggggacctgccaagagaggagactgctctccatgatgggcccaggtccaactgaaggcagtgagtctaccaggacactctgcattgaggccccggacatcaaggtcaacttctcctgcagggctgctgcaatcagtgtttactgggctcctggcagtgatgcaaggcttattttttcctccttgcacaagagaggccttaggcagggctctgccctgtggtaggggaggaaattgccgggggcagagttgctgagtcaggtgaatgggttgggaaactcttaatgagcatttccwtgaactyggaggagcgtactgcagaagtggaagagcacgagaggcacgcacagggccagcagcacctgagcccacccctggtttgtgcctgaggacatgcagcgtgtcttgtttccaacagcgaacccaactgagaagtggctgcacagaagctggacagcagcaggagaagtcaaatatcgtggcccatggatgtggtttgaacctctgacggcaccgcatccaggaaagcagtgtttcattgcacgtgcctgtctgtagcatgcagctttcccatggtttccataagctcccacacag

SEQ ID NO: 49613 - DNA, 600 bp, Chicken  19866894295774_2
ggacctgccaagagaggagactgctctccatgatgggcccaggtccaactgaaggcagtgagtctaccaggacactctgcattgaggccccggacatcaaggtcaacttctcctgcagggctgctgcaatcagtgtttactgggctcctggcagtgatgcaaggcttattttttcctccttgcacaagagaggccttaggcagggctctgccctgtggtaggggaggaaattgccgggggcagagttgctgagtcaggtgaatgggttgggaaactcttaatgagcatttccwtgaactyggaggagcgtactgcagaagtggaagagcacgagaggcacgcacagggccagcagcacctgagcccacccctggtttgtgcctgaggacatgcagcgtgtcttgtttccaacagcgaacccaactgagaagtggctgcacagaagctggacagcagcaggagaagtcaaatatcgtggcccatggatgtggtttgaacctctgacggcaccgcatccaggaaagcagtgtttcattgcacgtgcctgtctgtagcatgcagctttcccatggtttccataagctcccacacaggcatcac

SEQ ID NO: 49614 - DNA, 574 bp, Chicken  19866894295774_3
cagcaggagaagtcaaatatcgtggcccatggatgtggtttgaacctctgacggcaccgcatccaggaaagcagtgtttcattgcacgtgcctgtctgtagcatgcagctttcccatggtttccataagctcccacacaggcatcacccatcacgccagcagccagacacagagccttggggacaggaggaactggtaagtttgctgctgtgaactcacacaggtggaacagtcattgaggagggtttgttcccattcaaaccacacctggagaagggcaaactggcctgggtgtagcaycgcagctccaacacagcacaccagatgtgtacgttgatggaagcaggaccagactccaactctgaatatcccagatagcgacggctgcatgagtggtagagggagagagaaggagccatcatggctggaagagatgcagccacagtgtgagggtgggatatggcccctctgggtcgtacagacacgggaagcttcatggtgcaaggcagtgatggcagaggtgatgcaaggcagtgatggcagccaccaacactatctgtacgggaaagggaga

SEQ ID NO: 49615 - DNA, 599 bp, Chicken  19866894295775_1
  misc_feature (1)..(20): n is any nucleotide
nnnnnnnnnnnnnnnnnnnnctgtgctgtgctgtgctgtgctgctaggtgcctccctgcctccccagctgcccaggagctgatttatgtgacctttaaaaaaacgttcccctgaacacttcttcttcaaattaccaaacctttgtttccttccagctgcctgataagtgctaattatacacacagctgctgaagtattctcttccctacagcaggtgaagaagattcctatcacagcacatgctctaaaactcctcatctgttttcttaaagccatttgatgctacctgtctttagcctygcagaaactgcctgtctgtattttggtggcatgcacagaattacaggaatgtccctgggaggggggcagarcgctgggaattaaaggagagcacaagaccatagggctaaactgactgcacagctgagaccagtggtcccactttcctccartatcaaagcacttctgacctgagggcagaggctctggaaagagtgccaaagctacccgctggctgtaagccaggacacacagctgttatggacaggtaccataggtatcccacacctttgtaccacgggtacgtaactcagcagcat

SEQ ID NO: 49616 - DNA, 600 bp, Chicken  19866894295775_2
ccaggagctgatttatgtgacctttaaaaaaacgttcccctgaacacttcttcttcaaattaccaaacctttgtttccttccagctgcctgataagtgctaattatacacacagctgctgaagtattctcttccctacagcaggtgaagaagattcctatcacagcacatgctctaaaactcctcatctgttttcttaaagccatttgatgctacctgtctttagcctygcagaaactgcctgtctgtattttggtggcatgcacagaattacaggaatgtccctgggaggggggcagarcgctgggaattaaaggagagcacaagaccatagggctaaactgactgcacagctgagaccagtggtcccactttcctccartatcaaagcacttctgacctgagggcagaggctctggaaagagtgccaaagctacccgctggctgtaagccaggacacacagctgttatggacaggtaccataggtatcccacacctttgtaccacgggtacgtaactcagcagcatgagtccaagagagccactgcatggctcagccttcaaaatctgtgcaatgtcattctgtgcagtgtcatgagc

SEQ ID NO: 49617 - DNA, 600 bp, Chicken  19866894295775_3
cagctgcctgataagtgctaattatacacacagctgctgaagtattctcttccctacagcaggtgaagaagattcctatcacagcacatgctctaaaactcctcatctgttttcttaaagccatttgatgctacctgtctttagcctygcagaaactgcctgtctgtattttggtggcatgcacagaattacaggaatgtccctgggaggggggcagarcgctgggaattaaaggagagcacaagaccatagggctaaactgactgcacagctgagaccagtggtcccactttcctccartatcaaagcacttctgacctgagggcagaggctctggaaagagtgccaaagctacccgctggctgtaagccaggacacacagctgttatggacaggtaccataggtatcccacacctttgtaccacgggtacgtaactcagcagcatgagtccaagagagccactgcatggctcagccttcaaaatctgtgcaatgtcattctgtgcagtgtcatgagcgtaccacagagtgaggtacagcagtcaatttttcagtccttaaaagttttgcattgctcctcgtgctgaggaaggaccatc

SEQ ID NO: 49618 - DNA, 600 bp, Chicken  19866894295781_1
gtaaagaatgaaacagaattatcaaattactgtcctgaaacacgttaacttatgctaaaccaaacctttttcactgaaaattgttcaatctgattattttttcttttgaaaagcttctgaacttccttgaacacattctgagcaccattgacatcaccagtggctccttggcacactatgacacagaaacaaaaatgtgttaacactgctgggataaaaaaaaaaagagagagagaaaaaagattaaacatcatagagttgtgggggaaaaaaacaaacatgcacttctgcaaaggaccragagtgggatctgatgaacacaaaaatcccaactctcgcaggtatgctctgagatcatcaacaagtctgtattgttttccgtacccattaaaggacctagtatcacccaacagctaaggatttattaagtacaccttttcaatacactgtcagcttagcaataggtcacgtaataatcatagctggagggcaaaggcatatagacatgcattaataaattacataaacaraattacataagtacagtctgacagacagcwgcataagcagctgtgtggaacacactaagagcactagtca

SEQ ID NO: 49619 - DNA, 600 bp, Chicken  19866894295781_2
gagagaaaaaagattaaacatcatagagttgtgggggaaaaaaacaaacatgcacttctgcaaaggaccragagtgggatctgatgaacacaaaaatcccaactctcgcaggtatgctctgagatcatcaacaagtctgtattgttttccgtacccattaaaggacctagtatcacccaacagctaaggatttattaagtacaccttttcaatacactgtcagcttagcaataggtcacgtaataatcatagctggagggcaaaggcatatagacatgcattaataaattacataaacaraattacataagtacagtctgacagacagcwgcataagcagctgtgtggaacacactaagagcactagtcagtgccaaaagtaccatatcacatcactgatttatcacttgcaatcatcactgaaaatactcacctgctgttaaataagcgtaatagcactgagaccacctggattcatttttaagcctttcaaaggattcaaaggcatctttgaaattcatctctatcatgctgcaccagcctaaaggagagacaccaactgaatgaaagcacagtaattcaaaygtggtataaacgtta

SEQ ID NO: 49620 - DNA, 600 bp, Chicken  19866894295781_3
gtgggggaaaaaaacaaacatgcacttctgcaaaggaccragagtgggatctgatgaacacaaaaatcccaactctcgcaggtatgctctgagatcatcaacaagtctgtattgttttccgtacccattaaaggacctagtatcacccaacagctaaggatttattaagtacaccttttcaatacactgtcagcttagcaataggtcacgtaataatcatagctggagggcaaaggcatatagacatgcattaataaattacataaacaraattacataagtacagtctgacagacagcwgcataagcagctgtgtggaacacactaagagcactagtcagtgccaaaagtaccatatcacatcactgatttatcacttgcaatcatcactgaaaatactcacctgctgttaaataagcgtaatagcactgagaccacctggattcatttttaagcctttcaaaggattcaaaggcatctttgaaattcatctctatcatgctgcaccagcctaaaggagagacaccaactgaatgaaagcacagtaattcaaaygtggtataaacgttactgaagcatagcatctgctcatgagagctg

SEQ ID NO: 49621 - DNA, 600 bp, Chicken  19866894295781_4
aaattacataaacaraattacataagtacagtctgacagacagcwgcataagcagctgtgtggaacacactaagagcactagtcagtgccaaaagtaccatatcacatcactgatttatcacttgcaatcatcactgaaaatactcacctgctgttaaataagcgtaatagcactgagaccacctggattcatttttaagcctttcaaaggattcaaaggcatctttgaaattcatctctatcatgctgcaccagcctaaaggagagacaccaactgaatgaaagcacagtaattcaaaygtggtataaacgttactgaagcatagcatctgctcatgagagctggagctagcttaacaattataccaataactggaaaatttaaaacaaaactaatcaataataccttttaaacctggtttaaattagctggaaaatactgagttattcatgttataaaaaacaacaaaaccaattcacactaacaacaaatcaccaaaagctcttccttagctactaccagctccattactcttctttaaccagacccatttaaagcttctctattctaaagatttccatgaaaattaaaagcagaga

SEQ ID NO: 49622 - DNA, 600 bp, Chicken  19866894295788_1
gttgcaaggtgccttgatgagctgactgtagctctgattgataaacagcagtagatatgcataaaagagtgtgggtgcctccagcatgtctctgccttcagtgaagccagaaaagagggaaaacaaagtgctttacagaaacccattctcttgcctggactgataagcttacaaaataaataatatgcattaaacataagtaaggagaatacagagaacatttgtcttcatctatactatgtttcagaatattcatccaaattcatctcctgtgctgtttctgtggggctattaacaaargataaatgcagctcactattgaattgtattctcatctgaacaaaatcagtgatgatagctgcgtgaaaacctaggactgagatccagctccataatgccttgtgaaaaagcagcacagcttcaatagaaagggtatccatactgccctgccagaagtgagtgggcagattacaaaaaggaacggaaaatgcatagccccagtgacaggagacatcagcaatggaatatcaagcagcatttacagagacacatatcccatctatcttctgctctacataggacagccagacaaccagccca

SEQ ID NO: 49623 - DNA, 600 bp, Chicken  19866894295789_1
aaaaggaccaactacctcaagttaaaaaggattttgcaattaataggtctactattttttttttttcctgatctgcagttgtctctatttatgcactggaataccaaaagacagacacagcaaggatgctgaagtgctatgcctttcatacttatttgataccaaatgtaacttgggtacgaggcaatacatatatccaagaaacaggtcgggaggaaatcaggaatggagttctctcttctgttagaagtgaccagaatattataaacacatctgatacttactgctgtcacattaatytctccaatgaaaactggactgctaagtggagtatgcaaggtaaagataaagggataaagcctcttcctacatcattactgtaattattggttgtcatgttgctggggtttttcagcctggagaagtgaaggctctgaggagacctaatagcagcctggagtaactccaggagacctacagacaagctggcgagggacttcttatgatggcaggtagtgacagaacaagggtaaatggctttaaactagaagatggtagatttagactagatattagaaagaaactcttcactatgagggt

SEQ ID NO: 49624 - DNA, 599 bp, Chicken  19866894295799_1
  misc_feature (1)..(47): n is any nucleotide
nnnnnnnnnnnnnnnnnnnnnnnnnnnnnnnnnnnnnnnnnnnnnnnttaagttatggcatgctcctaaaaacaccaggaaattccgttttgaagttgatgttccagtcctaactcctgttgactttatatttcttttctctaaggcacaggcatgagctggggatggagtgtggctggaagcagagtgatgctgcctcaggctgacacctcacattaatctcattaggtgagctacgtgggttcactcaggccctcatagaaagcaagagcagaaatctctgttctcagcagccaaagyccatcaaatacagtatctgccatttcactgtattaactcctagttacataaaagaaaatgaaccaaacttgagggaatttacgtcagagcagctgtttgcatgcatcttctgctggtcttaactctcacaccttgggctttcctgttagcgtttgcaataacgtcattgcatcatggtccgagtgtttaatattccctctttcaaaatatgaagttgcagctgactccctgtattcttctgggatagatgcagaaaaagctttacttaacagctgctatatattattattattacctat

SEQ ID NO: 49625 - DNA, 600 bp, Chicken  19866894295802_1
tatcttggtagggctgtgttttgcagaactaaacgctttggagcaggagtcaagaatatggactaagttttgccaaggtcattagtagcaatggctgcctaattgtggaccctctcaagtgacctgatttcaaacagtcgcagagtttgcagttactgcattaagccactctaagaagttgtatataatggagatacctgaagtccctttgaaaatctcagttctaattctggatttccaaacttcccatgtgaacttaagaaaatcactcatcctacctggatattcttttccttaccyttaccaggagagggtaatgctcccattttctgtgttatgagacctaattcatraatatttattgatgtctttgtacaatactagcctcataattatttttgaaattgcacattgggaacctgctggagtttccatmaattggtacagaaatcattctttaactctgttctctcagtgccttttggggagtagcatctgtgtagccttagtactagatacagagtccctgttgcactttcttcccaraacagcatgtgtatttccatggccagcaagcaatgagagcacaaaatcataraa

SEQ ID NO: 49626 - DNA, 600 bp, Chicken  19866894295802_2
gaatatggactaagttttgccaaggtcattagtagcaatggctgcctaattgtggaccctctcaagtgacctgatttcaaacagtcgcagagtttgcagttactgcattaagccactctaagaagttgtatataatggagatacctgaagtccctttgaaaatctcagttctaattctggatttccaaacttcccatgtgaacttaagaaaatcactcatcctacctggatattcttttccttaccyttaccaggagagggtaatgctcccattttctgtgttatgagacctaattcatraatatttattgatgtctttgtacaatactagcctcataattatttttgaaattgcacattgggaacctgctggagtttccatmaattggtacagaaatcattctttaactctgttctctcagtgccttttggggagtagcatctgtgtagccttagtactagatacagagtccctgttgcactttcttcccaraacagcatgtgtatttccatggccagcaagcaatgagagcacaaaatcataraatcatagaatcatcatagaatggcttgggtcggaagggatgatgaacagatgac

SEQ ID NO: 49627 - DNA, 600 bp, Chicken  19866894295802_3
gtcgcagagtttgcagttactgcattaagccactctaagaagttgtatataatggagatacctgaagtccctttgaaaatctcagttctaattctggatttccaaacttcccatgtgaacttaagaaaatcactcatcctacctggatattcttttccttaccyttaccaggagagggtaatgctcccattttctgtgttatgagacctaattcatraatatttattgatgtctttgtacaatactagcctcataattatttttgaaattgcacattgggaacctgctggagtttccatmaattggtacagaaatcattctttaactctgttctctcagtgccttttggggagtagcatctgtgtagccttagtactagatacagagtccctgttgcactttcttcccaraacagcatgtgtatttccatggccagcaagcaatgagagcacaaaatcataraatcatagaatcatcatagaatggcttgggtcggaagggatgatgaacagatgactgtgaccggcatggctgtcagtgctcacagttgttgtccagccacttggggtatccttccactacagacacagttatggactc

SEQ ID NO: 49628 - DNA, 600 bp, Chicken  19866894295802_4
ccatgtgaacttaagaaaatcactcatcctacctggatattcttttccttaccyttaccaggagagggtaatgctcccattttctgtgttatgagacctaattcatraatatttattgatgtctttgtacaatactagcctcataattatttttgaaattgcacattgggaacctgctggagtttccatmaattggtacagaaatcattctttaactctgttctctcagtgccttttggggagtagcatctgtgtagccttagtactagatacagagtccctgttgcactttcttcccaraacagcatgtgtatttccatggccagcaagcaatgagagcacaaaatcataraatcatagaatcatcatagaatggcttgggtcggaagggatgatgaacagatgactgtgaccggcatggctgtcagtgctcacagttgttgtccagccacttggggtatccttccactacagacacagttatggactctcctagacattccttatgttcagttggaaggaggatatgcaatgcaaactttccatagggtcaacattactgttttgaacccttacgtactgttcatctcgtcattcaaa

SEQ ID NO: 49629 - DNA, 600 bp, Chicken  19866894295802_5
cyttaccaggagagggtaatgctcccattttctgtgttatgagacctaattcatraatatttattgatgtctttgtacaatactagcctcataattatttttgaaattgcacattgggaacctgctggagtttccatmaattggtacagaaatcattctttaactctgttctctcagtgccttttggggagtagcatctgtgtagccttagtactagatacagagtccctgttgcactttcttcccaraacagcatgtgtatttccatggccagcaagcaatgagagcacaaaatcataraatcatagaatcatcatagaatggcttgggtcggaagggatgatgaacagatgactgtgaccggcatggctgtcagtgctcacagttgttgtccagccacttggggtatccttccactacagacacagttatggactctcctagacattccttatgttcagttggaaggaggatatgcaatgcaaactttccatagggtcaacattactgttttgaacccttacgtactgttcatctcgtcattcaaatctgcttgcaaccccttggtgcaaactgagggccgaacaaagctggtagaaa

SEQ ID NO: 49630 - DNA, 600 bp, Chicken  19866894295805_1
tgtttactgatatctggtaccactgagtttgtgtggctgagcacacttggcagccactctgacagcatggtcaccactgggatctgtctcctggctgagcatctaataaaatttgtggaatttcatgtatttgagctcctactgctctgtcaagtttggttaaaatctgtgactaagtttgtggagggagagggaagggaagacactaaaacacaggagactggtattgtgcatcattgcactggtgtcatttttattaggaaattggaggacagttgctaagtagcaaatcttaggggwtttaaaagtagctgtagcaatgctccttgggcagkgcttgaaaagctcaatgtttggagcctgccttatgcactgcacacagttaacctatcacattaggataactcatagtcctataacccaagctctgtctgttctccttcccatctaaaatgatgttgactacagagaaatggtttactcctgctctgaaatgtgcagaacattatattcttccacacatgttcatttctgctacaaaactgttgatttttgctctcycctttttttcacacatcattttacttttaggactttcat

SEQ ID NO: 49631 - DNA, 600 bp, Chicken  19866894295805_2
gctgagcacacttggcagccactctgacagcatggtcaccactgggatctgtctcctggctgagcatctaataaaatttgtggaatttcatgtatttgagctcctactgctctgtcaagtttggttaaaatctgtgactaagtttgtggagggagagggaagggaagacactaaaacacaggagactggtattgtgcatcattgcactggtgtcatttttattaggaaattggaggacagttgctaagtagcaaatcttaggggwtttaaaagtagctgtagcaatgctccttgggcagkgcttgaaaagctcaatgtttggagcctgccttatgcactgcacacagttaacctatcacattaggataactcatagtcctataacccaagctctgtctgttctccttcccatctaaaatgatgttgactacagagaaatggtttactcctgctctgaaatgtgcagaacattatattcttccacacatgttcatttctgctacaaaactgttgatttttgctctcycctttttttcacacatcattttacttttaggactttcatttttctcttgcttcttttctcctttttaatttctc

SEQ ID NO: 49632 - DNA, 389 bp, Chicken  19866894295805_3
aaattggaggacagttgctaagtagcaaatcttaggggwtttaaaagtagctgtagcaatgctccttgggcagkgcttgaaaagctcaatgtttggagcctgccttatgcactgcacacagttaacctatcacattaggataactcatagtcctataacccaagctctgtctgttctccttcccatctaaaatgatgttgactacagagaaatggtttactcctgctctgaaatgtgcagaacattatattcttccacacatgttcatttctgctacaaaactgttgatttttgctctcycctttttttcacacatcattttacttttaggactttcatttttctcttgcttcttttctcctttttaatttctcacattcctttcaaca

SEQ ID NO: 49633 - DNA, 600 bp, Chicken  19866894295818_1
ctgaaagctgctccttcttcaaagcatatattcaccaaatgttgtcagcaaaccatttccataagagaattgttggtgagctgtagctcaagtacttctcacatgtaattggcttttgttacatttttattttaaggttttagtgttttaacatctccttaacaaagttaataacaagagagaaaaatactaagatacagctagtgaatgttatttcttttatacatcagttaataaggtcttaatgttacaaacctgtctgaattttcttaaaatatcagtaagataacagtaaccatmagtctcacaaaattaaatttatctaagatcagtctgaagaggacatttcccggttaaaccaaaccctgctctctgagttgctctttcccaaagcaactcactccaaaatgctcaactccaacagacatcctatcttctcccctctgcaggattctcttcaaagacactggtgtacatgtgttgagccgcctgcaggtctcacttctgaaatctactttctgctaccaccaatcatctcttttgctccctttggatctcttatgagaagataaaatcacctagccattaggccaggtatgt

SEQ ID NO: 49634 - DNA, 599 bp, Chicken  19866894295822_1
  misc_feature (1)..(186): n is any nucleotide
nnnnnnnnnnnnnnnnnnnnnnnnnnnnnnnnnnnnnnnnnnnnnnnnnnnnnnnnnnnnnnnnnnnnnnnnnnnnnnnnnnnnnnnnnnnnnnnnnnnnnnnnnnnnnnnnnnnnnnnnnnnnnnnnnnnnnnnnnnnnnnnnnnnnnnnnnnnnnnnnnnnnnnnnnnnnnnnnnnnnnnnnnncatctaggcaggagcacctgctgtgcttctcaacatttttggtgaatgaagatagaaaaatagtctttatagaggcaggggtgtcactggcagttattcttcctaataggatgrttgggagcatgttgtttccccttcctttgcctcactttccgtgcgtggaaaatggttgatgatttgcctttcctacacctctccaaaacacccagagctgctgctgagtgtgtatgtgactctgatggaaggtcacaaccaactgagcagtaatgcctacactgctgtgctctgagtgtcccaggtgagccaagtgcatgtaactgatgagctctgttgcagagtttagtacagagagctaataaggagatcttgccctattttgggcatgttttgcaaacacactgctgatatttgat

SEQ ID NO: 49635 - DNA, 474 bp, Chicken  19866894295822_2
catctaggcaggagcacctgctgtgcttctcaacatttttggtgaatgaagatagaaaaatagtctttatagaggcaggggtgtcactggcagttattcttcctaataggatgrttgggagcatgttgtttccccttcctttgcctcactttccgtgcgtggaaaatggttgatgatttgcctttcctacacctctccaaaacacccagagctgctgctgagtgtgtatgtgactctgatggaaggtcacaaccaactgagcagtaatgcctacactgctgtgctctgagtgtcccaggmtgtcctaggcatattattttatgagcagctaaccaggaaaaataggaatgagagtaagcacctgcctttaagagcagcattagcagctttggccaatgtcagttttcagtatttattaaagattaaagggaggaaagaacattttctacctcttgctaccctggcaatttaatg

SEQ ID NO: 49636 - DNA, 599 bp, Chicken  19866894295823_1
  misc_feature (1)..(131): n is any nucleotide
nnnnnnnnnnnnnnnnnnnnnnnnnnnnnnnnnnnnnnnnnnnnnnnnnnnnnnnnnnnnnnnnnnnnnnnnnnnnnnnnnnnnnnnnnnnnnnnnnnnnnnnnnnnnnnnnnnnnnnnnnnnnnnnnnnncacttgtttgcaggagacaaagcaatgaatttctctgactttctgaccatcattactgacaagaattgttttatccagaccctatgtaagtaagaaataccctacctaggtacatgtcgttcccctccagcaaaactctcacttatccagagatatctgaattacctcrttctaattggtactgagcaagaaatcagcactgtgacccagcattgcagctaatgaaaagccaaaagaactcatcctccctgctggacatccaaccagcacttggcagaaaacggggatgggtccccactgagcagactttggtctgctggggtctccactccccctgaaggtgaggcaaggctcagctgtggcwctgactgctttcctcctctccagtccctgacaaaaacgacrcaggtaactttgatcatgtygatgccagaggaatcctcctcctcaaagtcttgctgaagctgg

SEQ ID NO: 49637 - DNA, 600 bp, Chicken  19866894295823_2
attgttttatccagaccctatgtaagtaagaaataccctacctaggtacatgtcgttcccctccagcaaaactctcacttatccagagatatctgaattacctcrttctaattggtactgagcaagaaatcagcactgtgacccagcattgcagctaatgaaaagccaaaagaactcatcctccctgctggacatccaaccagcacttggcagaaaacggggatgggtccccactgagcagactttggtctgctggggtctccactccccctgaaggtgaggcaaggctcagctgtggcwctgactgctttcctcctctccagtccctgacaaaaacgacrcaggtaactttgatcatgtygatgccagaggaatcctcctcctcaaagtcttgctgaagctggtggagttggaagctctgccccagagaactctatttcatatttccaggtgagcttccttagagttgtaagtcagagaaggaagttccccctatcactgtgatatttacatgccacctaattagataaacagataacaggggcccaakactacatttcctgaaatgtcccatatctagttggacacccaaaagcacct

SEQ ID NO: 49638 - DNA, 600 bp, Chicken  19866894295823_3
ctaggtacatgtcgttcccctccagcaaaactctcacttatccagagatatctgaattacctcrttctaattggtactgagcaagaaatcagcactgtgacccagcattgcagctaatgaaaagccaaaagaactcatcctccctgctggacatccaaccagcacttggcagaaaacggggatgggtccccactgagcagactttggtctgctggggtctccactccccctgaaggtgaggcaaggctcagctgtggcwctgactgctttcctcctctccagtccctgacaaaaacgacrcaggtaactttgatcatgtygatgccagaggaatcctcctcctcaaagtcttgctgaagctggtggagttggaagctctgccccagagaactctatttcatatttccaggtgagcttccttagagttgtaagtcagagaaggaagttccccctatcactgtgatatttacatgccacctaattagataaacagataacaggggcccaakactacatttcctgaaatgtcccatatctagttggacacccaaaagcacctgcatagctttggtacctaccttacaaaggtgttgttgtaaa

SEQ ID NO: 49639 - DNA, 600 bp, Chicken  19866894295823_4
tccagcaaaactctcacttatccagagatatctgaattacctcrttctaattggtactgagcaagaaatcagcactgtgacccagcattgcagctaatgaaaagccaaaagaactcatcctccctgctggacatccaaccagcacttggcagaaaacggggatgggtccccactgagcagactttggtctgctggggtctccactccccctgaaggtgaggcaaggctcagctgtggcwctgactgctttcctcctctccagtccctgacaaaaacgacrcaggtaactttgatcatgtygatgccagaggaatcctcctcctcaaagtcttgctgaagctggtggagttggaagctctgccccagagaactctatttcatatttccaggtgagcttccttagagttgtaagtcagagaaggaagttccccctatcactgtgatatttacatgccacctaattagataaacagataacaggggcccaakactacatttcctgaaatgtcccatatctagttggacacccaaaagcacctgcatagctttggtacctaccttacaaaggtgttgttgtaaataccacatgtacccatttaa

SEQ ID NO: 49640 - DNA, 600 bp, Chicken  19866894295823_5
tgctggggtctccactccccctgaaggtgaggcaaggctcagctgtggcwctgactgctttcctcctctccagtccctgacaaaaacgacrcaggtaactttgatcatgtygatgccagaggaatcctcctcctcaaagtcttgctgaagctggtggagttggaagctctgccccagagaactctatttcatatttccaggtgagcttccttagagttgtaagtcagagaaggaagttccccctatcactgtgatatttacatgccacctaattagataaacagataacaggggcccaakactacatttcctgaaatgtcccatatctagttggacacccaaaagcacctgcatagctttggtacctaccttacaaaggtgttgttgtaaataccacatgtacccatttaaatagcacctttccaggtatgtcagtatgcagcatcccatgctgagcaggccttgggctgtgcttcactggtcagtggtgccctcttttgtcttccagttactaccagcagaagtttagggactgcagtagtgagcaagcctggacggatgctgatttcctcgtgagtcacaaaaagaacaacaacaaaa

SEQ ID NO: 49641 - DNA, 600 bp, Chicken  19866894295827_1
ttctgtaccacctgacaccacagctgtaggcagttgttaggaattgattgctgctttagggctactgtgtgtcagtcagggtgggatgagtccttgcagtgctagtgggttgtccttggtgttgtgggtcaattggtgagtaattgcattgcagctgtatgtattgttatcactgtattttagtttccattttttttcttttgttttggtaaatagtttttatcttaacccgtgagttctattttgtttctggttctctccttcatccctcctgggaggtagtgactgaacagccacatrgtgctgagctactgctaggttataccacaacagtgagcttctactacccagatcattcgttctgggagacaggaaagtaacatacctcaagggtagtgaaaatctaatttctgaagcgtttacccactaagtgttgtcaccttatgatggtagtcccattttccttgatctccattgtccacgtgaaatgcctgtaaggcaaatagtagcacccaactaaccaggaatctgctgtcaattggcatatttcaagtgagccttctgcttgccttccctgagcctcctgactcagtgtgttag

SEQ ID NO: 49642 - DNA, 600 bp, Chicken  19866894295832_1
agcaaaacgcgcattctttttcctccaataaactctgcagataagcaaagctactgctcataaatcagttttccaagtgcataaagctattaaaatatgcacagtgttaagaagccatctatgaacaaagactgcccggatcagtccttgatgctgtaggaaagcctaagatggtcagagcttgaaagcattgaagccatggggcagctcttggtgtaactctgctgcaggggacagcaataaggcatgctggctttcaggctgtccttacagcaactctgctgttttcagagatggagrggaaaacaggggagaacatgaacatccatttaaatctaacctagatttcctaactgatctcctgagatgttttaaatagtgtccagaaacttgttatttacgctgtgtaataaagctgacaccctcaagcctttctggagcaccaatcaagccaacagcccagccacatcctggcacagagttaaatcccagcccactgggatcaatagaaactttaccacagctttcagtagtatccakttggyccatgaagtcactgactgttaacccagaagttatctgcagtygaaatagccactt

SEQ ID NO: 49643 - DNA, 600 bp, Chicken  19866894295832_2
taaggcatgctggctttcaggctgtccttacagcaactctgctgttttcagagatggagrggaaaacaggggagaacatgaacatccatttaaatctaacctagatttcctaactgatctcctgagatgttttaaatagtgtccagaaacttgttatttacgctgtgtaataaagctgacaccctcaagcctttctggagcaccaatcaagccaacagcccagccacatcctggcacagagttaaatcccagcccactgggatcaatagaaactttaccacagctttcagtagtatccakttggyccatgaagtcactgactgttaacccagaagttatctgcagtygaaatagccacttgctatgaaacacttcctcacctggtgtctttacaatacacactgtagcatggtgacatcttctggggagcaccctctccttgtaaaggctatggagggagccagggacagcatcctaacttcagtgctttacatcatacttttaagtcaggagcaccaaactgatcaatactttagtttccaaaaacagaagtaaaakaacaaaagcagccaaagctctacaagccctttgtatcaactg

SEQ ID NO: 49644 - DNA, 600 bp, Chicken  19866894295832_3
catgctggctttcaggctgtccttacagcaactctgctgttttcagagatggagrggaaaacaggggagaacatgaacatccatttaaatctaacctagatttcctaactgatctcctgagatgttttaaatagtgtccagaaacttgttatttacgctgtgtaataaagctgacaccctcaagcctttctggagcaccaatcaagccaacagcccagccacatcctggcacagagttaaatcccagcccactgggatcaatagaaactttaccacagctttcagtagtatccakttggyccatgaagtcactgactgttaacccagaagttatctgcagtygaaatagccacttgctatgaaacacttcctcacctggtgtctttacaatacacactgtagcatggtgacatcttctggggagcaccctctccttgtaaaggctatggagggagccagggacagcatcctaacttcagtgctttacatcatacttttaagtcaggagcaccaaactgatcaatactttagtttccaaaaacagaagtaaaakaacaaaagcagccaaagctctacaagccctttgtatcaactgccctg

SEQ ID NO: 49645 - DNA, 600 bp, Chicken  19866894295832_4
tcagagatggagrggaaaacaggggagaacatgaacatccatttaaatctaacctagatttcctaactgatctcctgagatgttttaaatagtgtccagaaacttgttatttacgctgtgtaataaagctgacaccctcaagcctttctggagcaccaatcaagccaacagcccagccacatcctggcacagagttaaatcccagcccactgggatcaatagaaactttaccacagctttcagtagtatccakttggyccatgaagtcactgactgttaacccagaagttatctgcagtygaaatagccacttgctatgaaacacttcctcacctggtgtctttacaatacacactgtagcatggtgacatcttctggggagcaccctctccttgtaaaggctatggagggagccagggacagcatcctaacttcagtgctttacatcatacttttaagtcaggagcaccaaactgatcaatactttagtttccaaaaacagaagtaaaakaacaaaagcagccaaagctctacaagccctttgtatcaactgccctgttttaatccccggggcatttaactggtgactcagagcctgta

SEQ ID NO: 49646 - DNA, 600 bp, Chicken  19866894295832_5
gggatcaatagaaactttaccacagctttcagtagtatccakttggyccatgaagtcactgactgttaacccagaagttatctgcagtygaaatagccacttgctatgaaacacttcctcacctggtgtctttacaatacacactgtagcatggtgacatcttctggggagcaccctctccttgtaaaggctatggagggagccagggacagcatcctaacttcagtgctttacatcatacttttaagtcaggagcaccaaactgatcaatactttagtttccaaaaacagaagtaaaakaacaaaagcagccaaagctctacaagccctttgtatcaactgccctgttttaatccccggggcatttaactggtgactcagagcctgtaagaagaaaagggtcctgatgtgatctgttttacagctctaaacccgtgaggtacaacggtcagcgtggtcttacaccaacatgaagctattgagatagctagaactgttagccaagctgcagtgaggtcagtaatacagaacgcctgttaaagtaacacagaaaacaggagttgtccccgctgaggatacagcrtttgcagtgttagtgtg

SEQ ID NO: 49647 - DNA, 600 bp, Chicken  19866894295832_6
aaaaacagaagtaaaakaacaaaagcagccaaagctctacaagccctttgtatcaactgccctgttttaatccccggggcatttaactggtgactcagagcctgtaagaagaaaagggtcctgatgtgatctgttttacagctctaaacccgtgaggtacaacggtcagcgtggtcttacaccaacatgaagctattgagatagctagaactgttagccaagctgcagtgaggtcagtaatacagaacgcctgttaaagtaacacagaaaacaggagttgtccccgctgaggatacagcrtttgcagtgttagtgtgcagagctggatttggctcaggggctgttgctgtcacattggctttaggacagttattctgcttccaaacacagcaagctgtgaagttggaagtttctccctagcagatgtgatgtctagcatatttaagcaccttcacgtaaatgactctcatgcaaaacagtctccagtgtggcaagagtaactcttaggcagtaaactgagctcctgtgagctgatggagtctgagttcacctacagagacccacgtgaggtgggtttttcctgcttcaaaggggttgaag

SEQ ID NO: 49648 - DNA, 492 bp, Chicken  19866894295841_1
catatcccatcccatccgaggggctctgcctcggctcccctgggccctccccctccctcctcccttgtcttttttttttttttactctctctctttttttccatcccctcccccacctgggaagacccggcggctcccccccgccccgtgctcagtagcggcgggtgctcggcggcggcggagcggggacaccggcgcggcgtggatgtggccgctgccccccggccggggctcggcgctgccaggtacacgcagggacggactcggggggctccgcagccgaggcagcacggcgcgcastgggtttctttttgataggaccgaaaagtgacgcggatctttgatcccctttttaagcacaggcggctccgcggacagcggaggggggcacgttcattgctttacgctttcaagggtttcgtctccgcgcagctccggagcctctctgcgcttcgaaacagcctctccttgagttccgattcacccccgctg

SEQ ID NO: 49649 - DNA, 600 bp, Chicken  19866894295843_1
atgtactttaatttcagctcccgctagagcattgcagaactttgtaaaaaacatagataattgaaagacatttcttttggatcatttgcatttagtctgtgtccttgaggaacaatagttcacttgtgccccaggtgctttctttttccagaattaggttggatgtactgcctttttttaggtggatatatcttctttacagtatctgaatagcattattcttcctctacttgaaatttttccatatctgcttgctgcctccccttctttatcagtagcagggcagggggcccactaaartctgccagtctgctagtagcaattattttattcaaccacagtggatatgtttgctaggaccttgactggcctccttttgctttccagatgcttttcagtgctactgtaagagagatattctttcctacaytgaagattacaatcataaaggcaaagaattcttgtcctgataggaacatataccccacactatcatcctattgctcaaatagttatgtactagaaaatcagcatactgttgaaggagggccaccatggcagggtataaatagtctgtcagcagagacctatccatgtgtt

SEQ ID NO: 49650 - DNA, 600 bp, Chicken  19866894295843_2
ccaggtgctttctttttccagaattaggttggatgtactgcctttttttaggtggatatatcttctttacagtatctgaatagcattattcttcctctacttgaaatttttccatatctgcttgctgcctccccttctttatcagtagcagggcagggggcccactaaartctgccagtctgctagtagcaattattttattcaaccacagtggatatgtttgctaggaccttgactggcctccttttgctttccagatgcttttcagtgctactgtaagagagatattctttcctacaytgaagattacaatcataaaggcaaagaattcttgtcctgataggaacatataccccacactatcatcctattgctcaaatagttatgtactagaaaatcagcatactgttgaaggagggccaccatggcagggtataaatagtctgtcagcagagacctatccatgtgttatagtaatgtggctaggctgcttcccatcccaactgaagctaccccaggtacattcattgggtgttgccctgatggtttcttgccatcagactgcytctcctctctcctttttataattgrcatttatag

SEQ ID NO: 49651 - DNA, 600 bp, Chicken  19866894295843_3
agtgctactgtaagagagatattctttcctacaytgaagattacaatcataaaggcaaagaattcttgtcctgataggaacatataccccacactatcatcctattgctcaaatagttatgtactagaaaatcagcatactgttgaaggagggccaccatggcagggtataaatagtctgtcagcagagacctatccatgtgttatagtaatgtggctaggctgcttcccatcccaactgaagctaccccaggtacattcattgggtgttgccctgatggtttcttgccatcagactgcytctcctctctcctttttataattgrcatttataggagcagaatgtgcttcagaagcaactaaaaaagcatctctatctatggactcacaattgaaaacaatcattttgtgctaatggttctttacaaagggcattgttgcatgtaatcgtcagtacaaaaatataaacatgaaatcaaggcataaggagcctctctaatttaatgatccataaaacagataacttcacaagattttatgaagggttttaggctagagaatacagatacacctccttaaaacaagaattcaatacttatcc

SEQ ID NO: 49652 - DNA, 600 bp, Chicken  19866894295843_4
ttcctacaytgaagattacaatcataaaggcaaagaattcttgtcctgataggaacatataccccacactatcatcctattgctcaaatagttatgtactagaaaatcagcatactgttgaaggagggccaccatggcagggtataaatagtctgtcagcagagacctatccatgtgttatagtaatgtggctaggctgcttcccatcccaactgaagctaccccaggtacattcattgggtgttgccctgatggtttcttgccatcagactgcytctcctctctcctttttataattgrcatttataggagcagaatgtgcttcagaagcaactaaaaaagcatctctatctatggactcacaattgaaaacaatcattttgtgctaatggttctttacaaagggcattgttgcatgtaatcgtcagtacaaaaatataaacatgaaatcaaggcataaggagcctctctaatttaatgatccataaaacagataacttcacaagattttatgaagggttttaggctagagaatacagatacacctccttaaaacaagaattcaatacttatccctacactcttcatttgtcaatttac

SEQ ID NO: 49653 - DNA, 600 bp, Chicken  19866894295843_5
acatgaaatcaaggcataaggagcctctctaatttaatgatccataaaacagataacttcacaagattttatgaagggttttaggctagagaatacagatacacctccttaaaacaagaattcaatacttatccctacactcttcatttgtcaatttactacacgaataggtttcttgatccctgtgtagctataatgcgagtccagtctaattttgaaaacatcttgtaaagtgaaccatgtctcaagctgagctctgcagatcaggtagtgaggtcaactcatcgaacatgcaagctyccagctatacaatcaatcacgaagtcaagatttcaggctgtgtgtattataaggtgtattttaaataaagcagtactggaactcctaacctgctggtcctaataaaaaatagatttgcacagccaagtgctgcaactacaaagagatccatttaaattaacataaccctttcttcctcttctcatcatttaccacctaacggatcaacttataaaccaaagagcaagtcagaaaaaaaacaagggctttgttcatcctatatcagaggtggccacgcacaagatctgagaataaaatctg

SEQ ID NO: 49654 - DNA, 599 bp, Chicken  19866894295845_1
  misc_feature (1)..(3): n is any nucleotide
nnnatttcttctcccagaactaggttttcctctattttaataaaccttgaaatatttattattgcctcattcgtctttttttctccagctaacaacattttaaggtatctgatgaatgttcttgggaggatgtgaggagataactacagaggagagaaaatgactgcaccaagcagcttgtgaaatgattgttgaaattattcttaaatcatttaagaggagttaagattacaaagttattttggagcttgtaacaggctagggttcattccatcacagcttcttacaaatggcacatawgtgattgctgtcagtgaggcattttggtggctcacagtatgaaattgtctcctaattggcctttgtttcacattaacctctgtaaaagtggtttcttcattgcaggcctcagaagaaagccagcaagaacgaagacaacgatggccaggatggcaacagcagcagtgagaggcccgagcacgttacccgcaacggaaaccgtgttgggaggaggcacggaaacatccagtcctgtgagggaagagaggagcatttggtgttgtggtgccaaggagcagggcacaaagagctgctgtgct

SEQ ID NO: 49655 - DNA, 599 bp, Chicken  19866894295847_1
  misc_feature (1)..(53): n is any nucleotide
nnnnnnnnnnnnnnnnnnnnnnnnnnnnnnnnnnnnnnnnnnnnnnnnnnnnntaatacatctggctttcagctattcattttcctcatgtaacttgagatgtcagtctttgaagtacccaataatttttagattatatatgagcaaatgatttcaaatctgactgtattctgaactctggcttgtcccaaggcctgctgctcctgaagatacttctacttctcccaactctttggcattcactatagctgcaagtaactaagcttttgtaaattgcctttacaaaccaacaagaccagrcacaagaatgagcaccttctgacgtaaaatgagaaattattayaattgattatttccaagtgaatttttcactgaagttttgatggttaagtattttaattgcaattaaatgtaccataggaagttcaataaaatacagtaaataattttgcacatctatctcctttgatgttttggaaagattgcacattggaacatccatggcataaattatatatctgtaacatctgacaggatacacatttgggaatgccaattacacttttccatgacttcaaatatccttccaaggtaaattt

SEQ ID NO: 49656 - DNA, 599 bp, Chicken  19866894295847_2
  misc_feature (1)..(10): n is any nucleotide
nnnnnnnnnntaatacatctggctttcagctattcattttcctcatgtaacttgagatgtcagtctttgaagtacccaataatttttagattatatatgagcaaatgatttcaaatctgactgtattctgaactctggcttgtcccaaggcctgctgctcctgaagatacttctacttctcccaactctttggcattcactatagctgcaagtaactaagcttttgtaaattgcctttacaaaccaacaagaccagrcacaagaatgagcaccttctgacgtaaaatgagaaattattayaattgattatttccaagtgaatttttcactgaagttttgatggttaagtattttaattgcaattaaatgtaccataggaagttcaataaaatacagtaaataattttgcacatctatctcctttgatgttttggaaagattgcacattggaacatccatggcataaattatatatctgtaacatctgacaggatacacatttgggaatgccaattacacttttccatgacttcaaatatccttccaaggtaaattttcattgatgtaaaaagtcaaaatacaacaacagaaaaattgtg

SEQ ID NO: 49657 - DNA, 600 bp, Chicken  19866894295847_3
ggctgaggagcagttccattgagaatcactggggggctatcaggtagaatcagtgactgcaaattatctctgagcacatcaaaacaagctgccacaaataagacaatcattgtagagagagatgtgaggaggcagtaacctaagtaataacagaatgctcttagtctcaactagaagcgtacagaagaattgctcagcactgtttgccaattcagacaggatatggacaaggcaggaggatgccaaaggaaacaagaaaaatcaactacgaaatttgtgaggaaggtttagcagactcartatgagccttaaggccayggctagagagaaagggtgttaaaaatctgcttaccwctgccatgagaaaaagatcgaggagtcatggtcttacactgtatagatgcatcacactttacaggaaaaattccatcggtaggtgaattagaaytgcttaataaggatgccagagtttcaattccaggagtttggatgggtggtttagacatatgacaaccaagagagatgcaaagtcctgttgagccagttgtatagaagaagcagataacttgggcctatacttttgttctgtaactttttaac

SEQ ID NO: 49658 - DNA, 600 bp, Chicken  19866894295847_4
ttgagaatcactggggggctatcaggtagaatcagtgactgcaaattatctctgagcacatcaaaacaagctgccacaaataagacaatcattgtagagagagatgtgaggaggcagtaacctaagtaataacagaatgctcttagtctcaactagaagcgtacagaagaattgctcagcactgtttgccaattcagacaggatatggacaaggcaggaggatgccaaaggaaacaagaaaaatcaactacgaaatttgtgaggaaggtttagcagactcartatgagccttaaggccayggctagagagaaagggtgttaaaaatctgcttaccwctgccatgagaaaaagatcgaggagtcatggtcttacactgtatagatgcatcacactttacaggaaaaattccatcggtaggtgaattagaaytgcttaataaggatgccagagtttcaattccaggagtttggatgggtggtttagacatatgacaaccaagagagatgcaaagtcctgttgagccagttgtatagaagaagcagataacttgggcctatacttttgttctgtaactttttaactataggtaaatagcagca

SEQ ID NO: 49659 - DNA, 600 bp, Chicken  19866894295847_5
gactgcaaattatctctgagcacatcaaaacaagctgccacaaataagacaatcattgtagagagagatgtgaggaggcagtaacctaagtaataacagaatgctcttagtctcaactagaagcgtacagaagaattgctcagcactgtttgccaattcagacaggatatggacaaggcaggaggatgccaaaggaaacaagaaaaatcaactacgaaatttgtgaggaaggtttagcagactcartatgagccttaaggccayggctagagagaaagggtgttaaaaatctgcttaccwctgccatgagaaaaagatcgaggagtcatggtcttacactgtatagatgcatcacactttacaggaaaaattccatcggtaggtgaattagaaytgcttaataaggatgccagagtttcaattccaggagtttggatgggtggtttagacatatgacaaccaagagagatgcaaagtcctgttgagccagttgtatagaagaagcagataacttgggcctatacttttgttctgtaactttttaactataggtaaatagcagcacagcttcagcaagaaagtagaggtgaaagcactcaa

SEQ ID NO: 49660 - DNA, 600 bp, Chicken  19866894295847_6
aacagaatgctcttagtctcaactagaagcgtacagaagaattgctcagcactgtttgccaattcagacaggatatggacaaggcaggaggatgccaaaggaaacaagaaaaatcaactacgaaatttgtgaggaaggtttagcagactcartatgagccttaaggccayggctagagagaaagggtgttaaaaatctgcttaccwctgccatgagaaaaagatcgaggagtcatggtcttacactgtatagatgcatcacactttacaggaaaaattccatcggtaggtgaattagaaytgcttaataaggatgccagagtttcaattccaggagtttggatgggtggtttagacatatgacaaccaagagagatgcaaagtcctgttgagccagttgtatagaagaagcagataacttgggcctatacttttgttctgtaactttttaactataggtaaatagcagcacagcttcagcaagaaagtagaggtgaaagcactcaaaaatgaccaaatcataaaatgtatgaaattatcttctgttgcctgctactatctttacattaatacaactgagatgagtatcccttcttataca

SEQ ID NO: 49661 - DNA, 600 bp, Chicken  19866894295849_1
aggcttttcctatacaacgagaaggaactaaaaggaatttcgtcttatgggctatcttgctatcagctagactacttctgagttgtgcgctggccctcacagacatcttcgagtcatgaacaggctgcagcgctcaagggaaaagctgcccaggtgaacaaggcagtctgtgcaggagggctgattggtgtgtgtcattcagctctcctcctctctggtgcagagagagtcccttcctgagaagaacctgtctgtgtctgatgaatgcagtgatcatggcccttagcccgctggagctcraggagcatctggacaacgctctcaggcataggatttgaattttgggtgatcctgtgtggagccaggagttggaatcaacagtcactgtgggacgcaggatattctatggttctgtaactcaggcagtatttcaggcatgtggtgagaaacgtgctgccttgtgctggccaaaagaaaacctgctgttgcctggttgttatgaagaaatccaaatccctttgtcaaacactcctcatcaagcagggaggaagaggaagcaatgggttttccctggggtttttgctccaccagcctgaagaa

SEQ ID NO: 49662 - DNA, 592 bp, Chicken  19866894295857_1
ctcctggataattctaggaactgcatctgaggcttgcagtggggatcaagttgatgcagaaatgaggaaagggagataagggaagaaagcctcggagagggtggagagagaagaatgaagaaagtcatctagaaagagttatcaagtgttcttctcactggaaaaaaatgggggaaaagagaaaagactttgtagggaaggagaggctgaagaagacaatcaaacggaggaaagaaacgaagagagctgcgagaaagatccataaggttggtgaataacttgtgcaaataaaccctgatyatgggatccttgggcagtcatcagaaggtagcaagacctggrcactgcggtctaaacctacgtgttgcactgttgtcttgaagccgtcacttgactaacgcattttagattcatgggaagtgagtcagcttgagtaactctaagtgatctcagtgtatagaagccgcattagcttctttcctccacttacgaggtcagataaggggtttggagagggatggcagtaggaaggaggaggagaccctggggaacaaagcctggctctgccttgggggagagcggccgtgtctgg

SEQ ID NO: 49663 - DNA, 550 bp, Chicken  19866894295857_2
ggatcaagttgatgcagaaatgaggaaagggagataagggaagaaagcctcggagagggtggagagagaagaatgaagaaagtcatctagaaagagttatcaagtgttcttctcactggaaaaaaatgggggaaaagagaaaagactttgtagggaaggagaggctgaagaagacaatcaaacggaggaaagaaacgaagagagctgcgagaaagatccataaggttggtgaataacttgtgcaaataaaccctgatyatgggatccttgggcagtcatcagaaggtagcaagacctggrcactgcggtctaaacctacgtgttgcactgttgtcttgaagccgtcacttgactaacgcattttagattcatgggaagtgagtcagcttgagtaactctaagtgatctcagtgtatagaagccgcattagcttctttcctccacttacgaggtcagataaggggtttggagagggatggcagtaggaaggaggaggagaccctggggaacaaagcctggctctgccttgggggagagcggccgtgtctgg

SEQ ID NO: 49664 - DNA, 600 bp, Chicken  19866894295859_1
ctggccaaggctgtgattctgcaaagatggaagggcaggcataaggctggcatttcctggcagctttcttggagagtgaatcagtgaacatgtgtgaccaggattcttctcctgtagattttttgagaaacacttcatcattagggaactttaggatacttgagaagtaaagaactgcctgataaatgtaaacctctgccttttaagcgctgcagactgtctgcagttctgaatgaagttctgttgtaatgcagtgcagaagttcctagtgggcagtcatgaaggagaaactagaagcastccctgagcacgtgccctgcttcaatttcaggcacctgatacacaccactggatactgttttgcagttttccttcatcctcacaatctgtcagtgtgggaaggtgagggagcttgatgcaattagtgaaaatctagttagtgttgtctcagccactctgactgctacatggtcctgtggtacctgtttttataaaatcacttaagcaaattagttgtgggttacaataaagaggttcatcgaactgggattaggaatttgtctacaaggagctcgttcatttcatgctgcttgtgttgat

SEQ ID NO: 49665 - DNA, 600 bp, Chicken  19866894295864_1
gacttgaaatacatcagaagttgcacattaagagtctgtacattcaagtgatctcattccgagtttcataatatttctgtattacgttttggtttgtcaactactacaacaaattgctgccaagtctaccactttcaagagaacaaaactaaagacctttttagccaaagaagaaattcacaaactggaccatgagtacatttcagttttagttccatgtggagtaacaaactggaattcctcttcctcccacacttttctattaatacagataagcacttagcagagtttcagaagcarmagcgttttcagtcaatacaattaaaactctatcaaaccacaccgtgttcaacttctaaagtaactgcaactgtctctctatcaaaatgctcagtatgacaacaggatttcagacctacatctttctgtgaggcttctttcctcttcacagtttgtaagaccatcctgaactcagcactgaagtgacaatgcatcacttccagcagcacacagaaaggagtctatggctctcagggatttccagcacagtgctccactgccgcagcacctttagtatgagctgcagccttctgcgacagc

SEQ ID NO: 49666 - DNA, 600 bp, Chicken  19866894295864_2
acttgaaatacatcagaagttgcacattaagagtctgtacattcaagtgatctcattccgagtttcataatatttctgtattacgttttggtttgtcaactactacaacaaattgctgccaagtctaccactttcaagagaacaaaactaaagacctttttagccaaagaagaaattcacaaactggaccatgagtacatttcagttttagttccatgtggagtaacaaactggaattcctcttcctcccacacttttctattaatacagataagcacttagcagagtttcagaagcarmagcgttttcagtcaatacaattaaaactctatcaaaccacaccgtgttcaacttctaaagtaactgcaactgtctctctatcaaaatgctcagtatgacaacaggatttcagacctacatctttctgtgaggcttctttcctcttcacagtttgtaagaccatcctgaactcagcactgaagtgacaatgcatcacttccagcagcacacagaaaggagtctatggctctcagggatttccagcacagtgctccactgccgcagcacctttagtatgagctgcagccttctgcgacagcg

SEQ ID NO: 49667 - DNA, 600 bp, Chicken  19866894295864_3
cagcacctttagtatgagctgcagccttctgcgacagcgaggatgagtttgatgaaggataatggagagatttatttacagtcactcctggagactcagaagtaattcttgatgcctctcctccaaagtaaaacatgctctcagatctctatagagaatctttgtttataatggaatgtaaaaacaagaagtatatacctatcactataaaaatatatacccatcagtaaaatccccaaacaagtgtatcagcagttgtttagctggaggaagggggcaggcagaatcacaatttctgtyrtctttcctgattttcaggagaatgtttctaccacatgggatgggaggagttgtgaatgaaacatacacatttagaagtagcctttctttaccctgctgtttttccacagaaaaaatacctgttacaactttttcaatttcagctttagttaagtagttcactgctaccagcagcttattaccaggggaagaaaaacaactggcagaagaaaataataaaacactcttgtattcagctttaatcctagcctctttccacaaaccactagcaacaattcagaggttgtgactcaacactca

SEQ ID NO: 49668 - DNA, 600 bp, Chicken  19866894295864_4
agcacctttagtatgagctgcagccttctgcgacagcgaggatgagtttgatgaaggataatggagagatttatttacagtcactcctggagactcagaagtaattcttgatgcctctcctccaaagtaaaacatgctctcagatctctatagagaatctttgtttataatggaatgtaaaaacaagaagtatatacctatcactataaaaatatatacccatcagtaaaatccccaaacaagtgtatcagcagttgtttagctggaggaagggggcaggcagaatcacaatttctgtyrtctttcctgattttcaggagaatgtttctaccacatgggatgggaggagttgtgaatgaaacatacacatttagaagtagcctttctttaccctgctgtttttccacagaaaaaatacctgttacaactttttcaatttcagctttagttaagtagttcactgctaccagcagcttattaccaggggaagaaaaacaactggcagaagaaaataataaaacactcttgtattcagctttaatcctagcctctttccacaaaccactagcaacaattcagaggttgtgactcaacactcat

SEQ ID NO: 49669 - DNA, 599 bp, Chicken  19866894295865_1
  misc_feature (1)..(48): n is any nucleotide
nnnnnnnnnnnnnnnnnnnnnnnnnnnnnnnnnnnnnnnnnnnnnnnntggtgtggatgtctcatccctggagacattcatggtcaggctagatggagctctgggcaacctgatctagagcttgatctagtggctggccattccacctgtggcagaggggtttgaacaattcagggcaacattcaccaagaaaaaacatctccctcatactggagacctcagtcagaacaaagaaggtgaacagagctgagagggtgagggagagaaatgatcccttacaaaagctgatctgcagaacayaacctatcagccctcacagatgatatcaagagtgctgtattctgacaaaaacatgtttcctactttttaagccaaattagtcctytgtgtctccttttacctgtctagttctagaaaagtctatagtgagagtgaaaatgaaggaatttgtgaggaaaaaaaacacagmacttgcagaactgatktatgtcatcgagattgttcacaaggacctcttctagaacacagtagagggaagataaggttgggggaaggaagagataaaatgcagtttacacaaaccctgaattcatacaccg

SEQ ID NO: 49670 - DNA, 600 bp, Chicken  19866894295865_2
aggctagatggagctctgggcaacctgatctagagcttgatctagtggctggccattccacctgtggcagaggggtttgaacaattcagggcaacattcaccaagaaaaaacatctccctcatactggagacctcagtcagaacaaagaaggtgaacagagctgagagggtgagggagagaaatgatcccttacaaaagctgatctgcagaacayaacctatcagccctcacagatgatatcaagagtgctgtattctgacaaaaacatgtttcctactttttaagccaaattagtcctytgtgtctccttttacctgtctagttctagaaaagtctatagtgagagtgaaaatgaaggaatttgtgaggaaaaaaaacacagmacttgcagaactgatktatgtcatcgagattgttcacaaggacctcttctagaacacagtagagggaagataaggttgggggaaggaagagataaaatgcagtttacacaaaccctgaattcatacaccgaaagacaaataagaagttctaccctcaggtttaattatggaaaataaacacatcttgaagttatttctacttttggaaagcagcag

SEQ ID NO: 49671 - DNA, 600 bp, Chicken  19866894295865_3
ttcagggcaacattcaccaagaaaaaacatctccctcatactggagacctcagtcagaacaaagaaggtgaacagagctgagagggtgagggagagaaatgatcccttacaaaagctgatctgcagaacayaacctatcagccctcacagatgatatcaagagtgctgtattctgacaaaaacatgtttcctactttttaagccaaattagtcctytgtgtctccttttacctgtctagttctagaaaagtctatagtgagagtgaaaatgaaggaatttgtgaggaaaaaaaacacagmacttgcagaactgatktatgtcatcgagattgttcacaaggacctcttctagaacacagtagagggaagataaggttgggggaaggaagagataaaatgcagtttacacaaaccctgaattcatacaccgaaagacaaataagaagttctaccctcaggtttaattatggaaaataaacacatcttgaagttatttctacttttggaaagcagcagagatcatgcttcagcaaaatgaaaaggaacttagagttctgtaccagtagaaataaactaccaagaaaaaaaaaactgctctga

SEQ ID NO: 49672 - DNA, 600 bp, Chicken  19866894295865_4
ccaagaaaaaacatctccctcatactggagacctcagtcagaacaaagaaggtgaacagagctgagagggtgagggagagaaatgatcccttacaaaagctgatctgcagaacayaacctatcagccctcacagatgatatcaagagtgctgtattctgacaaaaacatgtttcctactttttaagccaaattagtcctytgtgtctccttttacctgtctagttctagaaaagtctatagtgagagtgaaaatgaaggaatttgtgaggaaaaaaaacacagmacttgcagaactgatktatgtcatcgagattgttcacaaggacctcttctagaacacagtagagggaagataaggttgggggaaggaagagataaaatgcagtttacacaaaccctgaattcatacaccgaaagacaaataagaagttctaccctcaggtttaattatggaaaataaacacatcttgaagttatttctacttttggaaagcagcagagatcatgcttcagcaaaatgaaaaggaacttagagttctgtaccagtagaaataaactaccaagaaaaaaaaaactgctctgaagcccaacacaaatct

SEQ ID NO: 49673 - DNA, 417 bp, Chicken  19866894295865_5
accctgaattcatacaccgaaagacaaataagaagttctaccctcaggtttaattatggaaaataaacacatcttgaagttatttctacttttggaaagcagcagagatcatgcttcagcaaaatgaaaaggaacttagagttctgtaccagtagaaataaactaccaagaaaaaaaaaactgctctgaagcccaacacaaatcttaatatctaaaaaaagtagagagtatagtggtatgaataatatatattccagattacagaaaataaatacttgttctctaaatgaaatcattccytcagagatgaaataaaataccagttgtttttttctttttttgcatagctgagttcttacattttcatctccttaaaaggatgaggactgcgtccctaatgaatacagtcttttttga

SEQ ID NO: 49674 - DNA, 600 bp, Chicken  19866894295868_1
ttttcttcatgatgtttccacgactcctttgtccttggcatggatgtaacacctaggattgttcttggtcgagagctactggacagacttgccctcctgagatggatgggctgaggagagatgggaacaggcagatactgcacattgactagaacgggataggctggtggcaggcaacctgatcaagaccctgtattttggtaagctgttggaagatcccagctgttctcccttccagctttaccctttttcccctcttcgctgtgttggagggatgctcccctggaccaggctgtcggkgtgtgcctgtggtgagagcctgcaatatgtttgtgaagagtgatggtggagtgggaatcaggtgctggccaagtagcatgtcctgggtgaagactttctgttagaatgtgggtgcgagagtacactcaccctctaggtaagcaggagaaggagatgaatatgcctgtgcattccctttgagctcaggatggtgccctcttttctgcaagcaggggagtttgcaaccagactgaaaatggttgaaatgcaaccagtgccttgataccttgtttgggaacaatgtctggctggacttcagtg

SEQ ID NO: 49675 - DNA, 456 bp, Chicken  19866894295873_1
gctcatatttcaatgaaaagattccccagagttcccaagagaggaatcagacatacgcagcactgtgtcaaagaagcctgagaagtttattcacttgcctagatagggtcaaagacaccataaaatactccctgcccaagtttatctttactggcgtgcttaggctatgggtggtccttcagaagctgatttgtctatctgcagcaattaacagctcttctctgcccctttggttttccactcatcagagggccctgcccagtgaggcagcagttcctggcagctgatgctggcaccaawagcaaaaatacagatgccagtttcycagctcagtgaaagacgggatgagtaaagccagataaattgagctgtctctcttgcagtgttccagtgtgaggcctcttacagccaccaagcatgcctgagcaaagtacttagagaaaataagtaaaatca

SEQ ID NO: 49676 - DNA, 431 bp, Chicken  19866894295873_2
ccagagttcccaagagaggaatcagacatacgcagcactgtgtcaaagaagcctgagaagtttattcacttgcctagatagggtcaaagacaccataaaatactccctgcccaagtttatctttactggcgtgcttaggctatgggtggtccttcagaagctgatttgtctatctgcagcaattaacagctcttctctgcccctttggttttccactcatcagagggccctgcccagtgaggcagcagttcctggcagctgatgctggcaccaawagcaaaaatacagatgccagtttcycagctcagtgaaagacgggatgagtaaagccagataaattgagctgtctctcttgcagtgttccagtgtgaggcctcttacagccaccaagcatgcctgagcaaagtacttagagaaaataagtaaaatca

SEQ ID NO: 49677 - DNA, 600 bp, Chicken  19866894295874_1
ggaggttcttttacagtttctgggggaaagaagaatttcatcattttagataagaggtatttatgtgctcttaacctagttgttaactttgttaacactagttggagccaagcaaagctactgagagaggagataagattttggacagacttaatttgattttttttttcctgcttactaggatagaaaagtcaaagacatttttttaaatattcagaagtatttcataatccaaatggatggaatgagacttgaccaggtaaaacggagtttttcttatatatacttttgcagaacacrtgactacttatcatcacttccaaagactgtgcttgctagacttatgtatggaaaaacatgaaactggtgaacatggtcatcctaaggaaaatgattatagcataaagttgtaaacaactgaatttgatctatgcagttcatgcaatagccttgatatggacaagatgtaaaaaaccatactctatgctacagctgagtgtggtgatgcagccccctcccttgggccagtctgtgatctcaggataatccactgttctgtttttgtctttgtacaagtgcagtgagttgagatgaacaggc

SEQ ID NO: 49678 - DNA, 600 bp, Chicken  19866894295874_2
tgcacaagtagttggaacacaaactggctgaaaggatattccatattatatggaaatttggtaacagcatcaagctgagttctgcagttaatacagtaggagaggatgccatccaagtgggcttggacaagctagaaaagtggacccatgagaagctaatgagattcaacaaggctaagtgtaaggtaggaacaatcccaggtatgtgtacagactggaagaactcaagggtagtcctgcagagaaggacttgggagttctggtagatgaaaagcttgaactgaaccaacagcatatgcytgtagccctgaaaaacagctctatcctgtgctgtcccaaaagaaggttggccagcagaatgagggaggtgattgtccccttctgctctgctctcatgagtccccatttggagtcctgccttcagacctggggcccccagcacaataaggatgtggaattgttggagcagatccagagggtggccatgaagatgatcagaaggctggaggacctctcctatgcagaaagactgagaggtgggctggttcagcctggataagacttcatggagatatcattttgtccttccagtacttaaaa

SEQ ID NO: 49679 - DNA, 600 bp, Chicken  19866894295874_3
tggagtcctgccttcagacctggggcccccagcacaataaggatgtggaattgttggagcagatccagagggtggccatgaagatgatcagaaggctggaggacctctcctatgcagaaagactgagaggtgggctggttcagcctggataagacttcatggagatatcattttgtccttccagtacttaaaaggagcttattaacagaagggaaaataactttttatatgaacagttagtgataggggaagaggttttaaaccctcttttaagaggggagaattaaatcagatattagsgggaaattctttaatgtaaaagtggtgaagagctggaasagggtatctgcaggagctgtggacatcccatcccttcaggcattcaaggccaggtcagatgtggcccagggcagcctgatccagatgttggcaaccccttgcaggggtttggaatttgatgaatggtggtgcagtacatacctgcctgccgacttaaaccacaacacttgtattctgactcctgcaatgattattttaaaactgttattcatcaaatcagaaaaaaacaacactcaagctgaagcataaactgttacagtt

SEQ ID NO: 49680 - DNA, 600 bp, Chicken  19866894295874_4
aggatgtggaattgttggagcagatccagagggtggccatgaagatgatcagaaggctggaggacctctcctatgcagaaagactgagaggtgggctggttcagcctggataagacttcatggagatatcattttgtccttccagtacttaaaaggagcttattaacagaagggaaaataactttttatatgaacagttagtgataggggaagaggttttaaaccctcttttaagaggggagaattaaatcagatattagsgggaaattctttaatgtaaaagtggtgaagagctggaasagggtatctgcaggagctgtggacatcccatcccttcaggcattcaaggccaggtcagatgtggcccagggcagcctgatccagatgttggcaaccccttgcaggggtttggaatttgatgaatggtggtgcagtacatacctgcctgccgacttaaaccacaacacttgtattctgactcctgcaatgattattttaaaactgttattcatcaaatcagaaaaaaacaacactcaagctgaagcataaactgttacagttagaaaagtgcagttaatttgatttagaactgaagcatac

SEQ ID NO: 49681 - DNA, 600 bp, Chicken  19866894295880_1
cccccgccccagcccctaatgtgcctggctggatgcccaccagcagggcagacccaagtgctgctggagtgcaagcctcatgcttgagattccttatgttggagaaagttccttgctgatacactgtagggaagctgaaaagcttcttcgaaacctcgctatgagatatgttaaaacccagtactagtccaaatgacttcatcttagtatttagcaaacaggagcaatgttcagtacgtgcttgaaatgcttgatttctttccatatcctcctgcccatcttgcttccccattttatttmttcctgttccttggttgcttgctgttgtgttacgatccaatcaagttaacacctacagaattcctgaaactttgacattccttgtacttcagactcaccccaagaagctcatgggtgcacattcctgtacctgatattgcttctcacaaatccagctgcgatctgagaagtggaaagtgtccagctgacccttgtgtctgatccagtctttcacactaaggaccaaaggcaacagctagatattttgagaccaggacaggatgttaatctggtgtgtcctttcctctgaacacaaactaa

SEQ ID NO: 49682 - DNA, 600 bp, Chicken  19866894295887_1
cgcacataatcatgtctttctgaagtagtattacatgtgttttgtagagctaatcaacactttgtcactctctagagatgcatattcaaactctacatctatctaacacatttccccattaataaaaccagtttatcatcttatgatgaaacaacataagctaaataaaaactatccccaaaatccagcctaaaagccaacatattttttttgtgcagagaactttaaatagaaactggcatacatgatatattaacccaaacctacgttttccagggggtctgaaaacaggcctatttytcatgcgtaaacctacaaaagcatactgaaatctgtattatatagcctttgcaacgactgcacaagaaggaactgaggttgttcagcctggaaaagaaaaggctgtggagagaccttcttgcagccttccagtatttaaagggaacttatacacatgagggaaataaactttttgcatggggtaagtagttataagacaaagcggaatggttttaaattaaaggaagggagatttaaattagatgtcaggggaagttctttactgagagtggtgaggtgctggaacaggctgcccagaaa

SEQ ID NO: 49683 - DNA, 600 bp, Chicken  19866894295887_2
tataagacaaagcggaatggttttaaattaaaggaagggagatttaaattagatgtcaggggaagttctttactgagagtggtgaggtgctggaacaggctgcccagaaacactgtagatgcttcgtccctacgggtgtttaaggccaggctggatgggcagtcttgctctagtacttcatctagcagctggcctgtggcaggggtttggaacctgatggcccttgtggtcccttccaacccaagccattctatgatgctatgatgagaataaaaacaagtaggagcatacagaactgtyataaagaaaaatgtcaggtagatacttaaaatcttttaaaaatactagttagtatttatgcacagaagccaaaatataaaagatgaaatcctggtcacactaattttagctacacgcaagataggttatcataggatctcatcaatgtaactcctgaccactaacagaatcttttcagaccagaaagaagagattccactacaaataacgaataacaaaatacaaaaggaagatcatggtcagaatattccctcaaaatgggttcctctcaatggaagaaaatcatataagagcaatcaa

SEQ ID NO: 49684 - DNA, 600 bp, Chicken  19866894295893_1
aagttaaagtagaacgctaaggaagcataagtgttgtgtgggaaagaaaaaaaaaaaatcacagtgatgtctacacactagaactgcctgcacagccaggaaataacaagtgtcactcgcagtattggcaagacttcacgtaaattaccatgtgcagtttggtcaccacacttcaaggagaataataagcttaaaacagcaccaaaaaagtgcttgagttaaatactctgaaagctcttctagaggtcagagaagcactagaacagactgtcactggaagccatgaacctgctgtcaccrggggtttctcagaatgacttagatagacacccagcaaggccaatgaaagccaaagtcaatcgtgacctgggggaaaagaatggatcagatgattcccagaggtgctatccactctttcataacattcacagatacagataccaaggctacacaggacctgtttcaacactatcttttgtcttctactagactatcaagaatagagactactgaaagtacagaccacatctagagaattgaccagtgaagccacatattcttgaaagcagtattctaaaaatggaccataacttcataaaa

SEQ ID NO: 49685 - DNA, 599 bp, Chicken  19866894295900_1
  misc_feature (1)..(204): n is any nucleotide
nnnnnnnnnnnnnnnnnnnnnnnnnnnnnnnnnnnnnnnnnnnnnnnnnnnnnnnnnnnnnnnnnnnnnnnnnnnnnnnnnnnnnnnnnnnnnnnnnnnnnnnnnnnnnnnnnnnnnnnnnnnnnnnnnnnnnnnnnnnnnnnnnnnnnnnnnnnnnnnnnnnnnnnnnnnnnnnnnnnnnnnnnnnnnnnnnnnnnnnnnnnnaaatctgtcatgacttgcaagaagcaggcagctgtactatgttggcttcctctgtcattctttattttccaagttagaatagttactgaggatttytgtagatagcttttcatagccttgcctacgaattccagcctggtaggtagccttgcagcccttgccattcccataaggagttagtgtgaagcaagtggctggcagaacttgcactaactgccttgcatctccaacaagaggctctgacattttgaatataaaaacttgttctcttcattgaaaagccttctctgcagcagttgggcctcttacagggtcatgtgcagcagtcccaggggttgcatgcagaatgagtgaacagtgtgagatgtacatctcttcctaattatgttaaatac

SEQ ID NO: 49686 - DNA, 600 bp, Chicken  19866894295900_2
cactaactgccttgcatctccaacaagaggctctgacattttgaatataaaaacttgttctcttcattgaaaagccttctctgcagcagttgggcctcttacagggtcatgtgcagcagtcccaggggttgcatgcagaatgagtgaacagtgtgagatgtacatctcttcctaattatgttaaatacaattaatgtgaggctctcctggtgacactttaaactttttctccgaaagacaattcaaaatgttctgcaagcttgctgggtgattttgtggggtgcgcttgtgtgtgtgagygttcagtgttaccatctgcagaataagcaatgagtctgggaagtgattgtcaagcttgtgaatgggcaatgcaagctttcactaagtttacaaggaacatttaagtggtcttttcttttcttggcctgtttacagatagcaaaggactacttaaaggactcctgagtgttgcttaggctcccttatgcaaagtattttgggagagtcttttgtctgctttgtttgcttgtttgttttcagaattcttcttttttttttctttaataaattgtgaataccaggaataattaattccttagt

SEQ ID NO: 49687 - DNA, 599 bp, Chicken  19866894295901_1
  misc_feature (1)..(62): n is any nucleotide
nnnnnnnnnnnnnnnnnnnnnnnnnnnnnnnnnnnnnnnnnnnnnnnnnnnnnnnnnnnnnntgccgaacataattggcagtaaccaaggataatgtgaatggagacaagcacatgttacagtgctattctgaaacagctggaagtaaaatgaactcagatcatcactgtggcgttttggttttgttcaggataagccaatgccttgcaaaagtgctccaacatacccgtggagctctaaagcccagctgtagcatcccccaggatgcgcccacgagctggggatgcaaacacagccacractccaaggaggactgagcctctaagaagctgagactgaggctggcaagacactaaagccacctgctgcttcktgctggctcagggaaagaaacaacccatactcagaatcactgaattgcaggggttggatgggacctcgagagatcgagttcaacatccctgctaaggtaggctccctgcaataggtcacacaggtaggcatccagatgggtctttaatatctctacaggaggagactccacaacttttctgggcaacctgtyccagaactctgtcactcttactgtaaagttcttc

SEQ ID NO: 49688 - DNA, 600 bp, Chicken  19866894295901_2
attggcagtaaccaaggataatgtgaatggagacaagcacatgttacagtgctattctgaaacagctggaagtaaaatgaactcagatcatcactgtggcgttttggttttgttcaggataagccaatgccttgcaaaagtgctccaacatacccgtggagctctaaagcccagctgtagcatcccccaggatgcgcccacgagctggggatgcaaacacagccacractccaaggaggactgagcctctaagaagctgagactgaggctggcaagacactaaagccacctgctgcttcktgctggctcagggaaagaaacaacccatactcagaatcactgaattgcaggggttggatgggacctcgagagatcgagttcaacatccctgctaaggtaggctccctgcaataggtcacacaggtaggcatccagatgggtctttaatatctctacaggaggagactccacaacttttctgggcaacctgtyccagaactctgtcactcttactgtaaagttcttctgcacgtttgtatggaacttcttatctgcaaggtttaggtcattactccttttcctmccattacacatcaccaa

SEQ ID NO: 49689 - DNA, 538 bp, Chicken  19866894295901_3
tgcgcccacgagctggggatgcaaacacagccacractccaaggaggactgagcctctaagaagctgagactgaggctggcaagacactaaagccacctgctgcttcktgctggctcagggaaagaaacaacccatactcagaatcactgaattgcaggggttggatgggacctcgagagatcgagttcaacatccctgctaaggtaggctccctgcaataggtcacacaggtaggcatccagatgggtctttaatatctctacaggaggagactccacaacttttctgggcaacctgtyccagaactctgtcactcttactgtaaagttcttctgcacgtttgtatggaacttcttatctgcaaggtttaggtcattactccttttcctmccattacacatcaccaagaagagcctggcctcatctatttgcctcctacctccccttaaatatttttaaacatttatcagatacccttctcagtcttcttttccccaggctgaacagacccaggttattcagcctttcctcatacag

SEQ ID NO: 49690 - DNA, 447 bp, Chicken  19866894295901_4
agccacctgctgcttcktgctggctcagggaaagaaacaacccatactcagaatcactgaattgcaggggttggatgggacctcgagagatcgagttcaacatccctgctaaggtaggctccctgcaataggtcacacaggtaggcatccagatgggtctttaatatctctacaggaggagactccacaacttttctgggcaacctgtyccagaactctgtcactcttactgtaaagttcttctgcacgtttgtatggaacttcttatctgcaaggtttaggtcattactccttttcctmccattacacatcaccaagaagagcctggcctcatctatttgcctcctacctccccttaaatatttttaaacatttatcagatacccttctcagtcttcttttccccaggctgaacagacccaggttattcagcctttcctcatacag

SEQ ID NO: 49691 - DNA, 599 bp, Chicken  19866894295908_1
  misc_feature (1)..(217): n is any nucleotide
nnnnnnnnnnnnnnnnnnnnnnnnnnnnnnnnnnnnnnnnnnnnnnnnnnnnnnnnnnnnnnnnnnnnnnnnnnnnnnnnnnnnnnnnnnnnnnnnnnnnnnnnnnnnnnnnnnnnnnnnnnnnnnnnnnnnnnnnnnnnnnnnnnnnnnnnnnnnnnnnnnnnnnnnnnnnnnnnnnnnnnnnnnnnnnnnnnnnnnnnnnnnnnnnnnnnnnnnntccagttttaacccatttccccttgttctgttgctacctgcccttataaaaagtcccttcccagctttcctgtaggtcccctwcaagtactggaaggctgctataatgtctcctcggagccccctcttctcccagctgaaaagccccggctctcttagcctgtcctcgtaggggaggtcctccagccctctgatcatctttgtcacacttctctggatctgctccaataacttcttgtccttctcgtgttaaggaccccagaactggatgtagtactccaggtggatgattttcttttgtttgcagtgacatacttagggaaggacaatgaaatagctattgtaatacagatagagcaagacaaggcttaacatgctttttt

SEQ ID NO: 49692 - DNA, 600 bp, Chicken  19866894295911_1
gttaatggctcggctgcagggaaagccctcgcgaggcaagcttaatgaagaagtcagcgtgcgctgggatcagacctgccgcctgtaaccgagcctcattgttatttaaattgggctcctggcagggctgggggaataactcgcgatcagacaattcttatgagcaatgcgatgaaccgtgcacacagagccaggaggagccctggggagaagctcatgttgtggggcagcagcagtgagcagccccaaaggcagctgtgtgttggggctgtgggtctgccccgttcccctcggcacgckgggaagcaggagcgctcccgttgccacacaggctcacttgtgtgctcaccccactcccaaggcagtggaaaatccccacagtttgaaccagtggcaaggagtgatgcccgcttcccctcttacagtcagaggatatgaaagccagttattgatcaaatggatttggaaacgggcagcaaaaccccaaggattttaccactaagtttgtttaagcagaggtgcaggaaggcggtttgatgtgggccacttttgggtacatgaaacagaattaatttgttcttcctgaaaacccagcagaga

SEQ ID NO: 49693 - DNA, 600 bp, Chicken  19866894295916_1
atgcaaagcccaaggccctccctgcacccagttatgtggggctcattacaactccggcagctccttcctctgagcagtgagtgttttaaaagctggcggttgttggtggctggcttctttttgcaggttcttcaataggaagcagcctgagggcatcctatgacctcatgcttgacaggggtaaagacttaaaccctaaaaatagccccacagaatctgaagaatataatcctcctgcctgtccccctccaaaccatcaatcctcccactgctcggctcaggaacagccgcttcctcccrgcagtccttgttttcccttcaagctcggagccgacaggaaatccattctcctcttgtaagagacaggagatgaattttccgcaatagctctcctagcaaagcagaaaatagaaagaaacaatagaaactgctttctcaaacaataggagcttctgaagagcagctcgccagaagcacagcatcacccatttatctgccagtcctaaataagcctgagtggaaaacggccaaggacctgttagctatcttggcccaaatataaggtcattttaaagctggaggcgtcctcccctttcaaag

SEQ ID NO: 49694 - DNA, 600 bp, Chicken  19866894295918_1
tagatcaataggtttcctattaaaactcaagacaggtttctggctactgctctgctactggtgaaacaaccctaatcacagcattcttgcagtatgcaatcttatgtatgtttgagctgtttattttatttatttatttatttatttatgggaacagagtacatcttgtttcttccttgtatgggaacgctgtgcttgtctgcctgcaatgctttcagtacaagtcacaccagccgtacattggtgtggctgatgtttttttcaaaacaagttaatatgccttactaatcactgatttakatatgtgcggtttttttatttttaaaagctggttttacacagaaaagagggtaacaaacaactctttcaaatttgaagaaatcctattctctgaatatgcatgaatgcaggattaaaattaaatagaaaattattttgctcttcagtacaaggggttcaattaagaaaaccaaaagacttcagtgatattagaagatgtggttccgttccttttctgttttggtattggtaatttgtgataaataatacttggctgcatcaagctgaaaggattgttactttgttccttggggacttttt

SEQ ID NO: 49695 - DNA, 600 bp, Chicken  19866894295918_2
attctgatttattttcagcaattctttgacatcacatattttaaggacctaacatggattcctctttggaatcttttgctttacttacagatgctcagttcttagatggcatgtgctggccactttttgtctgagtatcacagcttcccattgtaaatgggagtataaaaatgactggccaagataataaccagagcaggagaacccacagtccatgtacttaagagcacgcacacaacactgagcacatcctacatggacagagatacggataagtcttagagcccaaccacctccaaktgtgaatgcagctgagtcagtttgctcttccacacatatgcagtcattcaaaatgaataaaagctgttcttactgtcacttcagttacttaagaaataatttcttattatggcagatcccttgaaagtttgtcaccagccctactggttttcacttaactttaaatgtaacatacctaygtaggttaacatcactaaacttgttttggttagctaacgttatgattttgacaaggaacaatatttaaaagtgacagttaacctaccagtgatgtagccttctaaagcttttggcaccaga

SEQ ID NO: 49696 - DNA, 600 bp, Chicken  19866894295918_3
caagataataaccagagcaggagaacccacagtccatgtacttaagagcacgcacacaacactgagcacatcctacatggacagagatacggataagtcttagagcccaaccacctccaaktgtgaatgcagctgagtcagtttgctcttccacacatatgcagtcattcaaaatgaataaaagctgttcttactgtcacttcagttacttaagaaataatttcttattatggcagatcccttgaaagtttgtcaccagccctactggttttcacttaactttaaatgtaacatacctaygtaggttaacatcactaaacttgttttggttagctaacgttatgattttgacaaggaacaatatttaaaagtgacagttaacctaccagtgatgtagccttctaaagcttttggcaccagagattttgcagttcttaggtcttcagctgagcatttgccttcctcaagcccaaaggacattcccattctcttcagcacctcactgtcatcatgaatctcaaaagcattatcgaaattgaagaggtattcaaatctgtatttaagaagtcaaagtgagatgatttagaaaagtatggcttt

SEQ ID NO: 49697 - DNA, 600 bp, Chicken  19866894295919_1
ggttgatttttagccgtgtgtgtggtaggacaattagcagagcagatagttgttgttttaacccagaggatgcagagatgaagtcctctctgagcgctgctctgactgcccaggcaggtgtttgccttctgatgaggtttgcccatgggcacaaatgagcattcagtcagcaaaaaggacgtggccctggagaaaggacctgccccaagtcgtgcaggttgccctttttgccgttgggaatgggaatagtgcaagtgtcaggggttggcatgagaaggtaaatcagtgctggcttgcctmcagcaggtcctggtttgatattgctggtgatgcttcagcccagcctgctgctctttctgacaggcctccttaccattgcaggctgcagcagctggatgatgagaacagcgagctgaggtcatgtgtcccttgtttaagagccaacatcgagaggctcgaggaggtgagaacgtgtgtatgtgtgtcccagggcctctgccctccccacagctcagggggggggcccagcagcactgacaccacagcctgacctcggggcagtgctttgcaggcgggttcacagtgcctggctgcaaacct

SEQ ID NO: 49698 - DNA, 600 bp, Chicken  19866894295919_10
tcacagcccctctcccccacgccggggccaggaggctgcaggctggcagggccggatgggagcgttacccatggagaggatgcgcttgcaggtcccactgctggcacaggggttgcactgtggctctgttggagcttgtggaggatgtgagattaaaactgatgtgaaaccaaacttctgccctcyggcgttgcagccactcacagcctctgagcccacagagcactgcccaccrtggccaaggcagcgtttgtctgcrtgccctgaggccttgtaagcactgatggagaggactgctgygtcctggtggcatctggggcttttggaaagccaaaggcttcctcacatgcagagccaccctggggatggggtgggttggtgataggaaagcagggaaatgcctggygtggggctgttggcaccagcaggtgacaaacctcacccagcacctgcaggcagcaagccctgcgaccactgcgctgtgtgtgcttgcaggagaagcagaagctgctggatgagattgaggacctcactgtgcagctcacagaggagcaggagaacaagaggaagatgggggacaagctgagccacgagaggcac

SEQ ID NO: 49699 - DNA, 600 bp, Chicken  19866894295919_11
caggggttgcactgtggctctgttggagcttgtggaggatgtgagattaaaactgatgtgaaaccaaacttctgccctcyggcgttgcagccactcacagcctctgagcccacagagcactgcccaccrtggccaaggcagcgtttgtctgcrtgccctgaggccttgtaagcactgatggagaggactgctgygtcctggtggcatctggggcttttggaaagccaaaggcttcctcacatgcagagccaccctggggatggggtgggttggtgataggaaagcagggaaatgcctggygtggggctgttggcaccagcaggtgacaaacctcacccagcacctgcaggcagcaagccctgcgaccactgcgctgtgtgtgcttgcaggagaagcagaagctgctggatgagattgaggacctcactgtgcagctcacagaggagcaggagaacaagaggaagatgggggacaagctgagccacgagaggcaccagttccagaaggagaaggagtcgacccaggaggtgaggagtttggctgcccgctgcagccctgccttgctaaagggcagctttgcatctctagcttcagcagcat

SEQ ID NO: 49700 - DNA, 600 bp, Chicken  19866894295919_12
ctgccttgctaaagggcagctttgcatctctagcttcagcagcatctccagagccaacttttagagcctttggtcgagcctggatggaggaaggtagtacagcagcttagctgtgtaacatctgtcgctttggcctgtgttaaaattcaaccgagcacatctgcctgcgtctggaaacccatttgggctgggccacccatgccagttgcttgtctgttgcatcaaaggagctgtggcagcagcacgtggaaccagcaggcgctagcaaagggaaagagagagcagcatgggtgggagccytcagctgtctgcatgcctgggggcaaaaacgtgccctcccccccccatctccttccaggtagttccatctggaggctcragcagtgcttgccaycgtggcaggaatggagtttggggtctcagagtgraacttgctgttgttttggcatcatgtggggattcacagcacgtcccattgctgctcccagccaggagaccacccgtgtgtcccaccagctgcaaccagtgccagcactcagctgtccccttccttttgctgcagctcatcgaggacctcaggaagcagctcgagcacttgca

SEQ ID NO: 49701 - DNA, 600 bp, Chicken  19866894295919_13
ctggatggaggaaggtagtacagcagcttagctgtgtaacatctgtcgctttggcctgtgttaaaattcaaccgagcacatctgcctgcgtctggaaacccatttgggctgggccacccatgccagttgcttgtctgttgcatcaaaggagctgtggcagcagcacgtggaaccagcaggcgctagcaaagggaaagagagagcagcatgggtgggagccytcagctgtctgcatgcctgggggcaaaaacgtgccctcccccccccatctccttccaggtagttccatctggaggctcragcagtgcttgccaycgtggcaggaatggagtttggggtctcagagtgraacttgctgttgttttggcatcatgtggggattcacagcacgtcccattgctgctcccagccaggagaccacccgtgtgtcccaccagctgcaaccagtgccagcactcagctgtccccttccttttgctgcagctcatcgaggacctcaggaagcagctcgagcacttgcagctcttcaaactggaatgtgagcagcggcgaggccggagcagcagcatggggctgcaggagtacaacagcaggacacga

SEQ ID NO: 49702 - DNA, 600 bp, Chicken  19866894295919_14
tagtacagcagcttagctgtgtaacatctgtcgctttggcctgtgttaaaattcaaccgagcacatctgcctgcgtctggaaacccatttgggctgggccacccatgccagttgcttgtctgttgcatcaaaggagctgtggcagcagcacgtggaaccagcaggcgctagcaaagggaaagagagagcagcatgggtgggagccytcagctgtctgcatgcctgggggcaaaaacgtgccctcccccccccatctccttccaggtagttccatctggaggctcragcagtgcttgccaycgtggcaggaatggagtttggggtctcagagtgraacttgctgttgttttggcatcatgtggggattcacagcacgtcccattgctgctcccagccaggagaccacccgtgtgtcccaccagctgcaaccagtgccagcactcagctgtccccttccttttgctgcagctcatcgaggacctcaggaagcagctcgagcacttgcagctcttcaaactggaatgtgagcagcggcgaggccggagcagcagcatggggctgcaggagtacaacagcaggacacgagagacggagctggag

SEQ ID NO: 49703 - DNA, 600 bp, Chicken  19866894295919_15
tttggcctgtgttaaaattcaaccgagcacatctgcctgcgtctggaaacccatttgggctgggccacccatgccagttgcttgtctgttgcatcaaaggagctgtggcagcagcacgtggaaccagcaggcgctagcaaagggaaagagagagcagcatgggtgggagccytcagctgtctgcatgcctgggggcaaaaacgtgccctcccccccccatctccttccaggtagttccatctggaggctcragcagtgcttgccaycgtggcaggaatggagtttggggtctcagagtgraacttgctgttgttttggcatcatgtggggattcacagcacgtcccattgctgctcccagccaggagaccacccgtgtgtcccaccagctgcaaccagtgccagcactcagctgtccccttccttttgctgcagctcatcgaggacctcaggaagcagctcgagcacttgcagctcttcaaactggaatgtgagcagcggcgaggccggagcagcagcatggggctgcaggagtacaacagcaggacacgagagacggagctggagcaggagatcaagcagcttaagcaggtaggcgagg

SEQ ID NO: 49704 - DNA, 600 bp, Chicken  19866894295919_2
ttgatattgctggtgatgcttcagcccagcctgctgctctttctgacaggcctccttaccattgcaggctgcagcagctggatgatgagaacagcgagctgaggtcatgtgtcccttgtttaagagccaacatcgagaggctcgaggaggtgagaacgtgtgtatgtgtgtcccagggcctctgccctccccacagctcagggggggggcccagcagcactgacaccacagcctgacctcggggcagtgctttgcaggcgggttcacagtgcctggctgcaaacctggtgttaccaaacrtagtgagcctgagctggagcagcgggcggcctggctgcrggaggggactcgtgccctctgctggaggcaaatccacagccctgyggctgcagcaggaaggctttaggtctgcayggtgcccacacacrgctgagacctcagaatgctgtgttatctcacagcccctctcccccacgccggggccaggaggctgcaggctggcagggccggatgggagcgttacccatggagaggatgcgcttgcaggtcccactgctggcacaggggttgcactgtggctctgttggagcttgtggagga

SEQ ID NO: 49705 - DNA, 600 bp, Chicken  19866894295919_3
tttctgacaggcctccttaccattgcaggctgcagcagctggatgatgagaacagcgagctgaggtcatgtgtcccttgtttaagagccaacatcgagaggctcgaggaggtgagaacgtgtgtatgtgtgtcccagggcctctgccctccccacagctcagggggggggcccagcagcactgacaccacagcctgacctcggggcagtgctttgcaggcgggttcacagtgcctggctgcaaacctggtgttaccaaacrtagtgagcctgagctggagcagcgggcggcctggctgcrggaggggactcgtgccctctgctggaggcaaatccacagccctgyggctgcagcaggaaggctttaggtctgcayggtgcccacacacrgctgagacctcagaatgctgtgttatctcacagcccctctcccccacgccggggccaggaggctgcaggctggcagggccggatgggagcgttacccatggagaggatgcgcttgcaggtcccactgctggcacaggggttgcactgtggctctgttggagcttgtggaggatgtgagattaaaactgatgtgaaaccaaacttctgccct

SEQ ID NO: 49706 - DNA, 600 bp, Chicken  19866894295919_4
atgagaacagcgagctgaggtcatgtgtcccttgtttaagagccaacatcgagaggctcgaggaggtgagaacgtgtgtatgtgtgtcccagggcctctgccctccccacagctcagggggggggcccagcagcactgacaccacagcctgacctcggggcagtgctttgcaggcgggttcacagtgcctggctgcaaacctggtgttaccaaacrtagtgagcctgagctggagcagcgggcggcctggctgcrggaggggactcgtgccctctgctggaggcaaatccacagccctgyggctgcagcaggaaggctttaggtctgcayggtgcccacacacrgctgagacctcagaatgctgtgttatctcacagcccctctcccccacgccggggccaggaggctgcaggctggcagggccggatgggagcgttacccatggagaggatgcgcttgcaggtcccactgctggcacaggggttgcactgtggctctgttggagcttgtggaggatgtgagattaaaactgatgtgaaaccaaacttctgccctcyggcgttgcagccactcacagcctctgagcccacagagcactgc

SEQ ID NO: 49707 - DNA, 600 bp, Chicken  19866894295919_5
cttgtttaagagccaacatcgagaggctcgaggaggtgagaacgtgtgtatgtgtgtcccagggcctctgccctccccacagctcagggggggggcccagcagcactgacaccacagcctgacctcggggcagtgctttgcaggcgggttcacagtgcctggctgcaaacctggtgttaccaaacrtagtgagcctgagctggagcagcgggcggcctggctgcrggaggggactcgtgccctctgctggaggcaaatccacagccctgyggctgcagcaggaaggctttaggtctgcayggtgcccacacacrgctgagacctcagaatgctgtgttatctcacagcccctctcccccacgccggggccaggaggctgcaggctggcagggccggatgggagcgttacccatggagaggatgcgcttgcaggtcccactgctggcacaggggttgcactgtggctctgttggagcttgtggaggatgtgagattaaaactgatgtgaaaccaaacttctgccctcyggcgttgcagccactcacagcctctgagcccacagagcactgcccaccrtggccaaggcagcgtttgtctgcr

SEQ ID NO: 49708 - DNA, 600 bp, Chicken  19866894295919_6
aacatcgagaggctcgaggaggtgagaacgtgtgtatgtgtgtcccagggcctctgccctccccacagctcagggggggggcccagcagcactgacaccacagcctgacctcggggcagtgctttgcaggcgggttcacagtgcctggctgcaaacctggtgttaccaaacrtagtgagcctgagctggagcagcgggcggcctggctgcrggaggggactcgtgccctctgctggaggcaaatccacagccctgyggctgcagcaggaaggctttaggtctgcayggtgcccacacacrgctgagacctcagaatgctgtgttatctcacagcccctctcccccacgccggggccaggaggctgcaggctggcagggccggatgggagcgttacccatggagaggatgcgcttgcaggtcccactgctggcacaggggttgcactgtggctctgttggagcttgtggaggatgtgagattaaaactgatgtgaaaccaaacttctgccctcyggcgttgcagccactcacagcctctgagcccacagagcactgcccaccrtggccaaggcagcgtttgtctgcrtgccctgaggcctt

SEQ ID NO: 49709 - DNA, 600 bp, Chicken  19866894295919_7
aggggactcgtgccctctgctggaggcaaatccacagccctgyggctgcagcaggaaggctttaggtctgcayggtgcccacacacrgctgagacctcagaatgctgtgttatctcacagcccctctcccccacgccggggccaggaggctgcaggctggcagggccggatgggagcgttacccatggagaggatgcgcttgcaggtcccactgctggcacaggggttgcactgtggctctgttggagcttgtggaggatgtgagattaaaactgatgtgaaaccaaacttctgccctcyggcgttgcagccactcacagcctctgagcccacagagcactgcccaccrtggccaaggcagcgtttgtctgcrtgccctgaggccttgtaagcactgatggagaggactgctgygtcctggtggcatctggggcttttggaaagccaaaggcttcctcacatgcagagccaccctggggatggggtgggttggtgataggaaagcagggaaatgcctggygtggggctgttggcaccagcaggtgacaaacctcacccagcacctgcaggcagcaagccctgcgaccactgcgctgtgtg

SEQ ID NO: 49710 - DNA, 600 bp, Chicken  19866894295919_8
agcaggaaggctttaggtctgcayggtgcccacacacrgctgagacctcagaatgctgtgttatctcacagcccctctcccccacgccggggccaggaggctgcaggctggcagggccggatgggagcgttacccatggagaggatgcgcttgcaggtcccactgctggcacaggggttgcactgtggctctgttggagcttgtggaggatgtgagattaaaactgatgtgaaaccaaacttctgccctcyggcgttgcagccactcacagcctctgagcccacagagcactgcccaccrtggccaaggcagcgtttgtctgcrtgccctgaggccttgtaagcactgatggagaggactgctgygtcctggtggcatctggggcttttggaaagccaaaggcttcctcacatgcagagccaccctggggatggggtgggttggtgataggaaagcagggaaatgcctggygtggggctgttggcaccagcaggtgacaaacctcacccagcacctgcaggcagcaagccctgcgaccactgcgctgtgtgtgcttgcaggagaagcagaagctgctggatgagattgaggacctcactg

SEQ ID NO: 49711 - DNA, 600 bp, Chicken  19866894295919_9
ggtgcccacacacrgctgagacctcagaatgctgtgttatctcacagcccctctcccccacgccggggccaggaggctgcaggctggcagggccggatgggagcgttacccatggagaggatgcgcttgcaggtcccactgctggcacaggggttgcactgtggctctgttggagcttgtggaggatgtgagattaaaactgatgtgaaaccaaacttctgccctcyggcgttgcagccactcacagcctctgagcccacagagcactgcccaccrtggccaaggcagcgtttgtctgcrtgccctgaggccttgtaagcactgatggagaggactgctgygtcctggtggcatctggggcttttggaaagccaaaggcttcctcacatgcagagccaccctggggatggggtgggttggtgataggaaagcagggaaatgcctggygtggggctgttggcaccagcaggtgacaaacctcacccagcacctgcaggcagcaagccctgcgaccactgcgctgtgtgtgcttgcaggagaagcagaagctgctggatgagattgaggacctcactgtgcagctcacagaggagcaggaga

SEQ ID NO: 49712 - DNA, 600 bp, Chicken  19866894295923_1
tttcactaaattcacacttgtgaacacctgtgatctttttttttttcttttctttctagtgctttctatctaatcagcgggatcacttgtacttaaaacaacacaggctctttagtacactactgaaatcactaccaagtcagatctcttggtcttcttgatggatgaagaagtgtttgatggggtgatgtgagttttccccagctttcaagtcatcaaacagggctgctgtggagctgtctaacaaaaatatctgttcctccatgtcagccacacagtgctgcagcagaactaggggtkcagaatgtgttttgtctgctgtacctaagaggtttcttttcttttccctcatttaatttgcatctttgacccttttctttttgttaatccaaatggtacttcgttcaaatttcgtgacaaattgctgttaaaaaattcttgtttttgaaagacttgcaagaccaaatgtgttgatgcagagcaaggactgcggttgtactttccgtgtcttgaaacccagctggcagatatttgtcatacaggtagctgaacctctcctcccagagctgcatatccaagcttcgagtttgtctgcggagg

SEQ ID NO: 49713 - DNA, 600 bp, Chicken  19866894295929_1
ttctttcttttttttttttcttttttctttattaaacaggacaaatggaagctctggtgtggtatatgtggtgctaagtacagtacttgatgagtctttaaaataagaatattctcttgcctcaaaaggatactgagatttattataagctatgcacttgataaaagtgattatttaatgctatttacataaaagacccctctttttttttgcaagaagcataagttttgactttttcatctattgggattttgcatgaaattaaactttctgactgagcaagtaaaaatacagttttcsttatccctctgcctccttttcatagtgaaaagacaaggaaaatggaaaaaamcagagatgaatgtggcaacaagaactaagtccatctggagaataggagagccagatgcaggtacagcatggagaggaaacaaaggatgggctttaatcaccacatcatttcarcatgttggaaactggagaatacatgctgccccagacaccactggtttgtgttctcagaaccactcctttctaaaataatttatggcttaaaacaagacttatgtaacttgtcatcacttcatatttaaaatgctt

SEQ ID NO: 49714 - DNA, 555 bp, Chicken  19866894295929_2
tctggtgtggtatatgtggtgctaagtacagtacttgatgagtctttaaaataagaatattctcttgcctcaaaaggatactgagatttattataagctatgcacttgataaaagtgattatttaatgctatttacataaaagacccctctttttttttgcaagaagcataagttttgactttttcatctattgggattttgcatgaaattaaactttctgactgagcaagtaaaaatacagttttcsttatccctctgcctccttttcatagtgaaaagacaaggaaaatggaaaaaamcagagatgaatgtggcaacaagaactaagtccatctggagaataggagagccagatgcaggtacagcatggagaggaaacaaaggatgggctttaatcaccacatcatttcarcatgttggaaactggagaatacatgctgccccagacaccactggtttgtgttctcagaaccactcctttctaaaataatttatggcttaaaacaagacttatgtaacttgtcatcacttcatatttaaaatgctttggtttt

SEQ ID NO: 49715 - DNA, 442 bp, Chicken  19866894295929_3
agtgattatttaatgctatttacataaaagacccctctttttttttgcaagaagcataagttttgactttttcatctattgggattttgcatgaaattaaactttctgactgagcaagtaaaaatacagttttcsttatccctctgcctccttttcatagtgaaaagacaaggaaaatggaaaaaamcagagatgaatgtggcaacaagaactaagtccatctggagaataggagagccagatgcaggtacagcatggagaggaaacaaaggatgggctttaatcaccacatcatttcarcatgttggaaactggagaatacatgctgccccagacaccactggtttgtgttctcagaaccactcctttctaaaataatttatggcttaaaacaagacttatgtaacttgtcatcacttcatatttaaaatgctttggtttt

SEQ ID NO: 49716 - DNA, 600 bp, Chicken  19866894295931_1
cagcagatctgccgaagatgaaatacttgctttccaattactttcgattagacagatctctcactcaattggatttacctttcaaagagttttaaaccaaagagcaagtgaaagcatgtaagccaatatgctgacctgtacatcagcttagcattttacttgcaagcactgcctgggccacagggaggggctcagaggaggcagatgatgcaggcagctcatctaggaacccttgtccgtgatatttcctggttggaagaggttgagtcggcagcacaaaagcttgtggctgaggctgargaacttcttgagtaccacagaagcttgagcagcccaccaatacattgggaaaatgtattcacacaccaggcttcrtggagtttaggagaattattctagatcctatgctgagctgagatcagaacgagaccccttatgtggctagcaacaggatgtcctcttttcaaggctttgtacctggggaatttcatttcctggacggccgagcagtgcctgggcagaagatattttcaggacactgaaacgctttcctcatctgcttgccatttgattcggttgttttgctttgttttcaattat

SEQ ID NO: 49717 - DNA, 600 bp, Chicken  19866894295931_2
tacctttcaaagagttttaaaccaaagagcaagtgaaagcatgtaagccaatatgctgacctgtacatcagcttagcattttacttgcaagcactgcctgggccacagggaggggctcagaggaggcagatgatgcaggcagctcatctaggaacccttgtccgtgatatttcctggttggaagaggttgagtcggcagcacaaaagcttgtggctgaggctgargaacttcttgagtaccacagaagcttgagcagcccaccaatacattgggaaaatgtattcacacaccaggcttcrtggagtttaggagaattattctagatcctatgctgagctgagatcagaacgagaccccttatgtggctagcaacaggatgtcctcttttcaaggctttgtacctggggaatttcatttcctggacggccgagcagtgcctgggcagaagatattttcaggacactgaaacgctttcctcatctgcttgccatttgattcggttgttttgctttgttttcaattatgctttttttccatcattgtgtttgctgatttacattactgcctctaataaatagccatggcaacaggtgttgtaa

SEQ ID NO: 49718 - DNA, 600 bp, Chicken  19866894295934_1
tcccttttctcggcagagctgtggagcggagcagcagcaccaggtatggcagcagcaccccgagagccgccttcatcctccctgttctgctgcaccaacagcagccgcccgacgcacctctgcgcatgggaggaccgcatctcccttttaaaagcggtggccttgaagtggccaacacacaacacacctcccctgcgaaacacggccgctgtcccactgcagagcagggaggggtgggtcagaggaactcttctgttctatttttgggtttgcatccagtattggaaactgaagaaaagraaaaaaaaaaacaaaaactgtaaagctgtttccctttggttgcagggatgcgcggccttgagatgtttggagaggagggtggaagtcggggccgggggtttggcaggggttggcacagaccattcccatcagcagcagcaccgggaggagacaccgggctgtccacacctgggggagggggtgaagataacgggaaggaacgaatgaaatgcccaaagctccctcgggtgggcgcctccccctcggagcacagaggctgtgcacatctccagccgcgcaacacgtgcacagcaccacctg

SEQ ID NO: 49719 - DNA, 509 bp, Chicken  19866894295934_2
gcagcagcaccgggaggagacaccgggctgtccacacctgggggagggggtgaagataacgggaaggaacgaatgaaatgcccaaagctccctcgggtgggcgcctccccctcggagcacagaggctgtgcacatctccagccgcgcaacacgtgcacagcaccacctggcaggtggcaatgtacctgtaccagctcccagtgcacgggcagagccttctccgtgttcccaggactcgtgcagggtggagctcaggatacggccccagcacagacccagagagcgcagaacaaagggctsacaaacacagcctgcgtgcaggaggctcagccgagctgtttcaggcatggaggcccatgtcgggcatcaacagcccggagagcagcaggggggagggagatgccaatgaaagctcacmcagtgcttttcaagggttctcgagaagcggcgtgaagtgatttcctttaaaagagacatttctgtgctgctggctgccacccgagctgcca

SEQ ID NO: 49720 - DNA, 391 bp, Chicken  19866894295934_3
acagaggctgtgcacatctccagccgcgcaacacgtgcacagcaccacctggcaggtggcaatgtacctgtaccagctcccagtgcacgggcagagccttctccgtgttcccaggactcgtgcagggtggagctcaggatacggccccagcacagacccagagagcgcagaacaaagggctsacaaacacagcctgcgtgcaggaggctcagccgagctgtttcaggcatggaggcccatgtcgggcatcaacagcccggagagcagcaggggggagggagatgccaatgaaagctcacmcagtgcttttcaagggttctcgagaagcggcgtgaagtgatttcctttaaaagagacatttctgtgctgctggctgccacccgagctgcca

SEQ ID NO: 49721 - DNA, 600 bp, Chicken  19866894295936_1
tattaggaatgtttatctttttttcccctggtagtactgtgccctgaaagccacaggaactctcctgtcaccccagcagcaatgctggaggagcagttctgtgaaccaagctcctgctgaaaatgaaatggcctttgtataggaacactgtcctttttcttccgtgtttcgtctgctgaggagcagaagcccaggctggggcagcctgtctgtcctcccagtgcttttttggttaaggtttgggtggagctgcagcatttttgtctgaatctggctctgagtttgagtacaaggcaaatyattcaggaaagggacttcctgctggtcaagtcgtggtggaggtctgttcgtgagcgaagatgaaaatattgcacactttgaagaagtgatctaagcacagactcttagggtcacattaatgtgaacttgtgggtgggcaaagaagtagctaagaggttcaaatggatatcatgcattttaagagataattaattgtgaaatgtaacaatgaaaactggtgaagaagtgaaaatggaaattatgtgggtagcataaaatacctcaaatttaatacagagagagagagacaggtatcatata

SEQ ID NO: 49722 - DNA, 600 bp, Chicken  19866894295936_2
cgggttggggcacatgtatctgctttgacctgcttaatctgcttttatgatataaaatagaatctgccatttactggctgatttacatcaggcaataatcccagactacgaagtctacagctgcagagaccactcgctttcagcacgttttccatgctcctgtattgccataaacgttgcttgggtacatctcaggatccagacattacagttagaattggttgaaaagttggaagatttcttttgagaatctggttctctttggagacttcttccagtgtgggggtttcttaccacacrtatggttgcttcccctccaaggcaaacctccaatgacatcaggggatccacactrtggctgggccagagcttcacaaaccccactgttccracacttttagctataagttaaagcattatttttaccatttcccatttcctgtttgctgcagaacaaacacagctgtgtctgactggtaaaaggttgcttttgtcagagtgagctgggtcttgcagtgaaatttgaaggcytggatctccttagagcatttgttggctgcagcgtgatgagatactacagacaggcagagatgaagatgg

SEQ ID NO: 49723 - DNA, 600 bp, Chicken  19866894295936_3
aatagaatctgccatttactggctgatttacatcaggcaataatcccagactacgaagtctacagctgcagagaccactcgctttcagcacgttttccatgctcctgtattgccataaacgttgcttgggtacatctcaggatccagacattacagttagaattggttgaaaagttggaagatttcttttgagaatctggttctctttggagacttcttccagtgtgggggtttcttaccacacrtatggttgcttcccctccaaggcaaacctccaatgacatcaggggatccacactrtggctgggccagagcttcacaaaccccactgttccracacttttagctataagttaaagcattatttttaccatttcccatttcctgtttgctgcagaacaaacacagctgtgtctgactggtaaaaggttgcttttgtcagagtgagctgggtcttgcagtgaaatttgaaggcytggatctccttagagcatttgttggctgcagcgtgatgagatactacagacaggcagagatgaagatggtgagggatgactgaggaagatcagagtatgggcagtgggttgaaagctgatctga

SEQ ID NO: 49724 - DNA, 600 bp, Chicken  19866894295936_4
gcaataatcccagactacgaagtctacagctgcagagaccactcgctttcagcacgttttccatgctcctgtattgccataaacgttgcttgggtacatctcaggatccagacattacagttagaattggttgaaaagttggaagatttcttttgagaatctggttctctttggagacttcttccagtgtgggggtttcttaccacacrtatggttgcttcccctccaaggcaaacctccaatgacatcaggggatccacactrtggctgggccagagcttcacaaaccccactgttccracacttttagctataagttaaagcattatttttaccatttcccatttcctgtttgctgcagaacaaacacagctgtgtctgactggtaaaaggttgcttttgtcagagtgagctgggtcttgcagtgaaatttgaaggcytggatctccttagagcatttgttggctgcagcgtgatgagatactacagacaggcagagatgaagatggtgagggatgactgaggaagatcagagtatgggcagtgggttgaaagctgatctgaggagatggatgtgacaaccatccttcttgcacaaga

SEQ ID NO: 49725 - DNA, 600 bp, Chicken  19866894295936_5
ggaagatttcttttgagaatctggttctctttggagacttcttccagtgtgggggtttcttaccacacrtatggttgcttcccctccaaggcaaacctccaatgacatcaggggatccacactrtggctgggccagagcttcacaaaccccactgttccracacttttagctataagttaaagcattatttttaccatttcccatttcctgtttgctgcagaacaaacacagctgtgtctgactggtaaaaggttgcttttgtcagagtgagctgggtcttgcagtgaaatttgaaggcytggatctccttagagcatttgttggctgcagcgtgatgagatactacagacaggcagagatgaagatggtgagggatgactgaggaagatcagagtatgggcagtgggttgaaagctgatctgaggagatggatgtgacaaccatccttcttgcacaagactgtaaaacataatccaagtagcacctgctgcataactctgaagacccagagatgtgtctgtaccatggcagagcttcacaccagaaagctcagtgctgcttggcacagatagcttgacagtgggcacagatggggaaaa

SEQ ID NO: 49726 - DNA, 600 bp, Chicken  19866894295938_1
tgagcttgttcttcaacgggaattcacaacttgccactccatggactgctgttttgactctggcttgtggtgtgacaacacatctcatcaccagcaatgatgtgatccaggaaactgtcaccttctgcctcattttggttcaatagttcctgacacacttgcatacagtgttcttctgttcctgtgtgagcattcatgggacccacctggtgcaaaccttgcagtatttcaacattgcaccatcatttccaatgcactgaagccgatattcagctctgtacaaagctccctattcacaayctgttgatctgcacagatgagctgatcaagaaactcttcatttcatggtatgacagctatgcatggccgtccagaatgtggcttatctttcacgacaaaatattggtcagaaggctcaacttctactgccatatcaccaacatctgcctctgacgccaacattataaaacaggaggcattactttcrgagcagatcctgtgcctttacgatactcaaacgcctttaagacattgttctattcaacacagctccatctgctgcagacacgggctgtgaagagccgtggtaggctctcctgt

SEQ ID NO: 49727 - DNA, 600 bp, Chicken  19866894295938_2
gagcattcatgggacccacctggtgcaaaccttgcagtatttcaacattgcaccatcatttccaatgcactgaagccgatattcagctctgtacaaagctccctattcacaayctgttgatctgcacagatgagctgatcaagaaactcttcatttcatggtatgacagctatgcatggccgtccagaatgtggcttatctttcacgacaaaatattggtcagaaggctcaacttctactgccatatcaccaacatctgcctctgacgccaacattataaaacaggaggcattactttcrgagcagatcctgtgcctttacgatactcaaacgcctttaagacattgttctattcaacacagctccatctgctgcagacacgggctgtgaagagccgtggtaggctctcctgttgtcaaaatctctcttttacaggacattttcagccctctaaccatcgcgcaataaattcagcaggagttttattagggaacttggggtatttttctttcaaatatcgaaataggaaaaaaaatatagaactatagagagcctgaagcacttcctggctccctggttttgaacaagatagttgaaaag

SEQ ID NO: 49728 - DNA, 600 bp, Chicken  19866894295938_3
gttttctagctgaatggggacatctttatgttacaaagtcctccagatagatgaaaaacacgaggagctctgaggaacctccatttcttggatcttttcacctttgacttctatggaaccagagataatgcccagcttccatctcttcactcaccaggcaaccaccagcagctgaccaagggacaccacagataggaaagagcaaataggaggatggagtaaccccgtctcttccagtctcccagatttctttctcatccttaattaaaaccaaagctttaagggaggaaattgatgcayaaataaatgtatatatttgccacatagcaaggaaaattcctccatgacacagtagttttgacttcactgaaagtcaggggraaaaaaaagagatctggggagctcttcagccctcgtagactttggttttggaaagacttcctatgtgcatccacagagaatccttaggagggtctgttgtgataggacaaggggaaatggttccaaactgaaagagggtagatttagactgaatacaaggaagttttttacagtaagggctgtgagatactggcacaggctgaccagagaggggggtgg

SEQ ID NO: 49729 - DNA, 600 bp, Chicken  19866894295938_4
catttcttggatcttttcacctttgacttctatggaaccagagataatgcccagcttccatctcttcactcaccaggcaaccaccagcagctgaccaagggacaccacagataggaaagagcaaataggaggatggagtaaccccgtctcttccagtctcccagatttctttctcatccttaattaaaaccaaagctttaagggaggaaattgatgcayaaataaatgtatatatttgccacatagcaaggaaaattcctccatgacacagtagttttgacttcactgaaagtcaggggraaaaaaaagagatctggggagctcttcagccctcgtagactttggttttggaaagacttcctatgtgcatccacagagaatccttaggagggtctgttgtgataggacaaggggaaatggttccaaactgaaagagggtagatttagactgaatacaaggaagttttttacagtaagggctgtgagatactggcacaggctgaccagagaggggggtgggtgccccatccctgcagacactcaaggtcagcctggatggggctctgagcacccgatggagctgtccctgttcattgcagg

SEQ ID NO: 49730 - DNA, 599 bp, Chicken  19866894295939_1
  misc_feature (1)..(36): n is any nucleotide
nnnnnnnnnnnnnnnnnnnnnnnnnnnnnnnnnnnnacgttaattataacatgttgtaataaagatacccccaagatcagccctatcttttctgctatagtgcagtccctaggcatacggctaagtattccttgatcattatcctagctaaaaccgaagctactgaagtttaggggagttgtatctaacggaatttctttcatctctaataattgctaaactagcataattgctcatacttgaggtgaaatagaacccaagttgtctaaaagttaaaacaaaaacaaacctcaccacctytttatgtacattttacttttgtcaggatcctttgycaagaattgcattttgatttaaaagcatttaaaatcttcacgtgtgctgtctgacttttccaaaagagaacaactgagaaagctgaatgcttttctactaacagcgctgcaaaatatatttgaaaacagacatctactttttcacagcatcaaataaaggaggccaaaatcttcacagatttgtttgttgtcccttctgagaaagataatatttacatacgcacacatacatatcatgtctctgatttaagggaaacgagcgtt

SEQ ID NO: 49731 - DNA, 599 bp, Chicken  19866894295939_2
  misc_feature (1)..(1): n is any nucleotide
nacgttaattataacatgttgtaataaagatacccccaagatcagccctatcttttctgctatagtgcagtccctaggcatacggctaagtattccttgatcattatcctagctaaaaccgaagctactgaagtttaggggagttgtatctaacggaatttctttcatctctaataattgctaaactagcataattgctcatacttgaggtgaaatagaacccaagttgtctaaaagttaaaacaaaaacaaacctcaccacctytttatgtacattttacttttgtcaggatcctttgycaagaattgcattttgatttaaaagcatttaaaatcttcacgtgtgctgtctgacttttccaaaagagaacaactgagaaagctgaatgcttttctactaacagcgctgcaaaatatatttgaaaacagacatctactttttcacagcatcaaataaaggaggccaaaatcttcacagatttgtttgttgtcccttctgagaaagataatatttacatacgcacacatacatatcatgtctctgatttaagggaaacgagcgttttccctactaggactgattttgacctcaagtagct

SEQ ID NO: 49732 - DNA, 600 bp, Chicken  19866894295940_1
actcctattacagattgcatttaagggacattttgccatttaaagttcgtaggaagtaaaagtgcactttcttccaattatgaaaatcctgctcaaagggactggagctattctctctactaagagatggtatttttgatagataccaaagcattttcacatgtccgtgtgaaaattaaataataaatctttatttgagaaaggattacgtgaaatgtagacagtggataagaccttatagcgaacccaatcacaagtgcttcatcttccccatccccggaggcattcaaggccaggctrgrtrtggctctgggcagtctggtctggtggytggcgaccctgcacatagcaggggggttgaaacctctatgatcactgtggtcctttkcaacccaggccattctgtgattctatgctctttaagcacaacacacacgatactgaaccacrgacacgctcacgctctgcaagaaagatactgaaaaggaaggagagttcagttttccttctcttctttagagcaaagttgaccacacactgcacggcagctgtcagagcagctcttctacagcggactgtgacagcacagctatgctccca

SEQ ID NO: 49733 - DNA, 600 bp, Chicken  19866894295940_2
tcctattacagattgcatttaagggacattttgccatttaaagttcgtaggaagtaaaagtgcactttcttccaattatgaaaatcctgctcaaagggactggagctattctctctactaagagatggtatttttgatagataccaaagcattttcacatgtccgtgtgaaaattaaataataaatctttatttgagaaaggattacgtgaaatgtagacagtggataagaccttatagcgaacccaatcacaagtgcttcatcttccccatccccggaggcattcaaggccaggctrgrtrtggctctgggcagtctggtctggtggytggcgaccctgcacatagcaggggggttgaaacctctatgatcactgtggtcctttkcaacccaggccattctgtgattctatgctctttaagcacaacacacacgatactgaaccacrgacacgctcacgctctgcaagaaagatactgaaaaggaaggagagttcagttttccttctcttctttagagcaaagttgaccacacactgcacggcagctgtcagagcagctcttctacagcggactgtgacagcacagctatgctcccatc

SEQ ID NO: 49734 - DNA, 600 bp, Chicken  19866894295940_3
ctattacagattgcatttaagggacattttgccatttaaagttcgtaggaagtaaaagtgcactttcttccaattatgaaaatcctgctcaaagggactggagctattctctctactaagagatggtatttttgatagataccaaagcattttcacatgtccgtgtgaaaattaaataataaatctttatttgagaaaggattacgtgaaatgtagacagtggataagaccttatagcgaacccaatcacaagtgcttcatcttccccatccccggaggcattcaaggccaggctrgrtrtggctctgggcagtctggtctggtggytggcgaccctgcacatagcaggggggttgaaacctctatgatcactgtggtcctttkcaacccaggccattctgtgattctatgctctttaagcacaacacacacgatactgaaccacrgacacgctcacgctctgcaagaaagatactgaaaaggaaggagagttcagttttccttctcttctttagagcaaagttgaccacacactgcacggcagctgtcagagcagctcttctacagcggactgtgacagcacagctatgctcccatctg

SEQ ID NO: 49735 - DNA, 600 bp, Chicken  19866894295940_4
tttgccatttaaagttcgtaggaagtaaaagtgcactttcttccaattatgaaaatcctgctcaaagggactggagctattctctctactaagagatggtatttttgatagataccaaagcattttcacatgtccgtgtgaaaattaaataataaatctttatttgagaaaggattacgtgaaatgtagacagtggataagaccttatagcgaacccaatcacaagtgcttcatcttccccatccccggaggcattcaaggccaggctrgrtrtggctctgggcagtctggtctggtggytggcgaccctgcacatagcaggggggttgaaacctctatgatcactgtggtcctttkcaacccaggccattctgtgattctatgctctttaagcacaacacacacgatactgaaccacrgacacgctcacgctctgcaagaaagatactgaaaaggaaggagagttcagttttccttctcttctttagagcaaagttgaccacacactgcacggcagctgtcagagcagctcttctacagcggactgtgacagcacagctatgctcccatctgctcggcaacaaagagcgcacgaatgaa

SEQ ID NO: 49736 - DNA, 600 bp, Chicken  19866894295940_5
ctgctcaaagggactggagctattctctctactaagagatggtatttttgatagataccaaagcattttcacatgtccgtgtgaaaattaaataataaatctttatttgagaaaggattacgtgaaatgtagacagtggataagaccttatagcgaacccaatcacaagtgcttcatcttccccatccccggaggcattcaaggccaggctrgrtrtggctctgggcagtctggtctggtggytggcgaccctgcacatagcaggggggttgaaacctctatgatcactgtggtcctttkcaacccaggccattctgtgattctatgctctttaagcacaacacacacgatactgaaccacrgacacgctcacgctctgcaagaaagatactgaaaaggaaggagagttcagttttccttctcttctttagagcaaagttgaccacacactgcacggcagctgtcagagcagctcttctacagcggactgtgacagcacagctatgctcccatctgctcggcaacaaagagcgcacgaatgaagtctgatgcccaacatsacaactttaagacacaggcaactggctcttattttcactg

SEQ ID NO: 49737 - DNA, 600 bp, Chicken  19866894295940_6
gcattttcacatgtccgtgtgaaaattaaataataaatctttatttgagaaaggattacgtgaaatgtagacagtggataagaccttatagcgaacccaatcacaagtgcttcatcttccccatccccggaggcattcaaggccaggctrgrtrtggctctgggcagtctggtctggtggytggcgaccctgcacatagcaggggggttgaaacctctatgatcactgtggtcctttkcaacccaggccattctgtgattctatgctctttaagcacaacacacacgatactgaaccacrgacacgctcacgctctgcaagaaagatactgaaaaggaaggagagttcagttttccttctcttctttagagcaaagttgaccacacactgcacggcagctgtcagagcagctcttctacagcggactgtgacagcacagctatgctcccatctgctcggcaacaaagagcgcacgaatgaagtctgatgcccaacatsacaactttaagacacaggcaactggctcttattttcactgccagaactaaactttatttccatgtgtattacatactggtatttgatgccaagtacattaga

SEQ ID NO: 49738 - DNA, 600 bp, Chicken  19866894295940_7
gcaggggggttgaaacctctatgatcactgtggtcctttkcaacccaggccattctgtgattctatgctctttaagcacaacacacacgatactgaaccacrgacacgctcacgctctgcaagaaagatactgaaaaggaaggagagttcagttttccttctcttctttagagcaaagttgaccacacactgcacggcagctgtcagagcagctcttctacagcggactgtgacagcacagctatgctcccatctgctcggcaacaaagagcgcacgaatgaagtctgatgcccaacatsacaactttaagacacaggcaactggctcttattttcactgccagaactaaactttatttccatgtgtattacatactggtatttgatgccaagtacattagaattactttaacagaggatttaagtgaggaatatttattctcactaaacaggttaagaaggaatgtaaaaacctacaggaaaaaaaaaatgtttcaacttagttttgattttggcaatccaaacagtgaagtactcttctattctctcctcccatctttcaaagtaggaaaaaagaaaaacatcttttcataatcatgc

SEQ ID NO: 49739 - DNA, 600 bp, Chicken  19866894295956_1
aatacctattttcatccttggagaagttttctttgccacttttggcagatgtaggtctacctgctacaccttaatgagatctagattcacagcctactcccttctgtgtgttaagtttggcttcttcagatgtttcttaatcagaatattggattaaaatgtcctttagaaagttgtacaatttctatcaagaaacaaaaaacaaccaaagaaatctattacacaaaagaggtaatctgctttctccagtccaaactgctgaacttcaaataaaggaacagcagggaagcaatagaaatygcatttaaagttaataagtatttttaaaacacaacttctgcctcatgagccttaagatttgatttgcacctgcagacaaatcccaaggattatactcttcaccattctctgcttttaaacaaattttgctttaaaaagcctgttttctgatcttaactggataatatctttttaagtgaatttgggactctgtaataaaattccaattgcttaaatggctatgaattgaaaacaaaaggctagtgtagcttatttcattgaacaagccccatgtgacactttttagtttgtctaaataag

SEQ ID NO: 49740 - DNA, 599 bp, Chicken  19866894295961_1
  misc_feature (1)..(19): n is any nucleotide
nnnnnnnnnnnnnnnnnnnttgttccttggacaggagatgctccaggcccagagctacctgtctttcttgaactggggagcccggaactccagaattcccacagtgctccaggtgtgacctcaccagagcagaggatcacctccctctacctgctgaccatgctctttttaatgcacccaagaataccattggccttcctggccacaaggacacactgctggctcatggtctacctgctggccttcaggatccccaggtccttctctgcagagctcattttcatcaggtcagcccctaayatgtactgatgcatgcaaagaggttgtattactcctcagcagattgagaaagatgaggccctgaacagtttgcagcataccatacagaagcctttgttagagtagaagttagaagtcagaaatcctgacatttttttcccaggctggcatttgttacaaccaaagcccagttttaacctcttctgtgatttaggttccttactgaatgcaatgaaagtaatgaaagtgtcctctgatttattttgtcacaattacaaagacattccaaaaggggggagggtatgtaggaaaggttaggt

SEQ ID NO: 49741 - DNA, 600 bp, Chicken  19866894295962_1
ttcctccgatatctaatctaaatctcccctcttttggtttaaaactgttccccactgtgtgatcaatatcagactgtgtagaaacttggtgtccctcctgtttataattccatttcaggtacaggaaggcctcaatgaggtctccctggatctttctcttctccaagctaaagaagtgcagctctctcagcctcttttcataggagaggtgctccagccctcttgtcatcttcatggccctcctctggacttgcttcaacagttttacatctgttttgtactggaggccccagacctggrtgcagtactagagatggggcctcagaggagcagagtagaggakgcaccctgctggccacctgttttttggtgcagtccaggttatagctggccttccaggctgcaagtttgtgctgctggctcgtgtcatgatctatgtcagcagaaacccccaagtctttctctacaaggctgctttcagtgagtttgtctcccagtctgtacgcatgtctgggattgtcctgacccaattccagcatcttaacacttggcattgttgaacctcattaagttctcataggcccacttttcaagcctgcc

SEQ ID NO: 49742 - DNA, 600 bp, Chicken  19866894295962_2
actgttccccactgtgtgatcaatatcagactgtgtagaaacttggtgtccctcctgtttataattccatttcaggtacaggaaggcctcaatgaggtctccctggatctttctcttctccaagctaaagaagtgcagctctctcagcctcttttcataggagaggtgctccagccctcttgtcatcttcatggccctcctctggacttgcttcaacagttttacatctgttttgtactggaggccccagacctggrtgcagtactagagatggggcctcagaggagcagagtagaggakgcaccctgctggccacctgttttttggtgcagtccaggttatagctggccttccaggctgcaagtttgtgctgctggctcgtgtcatgatctatgtcagcagaaacccccaagtctttctctacaaggctgctttcagtgagtttgtctcccagtctgtacgcatgtctgggattgtcctgacccaattccagcatcttaacacttggcattgttgaacctcattaagttctcataggcccacttttcaagcctgcccaggtccctttggatgacatccctagcacactggttctctctt

SEQ ID NO: 49743 - DNA, 600 bp, Chicken  19866894295967_1
taagcaaattaacgggagcatatgaaatgttacgttcttttggctccagtgcctcttcctcttatcaaatgatagccaccattagaaacctttctttcttcttccactcctcctcagagagaaagctaattattatctttgtatatccgtgcagctggagaacttctcaagcacttgcttcaataaagtgtaaacttctgtccctggggtccctacatgccataattcagtgaggaatgtgtctttcataggagcttacattttgtattggtctgtacttcaaaaatatatgtgatacamatatttaaatagtttcagtgtatgcagtagtttcagtgtatgtagtttttagtttctttttatgaaaacaagacattacactgatcaatgcctgtgtgataataagagctttgatgtgactgatctcagaccgtcttttaagcataccctaagggggaaccagagggtgtgcatgcaagctttcagccacattaaaaatccaacatgtgctaaagttaaaatcagaacccagtgctttgccttcagtgctctggaggatgaaggtcacagagcctcacccattttggtatcccctataat

SEQ ID NO: 49744 - DNA, 600 bp, Chicken  19866894295971_1
atcctttatggctccaaaaaatatgtttgattcttgttctaagaaatggtgtggttcaagcaggcattcataaactctgtcccactgcctcctgttaggcagtagtctgtcctgtcccctgtcccttgtctctagcccaacaccaaagcctgtctcagtcagttactgtctgagttgaaggtgtcactcaagtgatgacagacctttcatcaagcttcttccctgctgttgaagcctctctgatcatgagaaatcttgactgtcagggttcaaagactttgtaaactgctggtccctttrggaaatcccttctacagcaatttcagacacatttaatgacacctgtagacccatctaagtggaagtctgttttttctctccaacccaatgttttatccagtggaggagctgtatggtctctaagtctcatgtgccctggagccaaaggaatggaattgtcgacatttgcaatttcttttttggatccgttttttatttcaagcagtgctgagggggataactgccctgtagcaggagcaggcttacagggagagtagctacacaaaacttcttgctgtctctattcttactgctgtcact

SEQ ID NO: 49745 - DNA, 600 bp, Chicken  19866894295973_1
aaagagcaactgtgacggagcagggatgaacagcatgataccagggggattaatcacagatgggggcagggggggtcagttagcactgctcttcgttcagaaatagcccaggttgctgctgctggccccatgacttatcatcagttaccggagcgtgatatttatgggaaaaggtcattcagacaatactgggctgaactgttttctctctctgtatcttccttgttacaattaagagagcaaaaagaatacctcccattaattaaaatgccacggaggtcagggatccgattgcttcakaaatgagtggtgtggcatgaccttacaaaacagtgtgaccagggttgttcggtgctttaggagaaacctcctggcccggggtggttggtgtgagccatcaggtgacagctcccatcctttgggtcagcacagagctccagcctgcaagcgcacggtgtggcttgttggaaacagcacgcctgcgttgcgttactccgagttgtgttcctttgcacgtcggtcaaaatcaacatgactgtgatggcacaggactgcagtgtgagtctgtaatccaaagctacgactgcaggtcactgtgtt

SEQ ID NO: 49746 - DNA, 600 bp, Chicken  19866894295973_2
taattagaacataaccaaacacaggcttggagctcattggcgttgcctgagaaagtgggtgtaatgaaaaccagaaacttacgaaacttcagggctgagaactccttcagagcaaggagaaaggatggggaggacgcgggctgaggaggttcaggtctgatgcgtctcccccaggttatcttaggaaagtcacttaattgtttgctctggaaaggaggacgtaaatacatctctttgggctgtccctatgcagaagacaaaccccagccgagggctgaaggttgcagtggtgataacagmtctgtgtcccttaggctgttcttcgttggatcccgagaaggacacctaccttcaattctctccatgattcacccgaggcttctcactcctgtaccatccctygtctttacggtaagccctggggtgtgtgatggggagtgtcagcctggtattgagaaaagggttggggatgggatcccaatggagcagttggggatggggtcccagtggatcgattggagaaggtctccaagtgcagccatttctgcttgctgctctgagagggtccttcttttcatcatatcttatatcccactyctg

SEQ ID NO: 49747 - DNA, 600 bp, Chicken  19866894295973_3
tccttcagagcaaggagaaaggatggggaggacgcgggctgaggaggttcaggtctgatgcgtctcccccaggttatcttaggaaagtcacttaattgtttgctctggaaaggaggacgtaaatacatctctttgggctgtccctatgcagaagacaaaccccagccgagggctgaaggttgcagtggtgataacagmtctgtgtcccttaggctgttcttcgttggatcccgagaaggacacctaccttcaattctctccatgattcacccgaggcttctcactcctgtaccatccctygtctttacggtaagccctggggtgtgtgatggggagtgtcagcctggtattgagaaaagggttggggatgggatcccaatggagcagttggggatggggtcccagtggatcgattggagaaggtctccaagtgcagccatttctgcttgctgctctgagagggtccttcttttcatcatatcttatatcccactyctgtttagtaatcattccaagcaccgtttgaaaatatcttcaataagtgaaaaaataattgatctgattctcttcttggcgcacaactcccacgctcattgcttt

SEQ ID NO: 49748 - DNA, 530 bp, Chicken  19866894295973_4
agmtctgtgtcccttaggctgttcttcgttggatcccgagaaggacacctaccttcaattctctccatgattcacccgaggcttctcactcctgtaccatccctygtctttacggtaagccctggggtgtgtgatggggagtgtcagcctggtattgagaaaagggttggggatgggatcccaatggagcagttggggatggggtcccagtggatcgattggagaaggtctccaagtgcagccatttctgcttgctgctctgagagggtccttcttttcatcatatcttatatcccactyctgtttagtaatcattccaagcaccgtttgaaaatatcttcaataagtgaaaaaataattgatctgattctcttcttggcgcacaactcccacgctcattgctttaatacatgcagttttgcctacctttccctttgctaatggctttatttcttctgggtgcagtgtgtcatgaccctgctctacgccttctccaatgacatcttctcagtcatcaacttcttcagctt

SEQ ID NO: 49749 - DNA, 599 bp, Chicken  19866894295979_1
  misc_feature (1)..(70): n is any nucleotide
nnnnnnnnnnnnnnnnnnnnnnnnnnnnnnnnnnnnnnnnnnnnnnnnnnnnnnnnnnnnnnnnnnnnnnatgccgaaggacaaggagcccatgaagtcgttcctgctggtcaggtcccaatcccagatttccactgacaaccgccctgtccttgtctgcctccttcagctggctgcagcagagtggagagaagggatgtgtcattggggacagcacggctggcacccctcccacctctgggaagcgtatgggaacagcacagagagcctcccagccaggggtatggggtgaaaggaatmatttctcagccaaatcagcttaatatctccaaatgattaaaccagagcaaacaccatcacgttaattcttagggaacaagaaaaattagtttacaggttcaagcatattgtactcacaatctgaatgtctcgttccactcaggattcagggagcactttatggttttggtcttctgtttgctttcatttttggggtcrgggattagtttaagcttcacgtagggatctgacaagccattgggatccatgggaactaggtttttagcatctcttactggggaggaaaaaaaggattattt

SEQ ID NO: 49750 - DNA, 600 bp, Chicken  19866894295979_2
gtgtcattggggacagcacggctggcacccctcccacctctgggaagcgtatgggaacagcacagagagcctcccagccaggggtatggggtgaaaggaatmatttctcagccaaatcagcttaatatctccaaatgattaaaccagagcaaacaccatcacgttaattcttagggaacaagaaaaattagtttacaggttcaagcatattgtactcacaatctgaatgtctcgttccactcaggattcagggagcactttatggttttggtcttctgtttgctttcatttttggggtcrgggattagtttaagcttcacgtagggatctgacaagccattgggatccatgggaactaggtttttagcatctcttactggggaggaaaaaaaggattatttgcaatattcaaatggtaaaaacacccaaaagcaaagagagcgtcgctgtcccacatgggatcctgctaagccactgcatggtgagcccatcgcctcccgggtctgggcaccagcagcaygagcaggaccagttcatggccacacatcccagcatggggacatggccctgtgccacaccaaggctctgggctcagcccac

SEQ ID NO: 49751 - DNA, 600 bp, Chicken  19866894295979_3
atctgaatgtctcgttccactcaggattcagggagcactttatggttttggtcttctgtttgctttcatttttggggtcrgggattagtttaagcttcacgtagggatctgacaagccattgggatccatgggaactaggtttttagcatctcttactggggaggaaaaaaaggattatttgcaatattcaaatggtaaaaacacccaaaagcaaagagagcgtcgctgtcccacatgggatcctgctaagccactgcatggtgagcccatcgcctcccgggtctgggcaccagcagcaygagcaggaccagttcatggccacacatcccagcatggggacatggccctgtgccacaccaaggctctgggctcagcccacctcctgctgtccgggtggccgtggcascagggcactcctgaggaatgcatcagatcattgctcagatcttcacagcacagaaaaatacctcctgaccctcagagtcaatcagttgatgccctgaagcatgagatttgattaccccacgatattatctcagcatgcagacctagacattccgctaatgggaataataatatctttccattaaagaaaatca

SEQ ID NO: 49752 - DNA, 600 bp, Chicken  19866894295979_4
tctgacaagccattgggatccatgggaactaggtttttagcatctcttactggggaggaaaaaaaggattatttgcaatattcaaatggtaaaaacacccaaaagcaaagagagcgtcgctgtcccacatgggatcctgctaagccactgcatggtgagcccatcgcctcccgggtctgggcaccagcagcaygagcaggaccagttcatggccacacatcccagcatggggacatggccctgtgccacaccaaggctctgggctcagcccacctcctgctgtccgggtggccgtggcascagggcactcctgaggaatgcatcagatcattgctcagatcttcacagcacagaaaaatacctcctgaccctcagagtcaatcagttgatgccctgaagcatgagatttgattaccccacgatattatctcagcatgcagacctagacattccgctaatgggaataataatatctttccattaaagaaaatcaaaaggcttctgcttgaccttgggtcactttctgatttttcaagcagaaatcaacaattcagtgaaagaaaactacacagtttcagaagcccgagttgggttcccagg

SEQ ID NO: 49753 - DNA, 600 bp, Chicken  19866894295988_1
tctcacagcatacttctggacaaactgtccagttgtgagatgaacaggtatatgttatgctgtatgaggaattgtctaaacagaagaactcaaaggctcacagtgaatggagctaaatttggctggcaggctttcactagtgtcacaattgtcacttgaaaaaatcctgtcacctgcttgtaaacctccttgctgtttggcctaagacgaatacttataaaatgtctttcacgcttttgtgactccattcaaacattttgattattttatttccagaggctgtgttcaatgataataaartagctcaaatgtagcttataataatatttttttattataactaaacatcaagataataaattttacatgtggtacaatctcaaaaacatcagctagtaagtgtggaatacatagtgggcatctgaaacgtgtctcagatctgattctttttgtgaggtaagaaaaagctagttggagtgtcattgccatttacaaaagaatgtaacctgtgtgtgacactgcagacctctgctaccsgatctggagtagcagggtccttgtgtgaaatcattccatgtgctgaagaaattacttctgctt

SEQ ID NO: 49754 - DNA, 567 bp, Chicken  19866894295988_2
tgtgactccattcaaacattttgattattttatttccagaggctgtgttcaatgataataaartagctcaaatgtagcttataataatatttttttattataactaaacatcaagataataaattttacatgtggtacaatctcaaaaacatcagctagtaagtgtggaatacatagtgggcatctgaaacgtgtctcagatctgattctttttgtgaggtaagaaaaagctagttggagtgtcattgccatttacaaaagaatgtaacctgtgtgtgacactgcagacctctgctaccsgatctggagtagcagggtccttgtgtgaaatcattccatgtgctgaagaaattacttctgcttgcatattttttttttttcaaaattgcataaagtaaatctgtaaaaaagatatcctacttactcagggatttgaagaaatcacaaaactgatgattgttccactggaaatatcctgggatagataaatctatgctaagatattttcttggtgacaagaacttcatagagtaggttcattctctttgttttaccccagaattcatt

SEQ ID NO: 49755 - DNA, 560 bp, Chicken  19866894295992_1
aagcattctcagatatggtagtttactaaagaaagtgtacaagactgacagccaaagaaggaaagcatttatagacagcacacaattatgaaaacattggtacttttctttatgtttgtttgtgaatggaatcaaattatttgtatttttttcaatatcactaatttttcagtgaaaagatttttacttcattaattttcgttaatgtaaaaaaatagctttttaacatttcaacttgattacagaaaaatgatgagatattgcatgccatttagcaattgtgttgtttaggaaagggaraaaaaaaacaccaawgtaawatgcattgcttatttgatagtttcttactttttaagatttcaattccaacttaatagtaacatttacaaaaacataataattatgaatatccaaaacaatgctaagatcacggtatttggataaatgaatctaatcagattcacttattttctccttaataatccttatgcttctacctactttaagattctagttatcctacttatggatctactttaacaaaactagcacatacatca

SEQ ID NO: 49756 - DNA, 545 bp, Chicken  19866894295992_2
tggtagtttactaaagaaagtgtacaagactgacagccaaagaaggaaagcatttatagacagcacacaattatgaaaacattggtacttttctttatgtttgtttgtgaatggaatcaaattatttgtatttttttcaatatcactaatttttcagtgaaaagatttttacttcattaattttcgttaatgtaaaaaaatagctttttaacatttcaacttgattacagaaaaatgatgagatattgcatgccatttagcaattgtgttgtttaggaaagggaraaaaaaaacaccaawgtaawatgcattgcttatttgatagtttcttactttttaagatttcaattccaacttaatagtaacatttacaaaaacataataattatgaatatccaaaacaatgctaagatcacggtatttggataaatgaatctaatcagattcacttattttctccttaataatccttatgcttctacctactttaagattctagttatcctacttatggatctactttaacaaaactagcacatacatca

SEQ ID NO: 49757 - DNA, 540 bp, Chicken  19866894295992_3
gtttactaaagaaagtgtacaagactgacagccaaagaaggaaagcatttatagacagcacacaattatgaaaacattggtacttttctttatgtttgtttgtgaatggaatcaaattatttgtatttttttcaatatcactaatttttcagtgaaaagatttttacttcattaattttcgttaatgtaaaaaaatagctttttaacatttcaacttgattacagaaaaatgatgagatattgcatgccatttagcaattgtgttgtttaggaaagggaraaaaaaaacaccaawgtaawatgcattgcttatttgatagtttcttactttttaagatttcaattccaacttaatagtaacatttacaaaaacataataattatgaatatccaaaacaatgctaagatcacggtatttggataaatgaatctaatcagattcacttattttctccttaataatccttatgcttctacctactttaagattctagttatcctacttatggatctactttaacaaaactagcacatacatca

SEQ ID NO: 49758 - DNA, 599 bp, Chicken  19866894295997_1
  misc_feature (1)..(11): n is any nucleotide
nnnnnnnnnnnagctgtcccttttttgctagcaggatggtgcaaaacaacaggaggtaggggctgtgttgtacagtactgagattaggcaggaacaggcacaggcatgaaccagggtctcacaaggcagagggatgttctccacctccagtatctctccatcatcttgagagccacatcccccattagcatttgctcccagtgcaaagcaagcgtgagccagcacacaacagctcagcttagtactggctgtcagagtgggcaagaaaagccatccacctgcagtgtgaacatccaccayccttccttgggcagcctataacatggctgaaccctcccaagccacaagcaacacacaatattgcgaacctaggtggaagattaccaggaaatgtgcacaggcaggagatcacagaaacacagaatggttgttgggttggaagggatctcgagtaacccccagtcccaacccctgctgtgggctggttttcccccaccagctcaggttgcccagggccccatccagcctggcctttgccttcagggatggggtgcctacagcttcttcagagccccctgttcctgtgagcacggctgctg

SEQ ID NO: 49759 - DNA, 399 bp, Chicken  19866894295997_2
gcagcctataacatggctgaaccctcccaagccacaagcaacacacaatattgcgaacctaggtggaagattaccaggaaatgtgcacaggcaggagatcacagaaacacagaatggttgttgggttggaagggatctcgagtaacccccagtcccaacccctgctgtgggctggttttcccccaccagctcaggttgcccagggccccatccagcctggcctttgccttcagggatggggtgcctacagcttcttcagagccccctgttcctgtgagcacggctgctgcaatctgcaawtccmatcttgcagarcaggatggagcagccaaatgtgcaattagggtcccgagtacccagcaatgctggcttgaagcagtctctgctggcttacctttt

SEQ ID NO: 49760 - DNA, 395 bp, Chicken  19866894295997_3
cctataacatggctgaaccctcccaagccacaagcaacacacaatattgcgaacctaggtggaagattaccaggaaatgtgcacaggcaggagatcacagaaacacagaatggttgttgggttggaagggatctcgagtaacccccagtcccaacccctgctgtgggctggttttcccccaccagctcaggttgcccagggccccatccagcctggcctttgccttcagggatggggtgcctacagcttcttcagagccccctgttcctgtgagcacggctgctgcaatctgcaawtccmatcttgcagarcaggatggagcagccaaatgtgcaattagggtcccgagtacccagcaatgctggcttgaagcagtctctgctggcttacctttt

SEQ ID NO: 49761 - DNA, 384 bp, Chicken  19866894295997_4
gctgaaccctcccaagccacaagcaacacacaatattgcgaacctaggtggaagattaccaggaaatgtgcacaggcaggagatcacagaaacacagaatggttgttgggttggaagggatctcgagtaacccccagtcccaacccctgctgtgggctggttttcccccaccagctcaggttgcccagggccccatccagcctggcctttgccttcagggatggggtgcctacagcttcttcagagccccctgttcctgtgagcacggctgctgcaatctgcaawtccmatcttgcagarcaggatggagcagccaaatgtgcaattagggtcccgagtacccagcaatgctggcttgaagcagtctctgctggcttacctttt

SEQ ID NO: 49762 - DNA, 600 bp, Chicken  19866894296002_1
caaaagtcgaaactcagtatagttctaagcagggtaattttcttagcatagcaaattataaacatattggctgaaaaagacagtgacattttagctggtggtggcacttcccaagccaggaaaatttttctcatctctcacagggtaccaacacatactaattagactcctaatgtttcttatgtaaatttacacataaaggacataattccaacaaacttcttgaagcttattattaaaatcatccagcagtggattatccaaatgaaacaattttacacgtttgtctccatgctattktgtgttcaaagaatatcaaaatcttcctgataaacaaggctaagatatctaagtatattcaactttattctgaagtatttgtgttcccttctgttgacaacatcgtgagaaatattaacgaagaaataagtaaaccaggtagaaatgcaaagtagtgctacaatgtgttgatttaccatagttttaggattatgctatgcagcatatcagtagtattttccactagcttaaacatagtaattttcatacaaagcatggaatatttggaagtaggcaagtgttctgggaacatacatttcc

SEQ ID NO: 49763 - DNA, 600 bp, Chicken  19866894296003_1
aatccagactcagtaagagattcagacactgacaaaccattagatgctttggatgatgaactctagcaattgtttagtgcaaatgtgtaaaccacaatatctccaaagtttatattctggatagcttaatgtgagctttcaaagggtcctcactacaaactatagattgcttcaaaataaaccttgccagaattcttagcatacaatcatattatgactaatatggctatctttaataattggttgcaataccaactctgcctatggtgcaagcctttcaatccatcgactatatgtcayattcccagaagcaatctgcagcttttatctacatctgtgactgccacatgtgtacatctaaagacaatgttttttgtttttttcaaatagaagtcaagattccagtttgctttcacttaaccttgtaatttgtttctaacatccccatatttcctcacattatcagtgaggtctgatcagctaatggcagctgcaaaataactgtggcagagaaagtctttgtcttttgaagtgtctgtcctttctgctttgcttattttccgcttgctgtaatttcctccaccattcaagcaccacgga

SEQ ID NO: 49764 - DNA, 599 bp, Chicken  19866894296006_1
  misc_feature (1)..(10): n is any nucleotide
nnnnnnnnnntgcaggaggactgagacagaaaaaactgttttctcgctttaaaagctattcataaacctctggttttatgacatccatgagttagatgtgcattttttccataacccacgggtaaaaattgatccgttgaactgcagcagcggatgacaactggtttgtttgcaattatgattgagttatttaaaaagaagaaggtattcctggaggtaacgtggagaggaggggggagagagcagtgatttgcactgatttgtggtgtgcactgataagttggtgattttggggcagcrgtgaggtgcaggacttgaggtctcctgcgtgcagctggggagcaattaggatgatttactctgaatcgtctcaggygtttcccctttgctmcgtagctaattcttctttacattttaggatgtcatcggtcaagttctgccagatgcaacgacaacagcgtttgagtgtaagtatgacttgtataaacgggcttcttggtcgctttatagggytgtcattttttaaataaataatgtttatgttcattatatgttacagttaaatatttatgcagtaatgcaagtttaatgatgatact

SEQ ID NO: 49765 - DNA, 600 bp, Chicken  19866894296006_2
tatgacatccatgagttagatgtgcattttttccataacccacgggtaaaaattgatccgttgaactgcagcagcggatgacaactggtttgtttgcaattatgattgagttatttaaaaagaagaaggtattcctggaggtaacgtggagaggaggggggagagagcagtgatttgcactgatttgtggtgtgcactgataagttggtgattttggggcagcrgtgaggtgcaggacttgaggtctcctgcgtgcagctggggagcaattaggatgatttactctgaatcgtctcaggygtttcccctttgctmcgtagctaattcttctttacattttaggatgtcatcggtcaagttctgccagatgcaacgacaacagcgtttgagtgtaagtatgacttgtataaacgggcttcttggtcgctttatagggytgtcattttttaaataaataatgtttatgttcattatatgttacagttaaatatttatgcagtaatgcaagtttaatgatgatacttgactaagtaatattttattatttaatcacaacttgagtgagcatatttccacaatacagctttaattaccagcgtg

SEQ ID NO: 49766 - DNA, 600 bp, Chicken  19866894296006_3
ttagatgtgcattttttccataacccacgggtaaaaattgatccgttgaactgcagcagcggatgacaactggtttgtttgcaattatgattgagttatttaaaaagaagaaggtattcctggaggtaacgtggagaggaggggggagagagcagtgatttgcactgatttgtggtgtgcactgataagttggtgattttggggcagcrgtgaggtgcaggacttgaggtctcctgcgtgcagctggggagcaattaggatgatttactctgaatcgtctcaggygtttcccctttgctmcgtagctaattcttctttacattttaggatgtcatcggtcaagttctgccagatgcaacgacaacagcgtttgagtgtaagtatgacttgtataaacgggcttcttggtcgctttatagggytgtcattttttaaataaataatgtttatgttcattatatgttacagttaaatatttatgcagtaatgcaagtttaatgatgatacttgactaagtaatattttattatttaatcacaacttgagtgagcatatttccacaatacagctttaattaccagcgtgaccttcccatgctct

SEQ ID NO: 49767 - DNA, 600 bp, Chicken  19866894296006_4
gaggtaacgtggagaggaggggggagagagcagtgatttgcactgatttgtggtgtgcactgataagttggtgattttggggcagcrgtgaggtgcaggacttgaggtctcctgcgtgcagctggggagcaattaggatgatttactctgaatcgtctcaggygtttcccctttgctmcgtagctaattcttctttacattttaggatgtcatcggtcaagttctgccagatgcaacgacaacagcgtttgagtgtaagtatgacttgtataaacgggcttcttggtcgctttatagggytgtcattttttaaataaataatgtttatgttcattatatgttacagttaaatatttatgcagtaatgcaagtttaatgatgatacttgactaagtaatattttattatttaatcacaacttgagtgagcatatttccacaatacagctttaattaccagcgtgaccttcccatgctcttattcctcactgcaattatattgcttgaattaaatgaaaagtataaagtacctgtagrtctgagttgcagattttatcctcttgtgggagaaatcaaaggagtggtagtttttacagaaata

SEQ ID NO: 49768 - DNA, 600 bp, Chicken  19866894296006_5
cgacaacagcgtttgagtgtaagtatgacttgtataaacgggcttcttggtcgctttatagggytgtcattttttaaataaataatgtttatgttcattatatgttacagttaaatatttatgcagtaatgcaagtttaatgatgatacttgactaagtaatattttattatttaatcacaacttgagtgagcatatttccacaatacagctttaattaccagcgtgaccttcccatgctcttattcctcactgcaattatattgcttgaattaaatgaaaagtataaagtacctgtagrtctgagttgcagattttatcctcttgtgggagaaatcaaaggagtggtagtttttacagaaatatggcacaacatagagttttattacccagtatggcagcatggctgtatttgtacctccggtttctgctagtagtggggaattgcttcatttttttccttctgctgggcacaggctctatatgccatctccctgttacctcccttgtgtgcaagaggaggaggtatggatggatagaatggaatcagtaaggttggagaagacctgtaagatcatcaggtccgaccatcatctcattg

SEQ ID NO: 49769 - DNA, 600 bp, Chicken  19866894296008_1
agcacaaatgcatgaagcttcagcgcagagtgtcagatataaacctgtgttatcagccacccctcccggtctaattctggtgctgggatgcatgctgacaaatcatgtcccacccacagacacgtggcaacatcccacatatgtaggttagttttctccttataataaacaggagaacagcatccagtgactagctttactatcagcataacatgagaatccaaaaccacgtgtgccaaaaaaaggaacagaacaagctgaacaaacagcttatttaccttaaacagtacctcaaatacwgaagtagttcttcatttcttcttcacagactcctggcagctggaatcaccttcactatttcaacattgttttaatgggattactcttagaactctcacaaagccaggcaactactaaaactgcatcttcccctcaccttactctgtgtaaacatatcagggggagagatctctgctccagacttctgggtttagatctgctttgagttccatgcagcccaacaccgctaccaccttcactctcctgagcagagtcaaaattccacgtagacgaggaagtttaatatcctccagactgact

SEQ ID NO: 49770 - DNA, 600 bp, Chicken  19866894296009_1
tgccttcccttatgcaccgggtgaatcactcaatcatagaaggagatcaggttggtcaagaaagacttgcctttcatgaatccatgctggctaggtctcatcccctggttgtcccacgcagaacatgtgatctctctcaagatggtctgctccatagtcttacctggtactgaggtcaggctgacaggcctgtaattccccagattctccttacaacccttcttgtagatgggtgtcacgttggcaagccttcaatactctgggacctttctgcttgaccaggaatgctgatagatggtraaaagtggcttgataatcacctccaccagctgtctcaagcacccttgggtggattccatctggccccatggagttgtggcagtccaggtggaatagtaggtctctaactgtttccacctgaatcgtggaggatttattctgttccccatctgagatgaccaggtcagggggtagagcaccctgaggataactggtctgacttttaaagacagatgaaaagaaggcattgagaacctcagccttttccttatcctcagttgtcacattccctgctgcacccagtaaaagatggagattctc

SEQ ID NO: 49771 - DNA, 375 bp, Chicken  19866894296022_1
acgggacactggaagcacacatagggacggctatggggacacacatggggacacacagggggatgttggggacacacgtgggaacagatacagggatacggggacgcatatggggacacacagtgggacagaggtggggacactggggacagacggacacagggacagacggacggacggacagccggctcaccagtcgtgcctttgaccaccagcgtggtgacggtgggcttaacggccgagacggtgacgggcgtcaccaggcgcacccctcccatgggaaccgtgcgcaggatggtyggggcgcctttcagcaccacctgcggggacagcgccaccgggtgaggggagatgggggacgtggggggatggggg

SEQ ID NO: 49772 - DNA, 599 bp, Chicken  19866894296026_1
  misc_feature (1)..(214): n is any nucleotide
nnnnnnnnnnnnnnnnnnnnnnnnnnnnnnnnnnnnnnnnnnnnnnnnnnnnnnnnnnnnnnnnnnnnnnnnnnnnnnnnnnnnnnnnnnnnnnnnnnnnnnnnnnnnnnnnnnnnnnnnnnnnnnnnnnnnnnnnnnnnnnnnnnnnnnnnnnnnnnnnnnnnnnnnnnnnnnnnnnnnnnnnnnnnnnnnnnnnnnnnnnnnnnnnnnnnnntcctgcaagaacctctgatgacaaaaagcgttccacgaggaaacccccgaccacctttcctttgctgttgcagttgggaacagctrcaaccccgctgccttccttctcctcccctctctctgctctttatctcacaaagaaccacagctcagaggacacagacctgctcagcccacctccgcctgcactgtcaggtcccaccatgcacaccaagccaagaggatggggatggctcacgcagcacttcagcccctgcactaccttctccttcagractgtgtgcatcggtgacttaacaaatggcatccccaatgatgctttatttcctygctctgatcactcctgaggctgagaggaacgctggagcacagtgtcaccatggcac

SEQ ID NO: 49773 - DNA, 599 bp, Chicken  19866894296026_2
  misc_feature (1)..(26): n is any nucleotide
nnnnnnnnnnnnnnnnnnnnnnnnnntcctgcaagaacctctgatgacaaaaagcgttccacgaggaaacccccgaccacctttcctttgctgttgcagttgggaacagctrcaaccccgctgccttccttctcctcccctctctctgctctttatctcacaaagaaccacagctcagaggacacagacctgctcagcccacctccgcctgcactgtcaggtcccaccatgcacaccaagccaagaggatggggatggctcacgcagcacttcagcccctgcactaccttctccttcagractgtgtgcatcggtgacttaacaaatggcatccccaatgatgctttatttcctygctctgatcactcctgaggctgagaggaacgctggagcacagtgtcaccatggcactgctggcttgtagctgaaacgaggaagtgacagcagaggatgaggtttgtcagttaaaattattggctttaaactgcaacaccgctcgctgcttggtctgatcaggcccaaaataaactgcattacatcacccgcaggtcaggctgagctaataagggtgtctttctcatagtgagaaggaacatatt

SEQ ID NO: 49774 - DNA, 600 bp, Chicken  19866894296026_3
gttccacgaggaaacccccgaccacctttcctttgctgttgcagttgggaacagctrcaaccccgctgccttccttctcctcccctctctctgctctttatctcacaaagaaccacagctcagaggacacagacctgctcagcccacctccgcctgcactgtcaggtcccaccatgcacaccaagccaagaggatggggatggctcacgcagcacttcagcccctgcactaccttctccttcagractgtgtgcatcggtgacttaacaaatggcatccccaatgatgctttatttcctygctctgatcactcctgaggctgagaggaacgctggagcacagtgtcaccatggcactgctggcttgtagctgaaacgaggaagtgacagcagaggatgaggtttgtcagttaaaattattggctttaaactgcaacaccgctcgctgcttggtctgatcaggcccaaaataaactgcattacatcacccgcaggtcaggctgagctaataagggtgtctttctcatagtgagaaggaacatattcacgttttctctttgcagtcacagcaccttccaactgtgcaaatgctgggggaaaa

SEQ ID NO: 49775 - DNA, 600 bp, Chicken  19866894296027_1
gcacagcctgtaatgagatatcccatcaccttcctttcaatgacatagctagacaatgtaaaataaatactgctttatgctgcaatttttaataaaaatagcatattggcaatatattgatgtaatgatttaaatgacacagctgtggtcagggcaattgctacccaccgtgactctaacatagcacagatgtttgaatttttactaaatgaacaccatccctttcttcacccttcataattttgtatttgaaccatccagtctcactgtagcagactcagggtctgctcacacgacggycataaaagaccagtttttataaaacattcctgaatcacatctattgacatcagaaagactggcggagtggggctgacacaggacrgccactgtatttctacaacccaatttagtaaaktaagggaattaagagggaaaagattaagtttccattagaaagtaattaacttgtgcccagttttcttctagagccacaaatccagacttgtgagagtacttygaagcagacgaagccttattatattgcagcactgaaagactcaaggttggtcagctcagcagagcatcagctcaaaataa

SEQ ID NO: 49776 - DNA, 600 bp, Chicken  19866894296027_2
tttttaataaaaatagcatattggcaatatattgatgtaatgatttaaatgacacagctgtggtcagggcaattgctacccaccgtgactctaacatagcacagatgtttgaatttttactaaatgaacaccatccctttcttcacccttcataattttgtatttgaaccatccagtctcactgtagcagactcagggtctgctcacacgacggycataaaagaccagtttttataaaacattcctgaatcacatctattgacatcagaaagactggcggagtggggctgacacaggacrgccactgtatttctacaacccaatttagtaaaktaagggaattaagagggaaaagattaagtttccattagaaagtaattaacttgtgcccagttttcttctagagccacaaatccagacttgtgagagtacttygaagcagacgaagccttattatattgcagcactgaaagactcaaggttggtcagctcagcagagcatcagctcaaaataaacgagcggtttgttgaccttttccgtgattgagacaaaactgaaagccagaaatgccccaacagcggtcaggcacactggggagc

SEQ ID NO: 49777 - DNA, 600 bp, Chicken  19866894296027_3
gatgtaatgatttaaatgacacagctgtggtcagggcaattgctacccaccgtgactctaacatagcacagatgtttgaatttttactaaatgaacaccatccctttcttcacccttcataattttgtatttgaaccatccagtctcactgtagcagactcagggtctgctcacacgacggycataaaagaccagtttttataaaacattcctgaatcacatctattgacatcagaaagactggcggagtggggctgacacaggacrgccactgtatttctacaacccaatttagtaaaktaagggaattaagagggaaaagattaagtttccattagaaagtaattaacttgtgcccagttttcttctagagccacaaatccagacttgtgagagtacttygaagcagacgaagccttattatattgcagcactgaaagactcaaggttggtcagctcagcagagcatcagctcaaaataaacgagcggtttgttgaccttttccgtgattgagacaaaactgaaagccagaaatgccccaacagcggtcaggcacactggggagctcccagccctggaaggtcactgcagcccaaaga

SEQ ID NO: 49778 - DNA, 518 bp, Chicken  19866894296027_4
cctttcttcacccttcataattttgtatttgaaccatccagtctcactgtagcagactcagggtctgctcacacgacggycataaaagaccagtttttataaaacattcctgaatcacatctattgacatcagaaagactggcggagtggggctgacacaggacrgccactgtatttctacaacccaatttagtaaaktaagggaattaagagggaaaagattaagtttccattagaaagtaattaacttgtgcccagttttcttctagagccacaaatccagacttgtgagagtacttygaagcagacgaagccttattatattgcagcactgaaagactcaaggttggtcagctcagcagagcatcagctcaaaataaacgagcggtttgttgaccttttccgtgattgagacaaaactgaaagccagaaatgccccaacagcggtcaggcacactggggagctcccagccctggaaggtcactgcagcccaaagattccatcagcgcactgagaa

SEQ ID NO: 49779 - DNA, 600 bp, Chicken  19866894296028_1
gagtttttactggaaatcactgacaagctcctgtcacaagtatagattactcagtgttcaatggcagagtttggctgacacttttattatgctcctgagccaaacaatcgactacattttcggccagatgactctcctgttgtacatccatatatgccttacggtacagctgtaaacaatagtgaaagcctctacaggaaattagatttgcagatctctgcttttagaggttgggcaaattaatttgattattcagtgctgataggtcactgatatattttgcattatacattcccaggracygaaccaaagcgacacacaatgttaaattcaaagtcacgttgtcrccaaatcttaattttacttaatttggaacctactctagcaaccattcagttatggttttcatgagctgcaatgtcaagaaaatgcacttcttcactargccagtcatacaatgcaatgacagaaagagtaccaacaagaacaacatcagtttcttccaactaaaactatatgctgtgagtgtttttatcggcagtgctcacccaacagatgaagctgtctgcgttactcagtctaaataactactcttttctc

SEQ ID NO: 49780 - DNA, 600 bp, Chicken  19866894296028_2
tttttactggaaatcactgacaagctcctgtcacaagtatagattactcagtgttcaatggcagagtttggctgacacttttattatgctcctgagccaaacaatcgactacattttcggccagatgactctcctgttgtacatccatatatgccttacggtacagctgtaaacaatagtgaaagcctctacaggaaattagatttgcagatctctgcttttagaggttgggcaaattaatttgattattcagtgctgataggtcactgatatattttgcattatacattcccaggracygaaccaaagcgacacacaatgttaaattcaaagtcacgttgtcrccaaatcttaattttacttaatttggaacctactctagcaaccattcagttatggttttcatgagctgcaatgtcaagaaaatgcacttcttcactargccagtcatacaatgcaatgacagaaagagtaccaacaagaacaacatcagtttcttccaactaaaactatatgctgtgagtgtttttatcggcagtgctcacccaacagatgaagctgtctgcgttactcagtctaaataactactcttttctcatc

SEQ ID NO: 49781 - DNA, 600 bp, Chicken  19866894296028_3
tactcagtgttcaatggcagagtttggctgacacttttattatgctcctgagccaaacaatcgactacattttcggccagatgactctcctgttgtacatccatatatgccttacggtacagctgtaaacaatagtgaaagcctctacaggaaattagatttgcagatctctgcttttagaggttgggcaaattaatttgattattcagtgctgataggtcactgatatattttgcattatacattcccaggracygaaccaaagcgacacacaatgttaaattcaaagtcacgttgtcrccaaatcttaattttacttaatttggaacctactctagcaaccattcagttatggttttcatgagctgcaatgtcaagaaaatgcacttcttcactargccagtcatacaatgcaatgacagaaagagtaccaacaagaacaacatcagtttcttccaactaaaactatatgctgtgagtgtttttatcggcagtgctcacccaacagatgaagctgtctgcgttactcagtctaaataactactcttttctcatcattttggaacgtattttccatttcaattcatttcttcttatctg

SEQ ID NO: 49782 - DNA, 600 bp, Chicken  19866894296028_4
atccatatatgccttacggtacagctgtaaacaatagtgaaagcctctacaggaaattagatttgcagatctctgcttttagaggttgggcaaattaatttgattattcagtgctgataggtcactgatatattttgcattatacattcccaggracygaaccaaagcgacacacaatgttaaattcaaagtcacgttgtcrccaaatcttaattttacttaatttggaacctactctagcaaccattcagttatggttttcatgagctgcaatgtcaagaaaatgcacttcttcactargccagtcatacaatgcaatgacagaaagagtaccaacaagaacaacatcagtttcttccaactaaaactatatgctgtgagtgtttttatcggcagtgctcacccaacagatgaagctgtctgcgttactcagtctaaataactactcttttctcatcattttggaacgtattttccatttcaattcatttcttcttatctgaactctaatgagctattaaatgcagcccagtgtcttctccaaggcatgctggctgtccagttttgttacttcatgcaaaggcttttattttttcttgt

SEQ ID NO: 49783 - DNA, 599 bp, Chicken  19866894296035_1
  misc_feature (1)..(39): n is any nucleotide
nnnnnnnnnnnnnnnnnnnnnnnnnnnnnnnnnnnnnnnttgccccgcgggctgcaatagctgccttacaacatttacggagatgggctgagccaggcgtggctttgcctgggtgaagccctgttggcagggctttctggaattcccaaggaatggggtgcggctgagcattcaccaaggtagcttgggctctgcggtgtctcttcctgctgggaggtggcagagctcatcccaagcatcagggagtgacaaggacactggaagctaaggcagccagtgatggatggatgggtgggtggrtggatrgatggatggatggcatgacaggggtaagctggtggacrgagccaggaggcaagttgtatgcgtgctttgtgccatggcagcatcccatgtggaagtggctcttgcaaggtgggttgtcccctcctgccatgacccctggcatagtcagcatggagattctcagaaagttccctctgctgggcagaggagcagagagctgggtgctcccctacctgagaccagcacatgggtgtatagaaacagtgcccaaaaagagagcttgaatatgtcctcagcttctttcttcaggctcg

SEQ ID NO: 49784 - DNA, 599 bp, Chicken  19866894296035_2
  misc_feature (1)..(33): n is any nucleotide
nnnnnnnnnnnnnnnnnnnnnnnnnnnnnnnnnttgccccgcgggctgcaatagctgccttacaacatttacggagatgggctgagccaggcgtggctttgcctgggtgaagccctgttggcagggctttctggaattcccaaggaatggggtgcggctgagcattcaccaaggtagcttgggctctgcggtgtctcttcctgctgggaggtggcagagctcatcccaagcatcagggagtgacaaggacactggaagctaaggcagccagtgatggatggatgggtgggtggrtggatrgatggatggatggcatgacaggggtaagctggtggacrgagccaggaggcaagttgtatgcgtgctttgtgccatggcagcatcccatgtggaagtggctcttgcaaggtgggttgtcccctcctgccatgacccctggcatagtcagcatggagattctcagaaagttccctctgctgggcagaggagcagagagctgggtgctcccctacctgagaccagcacatgggtgtatagaaacagtgcccaaaaagagagcttgaatatgtcctcagcttctttcttcaggctcggagggt

SEQ ID NO: 49785 - DNA, 600 bp, Chicken  19866894296035_3
ccgcgggctgcaatagctgccttacaacatttacggagatgggctgagccaggcgtggctttgcctgggtgaagccctgttggcagggctttctggaattcccaaggaatggggtgcggctgagcattcaccaaggtagcttgggctctgcggtgtctcttcctgctgggaggtggcagagctcatcccaagcatcagggagtgacaaggacactggaagctaaggcagccagtgatggatggatgggtgggtggrtggatrgatggatggatggcatgacaggggtaagctggtggacrgagccaggaggcaagttgtatgcgtgctttgtgccatggcagcatcccatgtggaagtggctcttgcaaggtgggttgtcccctcctgccatgacccctggcatagtcagcatggagattctcagaaagttccctctgctgggcagaggagcagagagctgggtgctcccctacctgagaccagcacatgggtgtatagaaacagtgcccaaaaagagagcttgaatatgtcctcagcttctttcttcaggctcggagggtctcccttccctccctgttgcactctccccttcataccac

SEQ ID NO: 49786 - DNA, 600 bp, Chicken  19866894296038_1
tccagggcatttcactctttctagtccttctgacccagctgggtttcacttctcctgctatagcaaccatgtctccgcagaaggaaccacttggccctgcccaggcttccccctgaaaacaccaaggctgtagcagtaccatcatctggcttctgagtataatcatcgaatggcttgggttggaaggaacctcaaagatcatttaattccaatgccctgctgtggaggcaggggtgtcaaccactaaatcaggcaccagctcaggctgcccagcgcccacccaacctggccttgaacacytccagggatggggcacccacagcttccctgggcagcctgttcaatacctttgttacagacaaaggaaagaaaccaccacatccttgatcccagagacagttcacaagayggtagcttgaaaaataccttttgcccatgcgtctagtagatttaatgcataaaatcatttcaagagcatcagtrtacaatatcagcaatttattctttgtatgcttattattgtacagtcactcttaaggtttctgatccatgcttttgcagggctcacacaattgactctgagaagcaatgaatgaaggc

SEQ ID NO: 49787 - DNA, 600 bp, Chicken  19866894296038_2
cccctgaaaacaccaaggctgtagcagtaccatcatctggcttctgagtataatcatcgaatggcttgggttggaaggaacctcaaagatcatttaattccaatgccctgctgtggaggcaggggtgtcaaccactaaatcaggcaccagctcaggctgcccagcgcccacccaacctggccttgaacacytccagggatggggcacccacagcttccctgggcagcctgttcaatacctttgttacagacaaaggaaagaaaccaccacatccttgatcccagagacagttcacaagayggtagcttgaaaaataccttttgcccatgcgtctagtagatttaatgcataaaatcatttcaagagcatcagtrtacaatatcagcaatttattctttgtatgcttattattgtacagtcactcttaaggtttctgatccatgcttttgcagggctcacacaattgactctgagaagcaatgaatgaaggcaatacagagcaaagatggattgtttggggttccattggtcccaggtctccctgccagaaggtgaggctgtgcctccccttcctgccctggggcctctgacattcctcga

SEQ ID NO: 49788 - DNA, 529 bp, Chicken  19866894296038_3
aaggaacctcaaagatcatttaattccaatgccctgctgtggaggcaggggtgtcaaccactaaatcaggcaccagctcaggctgcccagcgcccacccaacctggccttgaacacytccagggatggggcacccacagcttccctgggcagcctgttcaatacctttgttacagacaaaggaaagaaaccaccacatccttgatcccagagacagttcacaagayggtagcttgaaaaataccttttgcccatgcgtctagtagatttaatgcataaaatcatttcaagagcatcagtrtacaatatcagcaatttattctttgtatgcttattattgtacagtcactcttaaggtttctgatccatgcttttgcagggctcacacaattgactctgagaagcaatgaatgaaggcaatacagagcaaagatggattgtttggggttccattggtcccaggtctccctgccagaaggtgaggctgtgcctccccttcctgccctggggcctctgacattcctcgagag

SEQ ID NO: 49789 - DNA, 600 bp, Chicken  19866894296039_1
gggcatccacagcttctctgggcatcatattccagtgtctcactgccctctgagtaaaaaattcctactagcatctaatctgaatctactatattttagtttaaaaccatcatctcttgtcctgttactacagaccccagtaaaaggtccctctttcctgtaggccctctttaggtactgtaaggccactgtaaggtcttccaggagcctttttttctccagattgaactatccccaaaccctcagactgtctttccaggagaggtgcaccagtcctctgattatccttgtggccctccyctggacctactccagcaggttaaagytctttttgtgctgagggccccagagctgaactcagtactgcagggggtgtctcatgagaatgaagtagaggggaacaatcaccacttcctctctactggcacatttcttttgatgcagcccagggtatggttggcttactgggctgcaagtgccagattttcatccaccagcactccaaactcctgttctattctcagtcctgtatttgtgcttggtattgcctggattcaagtgcaagaccttgcacttgaccttgctgaacttcttgaaact

SEQ ID NO: 49790 - DNA, 600 bp, Chicken  19866894296039_2
atattccagtgtctcactgccctctgagtaaaaaattcctactagcatctaatctgaatctactatattttagtttaaaaccatcatctcttgtcctgttactacagaccccagtaaaaggtccctctttcctgtaggccctctttaggtactgtaaggccactgtaaggtcttccaggagcctttttttctccagattgaactatccccaaaccctcagactgtctttccaggagaggtgcaccagtcctctgattatccttgtggccctccyctggacctactccagcaggttaaagytctttttgtgctgagggccccagagctgaactcagtactgcagggggtgtctcatgagaatgaagtagaggggaacaatcaccacttcctctctactggcacatttcttttgatgcagcccagggtatggttggcttactgggctgcaagtgccagattttcatccaccagcactccaaactcctgttctattctcagtcctgtatttgtgcttggtattgcctggattcaagtgcaagaccttgcacttgaccttgctgaacttcttgaaactctcacaggccccccctcttaagcctg

SEQ ID NO: 49791 - DNA, 574 bp, Chicken  19866894296042_1
ggattatctttctgggggtaaaaggaagggaggtaagtatgactttgctgggaaacaattttacatatctgtcctgcccagcacctacaataacccaggctaccttcatcagtaggaatcaggactagcactcagtggtggaggaagaacaagagctaatccttacatcctttgctgcttttggatctgatacacaggcaaaggtgatgtcacaggtggagacaacttcagcaggggttcttcccagccgtgccccttcctggatgaacaaatcacactgcaaaaatcacaaattgaaawgtaagtaaaattaagtacaaaccaaatgggttctctagaattttgatgaaacaaacttcactgccaggctcaacctgagtcaagtgtattaattagtcagtagctgggttgggttttggtaattcatctcctatacccaaggggctcctctgcaggttttctgaaccctcaagtgaagaacttcaaaacaaaggcacaagagagaaggcttacgtgaaatactgtaagagattgaaccttgcagtttttaggagagtgcaaaaaaacgggtgaa

SEQ ID NO: 49792 - DNA, 599 bp, Chicken  19866894296048_1
  misc_feature (1)..(72): n is any nucleotide
nnnnnnnnnnnnnnnnnnnnnnnnnnnnnnnnnnnnnnnnnnnnnnnnnnnnnnnnnnnnnnnnnnnnnnnncccctgggctatgctactaatattgttatggcatcacatcccaccaaacacatttgagctagctttggtagcactgttggcacatcttgtattcagctagcttctaaacagattttgcagccagtattgccctcactgtaactactctcagtgtcaaaattgcttgtttaaggaaagaggtattaaatcttcagtcagagccttctgctctaattatagtttctgctytcatctagactcttgaaggaatgtctgcaagaaaggcattttcttttttaaaatctaaagagcagagatggagaagcagattcatgcttaaaacagcttggaaggaaacgcttgggattctcagggggattgagaaacatgtgggtttgggatgaaaagaaccaagccaagaactagctggccacttccagctttcacaccataaatcattacattctttaatagtcggccagctttcacaaacagaaagaaagtgaatacagtaggatgtagcagacaagatacagcttagtcaagag

SEQ ID NO: 49793 - DNA, 600 bp, Chicken  19866894296051_1
agatcctcagtaaaaatattaaacaaaacaggcccccataccaacttctgggaaacaccactcacgaccggtcactagctagatttaactccatttaccactgttctctgggcctggtccttcaaacagttctttacccagcagaatgtacctgcccaagtgaaagactgccagcttctctagaagaccaaatcctgggtcctgcactttggccacaataaccccaggcaacgctacaggcttggggcagagtggctggcagactgagtagaggaaatggacctgggggtattgattgaygctagactgaacatgagccagcagtgtgcccaggtggccaagaaggccaatggcatcctggcttgtatcagaaatagtgttgccagcaggaataggaaagtaatggtccccctgtactcagcactggtgaggccgcacctcgagtactgtgtccagttttgggcccctcactgtaagaaagacatcgaggccctggagcgtatccagaggagggcaccaaagctggtgagaggtctggagcacaggccttatgaggagcagctgaaggagctgggattgttcagtctagagaagaggagg

SEQ ID NO: 49794 - DNA, 599 bp, Chicken  19866894296058_1
  misc_feature (1)..(73): n is any nucleotide
nnnnnnnnnnnnnnnnnnnnnnnnnnnnnnnnnnnnnnnnnnnnnnnnnnnnnnnnnnnnnnnnnnnnnnnnnctttcatcacatggacccccagcagtatatcatttcataaccaggtccagaggtaagcttctgagtaacacgtaatttctgatttcaggccctattaagaggatttgtatctgtaatataaaagtagctctttgaagaatcttgatgaagatcgtattgtaatctgttctaggcagattcatagattaacaaacagctttgttatggtgatggataacaggctcagyaagatacactaagtcagaataattctatcagtataaatagaaacagtaaaagtactttaagtgaactaaaaagcaggaatgtttttctcctagtagcgactagttaggtattttttcctcaagaataattgtgcttatattaatttagaataagaaacattgccaaactatctattgtagtctgatacttagatatgctgccagaagttcatcattcaaaacagcttttggaacgttcttaaatttagaaagaggggctttcttctatcttttcagttgtgaatagacacaggtgggaa

SEQ ID NO: 49795 - DNA, 600 bp, Chicken  19866894296058_2
taaaagtactttaagtgaactaaaaagcaggaatgtttttctcctagtagcgactagttaggtattttttcctcaagaataattgtgcttatattaatttagaataagaaacattgccaaactatctattgtagtctgatacttagatatgctgccagaagttcatcattcaaaacagcttttggaacgttcttaaatttagaaagaggggctttcttctatcttttcagttgtgaatagacacaggtgggaaggaggctcaagtgggatttgagatttatgaagcccgactgcacaagrccattaaaaactcagttgatgtcacgagtcatggttggacaattcagttactgcccatgaccttcccctactaatttcatcagttatttctgcccacattagcagagattacatctccagctataaaggaatgattacgtttccacatcatatggaaaaaaattgtgacagacgtcacattttggtacattccataaggatcagtgtctatacttacagaatcaggtgcataaagtaaaaaggaaaatctttatacctatttatactagaaaataagtaagtgtataattctggtgatat

SEQ ID NO: 49796 - DNA, 598 bp, Chicken  19866894296058_3
cacattagcagagattacatctccagctataaaggaatgattacgtttccacatcatatggaaaaaaattgtgacagacgtcacattttggtacattccataaggatcagtgtctatacttacagaatcaggtgcataaagtaaaaaggaaaatctttatacctatttatactagaaaataagtaagtgtataattctggtgatatttcagtgttactactattatttgttttaagcgatgcgtgccattttattttacaaaaccccgaaaatgagcgtcaggttttatgaaagcattaygttttgaaatattttctttcttaaataattctccagtgtaagtaaggcgtataataaatcgtgatttatactgaaggcaattcttttttaagacagtatgaagaaaatggcttctatcgtttgaagcaactattagttttccattttcgttttgtgattgtttcagctttgcatgatgataatgttgagactcttccttcactactgtcaatatcttggaatgatatatgaggacacattaacttttcttaaataattccagtattttgcaggtggcctttgtgcatttacgcgagtc

SEQ ID NO: 49797 - DNA, 600 bp, Chicken  19866894296059_1
caggcattgcgtctggaaatggcgatgggtggtggagggttggcacgtgggtccatcctcgccccacgggttcatcccctgagctatgggatggggcaggcactggtgttatccctgtgctggggtcaggtagctgtctgtgctgggcctggtctggttttcttcttcacttcaacaaaaaaagcaaggccacaaaaattggtcccaggtgaaacctttctcttccctgaaacagccacatttcactccttgggctcttttattcgtttttgaattacattggctgcacctaaacatccyccgagataagagaggtatctttctcttcctttcccttgtgcccccccaaaaagccaaaataacaacgttcagcttttaaaactccttgctttcccttaaaccatttcatagaatcatagaatggtttttgggtttgcagcggggtgttttcagcctgcaggtgggtatccgtgcagaacagcccattgacatggaggtggttccatccccagcaccaatgggttcctgagcccaatgccaggctgtgaaatggctctctgctctgaaaatgaattagaaaacagaggaggaggcaatgca

SEQ ID NO: 49798 - DNA, 600 bp, Chicken  19866894296060_1
aggaatgcagaaaagaggggaatgacttcagatgtggatgatatgcatttgcctccatgccattcctagtttagttcaggcctgtacccaatgtgcattatggtcttatgtctctaaagataaatgatgatctttctaacagattgaatttctgaagtcagttgttaatacagcaaactttacaagcatttgctgtaatacatggatacagtgaatatgtcatcagccttcctgagaagcaaaatattgttgaccattctattttgtttcagaaatgctagctctagtccaaacatctcytcaacttccatagcaattattgtcaaagcatagataaagcaagagtgtatcaggtccaagcacagtccgtgtgctcagtacaaatgctgcagggaaaactggagaacacctgcataactgttttattactgaacagggctctttgtctaacctgtcaaccaccctgctgggaatctctcattttgacacaataacaagagaaacagttttaaaaatgaatgttgagatgcgaaagaaagcaagccccaacttgtacgctctgcatgttacctttccacttagtgaggtgtaatttagata

SEQ ID NO: 49799 - DNA, 460 bp, Chicken  19866894296060_2
agaaagcaagccccaacttgtacgctctgcatgttacctttccacttagtgaggtgtaatttagatactaatccagtgggaatttcactccttgcttttttcactgcactgaaggcatgaggctaactcctctgggaagcatgacatttcccaccattgcaacgctgtcccatgttacatatatctgaggtctgtcctttaattctcaggaagtcaggcaacaaaactgccagtcttttcttctaaagtttaggagcaatttgcatgtgtcaggtgtctgccaggctgctccattcaagyttgtaggatttgtggtcttctcaagaaaaatcatcttacttattctgtctgaggtaccttttacacccacaggtgaagaacatgtatacatacaatgcttgcaattgtaactgtcaatgaagagagctgtggaatatgggcctagcttaggggaagtcag

SEQ ID NO: 49800 - DNA, 600 bp, Chicken  19866894296074_1
tgattgtcagggttttcacttagttaatgcagttcgtattttgaatcaggtttgaaaatgatgatatggttttatgtctcagatctcactgtctctgtacgtctgttcactttgtaagagacagtccagtatattcgatacattctttccctccatgtttgtcattaaaagttaatgttttacaggttacgtatttttccattgtgggtttgttttggttttttttagaatatgtgtaatattctgctgctgtgagtgatgctcacagaaagaaggaaaatgccactttcaggattttcmgagcaaaagttgattgacgtttacagtgtgtggttgccaacttccacaattagatggcaaacatcagatggatattttaagaaagtagtttttcctttttctctygatttcagagaaaaaaaatgtaaagataattcctaaagaagactgatctcaaatgaaaatactgtcagtgttgttaactcaaaaatcataaggaatggaattacgttgtagtgtgtattatagttcagactcatttctgttttgtttcaaagaacttgaggcatttgagctgtgactgctggcttattgttaatt

SEQ ID NO: 49801 - DNA, 600 bp, Chicken  19866894296074_2
ttcactttgtaagagacagtccagtatattcgatacattctttccctccatgtttgtcattaaaagttaatgttttacaggttacgtatttttccattgtgggtttgttttggttttttttagaatatgtgtaatattctgctgctgtgagtgatgctcacagaaagaaggaaaatgccactttcaggattttcmgagcaaaagttgattgacgtttacagtgtgtggttgccaacttccacaattagatggcaaacatcagatggatattttaagaaagtagtttttcctttttctctygatttcagagaaaaaaaatgtaaagataattcctaaagaagactgatctcaaatgaaaatactgtcagtgttgttaactcaaaaatcataaggaatggaattacgttgtagtgtgtattatagttcagactcatttctgttttgtttcaaagaacttgaggcatttgagctgtgactgctggcttattgttaattgctaattaacaggtgccgacagtgatgacgttgtatagtagtagtatttcaaatgctcaccacttctgcttcctaatttattacattccctaaaatggactgctg

SEQ ID NO: 49802 - DNA, 600 bp, Chicken  19866894296078_1
ttgagactaggaaatctgtgtgtcttttatcctctgaatatgattaatgatgctttgtgttttgcaagacattattaaaaacagaagcctatgacttcattgtctctgacaatgactttgaacatggggtcagttattccacttttacatttctttgcaagattaaaagaaagtaaaaacaattgcactgggaggagggggaaactttacacagatgtgacaaagcaggatacacacacgttttcaatatgcttcttccagtgaaaattcacttcattcgtatgatactgctggtaagcraatgcttgtgacaggcaaatctagccatcaggaaaacatactggattcaggattatctcaagtaccacatgctagaattgttgaaaacgttaagcaaagagctcagagtttgattggggaaattacaagtaacagatgcaatttcttatttgcattcctggatagtgattgacaagaaagttgtcattgtgtagaactgaaacaaaatatgcaatatcaaggatgtgtatgaaaacactgttgacctattaaatataagtacttcttgttttcacataaaacactctactttcacaagta

SEQ ID NO: 49803 - DNA, 599 bp, Chicken  19866894296080_1
  misc_feature (1)..(72): n is any nucleotide
nnnnnnnnnnnnnnnnnnnnnnnnnnnnnnnnnnnnnnnnnnnnnnnnnnnnnnnnnnnnnnnnnnnnnnnnacacagggagctgtaaccagcagtcacttccattgatgggcttgaccaaaagcagtgtgtcacacttttgggacatgtctgaacccggctctaataccaggagaggagctgcaagacatggcaggaaggactgcagctacccagagaaactcatctgaaggagagggagtcatggccctcagttaccaccgctgttacaaatccatgcaaacactttaaagacaaaaraaaatcccgataagcatagaaaatgccagtgcataaatttaagctctttataaaattaaatcatgccttcaataatggccaaacacaaaaggagatgtataaacttcagaagtgtaaatccatgaaataccagcagcaaagctgctataattgataaactcccaaaaggcacacactgcatggacacagaaaacaaatgcagttggtctcagcccattctctgaacagcctaacaggccttctgcacrctaccaccatgtaactgggagtcccagtctgttagcaggacgacttcaggc

SEQ ID NO: 49804 - DNA, 600 bp, Chicken  19866894296080_2
cctcagttaccaccgctgttacaaatccatgcaaacactttaaagacaaaaraaaatcccgataagcatagaaaatgccagtgcataaatttaagctctttataaaattaaatcatgccttcaataatggccaaacacaaaaggagatgtataaacttcagaagtgtaaatccatgaaataccagcagcaaagctgctataattgataaactcccaaaaggcacacactgcatggacacagaaaacaaatgcagttggtctcagcccattctctgaacagcctaacaggccttctgcacrctaccaccatgtaactgggagtcccagtctgttagcaggacgacttcaggcaggtgagggctgaaggatccccatttcagcttcaggggatggacataaaggtgataagccattctgagtgaacaaaattcctggcttcaaaaatcttagaaaaacactgcttccagatttactgttttgaaagactacagactaccagttaagacttatctcacctcaacaccacaggtaaagttgagaacayacccacctcagcatctgagatggagactcgattggactctatcgttggcctccgta

SEQ ID NO: 49805 - DNA, 600 bp, Chicken  19866894296080_3
acaaatgcagttggtctcagcccattctctgaacagcctaacaggccttctgcacrctaccaccatgtaactgggagtcccagtctgttagcaggacgacttcaggcaggtgagggctgaaggatccccatttcagcttcaggggatggacataaaggtgataagccattctgagtgaacaaaattcctggcttcaaaaatcttagaaaaacactgcttccagatttactgttttgaaagactacagactaccagttaagacttatctcacctcaacaccacaggtaaagttgagaacayacccacctcagcatctgagatggagactcgattggactctatcgttggcctccgtattatacgtggtgatggccctgtggcataatgaccaaaacccggwgtgttgctcgaagccaaatgacttcctgatgatctttcctgaagagacaacttcctacttgatagcacaggtctagcaagaggtttcttggaagcatgccccgactgagcattgtctgactgttgggagagcaggaattcatttgtttccacatcactgttgactccatttctttggatgtcctttccgttatcagaaaa

SEQ ID NO: 49806 - DNA, 600 bp, Chicken  19866894296080_4
ttcaggcaggtgagggctgaaggatccccatttcagcttcaggggatggacataaaggtgataagccattctgagtgaacaaaattcctggcttcaaaaatcttagaaaaacactgcttccagatttactgttttgaaagactacagactaccagttaagacttatctcacctcaacaccacaggtaaagttgagaacayacccacctcagcatctgagatggagactcgattggactctatcgttggcctccgtattatacgtggtgatggccctgtggcataatgaccaaaacccggwgtgttgctcgaagccaaatgacttcctgatgatctttcctgaagagacaacttcctacttgatagcacaggtctagcaagaggtttcttggaagcatgccccgactgagcattgtctgactgttgggagagcaggaattcatttgtttccacatcactgttgactccatttctttggatgtcctttccgttatcagaaaagacagtgtcattttcttcagtgatgtcttcaccattttggtcacttctgtttgggtgagcagccacatctatggccgccacccgctctgccagttcagcc

SEQ ID NO: 49807 - DNA, 600 bp, Chicken  19866894296090_1
ttccttagtatccaataattctacaaagtgtttctcagtgggaagaacccaagttataaaatctactcactactgtaacagaaaagatgggtattttccaagaattttattttcaactgttaaaaaacagtcagtggagactgacatggacaaaaattcagtgtatggctgactccagatagaaatcctgtgacaaatctattaattctccatacattagcaaacctaattgtttctgtccataaaatactcttcctgaatcgactctcacaatggcaattttaaaattagatatgtctsactcctcaataaggccatcagatcaatggaacagttgagactgaggtccacaatgggaaacaacaaactaaatatgcatgagaagcaagaggcaccagaacggtactaggttacaaattctctgccatcttcatcttgcaaaaacaacacacaaaagaattaatcagcccaaataccagaaatcaaatccaccccttttcactgctgctgcttgagacttcctgccacctacacacctctttttgctccttaccacaagcctcctctggggaaaacatgagaaggccacacagactgcac

SEQ ID NO: 49808 - DNA, 600 bp, Chicken  19866894296094_1
ccagaaatgtgtccatctgttatacagtactgagcactgaatacacttatcactacaaatatgagacagagaaggtgagcgggaaggagacatggttcaaaaaagatgattagacagttttactgtggaatttctagttaatgtcagctcaaaaatgtatgcagaaagacctctgcaagtctattattactttctccatttttgtcttagacttcatagtaaccatggttagtgcaagaacatgggaaataacctcttttttcatctcttgaagcagagagatgtggggaagtcaatcawttaggggaataggaagcaatatgacttttaatagaccttagagygtaggacagggccaaagaaaaagattcacaataaaaacrtataaagtagctcagaaacaaacattagcgatcacagtgttgtgtttgcatgtttgcactgttctcagttagyactgagttaggcatgtgaaataaaatgaacaaacgtggtatcaaattttaaatgtgacaatatgttaagtttggggaggatgggtgttatactttgaaagccaaagtcataaaaaaaaaaataactttgtaaatgcaaaagtag

SEQ ID NO: 49809 - DNA, 600 bp, Chicken  19866894296094_2
acttatcactacaaatatgagacagagaaggtgagcgggaaggagacatggttcaaaaaagatgattagacagttttactgtggaatttctagttaatgtcagctcaaaaatgtatgcagaaagacctctgcaagtctattattactttctccatttttgtcttagacttcatagtaaccatggttagtgcaagaacatgggaaataacctcttttttcatctcttgaagcagagagatgtggggaagtcaatcawttaggggaataggaagcaatatgacttttaatagaccttagagygtaggacagggccaaagaaaaagattcacaataaaaacrtataaagtagctcagaaacaaacattagcgatcacagtgttgtgtttgcatgtttgcactgttctcagttagyactgagttaggcatgtgaaataaaatgaacaaacgtggtatcaaattttaaatgtgacaatatgttaagtttggggaggatgggtgttatactttgaaagccaaagtcataaaaaaaaaaataactttgtaaatgcaaaagtagtagcaatatgctacagcaaatgcttgccacttaatcacaatggg

SEQ ID NO: 49810 - DNA, 600 bp, Chicken  19866894296094_3
aaggagacatggttcaaaaaagatgattagacagttttactgtggaatttctagttaatgtcagctcaaaaatgtatgcagaaagacctctgcaagtctattattactttctccatttttgtcttagacttcatagtaaccatggttagtgcaagaacatgggaaataacctcttttttcatctcttgaagcagagagatgtggggaagtcaatcawttaggggaataggaagcaatatgacttttaatagaccttagagygtaggacagggccaaagaaaaagattcacaataaaaacrtataaagtagctcagaaacaaacattagcgatcacagtgttgtgtttgcatgtttgcactgttctcagttagyactgagttaggcatgtgaaataaaatgaacaaacgtggtatcaaattttaaatgtgacaatatgttaagtttggggaggatgggtgttatactttgaaagccaaagtcataaaaaaaaaaataactttgtaaatgcaaaagtagtagcaatatgctacagcaaatgcttgccacttaatcacaatgggttagtgagtactgactgcaaaaggggcttgatcctggaa

SEQ ID NO: 49811 - DNA, 600 bp, Chicken  19866894296094_4
gtatgcagaaagacctctgcaagtctattattactttctccatttttgtcttagacttcatagtaaccatggttagtgcaagaacatgggaaataacctcttttttcatctcttgaagcagagagatgtggggaagtcaatcawttaggggaataggaagcaatatgacttttaatagaccttagagygtaggacagggccaaagaaaaagattcacaataaaaacrtataaagtagctcagaaacaaacattagcgatcacagtgttgtgtttgcatgtttgcactgttctcagttagyactgagttaggcatgtgaaataaaatgaacaaacgtggtatcaaattttaaatgtgacaatatgttaagtttggggaggatgggtgttatactttgaaagccaaagtcataaaaaaaaaaataactttgtaaatgcaaaagtagtagcaatatgctacagcaaatgcttgccacttaatcacaatgggttagtgagtactgactgcaaaaggggcttgatcctggaaagcatctactccaaggttcataatctttgttacaaagaaagacttcaaagtcacattgattttgatgcactgt

SEQ ID NO: 49812 - DNA, 600 bp, Chicken  19866894296096_1
atagctcaaatcccaccataaggcacttgttttagcattggatctagtagaacttgcttcaagctctacagctttaagacttgggttagtcaagtgttttctattgacagtgttgatgaaatataatatttatcgtgcgcacattctacttcagatatttgaaagatggattgccagctttgagccgtagacacccaggctcttttgggaggaataatgtcactcttatataaagtgtttaaacactaattactattgtttatctttatgctcccaaaaccaaacgttttggctgtgtcraacattcagagttgatttggtgagcaaaaaagttgtcccttgagcaatattaggagttacttgctggcactgatataatagctaaagtgaatttaatagcctatttgcttatggaacgaatacattaccaaactaaatttgtgaagaaaagattcagttgtcaaaataccaaggagagaaaacaaaaaataaggggggagataattaggggtgccaggaagcttctaaagaagcatgcaagcacatctacttggaatattacttccagtgctgtgacttagagtaagcttgcactcaatg

SEQ ID NO: 49813 - DNA, 600 bp, Chicken  19866894296096_2
ttagacacgtgcagacaaaagcacatgcgcacgtagcgtgtctgttctgagtgtgccctggtggtagcagctgtccaagttgaatcactggagttgtgttcagctcatgctgaaagaaatccaagatgtttgcagaactgaccggagaaagtcggagctggctctgtgcagctgcaggcaaagcagacacaatccagcacagccctggctggctccaggggtagcatgttctgcaagttggtgggtggggaccgtcctgagccatttcaggatgctttcagggcagcaaaacttcttaarcttctcttaaatgacatttttgtttcctcacagcgggagaaaattcctgctgtcattattgaaaactagctctagacactgcagtgatgcagctaagtagctattgagtcaaaataagaaaaagaatagctttcattggctgaatcattaaccacaggagttttgcagcctctccataccttcacttacagattgccrgtagggtcatgttgtgctttgcaatcagttttagaattgttagctgcctcttctgtttttgttttatgatgttaggaatcaaactgttcttccgaattacaa

SEQ ID NO: 49814 - DNA, 600 bp, Chicken  19866894296096_3
acagccctggctggctccaggggtagcatgttctgcaagttggtgggtggggaccgtcctgagccatttcaggatgctttcagggcagcaaaacttcttaarcttctcttaaatgacatttttgtttcctcacagcgggagaaaattcctgctgtcattattgaaaactagctctagacactgcagtgatgcagctaagtagctattgagtcaaaataagaaaaagaatagctttcattggctgaatcattaaccacaggagttttgcagcctctccataccttcacttacagattgccrgtagggtcatgttgtgctttgcaatcagttttagaattgttagctgcctcttctgtttttgttttatgatgttaggaatcaaactgttcttccgaattacaacactgatgcttgggaaagcattccctcctttctggtttttctttttatccataagcagaccggctgtacctacgcactctgagttactcagagctctgtgatggaggaggcacaagtagtcagcatcccattctgctcatgcatccagggctgaggactcagaccagcaggccccatgggatgaagggcgttggagta

SEQ ID NO: 49815 - DNA, 600 bp, Chicken  19866894296097_1
ctctcagatcacacgattataccagtcacaccttgggtccagtatttaacattcccactgtagcagccgcttataaagtatctgttgctgggtaatggagtctgcctacttgcccagggcacgggaagaccaaattcccaggacaagagctagaaccaatgtccccagcaacaacagcacttgtattacaaatggaattccacaaacaatatttaatacttttataacagaagcacttaacaattacaaagataagaacaatgacacagttcctatcaggaaaagaatgaaaatccattygggcatttgtccaccctgtttgaccagtcactttaaactcttcagtgacagtttgcaaccgtctcttgcaggagaatgaaactatggatccgacacactttttagctttgatctttccaaagctcacacagctcacgttcccgagcacactgtggtctctctctcgggataccttgcgcgctttacctgtgggattcttgggatacccccctaagtgggacccccctcccgagggggtgtactcccccagccatcgcgatcacccaaccattacctgtggatccaccctcggggggagca

SEQ ID NO: 49816 - DNA, 600 bp, Chicken  19866894296100_1
aaatctgaaatatcattggagcataaagttactcttctggcaccctggcatccatcccaatggatttctgactatttatttttttgtttgtttctcttagtatgtatctaacacaggatcataaactatcttcagtaagttatctttgggtgcttttttcatatctgaacactctatttgcagtggttttagcatagtgtactttgtaattaaagaactcgctgtttaatatgctgcacaggttttcttcgtccttctctgaaaaagaagggaatgaatggactgtgatttaaattgccwagctccctcattagtttgcaaaattcatttgtccattataataattactctttctgaaagtatgtgggagtgtgttctctggctttcaagttctgggcaattccctgagagttcttggggaatgatttatggtgataaccacttctgtgtcttgtttgtgttcagtgcttctcagtaagctctattcttactgaagaaaaaaaattacaacactaggtagatcaaaccatataatcactatttctctcatcgtagaatcatagaatcactaaggttggaaaagacccacaggatcaccca

SEQ ID NO: 49817 - DNA, 600 bp, Chicken  19866894296106_1
gcaggggtaacttcaggaggcatctctactcaaggggagatcctgttttgcagctgtttgcggtgtaggtaagctcagggcttgggctgctcgctattaatggtaagatgactgactcacagtcatagtatttagttcatatttatttggttctcagctcttgaaacaggtttttgctatcagttattttagaccctccaatctgacacagatttttgttcattatctgtctcagcaagacagaattattagtcctatcaaggtctagggaatctcattgtcagcccaagcaaggccttygccctaatggatatgcagaaggaagacagtgggagaacggtagaatacacagaagatttctttgcatatgatctactttgactgagacaaatttgcaatgtgcacactctggggaaactaaagagtgaagagatcagttctaygtgtttagcactgatcattagttagggcctaatgcagtatttagaccataacagaacttttgttcttgtaatgtatgcagaaatttttattcgcgattatatttttagtcatggtctagggatgttacaagcatcagctacgatgtcctgcaacaga

SEQ ID NO: 49818 - DNA, 497 bp, Chicken  19866894296106_2
tatttggttctcagctcttgaaacaggtttttgctatcagttattttagaccctccaatctgacacagatttttgttcattatctgtctcagcaagacagaattattagtcctatcaaggtctagggaatctcattgtcagcccaagcaaggccttygccctaatggatatgcagaaggaagacagtgggagaacggtagaatacacagaagatttctttgcatatgatctactttgactgagacaaatttgcaatgtgcacactctggggaaactaaagagtgaagagatcagttctaygtgtttagcactgatcattagttagggcctaatgcagtatttagaccataacagaacttttgttcttgtaatgtatgcagaaatttttattcgcgattatatttttagtcatggtctagggatgttacaagcatcagctacgatgtcctgcaacagatcagcactttcacaaaactgagcataaagatctatttgag

SEQ ID NO: 49819 - DNA, 600 bp, Chicken  19866894296107_1
attccaaatgtcttaattgtagctaaaacaacaacaaaacacacacacaaacccagcaaaacccaacaaattagctctaattgtattcacccaagtttgtgggagccaaaggacagtaattgactgttgtcccacaaactgctctgttttactaaccagactggtgaggctgggctttgcaggtgttcagtgtaggaggtaagcagtagtattcctgcaaaccagagatttgtcaggacctctaattaaataggacagactgaccaacctctgttgccctgggagaaaggcaaagttggktgcttctgtgccataactcaaagatgcagccaactgcttaggggcatcaggaaggaagatgatcctcttttgatctctctgccgaatggataggggtggctcatgtaggctgtatatcatagttcctctgaaacatggtagtttatgtgcatgtgcaagtttcctaccattttacagtgagataatcatctattaaacttgagtgtgaattacagcaggcaaatcctaactatttacattcattttctttcaaacagacttttcattgtgacatttatttaatttagactttaagatatt

SEQ ID NO: 49820 - DNA, 599 bp, Chicken  19866894296113_1
  misc_feature (1)..(104): n is any nucleotide
nnnnnnnnnnnnnnnnnnnnnnnnnnnnnnnnnnnnnnnnnnnnnnnnnnnnnnnnnnnnnnnnnnnnnnnnnnnnnnnnnnnnnnnnnnnnnnnnnnnnnnnncttcccacccctactacaatgtggtaagaatgaaataatttatcctccaagttagctgctgtgcctgatgcaatgctaccaatgcatttctcaaacttcacaaaaatacttggaagcacgtattttttgctacctgcttttcctctcaccttaaataattaggaagaacttacaagattctgcttcacaatacaamtgcgtttccttattttattatcttttttccccatccacacatcgttatttgtaaaactcatttaataattctgagagattccaagatgtgtgtcagatgctgggatattgccacttgtgtggtggtttgctacacttacccttcagtcttgtggctaacaattcacccaaaatgtgataatacctcaccacaacccacacgctgctgctcttcaaaggagaacaaggatacataattatgagatgatgagctcaaatgtaagacaggagatgagggaacagattctgtaaccacacctg

SEQ ID NO: 49821 - DNA, 599 bp, Chicken  19866894296120_1
  misc_feature (1)..(117): n is any nucleotide
nnnnnnnnnnnnnnnnnnnnnnnnnnnnnnnnnnnnnnnnnnnnnnnnnnnnnnnnnnnnnnnnnnnnnnnnnnnnnnnnnnnnnnnnnnnnnnnnnnnnnnnnnnnnnnnnnnnnnatgtgcctagagttgcatttaatctctgacgcagctgtgatctggtggttgagtaattcttcctggtgttggtttgtaattctgtgatatagcaatactcacttctgacagcctgtgggatcaccttgattcaaaagccatctgcacatggttgtgggcaagcagatacaggtggcccagcayaagtaggtgggttgaaccaaatggtctccagagatccctttcaacctcagccattctgtggttttatgacctcttacctcatttgggctgccatataccacataggcttatgggaaactcacatctttttacactggaaccaaaataggatgaagtaggactttttatagaaatgctagatctgtyttcaagccaccagatcaagctcmtctcaactgttcaaccaaatcactcctgaaatgttgatagtcaaattgactagattgtcactgactgtgatgaagacagaggtactgact

SEQ ID NO: 49822 - DNA, 600 bp, Chicken  19866894296120_2
tggtttgtaattctgtgatatagcaatactcacttctgacagcctgtgggatcaccttgattcaaaagccatctgcacatggttgtgggcaagcagatacaggtggcccagcayaagtaggtgggttgaaccaaatggtctccagagatccctttcaacctcagccattctgtggttttatgacctcttacctcatttgggctgccatataccacataggcttatgggaaactcacatctttttacactggaaccaaaataggatgaagtaggactttttatagaaatgctagatctgtyttcaagccaccagatcaagctcmtctcaactgttcaaccaaatcactcctgaaatgttgatagtcaaattgactagattgtcactgactgtgatgaagacagaggtactgacttacctatagatacctacagtcagatgtaataatcttgaactgaattccatccagctacctagtcaactgaatttatmtggttcatgttkactctctagtgggaggaaatgatttctctggaataagtcacattcctatgccagccatctgttggcatcttcttyctgaaactgtacaattttgtttt

SEQ ID NO: 49823 - DNA, 600 bp, Chicken  19866894296120_3
caatactcacttctgacagcctgtgggatcaccttgattcaaaagccatctgcacatggttgtgggcaagcagatacaggtggcccagcayaagtaggtgggttgaaccaaatggtctccagagatccctttcaacctcagccattctgtggttttatgacctcttacctcatttgggctgccatataccacataggcttatgggaaactcacatctttttacactggaaccaaaataggatgaagtaggactttttatagaaatgctagatctgtyttcaagccaccagatcaagctcmtctcaactgttcaaccaaatcactcctgaaatgttgatagtcaaattgactagattgtcactgactgtgatgaagacagaggtactgacttacctatagatacctacagtcagatgtaataatcttgaactgaattccatccagctacctagtcaactgaatttatmtggttcatgttkactctctagtgggaggaaatgatttctctggaataagtcacattcctatgccagccatctgttggcatcttcttyctgaaactgtacaattttgttttctgacttagctggaattttgcta

SEQ ID NO: 49824 - DNA, 600 bp, Chicken  19866894296120_4
cctcatttgggctgccatataccacataggcttatgggaaactcacatctttttacactggaaccaaaataggatgaagtaggactttttatagaaatgctagatctgtyttcaagccaccagatcaagctcmtctcaactgttcaaccaaatcactcctgaaatgttgatagtcaaattgactagattgtcactgactgtgatgaagacagaggtactgacttacctatagatacctacagtcagatgtaataatcttgaactgaattccatccagctacctagtcaactgaatttatmtggttcatgttkactctctagtgggaggaaatgatttctctggaataagtcacattcctatgccagccatctgttggcatcttcttyctgaaactgtacaattttgttttctgacttagctggaattttgctacgtgttaggtttctgtatgttggattcaagcgttcttatgacagtgatttcttttgtactagcttgaaagcaagccagtgtgtagaaaaaggacaaaggcttaagcatatcgtaattaagacactgactttgtggctcatttctgtagtttctgcagtattttgtac

SEQ ID NO: 49825 - DNA, 600 bp, Chicken  19866894296120_5
tgccatataccacataggcttatgggaaactcacatctttttacactggaaccaaaataggatgaagtaggactttttatagaaatgctagatctgtyttcaagccaccagatcaagctcmtctcaactgttcaaccaaatcactcctgaaatgttgatagtcaaattgactagattgtcactgactgtgatgaagacagaggtactgacttacctatagatacctacagtcagatgtaataatcttgaactgaattccatccagctacctagtcaactgaatttatmtggttcatgttkactctctagtgggaggaaatgatttctctggaataagtcacattcctatgccagccatctgttggcatcttcttyctgaaactgtacaattttgttttctgacttagctggaattttgctacgtgttaggtttctgtatgttggattcaagcgttcttatgacagtgatttcttttgtactagcttgaaagcaagccagtgtgtagaaaaaggacaaaggcttaagcatatcgtaattaagacactgactttgtggctcatttctgtagtttctgcagtattttgtacagtttcatgaaa

SEQ ID NO: 49826 - DNA, 570 bp, Chicken  19866894296120_6
tttatagaaatgctagatctgtyttcaagccaccagatcaagctcmtctcaactgttcaaccaaatcactcctgaaatgttgatagtcaaattgactagattgtcactgactgtgatgaagacagaggtactgacttacctatagatacctacagtcagatgtaataatcttgaactgaattccatccagctacctagtcaactgaatttatmtggttcatgttkactctctagtgggaggaaatgatttctctggaataagtcacattcctatgccagccatctgttggcatcttcttyctgaaactgtacaattttgttttctgacttagctggaattttgctacgtgttaggtttctgtatgttggattcaagcgttcttatgacagtgatttcttttgtactagcttgaaagcaagccagtgtgtagaaaaaggacaaaggcttaagcatatcgtaattaagacactgactttgtggctcatttctgtagtttctgcagtattttgtacagtttcatgaaacatatttattcagtacataaaatgatgtacatttctcattatttt

SEQ ID NO: 49827 - DNA, 600 bp, Chicken  19866894296121_1
tttttaacctagacagatggaagcctggaaatacagaaatgagacttcatcttagtttcacaaatctagtgatgcaggttttttgcatcctgctcactactttcatccccctgaaacactccatccctgttctgcctgacaggaatgagatgctatgctcattcacatgccttaaaagtactggacacgttccttgcttttgctctgaaagaaaggaggaaagctttgcccatcacagcccttgccataaatgacatgaaaataaggggaattggttctcaataaactttgatggcaccrtttttttcactatgtggaaaagcctgtgttagttaagctatgaaaattcaccagtataaacaagtccttaaagcagtaggccagtgaagtattctgaaaatccctcccagcttcaggtcacacctaggcttggcctgaaacactgaaatttaggtcagacttgtgccagctaagcatgatttccttctaaactacagctacaatctctgcaaggctaacagtgtttatcatccatgcatgtttgccaacatacggatcgcctcaggctccacacacttttcgtaaggaatgaatgcattc

SEQ ID NO: 49828 - DNA, 600 bp, Chicken  19866894296121_2
gtgccagctaagcatgatttccttctaaactacagctacaatctctgcaaggctaacagtgtttatcatccatgcatgtttgccaacatacggatcgcctcaggctccacacacttttcgtaaggaatgaatgcattcctcaatttcttactgtcttgttcctatgggtagtttgatattcgaagttcttttagagaaaaagagccagaagaccagtttacaaaagctgcaagagacaacttcacatgaagcaagttttgcagttattatacactgatcctgaaaggccaagtttttggsaaagagctacaacattaaataaggagcgtgggatcatttattgctaaaaggaatggataatcctcaggcctggataccttcagtgaattggaggaagcaacagaagaaacatattaagtactgtggagagtgtagttttaaacaagttaacaactaacacaaacgaaacttgggaagcaaaataggtgatgtataaacacaggatacaaaagaaaacttacagcatcttgcactagaaaacactacctattttcatagaagccctaattttgggcagtagtgcctcttggaagttgccct

SEQ ID NO: 49829 - DNA, 600 bp, Chicken  19866894296121_3
gagcgtgggatcatttattgctaaaaggaatggataatcctcaggcctggataccttcagtgaattggaggaagcaacagaagaaacatattaagtactgtggagagtgtagttttaaacaagttaacaactaacacaaacgaaacttgggaagcaaaataggtgatgtataaacacaggatacaaaagaaaacttacagcatcttgcactagaaaacactacctattttcatagaagccctaattttgggcagtagtgcctcttggaagttgcccttctcatgggcaggtatcagctcwatattcagagcagtcgttccacactagaccactttccacagtgctctgaatcagaaagccaagagtgttgcatgggagtctgccagaaatactaagagctactatctgcccactagatgaaaatgttgctttgggttgaaagacacctaaagaactacttccaacctccctgctgtaggcaggaacaccttacacttaatacaggatgtggcagaacacagccactgagtttgcaacatgttttttacttctctctttgcaacatgctctaggtgaccctgctagaagcaggggggttgg

SEQ ID NO: 49830 - DNA, 599 bp, Chicken  19866894296124_1
  misc_feature (1)..(43): n is any nucleotide
nnnnnnnnnnnnnnnnnnnnnnnnnnnnnnnnnnnnnnnnnnngaatcttccggatgccttagatctgtaacagaagaaggcagcgaaagggcttagatagagaaccatcttatcctgcaattccttttcttttttattgtaggtatagcaatgctgcttactcttgtgatatgtacctcagaggagtctgtactattaatgtctgtgagccagtctagtgctgggaaatttggtaacatgaacttgcagaacagttacacgtgttgctgtgttgaggctactcatccctctgtgcctaygactgtcaattcctttaaatgattacagcttagcttaagatatgtcttgttttcacagatcaggaacgagtggttgctgtaaaatcattcatgctgtcattagaaagtccagaagaaaactctctaaccccagcatggtgttagaaagtaggcattcctttattcrcgatatgtactgggtgacttggcaaatcaagcgtgcgctctcagagttcaggttctacatatacacagttaagacatatgtatgtgatatatttcctggaaatggtatacatattcattgttttccaakaact

SEQ ID NO: 49831 - DNA, 600 bp, Chicken  19866894296124_2
gtgatatgtacctcagaggagtctgtactattaatgtctgtgagccagtctagtgctgggaaatttggtaacatgaacttgcagaacagttacacgtgttgctgtgttgaggctactcatccctctgtgcctaygactgtcaattcctttaaatgattacagcttagcttaagatatgtcttgttttcacagatcaggaacgagtggttgctgtaaaatcattcatgctgtcattagaaagtccagaagaaaactctctaaccccagcatggtgttagaaagtaggcattcctttattcrcgatatgtactgggtgacttggcaaatcaagcgtgcgctctcagagttcaggttctacatatacacagttaagacatatgtatgtgatatatttcctggaaatggtatacatattcattgttttccaakaactcattaatatatgctaatatcctatacaggccttcatttgtcagaagactgctgacttcatcccttttatttcatcttcagcttaatcacagtgacctttggctgatctccagctgttttccyccagtttgacaaatttccattgcttgttatgccataatgagcaac

SEQ ID NO: 49832 - DNA, 583 bp, Chicken  19866894296124_3
cctaygactgtcaattcctttaaatgattacagcttagcttaagatatgtcttgttttcacagatcaggaacgagtggttgctgtaaaatcattcatgctgtcattagaaagtccagaagaaaactctctaaccccagcatggtgttagaaagtaggcattcctttattcrcgatatgtactgggtgacttggcaaatcaagcgtgcgctctcagagttcaggttctacatatacacagttaagacatatgtatgtgatatatttcctggaaatggtatacatattcattgttttccaakaactcattaatatatgctaatatcctatacaggccttcatttgtcagaagactgctgacttcatcccttttatttcatcttcagcttaatcacagtgacctttggctgatctccagctgttttccyccagtttgacaaatttccattgcttgttatgccataatgagcaactttttatcttggtacactgtaactcaaaacaattcatatgaaacccaagaaaaaattccttgcacctggtggatacagagaagttcccagtatatactatatagagaaaaag

SEQ ID NO: 49833 - DNA, 457 bp, Chicken  19866894296124_4
ctctaaccccagcatggtgttagaaagtaggcattcctttattcrcgatatgtactgggtgacttggcaaatcaagcgtgcgctctcagagttcaggttctacatatacacagttaagacatatgtatgtgatatatttcctggaaatggtatacatattcattgttttccaakaactcattaatatatgctaatatcctatacaggccttcatttgtcagaagactgctgacttcatcccttttatttcatcttcagcttaatcacagtgacctttggctgatctccagctgttttccyccagtttgacaaatttccattgcttgttatgccataatgagcaactttttatcttggtacactgtaactcaaaacaattcatatgaaacccaagaaaaaattccttgcacctggtggatacagagaagttcccagtatatactatatagagaaaaag

SEQ ID NO: 49834 - DNA, 600 bp, Chicken  19866894296132_1
tgccggcaacacttccttcccttcctgggttaaacaccataatctttgtttagctactgcatgcaaatccataaatatcgaattttgatttcctctccagcagtttaaaggattatatctgcaatatttttagcccagatcatttccttggtctgatttccaggctgtgcccaccatgaggcgtgggcaggtgtggtgaggcacacagtggtcccctctcagggggcgaagagctgctgaatggccatgcccagaggtgcaccacatgtctccgtccctctgcactgggagcagttgggyaaaaagctgtgatttaccatcagctgctttgtttcccactcagagcatctgtaggactgggggcatgttgtgcagctccacatgcwgcagctgtgcacatcccttcacctccagcacaaggtccccagcccaaggaggagtgttatctcccctgcttcaaagrcagaacctgcagcacagaaacccccttgctcctttcagtgggggatttagctaatgctctctccaatccattttgcttctctgcagcttagcgtggatttccatccccatctcgtcagcccacttagggcatgcagc

SEQ ID NO: 49835 - DNA, 600 bp, Chicken  19866894296132_2
gatttcctctccagcagtttaaaggattatatctgcaatatttttagcccagatcatttccttggtctgatttccaggctgtgcccaccatgaggcgtgggcaggtgtggtgaggcacacagtggtcccctctcagggggcgaagagctgctgaatggccatgcccagaggtgcaccacatgtctccgtccctctgcactgggagcagttgggaaaaaagctgtgatttaccatcagctgctttgtttcccactcagagcatctgtaggactgggggcatgttgtgcagctccacatgcwgcagctgtgcacatcccttcacctccagcacaaggtccccagcccaaggaggagtgttatctcccctgcttcaaagrcagaacctgcagcacagaaacccccttgctcctttcagtgggggatttagctaatgctctctccaatccattttgcttctctgcagcttagcgtggatttccatccccatctcgtcagcccacttagggcatgcagccctctgccagcctgcagccattccgacctctgagctgcctggcggggctgcgatgcagagcactttgcgatgtgcactgggggaac

SEQ ID NO: 49836 - DNA, 594 bp, Chicken  19866894296132_3
gctgtgcccaccatgaggcgtgggcaggtgtggtgaggcacacagtggtcccctctcagggggcgaagagctgctgaatggccatgcccagaggtgcaccacatgtctccgtccctctgcactgggagcagttgggaaaaaagctgtgatttaccatcagctgctttgtttcccactcagagcatctgtaggactgggggcatgttgtgcagctccacatgcwgcagctgtgcacatcccttcacctccagcacaaggtccccagcccaaggaggagtgttatctcccctgcttcaaagrcagaacctgcagcacagaaacccccttgctcctttcagtgggggatttagctaatgctctctccaatccattttgcttctctgcagcttagcgtggatttccatccccatctcgtcagcccacttagggcatgcagccctctgccagcctgcagccattccgacctctgagctgcctggcggggctgcgatgcagagcactttgcgatgtgcactgggggaactgcaccctgcagccaggccctgggggcttttgcaggagaagtggatctgaaagcattaagatttctgcatt

SEQ ID NO: 49837 - DNA, 599 bp, Chicken  19866894296143_1
  misc_feature (1)..(143): n is any nucleotide
nnnnnnnnnnnnnnnnnnnnnnnnnnnnnnnnnnnnnnnnnnnnnnnnnnnnnnnnnnnnnnnnnnnnnnnnnnnnnnnnnnnnnnnnnnnnnnnnnnnnnnnnnnnnnnnnnnnnnnnnnnnnnnnnnnnnnnnnnnnnnnntgggatctgaaaggggattagtacttcagtgacactagaaatacatcattaaaatcaattagtggtcaagtaaccagtaatcagtgcagtgagaatggccctgatttgataggatttgaaaatggtaatcttttggacactatgcaggttaacagtrcaaatgctatatttagtttttccatttggcaggttttggacagacagctaaaaagttttgtcttagagaaggggcctttagattttgcacactcaagtaaaagcccatggctgatctgctgcaagctgtgctgtgcttttcctttgaaaagagataatgcctgactttgaataggattgctacaggcattttgggcaccactgctggggcaaatcctgcaagctgtctttaacagaaactgcaacatggctgtaggcatgaaggataactcacagagcagtctgccattcctgtaacac

SEQ ID NO: 49838 - DNA, 377 bp, Chicken  19866894296143_2
acaggcattttgggcaccactgctggggcaaatcctgcaagctgtctttaacagaaactgcaacatggctgtaggcatgaaggataactcacagagcagtctgccattcctgtaacacttccccagccctcagactgctatacgtgttggcagggtccactactcaccttctcgaaggagagatgcgggttgtagtaattaacgtatggcatggtcccaacaaacggcagtggcattgggcctggggggtaacggctccacttctttctgcgcttcatgaaatcaacaagtatggtaaaracggtaagaaaaactcccagtacagagatgttgctccaagatgacagccacaggagcagtgtcattttgtagtttgt

SEQ ID NO: 49839 - DNA, 600 bp, Chicken  19866894296146_1
gtgactgtgggagccaattctccttcactcaacaaaaggaaaagtttttccttaagagaagttctcactgctgagagtgcagtataaatgaatataaaatgtcttcaaaatgatacatttgaaattgaattattcgacctgtacagaagtatgccaaactccaaacaggatggaggatgtctaccaaagctacttttttgcactacttgaaatagaagtattgctaagtacttaactgttgcaacctatccatttgaaataggtctgattattgatgcttttggtgaactaagagaccarcaagaacaagtgagagaagatatggaggtatgaaaagaacatcacatttttccatttctcttactaatctagatttttacagttataattgatttgtaaacacaaattgtgtttccagaccaagtgctttatttgtggaattggcaacgactattttgacacaatcccacatggctttgaaacacatactctgcaggaacacaacttggcaaactacctgtaagtatattttactattggaattattataataagacctttcagctccaaagcaatttagaagcacacatttttgtgtgc

SEQ ID NO: 49840 - DNA, 525 bp, Chicken  19866894296152_1
ataaaaccgaaaagctatgacttttgcttctattaaacatcatgtttagacaaatggttgaaatttaattgtcagattctgcttcttaaatacattgacagctctcattaaacttgaaggcagccacatgctagcacaatggggattataacatttggctgaaacttaaaaatattgtggattaaaaggattgtgagttgcactaagcagcattatcttcttacaaaggaacaaaatgagctgcacccatactgtagtcttgcttttatttaggatttttcttcagtggattcttcaggratttgatctgcgttgaaatcaaggatatttttatcttgcaaatatatagaagaaacttttagcatacattttccagatttttttttttgttattattattattgatctatcttgcattttacaaatcaagtgtctttcatagattgtaaagggttttgttttatggcactcaggtatatttttcctgaagaaggactgtggcatgtgcaaggaacccataaaaag

SEQ ID NO: 49841 - DNA, 600 bp, Chicken  19866894296158_1
gctctcaccaaagacaactgtgcttgttttcaagtattctgggttactaggcacctcaagctgcataccatacaaagcatacactgcaatgcaaaaaaagggaagtctgatacaccactaacaaacaacagcaattaattgtaaaaacgaacagcagcgggcagttgaaccatcaaaagtttctgtgtacagctgtacaattaaaattacctgtataaaacagttccagtatggaacaagcagtgtttttatacagcactaagcagattttaaaatgatcggcatgtaagatgctcaaartgaaggggaaaaaaaagaaaaaaaatggaaatcctttaaaaaaattattacatcaagagatttatgcataatattattttctcctcacagccccaaaagttcaaaacactggagattaccgttggctcagtgttgrgtgttgtttcaagtgctggaaccaagtgttccttataacactgcgcagttcatgattgtggcgagctgacaaaacacctacaacaacatcataatgtttcagcttccactgaggaaagaaggccagaggacctagaaatataaagtaagaacagatacattata

SEQ ID NO: 49842 - DNA, 544 bp, Chicken  19866894296158_2
aattgtaaaaacgaacagcagcgggcagttgaaccatcaaaagtttctgtgtacagctgtacaattaaaattacctgtataaaacagttccagtatggaacaagcagtgtttttatacagcactaagcagattttaaaatgatcggcatgtaagatgctcaaartgaaggggaaaaaaaagaaaaaaaatggaaatcctttaaaaaaattattacatcaagagatttatgcataatattattttctcctcacagccccaaaagttcaaaacactggagattaccgttggctcagtgttgrgtgttgtttcaagtgctggaaccaagtgttccttataacactgcgcagttcatgattgtggcgagctgacaaaacacctacaacaacatcataatgtttcagcttccactgaggaaagaaggccagaggacctagaaatataaagtaagaacagatacattatatgcacaattctgagctggaagcagtaattaaaatgcacatcaaaagcaagagtactgggtacttgaaacactaaaaacaa

SEQ ID NO: 49843 - DNA, 600 bp, Chicken  19866894296161_1
tgaaggcatgcactgaatctctggggagcagtcctcaacacggaccagccttgtgtgtgcgcttgctctccctacctctgataacacttgcgttattgtagaagcagacaggcttacaggtttgcttctcactgctttggattaaaaaaaaaaagtatgtttttttgttgttttttgcttggggtgttgggttgttttttgtttttttgttttttttttttttgctgttaggcagataggagcttctcctgctcttgtcagttatttcagagaagttactggaggaaaatacggcatttstacaatctgaattactgaatgttaccacaatctccagaaaacaaaaactactgggtacttaggtttctataggctgtttgtgattcctcatacattaaaactctcagctgcaaagatgaatagaaaggcatcgctaagccattaaagracaaaagtgtttagggaattttcaaaggcagaaagagcactcagaggactcgcgattcctttaggcagttaaacagtccttatggccgttcccattcatgacaatgtcctttctagttactgaaataccgtgattctgttatcaaggtgaca

SEQ ID NO: 49844 - DNA, 600 bp, Chicken  19866894296161_2
aaaaaagtatgtttttttgttgttttttgcttggggtgttgggttgttttttgtttttttgttttttttttttttgctgttaggcagataggagcttctcctgctcttgtcagttatttcagagaagttactggaggaaaatacggcatttstacaatctgaattactgaatgttaccacaatctccagaaaacaaaaactactgggtacttaggtttctataggctgtttgtgattcctcatacattaaaactctcagctgcaaagatgaatagaaaggcatcgctaagccattaaagracaaaagtgtttagggaattttcaaaggcagaaagagcactcagaggactcgcgattcctttaggcagttaaacagtccttatggccgttcccattcatgacaatgtcctttctagttactgaaataccgtgattctgttatcaaggtgacaccacagtgtctgtcttggttcagggcagcgctgtgagtgatagacgctttagaaatattcagaaaatgctggcaactgccctcctgtgaacccactgttgtagatcattgctgtcaagaaatacgatttgtcttaattgtttgggttt

SEQ ID NO: 49845 - DNA, 600 bp, Chicken  19866894296167_1
cagctttatgtttctttttttttttttttttccagttagtgtttgttgctgacaacttcagcattatgggaactattaataatgaacctaagagagaattaaaaaaatatcagaactgaaaaatgtaatagatctaagcagggaaaaaaaagaaataccaaaacaaccaacaaaaacacaaaaaacccacaatgtctgctaaccttattgctaataagttttaatcaaatccagaacattctctgatagatgaggttaattgtattgttgatcatatcctcctatgtcccttctccaagwagaaaattccatgctcattctaatttgcaaagagttcactcttcctaccaatgagagaagcattcctctcctgaaaactttatcaaagtcactgtatataaggctctgtaggaatctgcaagggttttacctgagatctgtaccaggaccagctcaggtagacctcctgttctactttcaacaagaggcatgattaaagctttgcggtagctgggactgctgtagttygagaggacagacaagccaagcctagaggcttctttctctgcctggagtttatcaattaacttcaagcttttt

SEQ ID NO: 49846 - DNA, 600 bp, Chicken  19866894296167_2
atccagaacattctctgatagatgaggttaattgtattgttgatcatatcctcctatgtcccttctccaagwagaaaattccatgctcattctaatttgcaaagagttcactcttcctaccaatgagagaagcattcctctcctgaaaactttatcaaagtcactgtatataaggctctgtaggaatctgcaagggttttacctgagatctgtaccaggaccagctcaggtagacctcctgttctactttcaacaagaggcatgattaaagctttgcggtagctgggactgctgtagttygagaggacagacaagccaagcctagaggcttctttctctgcctggagtttatcaattaacttcaagctttttttttttgttgcagttctagctggaagcttcatttgaacttcctccgcaaactttaatttccatttgatcttacagagacaccatcaaatagtttgggttctataaggctaagagataactttattgctgtgtttcataccaaacctgaagaaaacattcactgattgctgaaagatgatattcacggagttttttaaaaccacaatagaggtaggattatttacatat

SEQ ID NO: 49847 - DNA, 600 bp, Chicken  19866894296170_1
gactgatagaatttggctattattgtatcatttattctgggttcagagtattcgtacaagagatgttagaaacagaacaccttcaggaacagaaatccctgaggcctcatttgtttttatttcaataaccgttcctccttcctgccgtgctctccttgccaggtgcattgcaacaacatgttttccaagggggtgaagatcttccagaaggtggagtgtctgttcaaaccacgcctgattgcagactgggagcctgaacccgttggtgtggcgacagtcctggatgacaaaaatcccagygctaggtttgtgactgtccccctcaaccagcatgtgggtaaagccatgctgtgccgcttctactttgctgacacctggatgatgatcagcgagatctcctttcagtcaggtgagtgttcctacagtcaggcagatcttgggaagggtgaggagaggagggatgggttggaggtgcaagatgtggggttaatgtgagcgtaaggcactgtggggctgcgcggtggggaggaggttacaaagagttggaagggcaatgcatgggcaggaaagtcaggtctacagaggatgcttttaagctgt

SEQ ID NO: 49848 - DNA, 599 bp, Chicken  19866894296172_1
  misc_feature (1)..(27): n is any nucleotide
nnnnnnnnnnnnnnnnnnnnnnnnnnnctggatgaaatctgtcagagcacgcctagagtgcgcggatgccaacaccaaagagccagctgctcggggacagtaaacaccatttcggctgctggagggcaagcagcacagccaggcagccacaggagccagcagctctgtgcctcagcctcttccacacgtggttaggggtgagggctgccaaggggacagtggcagtaggacaaagaccagaggaagacagaacagggaggtatgaaggaaagaagttaatgcatcacacagccctgcacyggctacacacaacaggacatacacagcatatctgtaccacctcagggctgtgccacatgtgagatacacaacatccatagcacaaataacacatgctttacaaactcagtacaaatacactgcatagcacattcacgctccctggcctctctccccttcattaacaagtaccaaacccactgcaaactgctgcctctcactctcaactcccagcaaccgttgtgcctyactgctrtagaagggtgcactcaacaccaccaccaaaccccaaactagttacaaaatgaaatcacagggtg

SEQ ID NO: 49849 - DNA, 600 bp, Chicken  19866894296172_2
gacaaagaccagaggaagacagaacagggaggtatgaaggaaagaagttaatgcatcacacagccctgcacyggctacacacaacaggacatacacagcatatctgtaccacctcagggctgtgccacatgtgagatacacaacatccatagcacaaataacacatgctttacaaactcagtacaaatacactgcatagcacattcacgctccctggcctctctccccttcattaacaagtaccaaacccactgcaaactgctgcctctcactctcaactcccagcaaccgttgtgcctyactgctrtagaagggtgcactcaacaccaccaccaaaccccaaactagttacaaaatgaaatcacagggtgagtgctgccatgcgtaaagtacaaccaaccactgcagataaggatgcaatacgctgattccattaggctacatttcttccaaggagatgctgcctacagattatgccagatactgcaaccaagaattttacttctacatacactgcacaccgcttgaacaagcggcacagctttttgtattcaaccatttagaaccataatatatttttagagtgaccaaagcaaaacc

SEQ ID NO: 49850 - DNA, 600 bp, Chicken  19866894296172_3
accagaggaagacagaacagggaggtatgaaggaaagaagttaatgcatcacacagccctgcacyggctacacacaacaggacatacacagcatatctgtaccacctcagggctgtgccacatgtgagatacacaacatccatagcacaaataacacatgctttacaaactcagtacaaatacactgcatagcacattcacgctccctggcctctctccccttcattaacaagtaccaaacccactgcaaactgctgcctctcactctcaactcccagcaaccgttgtgcctyactgctrtagaagggtgcactcaacaccaccaccaaaccccaaactagttacaaaatgaaatcacagggtgagtgctgccatgcgtaaagtacaaccaaccactgcagataaggatgcaatacgctgattccattaggctacatttcttccaaggagatgctgcctacagattatgccagatactgcaaccaagaattttacttctacatacactgcacaccgcttgaacaagcggcacagctttttgtattcaaccatttagaaccataatatatttttagagtgaccaaagcaaaaccaaattta

SEQ ID NO: 49851 - DNA, 600 bp, Chicken  19866894296174_1
cagggattagccatcatcattaataacagagttgtgctagtttacacaagcacagattattctactgtaataaatatcctttgttcagtgagaacacgtatccattaccattcttcacagcaacatgtataacttccaaatagctgctatccaaatagactttcaactctacttcaaattatctggacagctgcctcaaatatttttctcccctagagaagcattgcaagtaaagttggatgattattataaacacatcctcttaatttctcactatgatatcaaaaaaatatttatatyaactacatcttcttcttttgagttcttatctcctttgtaattgtacttaacatgttcacagtcatttttagaaatttataaatttaagaaaatacaacagtatttataaaatctaaatattcatgactgatctcaaatgaactggagtttttgtagaaaaaaatgaaaaaaattcattaatttcattaattaatgaaataaagcttttcgctgtttttctaagttctatctctaatgtctgagccacggtgattggagaggctttagagagcctgagaaagacaatctagtaactccatt

SEQ ID NO: 49852 - DNA, 600 bp, Chicken  19866894296174_2
ttcttttgagttcttatctcctttgtaattgtacttaacatgttcacagtcatttttagaaatttataaatttaagaaaatacaacagtatttataaaatctaaatattcatgactgatctcaaatgaactggagtttttgtagaaaaaaatgaaaaaaattcattaatttcattaattaatgaaataaagcttttcgctgtttttctaagttctatctctaatgtctgagccacggtgattggagaggctttagagagcctgagaaagacaatctagtaactccattgagagcacaccrttgagagtgtrtagaactagacagcacagatccaaaaaatattgatatcatattttgttgccccacagaaattttcactttagaaatggtgctattaaatgcagttgctcccttactgagtttctcttaattagttatcttaatctccaagtctgacaagtctagattttctttttggaagacgtggtactgtgactgtcgagccatgtttaggttacatgcccaggagacataaatcccagttgcctgctcaagttcctactagttcccattccagataggggacagttccatggatga

SEQ ID NO: 49853 - DNA, 600 bp, Chicken  19866894296174_3
tcttatctcctttgtaattgtacttaacatgttcacagtcatttttagaaatttataaatttaagaaaatacaacagtatttataaaatctaaatattcatgactgatctcaaatgaactggagtttttgtagaaaaaaatgaaaaaaattcattaatttcattaattaatgaaataaagcttttcgctgtttttctaagttctatctctaatgtctgagccacggtgattggagaggctttagagagcctgagaaagacaatctagtaactccattgagagcacaccrttgagagtgtrtagaactagacagcacagatccaaaaaatattgatatcatattttgttgccccacagaaattttcactttagaaatggtgctattaaatgcagttgctcccttactgagtttctcttaattagttatcttaatctccaagtctgacaagtctagattttctttttggaagacgtggtactgtgactgtcgagccatgtttaggttacatgcccaggagacataaatcccagttgcctgctcaagttcctactagttcccattccagataggggacagttccatggatgatacagaagcaa

SEQ ID NO: 49854 - DNA, 600 bp, Chicken  19866894296174_4
cgtggtactgtgactgtcgagccatgtttaggttacatgcccaggagacataaatcccagttgcctgctcaagttcctactagttcccattccagataggggacagttccatggatgatacagaagcaatcaatcatcccctacacactcctcatagactacatgatacctaggaaattaaggatttattacttaccaaacaagccagatcttgacttaagggttgcatctgagatgatgcaactgcagcctactcttacaccacagacataattgtgaattcctctttccaagtcacartgttgcttatgtttcatttcccaaaaagccatgttgtatttctttgggctacaaggagaagactcattgcagatgttcacatgaaggctaagagcagtgttctatgtttgtagtcattgaagaaaaacagtcatccctatagcaagattaatcttatctaagaaattatattgcctaaatattctgtctmtattgcttacagcatagtttgtatgcaagraactttctcacgtgaacatctgtactgtagatgtttagcatgtggttaagtggatctcaccagaggtctcagaagctgca

SEQ ID NO: 49855 - DNA, 600 bp, Chicken  19866894296174_5
acttaccaaacaagccagatcttgacttaagggttgcatctgagatgatgcaactgcagcctactcttacaccacagacataattgtgaattcctctttccaagtcacartgttgcttatgtttcatttcccaaaaagccatgttgtatttctttgggctacaaggagaagactcattgcagatgttcacatgaaggctaagagcagtgttctatgtttgtagtcattgaagaaaaacagtcatccctatagcaagattaatcttatctaagaaattatattgcctaaatattctgtctmtattgcttacagcatagtttgtatgcaagraactttctcacgtgaacatctgtactgtagatgtttagcatgtggttaagtggatctcaccagaggtctcagaagctgcataaatagtaggctcccatgaaagcaagttctgagcaccrcattaagtaccaaactaccttgtgacacagaggcttcagtgtttcttggagatatcagtttgactgtcatacatctctacactctggattctactgtatcactgatggaatataaattcttcttgtctacattaatcagtcttctcccagc

SEQ ID NO: 49856 - DNA, 592 bp, Chicken  19866894296174_6
gggttgcatctgagatgatgcaactgcagcctactcttacaccacagacataattgtgaattcctctttccaagtcacartgttgcttatgtttcatttcccaaaaagccatgttgtatttctttgggctacaaggagaagactcattgcagatgttcacatgaaggctaagagcagtgttctatgtttgtagtcattgaagaaaaacagtcatccctatagcaagattaatcttatctaagaaattatattgcctaaatattctgtctmtattgcttacagcatagtttgtatgcaagraactttctcacgtgaacatctgtactgtagatgtttagcatgtggttaagtggatctcaccagaggtctcagaagctgcataaatagtaggctcccatgaaagcaagttctgagcaccrcattaagtaccaaactaccttgtgacacagaggcttcagtgtttcttggagatatcagtttgactgtcatacatctctacactctggattctactgtatcactgatggaatataaattcttcttgtctacattaatcagtcttctcccagcaagggcagcaggaccagaggca

SEQ ID NO: 49857 - DNA, 473 bp, Chicken  19866894296174_7
ttctttgggctacaaggagaagactcattgcagatgttcacatgaaggctaagagcagtgttctatgtttgtagtcattgaagaaaaacagtcatccctatagcaagattaatcttatctaagaaattatattgcctaaatattctgtctmtattgcttacagcatagtttgtatgcaagraactttctcacgtgaacatctgtactgtagatgtttagcatgtggttaagtggatctcaccagaggtctcagaagctgcataaatagtaggctcccatgaaagcaagttctgagcaccrcattaagtaccaaactaccttgtgacacagaggcttcagtgtttcttggagatatcagtttgactgtcatacatctctacactctggattctactgtatcactgatggaatataaattcttcttgtctacattaatcagtcttctcccagcaagggcagcaggaccagaggca

SEQ ID NO: 49858 - DNA, 600 bp, Chicken  19866894296175_1
ctgtcactcctgcccgcgctgtaatcacatctttgtcttgctccatagacacctcccaggggcagcctggaaactcagcccttcagcttagtgtcggtccgagctaggatggtcccatcagtcactgccagccacaacacctgggattcccttcagctctgcacatccagcagggctgtgagctccctcctgcagcatcggttgggtcacatcccacaagagctccatgagctccatccctcgaggcggaagagcatcccaccactgctgtgccactgctgtcagctcctcccagcaccwacaacagggacagaaccctccttccatcacccaggagtcagctcaagacccccagacttgttccacctatcggggcagcttcttctggcagtgaaggcagcaagtatggcaagctcctgcttgtgggggaaggctccccggggkggccccaccttaagccccacagacagagcacatgccgacgatgcccactcccctgccagtactcccagcttgatgccccaaatgacatttcccaggaaaagaacagcacagtaaattcaaaggttaaatttgcatatctcccagggctgctgggaa

SEQ ID NO: 49859 - DNA, 600 bp, Chicken  19866894296175_2
gattcccttcagctctgcacatccagcagggctgtgagctccctcctgcagcatcggttgggtcacatcccacaagagctccatgagctccatccctcgaggcggaagagcatcccaccactgctgtgccactgctgtcagctcctcccagcaccwacaacagggacagaaccctccttccatcacccaggagtcagctcaagacccccagacttgttccacctatcggggcagcttcttctggcagtgaaggcagcaagtatggcaagctcctgcttgtgggggaaggctccccggggkggccccaccttaagccccacagacagagcacatgccgacgatgcccactcccctgccagtactcccagcttgatgccccaaatgacatttcccaggaaaagaacagcacagtaaattcaaaggttaaatttgcatatctcccagggctgctgggaagagccagccgctagtyctgagatgggctgctgccagcctgccatgcagggaatacccaccttgcacccakctgggccgcccatggggaccccttgcacagcaaacccgggttctgagagggacaaaagtgaaggaccacagcag

SEQ ID NO: 49860 - DNA, 460 bp, Chicken  19866894296175_3
cctccttccatcacccaggagtcagctcaagacccccagacttgttccacctatcggggcagcttcttctggcagtgaaggcagcaagtatggcaagctcctgcttgtgggggaaggctccccggggkggccccaccttaagccccacagacagagcacatgccgacgatgcccactcccctgccagtactcccagcttgatgccccaaatgacatttcccaggaaaagaacagcacagtaaattcaaaggttaaatttgcatatctcccagggctgctgggaagagccagccgctagtyctgagatgggctgctgccagcctgccatgcagggaatacccaccttgcacccakctgggccgcccatggggaccccttgcacagcaaacccgggttctgagagggacaaaagtgaaggaccacagcagtggatgaagctttggccatgaatctgcagaag

SEQ ID NO: 49861 - DNA, 406 bp, Chicken  19866894296175_4
cggggcagcttcttctggcagtgaaggcagcaagtatggcaagctcctgcttgtgggggaaggctccccggggkggccccaccttaagccccacagacagagcacatgccgacgatgcccactcccctgccagtactcccagcttgatgccccaaatgacatttcccaggaaaagaacagcacagtaaattcaaaggttaaatttgcatatctcccagggctgctgggaagagccagccgctagtyctgagatgggctgctgccagcctgccatgcagggaatacccaccttgcacccakctgggccgcccatggggaccccttgcacagcaaacccgggttctgagagggacaaaagtgaaggaccacagcagtggatgaagctttggccatgaatctgcagaag

SEQ ID NO: 49862 - DNA, 600 bp, Chicken  19866894296187_1
cttttcaacccaggccattctatgattctatgactatcctggcacagtggcagtaggtagagtatacctgctgtgagccatccgcacggtctctaagcagagtcagcctgggactatacccgggtcaggttttacttggcagcaggtctgcctgctccttctgttttgtcagtaactcctttcagttccttctggagttactggtacgcctttcacacttctcagcctatctgggtccaacaggacttcctagtgaaagtgtgactataatcagctttcaggtttaaactagctcctcaygttgtatatggttccagtcaggccaataacctgcccatatgtgagggtcccatgcataaatcacctctagagacccatttaggactggaagactttccagtactatgtagggttttttttttatgttttccaacgaatttcagattttttgcctttggcaatacacagttggttatatttcacagaacatctcaaatggatcccatacaaccactgtggattgttagtttttttcacctgtatgtgtcctattcacctggagtactgcgtccggatgtggagtcctcagtacaggagagc

SEQ ID NO: 49863 - DNA, 600 bp, Chicken  19866894296187_2
agtatctaaacgggagctacgggaaagaagggggcagactcttcaggagtatctgtggtaataggacaaggggaaatggtttcaagcttaaagacgcaggagatttaggttggacataaggaaaaagtcttttacagtgagggtggggattggaccagatggccttaaaaggtcccttccaattaaggattctatgaccctataggcagcttctcagcaaagcataccaagtttcttcatgcttaaaaggtgggtccaaggcatggtcattttgaaaggctttcaaaatgtttggtaccraatttcatttccagctccttcctacatctttcatttggattatatcttcttttggttctatcatctctcaggccggatttgctgtctcatgtttggactttgcctgtctcacaaagatgcaatcctgctgctctcagtggtctgatttgttttatggtaaggccaagtgagcttttacttcaattcagggaagaaaaaaaagtctgggaaagaatgtaaaaagtaaacatcgaattcctataatcagcaacgctgtaagtgccagactatactgagcatacacatgggtttgattttcat

SEQ ID NO: 49864 - DNA, 600 bp, Chicken  19866894296194_1
ttttcaacccaggccattctatgatttaactaatattcctcatgtcattaacaaaataatagcccttgtcaaccaggacagaagtttccaggaattctagccttcttttaaagtccaggccaagcccagagaggaagcagaaaacaaggatcgtactgcagtgtatggcatatcctacagcatgaaagtttcaggacaaccaagcctaaggcttgtggcttactattttccacattatatactttgccataagggactaaatatttaagagtcagaacatcttttcagaatagtagacgyagtatggtggagccttcaaatcaaagattagagaagctcrgcattactcttggaaaataactattcagtgccttaataaaatttcagaaaaataagtgcttaaacatttctgtatttttttaattcaattggtgggaattcctggctagctaaatcctgtgtaactaactctgttttagggtgtctacatgggatggttaactgcttctggaagtggagcacgcatacttggaccggtttttgtgagccaaatatacactcatttgggaccacgctgggcatttagcttaatatgtggag

SEQ ID NO: 49865 - DNA, 600 bp, Chicken  19866894296194_2
catgtcattaacaaaataatagcccttgtcaaccaggacagaagtttccaggaattctagccttcttttaaagtccaggccaagcccagagaggaagcagaaaacaaggatcgtactgcagtgtatggcatatcctacagcatgaaagtttcaggacaaccaagcctaaggcttgtggcttactattttccacattatatactttgccataagggactaaatatttaagagtcagaacatcttttcagaatagtagacgyagtatggtggagccttcaaatcaaagattagagaagctcrgcattactcttggaaaataactattcagtgccttaataaaatttcagaaaaataagtgcttaaacatttctgtatttttttaattcaattggtgggaattcctggctagctaaatcctgtgtaactaactctgttttagggtgtctacatgggatggttaactgcttctggaagtggagcacgcatacttggaccggtttttgtgagccaaatatacactcatttgggaccacgctgggcatttagcttaatatgtggagtggttgtactctctctgttagtcttggagatagtatacaa

SEQ ID NO: 49866 - DNA, 600 bp, Chicken  19866894296199_1
cctggtaactaatgagaaagatggagacagcacaatcatttgttacttaggaacattttaaaaacgcgtttacttgaacaattcatttttctactgtagatcctttttaattttgaagacctgttttaaaaggtttcacaattatatctgggaataaaaaaatagtcactgtcaacctaagctattggatatacaaacaagtactatgaagacaaatgacatccagatagtagcagctgcaaaaaataaaatacgatgaagatcacttcttcattcacagatcatctatattagattttwaaaaataactcccataagaggaattatcagatctcaagttagagaaaaataaccatccttggtgtgttgagaaacagctctgcagaaccctacccaatccccaggaactgcagccagttgtcattccttctgcctgagaagggagagatgatattgcgtgaccaaaattgttttccccaaatgagaacctgatgttaccctttccacagaaaacagcattaaataaaactgaggcgtgagctccatgcagcagttttacagattcccaggtcagaaatatacaataagcagtaaagaaaa

SEQ ID NO: 49867 - DNA, 600 bp, Chicken  19866894296203_1
tgtgaaaacatatatttttagatacagaaatgcaaatgtgatgcaaaagagtggcagcactctgtaagtatatgtttagatgaatcttcaaacataagcagatgtgtttcctgggaatatatattattctataggaccagagaatgtacagtttcacagccctcgttggagactggttaatgcacccagcagccttaatttctaaaggttgtctctaaagatttaattgaattttgaaaagggtatgtgagcactcctggaaacatcattcacctattaaggggttgaattcagcagccyagctgaagtacatgggactttctcagtgacaaccaggctgcaagacctcatcccagcgtcaggtaagaatgtgtgccaaacacatgcctcagcttttmctgtttggggctttctcttccctccctcagccacttcagatctgtgacagtgactggcatttagaaatggggaaagacaagaggcaggtgtcccctgtctcaatggcagtgacgtcaatggctcacccaggatggctggctcaccccagccacgtacccacactcaggatgtatccaaccaccyggacaagcagcaggagca

SEQ ID NO: 49868 - DNA, 600 bp, Chicken  19866894296203_2
cagatgtgtttcctgggaatatatattattctataggaccagagaatgtacagtttcacagccctcgttggagactggttaatgcacccagcagccttaatttctaaaggttgtctctaaagatttaattgaattttgaaaagggtatgtgagcactcctggaaacatcattcacctattaaggggttgaattcagcagccyagctgaagtacatgggactttctcagtgacaaccaggctgcaagacctcatcccagcgtcaggtaagaatgtgtgccaaacacatgcctcagcttttmctgtttggggctttctcttccctccctcagccacttcagatctgtgacagtgactggcatttagaaatggggaaagacaagaggcaggtgtcccctgtctcaatggcagtgacgtcaatggctcacccaggatggctggctcaccccagccacgtacccacactcaggatgtatccaaccaccyggacaagcagcaggagcactgcaaggaaggcaatgtccctttgcagagggacaggacataccaggaggagcactgcattctgagcaaggattgaggcactcacacctaccaatgca

SEQ ID NO: 49869 - DNA, 568 bp, Chicken  19866894296203_3
ggttgaattcagcagccyagctgaagtacatgggactttctcagtgacaaccaggctgcaagacctcatcccagcgtcaggtaagaatgtgtgccaaacacatgcctcagcttttmctgtttggggctttctcttccctccctcagccacttcagatctgtgacagtgactggcatttagaaatggggaaagacaagaggcaggtgtcccctgtctcaatggcagtgacgtcaatggctcacccaggatggctggctcaccccagccacgtacccacactcaggatgtatccaaccaccyggacaagcagcaggagcactgcaaggaaggcaatgtccctttgcagagggacaggacataccaggaggagcactgcattctgagcaaggattgaggcactcacacctaccaatgcaatgctagtactgggtatttgcatagcatacaaagatgctcaaagtgcagtgcggccatttattatttaagctttgggaggcaagtggtgatttggcactgcacatttgcttagaggagatgaggaaatcaaaacaggtagcttgtgtgactc

SEQ ID NO: 49870 - DNA, 600 bp, Chicken  19866894296212_1
gaagaaagtgatctagatgcagaatgactatctggctatgcaacactaagaatacagctattctgactgaataaactgggcagaagaagccaaagacggaatgtaggggatccaacaggtccatagacatgccaacaccaaatattgtcttctcagtctgaggctgttgattatttgtccttttgtttccagggagaaaccggttatcacctttgagaacattttctatcactcttttatttttgcaataaacagagtgcaatgcttaaatccctgtctgcagctcttccttctcatcaygtgaagctccacaaggaatgtgttttttgtttacaaaggtaaggaattaaatacagcttgaccttgtctgccctattccattaagtaccatccgtcagacattagaagcaaagaacagaggaagggtacagtccccaaacacatcaaatatcatttttgcacttaatgctttccctcatttcgatattgactttgcttctttcagcacaagcaatgctcggcagtcctctcacttttcaacatggcttctgaaatcagagatcacatctgcctcccagggcagcagccacagcaccctgc

SEQ ID NO: 49871 - DNA, 600 bp, Chicken  19866894296214_1
caaacagttcccataatgcaggcctattctaaatcacatgctaatcacagcagactcagccacaagaaaggttcccatctcatgcacattgctgaagctcacagaaagctgcaactttcatctgcccatcctcctttcacatacaggccagctgaggatcagccttcacacttttacaactgaacggagtttgaaaattccagctccccccagaagcaaacaattacacacccctccagaggaacgacttccaaatctttctgtagaacaactgtgtcagaagcaaatgtaaagacagcrctgctctgcacctcagggaaaagctctgcaaagcgagcttgaactcactgttagctccgtcagcagtgcacttgcaggtgacagcaaatgctggtaatgccttggggagcgggagaaggaagtcgggggggtttctctgaaaagattttcaccccttttctgtaagaacattaatattacataatttttctgacttcttttattataccacaaggcaacgtgattgaaaatggacaaattccaaaaaagaatgcatgcccactgatatcacagagggatgctttgctgtgatttaatagc

SEQ ID NO: 49872 - DNA, 600 bp, Chicken  19866894296218_1
aaagtaaataatatgtaaaggctgctctgaaagtaatgcctactattttattatgttggtccccctacatcataggcagatgctgctggtatgtcagtagagtttgaacctttctaacaaaattctgttacattttgttgctgtgtggcagatgacagcagaggagcagtctgacacaatgacatctgacatggaagtgcatatgaagcaaaggtgtgtcactgaattcctccatgcggaaaaaatggcactcactgatgtttgctgaacattgttggagaccaaagagtggatatgagygcactgagacagtgggtggtgcgtttcagcagtggtgacaatgggtcaccttcactggtgcacaacatgcaggctctttttcattgctggcaaaaatkcacagctaacactggtggctatgttgaaaaatgatgttttgcaactgmgaattttctctatcaaatagtgttattgttctctttgtatctgttgtagtttccatggaaattaataggcgacattactttcagagtgacctacatatttgagaggtgacgactcaaggccccggttcagtgaacccctaaaacgtctgtgtaa

SEQ ID NO: 49873 - DNA, 600 bp, Chicken  19866894296218_2
agagtttgaacctttctaacaaaattctgttacattttgttgctgtgtggcagatgacagcagaggagcagtctgacacaatgacatctgacatggaagtgcatatgaagcaaaggtgtgtcactgaattcctccatgcggaaaaaatggcactcactgatgtttgctgaacattgttggagaccaaagagtggatatgagygcactgagacagtgggtggtgcgtttcagcagtggtgacaatgggtcaccttcactggtgcacaacatgcaggctctttttcattgctggcaaaaatkcacagctaacactggtggctatgttgaaaaatgatgttttgcaactgmgaattttctctatcaaatagtgttattgttctctttgtatctgttgtagtttccatggaaattaataggcgacattactttcagagtgacctacatatttgagaggtgacgactcaaggccccggttcagtgaacccctaaaacgtctgtgtaaatgaagtcccaattattttaatactctttatgtgaaggagatgagtttgtggtctgctgattcattaggtgataaagtactttcagtcrataaaaatg

SEQ ID NO: 49874 - DNA, 600 bp, Chicken  19866894296218_3
ggcagatgacagcagaggagcagtctgacacaatgacatctgacatggaagtgcatatgaagcaaaggtgtgtcactgaattcctccatgcggaaaaaatggcactcactgatgtttgctgaacattgttggagaccaaagagtggatatgagygcactgagacagtgggtggtgcgtttcagcagtggtgacaatgggtcaccttcactggtgcacaacatgcaggctctttttcattgctggcaaaaatkcacagctaacactggtggctatgttgaaaaatgatgttttgcaactgmgaattttctctatcaaatagtgttattgttctctttgtatctgttgtagtttccatggaaattaataggcgacattactttcagagtgacctacatatttgagaggtgacgactcaaggccccggttcagtgaacccctaaaacgtctgtgtaaatgaagtcccaattattttaatactctttatgtgaaggagatgagtttgtggtctgctgattcattaggtgataaagtactttcagtcrataaaaatgatttagggggccaattacatttgtttaggcatacagggacagaattaa

SEQ ID NO: 49875 - DNA, 600 bp, Chicken  19866894296218_4
gcaaaaatkcacagctaacactggtggctatgttgaaaaatgatgttttgcaactgmgaattttctctatcaaatagtgttattgttctctttgtatctgttgtagtttccatggaaattaataggcgacattactttcagagtgacctacatatttgagaggtgacgactcaaggccccggttcagtgaacccctaaaacgtctgtgtaaatgaagtcccaattattttaatactctttatgtgaaggagatgagtttgtggtctgctgattcattaggtgataaagtactttcagtcrataaaaatgatttagggggccaattacatttgtttaggcatacagggacagaattaaaacttaastagagttaatgatacaaaataaagtttggcaccttaaatatgaaataagatgcacatttttaaattgataccatcatgcactggtaccagaacatttggattttgtttttaaagtcttcatgttaagacagactaagattacatattttacttcatctctaatgttgctcacagtctcatagctctttttgatgttaaaaactatgcatcacccaacagcaatatattataaatc

SEQ ID NO: 49876 - DNA, 600 bp, Chicken  19866894296218_5
tctatcaaatagtgttattgttctctttgtatctgttgtagtttccatggaaattaataggcgacattactttcagagtgacctacatatttgagaggtgacgactcaaggccccggttcagtgaacccctaaaacgtctgtgtaaatgaagtcccaattattttaatactctttatgtgaaggagatgagtttgtggtctgctgattcattaggtgataaagtactttcagtcrataaaaatgatttagggggccaattacatttgtttaggcatacagggacagaattaaaacttaastagagttaatgatacaaaataaagtttggcaccttaaatatgaaataagatgcacatttttaaattgataccatcatgcactggtaccagaacatttggattttgtttttaaagtcttcatgttaagacagactaagattacatattttacttcatctctaatgttgctcacagtctcatagctctttttgatgttaaaaactatgcatcacccaacagcaatatattataaatctataaattaaaacctaaacattataccctaaatatgaagctcagtatttagatctgagatgtttg

SEQ ID NO: 49877 - DNA, 600 bp, Chicken  19866894296223_1
tgctgctggtgccagcaaagcactgtgagggacaggtggctcgggagcaaaaggaggtttttgtaattgcttggcagggcaaagctgtattagagtgcagcagcagttggcagattggattaacgttctcctaggggcgaaatctggcacatgagctgtatgttaatacctggagcctaagttgattctggagctgcatttgtaacaaaaagagcatccactttacctctgccatgtcacagagacataaatactgaagctggcattagaattcctttttggcatcatcagcagaataargctctcataaacataattcagatggatatcttttaatcaagaattattattatgaaataacagagagataatcagtttgtagagtgtgaagtagcagcattaacctacagcactgcagtccatctatttctgtagtggatgcacccatcatactttatttgtgattatcttgcacgctagagatgatactatttgtgaaggagtaattctttggcttagctggttcagaggactttgggccaggagctggaaaattagctaatcccaactcacacaccccatgcatctgtgggagagatt

SEQ ID NO: 49878 - DNA, 600 bp, Chicken  19866894296233_1
cccacataaagcagcctctgccctgacaagcgtacggtgtaattgctgcccaaacacatcccacttcctcgctgcgattgactcataactgcttctgaaaaactcccataggaatattccttgcagaataacaagcagcttgattttttttattttatttttctggcctccatcttgagagacagcagaagatggccccagccaggcgggacccccggggagccgcacctgaggcgctctctgtgcgaggcggggagcaggcagagggcagtgcagccccaccggtacgctgcctgagcrgccgggaagaggcagctgcggggaargcaagaaaacaagaaaatagccggacccagcgaggaaaaaaccgtggcggtgggctggaggaaccttaagcggcacgttcaggccttactccagcccccaagagctctcgatttagccgagcccctgtgccgctgccgcgagcagcccaggcagcagcaaccgccttccgcccattctgaggtaatcccctcactgccaccactacgcatgcgtacgtcccgggaaaaggcgcacggtgcagttggctgcgctacacgcgtacccgcgtcctcc

SEQ ID NO: 49879 - DNA, 600 bp, Chicken  19866894296233_2
caagcgtacggtgtaattgctgcccaaacacatcccacttcctcgctgcgattgactcataactgcttctgaaaaactcccataggaatattccttgcagaataacaagcagcttgattttttttattttatttttctggcctccatcttgagagacagcagaagatggccccagccaggcgggacccccggggagccgcacctgaggcgctctctgtgcgaggcggggagcaggcagagggcagtgcagccccaccggtacgctgcctgagcrgccgggaagaggcagctgcggggaargcaagaaaacaagaaaatagccggacccagcgaggaaaaaaccgtggcggtgggctggaggaaccttaagcggcacgttcaggccttactccagcccccaagagctctcgatttagccgagcccctgtgccgctgccgcgagcagcccaggcagcagcaaccgccttccgcccattctgaggtaatcccctcactgccaccactacgcatgcgtacgtcccgggaaaaggcgcacggtgcagttggctgcgctacacgcgtacccgcgtcctccttgcggtcccatccgggaacgcgatg

SEQ ID NO: 49880 - DNA, 600 bp, Chicken  19866894296233_3
gcagggcgggcggtgaggctgaggccccttcacggagctgcggtagctgctgtgtgtgcggggagggcacccggggctgcccttccatgtggcggcggcctcctatgtgaggccgtgtgtggcggtggggctgcgctgagcctgcggctggaggtgagcctggctccattttccgctgccgttagagggagagttgggatggcagcagccctgctaaaaggagaaaaaacgtatgtaatgccgaccattttttagaaaagcatcccgagatcctcccaggaatacttcattggcgttcgragtcttaacagggatttggcaggcacttaaaatcagcaggtagcaggccggttggttatctaggagctctccaggcctttgtgcaggcgtggggctgctccctggggttggttccgtcccccagcagcgtcgggcggctcggttcggaatgacggcctcagcgtaacgggctgaagcttcagacccactcctaaacgggctctttgtgctgtgccagcttttctcaaggctttgttcaggccctttggctcgccaaatgctcctgcagcatgcacgtaggattccataagagtggttcct

SEQ ID NO: 49881 - DNA, 599 bp, Chicken  19866894296257_1
  misc_feature (1)..(81): n is any nucleotide
nnnnnnnnnnnnnnnnnnnnnnnnnnnnnnnnnnnnnnnnnnnnnnnnnnnnnnnnnnnnnnnnnnnnnnnnnnnnnnnnntaaagaaaatgcacttttgaggaataatttcttagttgaattcagtctgcagtgtcatagaaaatgtatttatttttcattaagacttgctatcttaaaatactttggaagaatctgtttgtacatttgatcccttctgcatgttaaattattagaaagtactgacagcagttcagtatggccatagaggtgggatgaaaactggattgttaacattargatgtcacttgctgtcckcattgaactcgtgagaggacataggttttggacacaaatttgtgatgcttgatcccagagcttgagtttttaatgaaggctatytggaccttgccacaggtgattagtcagcctacctgaaactgtgtgataaaccagattgtgagagcaaccatggagacagtgagcaattaagatagtaatgtggggcaagagttctgaaaggagattargcaaggtttatattaattaggaaagaagtgtttaacagaatacaatgattaagagacacagatctgaag

SEQ ID NO: 49882 - DNA, 599 bp, Chicken  19866894296257_2
  misc_feature (1)..(63): n is any nucleotide
nnnnnnnnnnnnnnnnnnnnnnnnnnnnnnnnnnnnnnnnnnnnnnnnnnnnnnnnnnnnnnntaaagaaaatgcacttttgaggaataatttcttagttgaattcagtctgcagtgtcatagaaaatgtatttatttttcattaagacttgctatcttaaaatactttggaagaatctgtttgtacatttgatcccttctgcatgttaaattattagaaagtactgacagcagttcagtatggccatagaggtgggatgaaaactggattgttaacattargatgtcacttgctgtcckcattgaactcgtgagaggacataggttttggacacaaatttgtgatgcttgatcccagagcttgagtttttaatgaaggctatytggaccttgccacaggtgattagtcagcctacctgaaactgtgtgataaaccagattgtgagagcaaccatggagacagtgagcaattaagatagtaatgtggggcaagagttctgaaaggagattargcaaggtttatattaattaggaaagaagtgtttaacagaatacaatgattaagagacacagatctgaaggacatatagaaggcagat

SEQ ID NO: 49883 - DNA, 600 bp, Chicken  19866894296257_3
gaataatttcttagttgaattcagtctgcagtgtcatagaaaatgtatttatttttcattaagacttgctatcttaaaatactttggaagaatctgtttgtacatttgatcccttctgcatgttaaattattagaaagtactgacagcagttcagtatggccatagaggtgggatgaaaactggattgttaacattargatgtcacttgctgtcckcattgaactcgtgagaggacataggttttggacacaaatttgtgatgcttgatcccagagcttgagtttttaatgaaggctatytggaccttgccacaggtgattagtcagcctacctgaaactgtgtgataaaccagattgtgagagcaaccatggagacagtgagcaattaagatagtaatgtggggcaagagttctgaaaggagattargcaaggtttatattaattaggaaagaagtgtttaacagaatacaatgattaagagacacagatctgaaggacatatagaaggcagatgctgtgaaattatttgacagaataatgggctgaaaaacaaagggcatggaccaaagctttgaaaagattggtcagcaagagagtt

SEQ ID NO: 49884 - DNA, 600 bp, Chicken  19866894296257_4
tattagaaagtactgacagcagttcagtatggccatagaggtgggatgaaaactggattgttaacattargatgtcacttgctgtcckcattgaactcgtgagaggacataggttttggacacaaatttgtgatgcttgatcccagagcttgagtttttaatgaaggctatytggaccttgccacaggtgattagtcagcctacctgaaactgtgtgataaaccagattgtgagagcaaccatggagacagtgagcaattaagatagtaatgtggggcaagagttctgaaaggagattargcaaggtttatattaattaggaaagaagtgtttaacagaatacaatgattaagagacacagatctgaaggacatatagaaggcagatgctgtgaaattatttgacagaataatgggctgaaaaacaaagggcatggaccaaagctttgaaaagattggtcagcaagagagttcaggataagtttcttcacacagaaggtgtgaagaatgtatagcactgcaagctactaggtaaggaaaaacaaaccctcaaatgctaagtatatgtgaagacagagagattggtagatgaacagcatgg

SEQ ID NO: 49885 - DNA, 600 bp, Chicken  19866894296263_1
caaaaccactgacactttcacggaggagtaagtatggccatctgaattgctgaagaacctgcacacaacaggctaaagaaggctattctctggtttatttctcagatcaagttaaatcaacaaatttcttccaatagcaaagtcaaaaccacacagcaaaatagttcttgataagcagttcctgtttccataccaacttcaaaggtccattccttcattacaaggttaacttgtatcacaaagaaatgcccatgttgtggagtgaaatacatctgctagcagacaaattatcaacagaayagacaggaaaatttaatggctgaaagtgggagataaatccaggctgaaattattttaactcagactcataagaataatgaaggtctcgattaaagttccggtggagtaaccagcaatggccatttctgaagtgttaggtgacacatycctcaccacaaaaacacaaaacatgttgcagttcagaaaggaattatctcagggaaatgctgtcatccttgtgacaaagtagatgtcaacagtgtattcttcttgctctcttagctaagcatcaccgtgtaccaaaatatgcctttggcttgg

SEQ ID NO: 49886 - DNA, 600 bp, Chicken  19866894296263_2
accacacagcaaaatagttcttgataagcagttcctgtttccataccaacttcaaaggtccattccttcattacaaggttaacttgtatcacaaagaaatgcccatgttgtggagtgaaatacatctgctagcagacaaattatcaacagaayagacaggaaaatttaatggctgaaagtgggagataaatccaggctgaaattattttaactcagactcataagaataatgaaggtctcgattaaagttccggtggagtaaccagcaatggccatttctgaagtgttaggtgacacatycctcaccacaaaaacacaaaacatgttgcagttcagaaaggaattatctcagggaaatgctgtcatccttgtgacaaagtagatgtcaacagtgtattcttcttgctctcttagctaagcatcaccgtgtaccaaaatatgcctttggcttggtgaagtctacgagaaggatgttttctgtttacactcagtacttgttagagtttgagacagtctttatscacccgatccttttaatctcttaacccatattgggctgagaacaattctggggacaatgtgtatgtatgtgtttctatg

SEQ ID NO: 49887 - DNA, 600 bp, Chicken  19866894296263_3
taagaataatgaaggtctcgattaaagttccggtggagtaaccagcaatggccatttctgaagtgttaggtgacacatycctcaccacaaaaacacaaaacatgttgcagttcagaaaggaattatctcagggaaatgctgtcatccttgtgacaaagtagatgtcaacagtgtattcttcttgctctcttagctaagcatcaccgtgtaccaaaatatgcctttggcttggtgaagtctacgagaaggatgttttctgtttacactcagtacttgttagagtttgagacagtctttatscacccgatccttttaatctcttaacccatattgggctgagaacaattctggggacaatgtgtatgtatgtgtttctatgtccctgtggggctmctgtgtgggcacccaaatattgttgtaactttggtggaatcgatttgtggcaccttctattttattttattttctcttgttcctcttctcagtgctatctctcagcaactttctctatgctagctaatgcagcaaatgagattacactgtctactactgttgatatgctcagacagcatgctgcccatgttatcagtgtcactctcc

SEQ ID NO: 49888 - DNA, 600 bp, Chicken  19866894296263_4
cacaaaacatgttgcagttcagaaaggaattatctcagggaaatgctgtcatccttgtgacaaagtagatgtcaacagtgtattcttcttgctctcttagctaagcatcaccgtgtaccaaaatatgcctttggcttggtgaagtctacgagaaggatgttttctgtttacactcagtacttgttagagtttgagacagtctttatscacccgatccttttaatctcttaacccatattgggctgagaacaattctggggacaatgtgtatgtatgtgtttctatgtccctgtggggctmctgtgtgggcacccaaatattgttgtaactttggtggaatcgatttgtggcaccttctattttattttattttctcttgttcctcttctcagtgctatctctcagcaactttctctatgctagctaatgcagcaaatgagattacactgtctactactgttgatatgctcagacagcatgctgcccatgttatcagtgtcactctccaccatcctcctacattctttctaacttaaaccttttgaaaccactggccaacatggactgatctattactaatctctgacaaatcctatgtta

SEQ ID NO: 49889 - DNA, 600 bp, Chicken  19866894296265_1
caggtaaaaccttacttaaactgattagctcacgtctcttagagtgtctgcatggagaaactgccatttaagatttgtgtgtgcagctgggatttgctgcatgcttgctttctctgcagccagcagtgctaggagtcaggccatgtgtggtgtgcgtggtcatgtgagaggatgtgcccatcacaagccaaccttgataatgccagtaacgccttccaaaccagtagagcagtgtctgcatgccttaatgtagtttgcagatgggtctgtattcactttcaaggggactcacaagccagytgagtgcaataccgttgacgctgtagttactgagagggtagaaacctcatctttgtttctaatggtgtgtttttcctgttctgatgattctggcacagacgttttaatgctgagcagatacagttactgggatgccaaagacatgtcttcaacagagcttctgttcctttaaagagcatctttatttttgtggcttgtgttttaactaaatggcagaggttttgcggaatcagaagcccagaacgtcattctggtcacaggcaaatcttgtgacggtgcacatctgcagtaatttcctga

SEQ ID NO: 49890 - DNA, 600 bp, Chicken  19866894296265_2
aaattgattcttgccactggttgcagtgggatgtttggaggctggtggtttgagtctgagtggacttacatcactgaagtaaggcagaaatggctgagctaatcacagaattctctgtgaacaccggttgttgtggggagctgtgttctgggtaatggaagaaattgttgatctgtagatgattcagtccaatatcctgatggatgctgcctgcatgtatgcagttgagtctttggttaggaaatgcagagctgggggaaggtaacgctatgtgaagcagccacaacttgggtaatagcrgagatgtgattttggaaacgtgtggcaraaaggtctgatgtaagctgttctttccttcaaagatgttggcctctaattaagagacaagcctttgtctgagttgctgggctttgagaagtggttgctggctttggataggacagacgctgggtacttgtccaactgctttgtgttgaggtctgcctgtgcctgaggtcaaggtgcttgggcagggcttgtctgtgcctgtgctgaggactgcacgcctgttctgaggcttgagatggacccacaggagtgactgaaacatgtttttcatgt

SEQ ID NO: 49891 - DNA, 600 bp, Chicken  19866894296265_3
ggatgtttggaggctggtggtttgagtctgagtggacttacatcactgaagtaaggcagaaatggctgagctaatcacagaattctctgtgaacaccggttgttgtggggagctgtgttctgggtaatggaagaaattgttgatctgtagatgattcagtccaatatcctgatggatgctgcctgcatgtatgcagttgagtctttggttaggaaatgcagagctgggggaaggtaacgctatgtgaagcagccacaacttgggtaatagcrgagatgtgattttggaaacgtgtggcaraaaggtctgatgtaagctgttctttccttcaaagatgttggcctctaattaagagacaagcctttgtctgagttgctgggctttgagaagtggttgctggctttggataggacagacgctgggtacttgtccaactgctttgtgttgaggtctgcctgtgcctgaggtcaaggtgcttgggcagggcttgtctgtgcctgtgctgaggactgcacgcctgttctgaggcttgagatggacccacaggagtgactgaaacatgtttttcatgtttcagaaagaaaatcagttcctgatctg

SEQ ID NO: 49892 - DNA, 599 bp, Chicken  19866894296273_1
  misc_feature (1)..(55): n is any nucleotide
nnnnnnnnnnnnnnnnnnnnnnnnnnnnnnnnnnnnnnnnnnnnnnnnnnnnnnntttaaaattcattgtccatcagtttttctgccgggtgaaaatccggaactgatccatgtaaatagttcagtgagaagcgagcataaagcagcacacataagtagggattcatttaaaaatccataccaatggcagtgtattttcatggcattcccatctcagactatgacgctgtcccccactgagtgcattgcatctacgtggaattcacaaagctggggagctatggctgtgattctgacttmaggctgatgatagcatttacacatacattactgttaaaattgaatatttgaaagtgcttcaccaaggctatgttttagaaatgcatctgaaataactgaagaggtagaactgtcaatactgattacaaacagagggttaattcttctgttggtgtaaatcagcataaccratagatttgtgctgatttacrttggtaaggcccagaaaatagaggagctatatgacaaacaaagggtgctatatttatttcataagtgagaaatacttcataactcaggcacaccattggcatgaataa

SEQ ID NO: 49893 - DNA, 600 bp, Chicken  19866894296273_2
aaaatccataccaatggcagtgtattttcatggcattcccatctcagactatgacgctgtcccccactgagtgcattgcatctacgtggaattcacaaagctggggagctatggctgtgattctgacttmaggctgatgatagcatttacacatacattactgttaaaattgaatatttgaaagtgcttcaccaaggctatgttttagaaatgcatctgaaataactgaagaggtagaactgtcaatactgattacaaacagagggttaattcttctgttggtgtaaatcagcataaccratagatttgtgctgatttacrttggtaaggcccagaaaatagaggagctatatgacaaacaaagggtgctatatttatttcataagtgagaaatacttcataactcaggcacaccattggcatgaataagttatgaaaaatcttcacagccaaaagaacataatcatccttcatgtataacagatttgtttattctgtaaagattcatttcagttgattaattatcagtatctgctgatggtggaggtaacaagccatctctgatgagagaatcattttaggacatgctcagaatatttt

SEQ ID NO: 49894 - DNA, 600 bp, Chicken  19866894296273_3
gtattttcatggcattcccatctcagactatgacgctgtcccccactgagtgcattgcatctacgtggaattcacaaagctggggagctatggctgtgattctgacttmaggctgatgatagcatttacacatacattactgttaaaattgaatatttgaaagtgcttcaccaaggctatgttttagaaatgcatctgaaataactgaagaggtagaactgtcaatactgattacaaacagagggttaattcttctgttggtgtaaatcagcataaccratagatttgtgctgatttacrttggtaaggcccagaaaatagaggagctatatgacaaacaaagggtgctatatttatttcataagtgagaaatacttcataactcaggcacaccattggcatgaataagttatgaaaaatcttcacagccaaaagaacataatcatccttcatgtataacagatttgtttattctgtaaagattcatttcagttgattaattatcagtatctgctgatggtggaggtaacaagccatctctgatgagagaatcattttaggacatgctcagaatattttatcacctcgcacaacttgtat

SEQ ID NO: 49895 - DNA, 599 bp, Chicken  19866894296276_1
  misc_feature (1)..(119): n is any nucleotide
nnnnnnnnnnnnnnnnnnnnnnnnnnnnnnnnnnnnnnnnnnnnnnnnnnnnnnnnnnnnnnnnnnnnnnnnnnnnnnnnnnnnnnnnnnnnnnnnnnnnnnnnnnnnnnnnnnnnnnntaaaaagcaccaggctgaaggaaggttgctagactgacccttgagaagcactcgtaggctaaacctaaatgaagaactttattaacagtgttggggaaaaagaaagaagtagtgtttgttaatgctactaatctgagggatgtctcatgtcagagcacaaaaagaaatgcgttctacatakattaagttctgatatctgcatacratatatgtatagcagagtgtataactgccacatttttsccctgttaaattcccaatttattcacaaatatgtagaacrtgactactatgctccttaaattacataccaaggtaccacattcgaaagttacttcccacctgctgctcyctaaagtaatccagccttccctgtatttccccaacaggacaaaaaaagtgtgtcagcaagcagagctatactgaacagaagtgcagacacatgcactctcgatttgaattgaatccttactggttcct

SEQ ID NO: 49896 - DNA, 599 bp, Chicken  19866894296276_2
  misc_feature (1)..(95): n is any nucleotide
nnnnnnnnnnnnnnnnnnnnnnnnnnnnnnnnnnnnnnnnnnnnnnnnnnnnnnnnnnnnnnnnnnnnnnnnnnnnnnnnnnnnnnnnnnnnnnntaaaaagcaccaggctgaaggaaggttgctagactgacccttgagaagcactcgtaggctaaacctaaatgaagaactttattaacagtgttggggaaaaagaaagaagtagtgtttgttaatgctactaatctgagggatgtctcatgtcagagcacaaaaagaaatgcgttctacatakattaagttctgatatctgcatacratatatgtatagcagagtgtataactgccacatttttsccctgttaaattcccaatttattcacaaatatgtagaacrtgactactatgctccttaaattacataccaaggtaccacattcgaaagttacttcccacctgctgctcyctaaagtaatccagccttccctgtatttccccaacaggacaaaaaaagtgtgtcagcaagcagagctatactgaacagaagtgcagacacatgcactctcgatttgaattgaatccttactggttcctctgggccacactgtctgctccagc

SEQ ID NO: 49897 - DNA, 599 bp, Chicken  19866894296276_3
  misc_feature (1)..(57): n is any nucleotide
nnnnnnnnnnnnnnnnnnnnnnnnnnnnnnnnnnnnnnnnnnnnnnnnnnnnnnnnntaaaaagcaccaggctgaaggaaggttgctagactgacccttgagaagcactcgtaggctaaacctaaatgaagaactttattaacagtgttggggaaaaagaaagaagtagtgtttgttaatgctactaatctgagggatgtctcatgtcagagcacaaaaagaaatgcgttctacatakattaagttctgatatctgcatacratatatgtatagcagagtgtataactgccacatttttsccctgttaaattcccaatttattcacaaatatgtagaacrtgactactatgctccttaaattacataccaaggtaccacattcgaaagttacttcccacctgctgctcyctaaagtaatccagccttccctgtatttccccaacaggacaaaaaaagtgtgtcagcaagcagagctatactgaacagaagtgcagacacatgcactctcgatttgaattgaatccttactggttcctctgggccacactgtctgctccagcatcttctgactgaacctgggaataaagagatcttggaa

SEQ ID NO: 49898 - DNA, 599 bp, Chicken  19866894296276_4
  misc_feature (1)..(17): n is any nucleotide
nnnnnnnnnnnnnnnnntaaaaagcaccaggctgaaggaaggttgctagactgacccttgagaagcactcgtaggctaaacctaaatgaagaactttattaacagtgttggggaaaaagaaagaagtagtgtttgttaatgctactaatctgagggatgtctcatgtcagagcacaaaaagaaatgcgttctacatakattaagttctgatatctgcatacratatatgtatagcagagtgtataactgccacatttttsccctgttaaattcccaatttattcacaaatatgtagaacrtgactactatgctccttaaattacataccaaggtaccacattcgaaagttacttcccacctgctgctcyctaaagtaatccagccttccctgtatttccccaacaggacaaaaaaagtgtgtcagcaagcagagctatactgaacagaagtgcagacacatgcactctcgatttgaattgaatccttactggttcctctgggccacactgtctgctccagcatcttctgactgaacctgggaataaagagatcttggaagcacctaaaacctcagttaaacaattcaattctcccatgc

SEQ ID NO: 49899 - DNA, 600 bp, Chicken  19866894296276_5
cgtaggctaaacctaaatgaagaactttattaacagtgttggggaaaaagaaagaagtagtgtttgttaatgctactaatctgagggatgtctcatgtcagagcacaaaaagaaatgcgttctacatakattaagttctgatatctgcatacratatatgtatagcagagtgtataactgccacatttttsccctgttaaattcccaatttattcacaaatatgtagaacrtgactactatgctccttaaattacataccaaggtaccacattcgaaagttacttcccacctgctgctcyctaaagtaatccagccttccctgtatttccccaacaggacaaaaaaagtgtgtcagcaagcagagctatactgaacagaagtgcagacacatgcactctcgatttgaattgaatccttactggttcctctgggccacactgtctgctccagcatcttctgactgaacctgggaataaagagatcttggaagcacctaaaacctcagttaaacaattcaattctcccatgctatggggtggagataaattcctaatccctccaaagccctcgctgagcagctggcagacacaacaggctgt

SEQ ID NO: 49900 - DNA, 600 bp, Chicken  19866894296277_1
gacagaggtgatgctctctaaggccgatggatctcaagtgtgcagcgcagcatcacttgaaggtggaggacctccccatctgcagagctgcccacgtcccctgcaggcttagggcggctctgagggccaggaatgaggaagaggatggaggaggtgagacccctcccctgtgttttgctgcaggcagaagttcacttggttcaaccgtgttgtgcaactccagcttgtctcaggcactggagtctggaggggtttggccgaggctttcagcctcacggaatgcaactgtcatttatctgrgagtgtttctagggttgaaaaaatgaaggaaatatcactttataggaagcttaatttgttggtctgccttctgctctgagaagctgtgtrctgggcatcccccttctcctggctccaactgctgatggtggagacacaaaactcacccaatctcatcaagcagaactctgcaatcccacrtttcttcatggcttgcatgcatgatgaaacagccatggaggaggtctttgtgccaggcctctcagtgtgccaagcaagctgagcagctggcagtgctgcaaaaccatcccgtttccttgt

SEQ ID NO: 49901 - DNA, 600 bp, Chicken  19866894296277_2
cccacgtcccctgcaggcttagggcggctctgagggccaggaatgaggaagaggatggaggaggtgagacccctcccctgtgttttgctgcaggcagaagttcacttggttcaaccgtgttgtgcaactccagcttgtctcaggcactggagtctggaggggtttggccgaggctttcagcctcacggaatgcaactgtcatttatctgrgagtgtttctagggttgaaaaaatgaaggaaatatcactttataggaagcttaatttgttggtctgccttctgctctgagaagctgtgtrctgggcatcccccttctcctggctccaactgctgatggtggagacacaaaactcacccaatctcatcaagcagaactctgcaatcccacrtttcttcatggcttgcatgcatgatgaaacagccatggaggaggtctttgtgccaggcctctcagtgtgccaagcaagctgagcagctggcagtgctgcaaaaccatcccgtttccttgtcctggtttgggaggaaagttggtgttaaaattttagcaaagaaagaaactcttttcagtacatgtaaaacattttcttgtttttaattta

SEQ ID NO: 49902 - DNA, 600 bp, Chicken  19866894296277_3
caggcagaagttcacttggttcaaccgtgttgtgcaactccagcttgtctcaggcactggagtctggaggggtttggccgaggctttcagcctcacggaatgcaactgtcatttatctgrgagtgtttctagggttgaaaaaatgaaggaaatatcactttataggaagcttaatttgttggtctgccttctgctctgagaagctgtgtrctgggcatcccccttctcctggctccaactgctgatggtggagacacaaaactcacccaatctcatcaagcagaactctgcaatcccacrtttcttcatggcttgcatgcatgatgaaacagccatggaggaggtctttgtgccaggcctctcagtgtgccaagcaagctgagcagctggcagtgctgcaaaaccatcccgtttccttgtcctggtttgggaggaaagttggtgttaaaattttagcaaagaaagaaactcttttcagtacatgtaaaacattttcttgtttttaatttaaaattaggtaatagctgctattaactgttaatttaaaaaaataaccttattattgatgagtcacaatgcgaaattccttttaattctgcc

SEQ ID NO: 49903 - DNA, 600 bp, Chicken  19866894296279_1
acatggacactccaacggtatgttaaatatactcataagtgcaactatcaaagggtaagtgtgcattacagaaacgagtacccagattatgtatatactgtgaaatgtatgtgaacgtgcatgacttgaaccaatgaactgtggcctgaaatgatgtcacagaatgtgcagcattaagtggaaggttaaacctacttgcatcttggttcattaaacgcagttaaagtgcaaattccctcattctgacagtagtaatcacaagggttcactttctggtcacagcgctgacttttaaacccmacagagcatctgcagaatttcagtaaaatagacctatataaatattctgccttttgctgaacaaattttaaatgcattacatttaatgatggcaagacacgcacacatacacaggcacacacccacagatataaataaattagttttgtttgtttgtttttaatcctggaaagatctaatttaactacactgataagttttctcatcaaagtttatcaaacacttaaaacaatgagcctctacaaacttatgcgttcaggtgttcagtattttttgttaactgtactacacattcgtatt

SEQ ID NO: 49904 - DNA, 600 bp, Chicken  19866894296282_1
attaaatcctatcaccaaaatccagaaatgcacatgtagatttaaccagactgagagtctacggagtgaagtaacacagctacaacatgacagagttaacaagccatggttttatcctgtttggacatcagttttataaagcttcctcctcactgtagtttcaaagaacaaatcaatgcagcaagatgaagcacaaactgaatacatgtatttttaaagacactcaagttttaaccaataggaaactgcagtctttaattttgctcttatttactatcagcttttacatggagcaaagaktaattttaagaggtcagaaaatgaccaacctatttagaagtgccgagacagctcaagatgggtacttagtgagattcaaaagatgtgagttaggtactactaaaactcataagaaagaggcacctaaaccatggagactcattttgaatattagctccccatctrcctctctcttatcaagacagcagaggtggctgttttgctgcacagcacataggagatcattctagggcagtctcttggtttaatcaaagtsccyaatccagagagaactggccagttcccactttgctctgttga

SEQ ID NO: 49905 - DNA, 600 bp, Chicken  19866894296282_2
gaacaaatcaatgcagcaagatgaagcacaaactgaatacatgtatttttaaagacactcaagttttaaccaataggaaactgcagtctttaattttgctcttatttactatcagcttttacatggagcaaagaktaattttaagaggtcagaaaatgaccaacctatttagaagtgccgagacagctcaagatgggtacttagtgagattcaaaagatgtgagttaggtactactaaaactcataagaaagaggcacctaaaccatggagactcattttgaatattagctccccatctrcctctctcttatcaagacagcagaggtggctgttttgctgcacagcacataggagatcattctagggcagtctcttggtttaatcaaagtsccyaatccagagagaactggccagttcccactttgctctgttgagatgtcaggaaaagaaaacctaagttttgtggagagttccacaaaaaagcccacaacatagtaattatgaggcagacatatttctgcaaacaggaatgtcatacgtatcatttgaagcaaaaaggcagataaggtgctaaatcagttgaaaatatttccaaatac

SEQ ID NO: 49906 - DNA, 600 bp, Chicken  19866894296282_3
aattttgctcttatttactatcagcttttacatggagcaaagaktaattttaagaggtcagaaaatgaccaacctatttagaagtgccgagacagctcaagatgggtacttagtgagattcaaaagatgtgagttaggtactactaaaactcataagaaagaggcacctaaaccatggagactcattttgaatattagctccccatctrcctctctcttatcaagacagcagaggtggctgttttgctgcacagcacataggagatcattctagggcagtctcttggtttaatcaaagtsccyaatccagagagaactggccagttcccactttgctctgttgagatgtcaggaaaagaaaacctaagttttgtggagagttccacaaaaaagcccacaacatagtaattatgaggcagacatatttctgcaaacaggaatgtcatacgtatcatttgaagcaaaaaggcagataaggtgctaaatcagttgaaaatatttccaaatactggaaggaggtatttatttgcaagaaaattagtaattttttgtattatttttacaactaaactaattaaaaaactccagtaagttaaagct

SEQ ID NO: 49907 - DNA, 600 bp, Chicken  19866894296282_4
tttgctcttatttactatcagcttttacatggagcaaagaktaattttaagaggtcagaaaatgaccaacctatttagaagtgccgagacagctcaagatgggtacttagtgagattcaaaagatgtgagttaggtactactaaaactcataagaaagaggcacctaaaccatggagactcattttgaatattagctccccatctrcctctctcttatcaagacagcagaggtggctgttttgctgcacagcacataggagatcattctagggcagtctcttggtttaatcaaagtsccyaatccagagagaactggccagttcccactttgctctgttgagatgtcaggaaaagaaaacctaagttttgtggagagttccacaaaaaagcccacaacatagtaattatgaggcagacatatttctgcaaacaggaatgtcatacgtatcatttgaagcaaaaaggcagataaggtgctaaatcagttgaaaatatttccaaatactggaaggaggtatttatttgcaagaaaattagtaattttttgtattatttttacaactaaactaattaaaaaactccagtaagttaaagctact

SEQ ID NO: 49908 - DNA, 600 bp, Chicken  19866894296284_1
gctgcattccacggggacagcttggtgtcaccaaagctcccttggcaaacagggggcatgggcacaacagggacttctgcagccacactatgggctggggagcagcactctggcatagacccagaagctgtgtcaccaccccatgccccctggctcagcaaggtcccagcagcactgtgtgccagcagtgtacagctgtgcttgctcacctggtccagatgccatcagcatcttcccttctcctcacagatgtgcaaaaagcgagagaagcgccttccagaccccactctggagaagtaygtgctgacggtggtgctggacaccatcaatgcattcttcagctctccattctcrgagaacagcacctcrctgcaggtaatggggtgttgcatagccatgccatgcatggagcgagcaaagggctcaccctttgggaaaaggagtctgtactgatacagagctgcccattctctccttcagacccaccagaccattgtggtgcagcttctccagtccaccatgaggctgttggagtgctcctggctgcagcagcagcacaagagctcagtggaggcctgcatccgaacgctggcgatggtt

SEQ ID NO: 49909 - DNA, 600 bp, Chicken  19866894296284_2
ggcatgggcacaacagggacttctgcagccacactatgggctggggagcagcactctggcatagacccagaagctgtgtcaccaccccatgccccctggctcagcaaggtcccagcagcactgtgtgccagcagtgtacagctgtgcttgctcacctggtccagatgccatcagcatcttcccttctcctcacagatgtgcaaaaagcgagagaagcgccttccagaccccactctggagaagtaygtgctgacggtggtgctggacaccatcaatgcattcttcagctctccattctcrgagaacagcacctcrctgcaggtaatggggtgttgcatagccatgccatgcatggagcgagcaaagggctcaccctttgggaaaaggagtctgtactgatacagagctgcccattctctccttcagacccaccagaccattgtggtgcagcttctccagtccaccatgaggctgttggagtgctcctggctgcagcagcagcacaagagctcagtggaggcctgcatccgaacgctggcgatggttggtaaggagctgtgccggagggatgctctgctccctgcctgccagagggatgca

SEQ ID NO: 49910 - DNA, 600 bp, Chicken  19866894296284_3
gggacttctgcagccacactatgggctggggagcagcactctggcatagacccagaagctgtgtcaccaccccatgccccctggctcagcaaggtcccagcagcactgtgtgccagcagtgtacagctgtgcttgctcacctggtccagatgccatcagcatcttcccttctcctcacagatgtgcaaaaagcgagagaagcgccttccagaccccactctggagaagtaygtgctgacggtggtgctggacaccatcaatgcattcttcagctctccattctcrgagaacagcacctcrctgcaggtaatggggtgttgcatagccatgccatgcatggagcgagcaaagggctcaccctttgggaaaaggagtctgtactgatacagagctgcccattctctccttcagacccaccagaccattgtggtgcagcttctccagtccaccatgaggctgttggagtgctcctggctgcagcagcagcacaagagctcagtggaggcctgcatccgaacgctggcgatggttggtaaggagctgtgccggagggatgctctgctccctgcctgccagagggatgcagctgctctggctgct

SEQ ID NO: 49911 - DNA, 600 bp, Chicken  19866894296284_4
gttatgtgtccggtttggccagaggagagctgaagcttgggcttggttggggaattcctggtgtgtccttgctggtgcagggcccagaaagaaagctggcatttttggcagctttccctcgccaggactttgccctcagcctgcctgcagctgcctgactcaggacaagcactgagtcaccacgtggaaagcattgcgtgctggttagatgctgggtggaggcactggccggagacgtaggattcccctttgtaattgcagcctctctgcactgggcttttccaactgaaaaccagaggyggtgcctcctcccaccccatgggcagcaggggctgtaggcaatgggtgctgcactggggagagatgggtagaagtaccacagcmcccaccagcctggagggcttttctctygtattttattcatatcttcttcactgtaaatgaagagcgggtgaaggggtgcccaacccggggctgtgcagtagctgatgtggcagctgatagctcatggctgtccccaaacccttccccctgtcccgcagccaagagccgctccatcgcgctgcccatggacctggatgcccacgtcagctccctgct

SEQ ID NO: 49912 - DNA, 600 bp, Chicken  19866894296284_5
cagaaagaaagctggcatttttggcagctttccctcgccaggactttgccctcagcctgcctgcagctgcctgactcaggacaagcactgagtcaccacgtggaaagcattgcgtgctggttagatgctgggtggaggcactggccggagacgtaggattcccctttgtaattgcagcctctctgcactgggcttttccaactgaaaaccagaggyggtgcctcctcccaccccatgggcagcaggggctgtaggcaatgggtgctgcactggggagagatgggtagaagtaccacagcmcccaccagcctggagggcttttctctygtattttattcatatcttcttcactgtaaatgaagagcgggtgaaggggtgcccaacccggggctgtgcagtagctgatgtggcagctgatagctcatggctgtccccaaacccttccccctgtcccgcagccaagagccgctccatcgcgctgcccatggacctggatgcccacgtcagctccctgctcaacagcagctccaccagtaccgtgcagaggaacacgtccagctacaagacggccacgcggaccttccccccgcgtctccacca

SEQ ID NO: 49913 - DNA, 600 bp, Chicken  19866894296284_6
ctttccctcgccaggactttgccctcagcctgcctgcagctgcctgactcaggacaagcactgagtcaccacgtggaaagcattgcgtgctggttagatgctgggtggaggcactggccggagacgtaggattcccctttgtaattgcagcctctctgcactgggcttttccaactgaaaaccagaggyggtgcctcctcccaccccatgggcagcaggggctgtaggcaatgggtgctgcactggggagagatgggtagaagtaccacagcmcccaccagcctggagggcttttctctygtattttattcatatcttcttcactgtaaatgaagagcgggtgaaggggtgcccaacccggggctgtgcagtagctgatgtggcagctgatagctcatggctgtccccaaacccttccccctgtcccgcagccaagagccgctccatcgcgctgcccatggacctggatgcccacgtcagctccctgctcaacagcagctccaccagtaccgtgcagaggaacacgtccagctacaagacggccacgcggaccttccccccgcgtctccaccacccccaaccagtgggactacaagaaca

SEQ ID NO: 49914 - DNA, 600 bp, Chicken  19866894296297_1
tgataataagcttatatgagtacctttcatttgcttgaaggcaaatgattatgaaatctagacttcttaaaaaagttaactaacttggtcttaaatggattaacttgatctttaccttccttacatttttactatggttaattatattcatgtgggctatggtagttgcatatgagaagcatcatgtgcaatttcacttactgttaactagataatctcatgtaaatcccataaaacaaatgataatctcattacagtgtgcagagtgctcttctcagagaagggaatatgagctgtcamtgggaaaatatctggatgtgagttttcttcagtaatctctatttatgctgagccttaagggtcatgccataagctcagcacctttctgtaaggtactttgtttttcttttagaactacccgtgctacagcaaaccagtagtgctgagtaattccagcttcctgctgtatatgcattatattcatcaattcaaactctttaagcagtgagacaaagtaggcatatttacactagtttttcttcttcaatcctattgacttttcctcctgtgaagatccttaatttgcaatttttccacttc

SEQ ID NO: 49915 - DNA, 600 bp, Chicken  19866894296297_2
atctgtctgttgtaaagtacagaatttcataaaatgaacagtaaagacaaagagataattggttatagcaaggacacacgttagactaagactggaaggcacgaaacataagcacggatagcaacttctgtgtgcttgagagggttgttattaactgaaaacaaactttgttttctgctctttgcttggctgctgtcaaaaggtacggtcccgtctatgcactagcagcatctctaattccatcttttgaagcctgtggctttattactgcttctcttccaatgacttagaaaaaagacmgtgtcagaacagcattataaatggagcagacaggcttctgtagagattatactttgccgggttgctttgttctgtttcctgtatttctaaagcatatatacaacagttctaaaggagctgtgtgctttcctctacagtggtaacatttgtgctggaaggtgcaacaactttggggaggataagagtttaagcaaaatggagacacaggaatattaacatcatttatctcaaatatagagccaaagcatattacatattttatgcctttctgaactaaataagcagggtatttgaagaaag

SEQ ID NO: 49916 - DNA, 600 bp, Chicken  19866894296299_1
agaaggactttggctaaaaaaaaaacttatcgtccccatctacatattgcatagtttactcaacaagtattacctgatttttttactagtcctccaaagagacaggaaccatactcttttctaatggctttaaaatgcccggttttaaatagaaggaatgagttggtagtgatctgcaacaagcctcagactttatactcataaaccatgagccattttccagggtctttgcaatgtctggcatatcatgagccaactccatgatctgtatttcttatttaaaaaaaacacaagtccaaycttaagtttgctaccagaagtagattttcaataatttgtctgttgatagaccacatttactatcagatmcagcacaagtatgtagaagaaaaacatacaaaacagagaagccatcaaaatcaactggccatggcagctgtatgttgaaggaaaactaacccatcaattactttttccactacagtaacttctataaattagcatgtgaaatagtccttttgaaataaaaaccatggaaatatcaccagcaagaaaagtgaaaatgtcaaagatgaagtcaggaattacatcaagctaaac

SEQ ID NO: 49917 - DNA, 600 bp, Chicken  19866894296299_2
ttacctgatttttttactagtcctccaaagagacaggaaccatactcttttctaatggctttaaaatgcccggttttaaatagaaggaatgagttggtagtgatctgcaacaagcctcagactttatactcataaaccatgagccattttccagggtctttgcaatgtctggcatatcatgagccaactccatgatctgtatttcttatttaaaaaaaacacaagtccaaycttaagtttgctaccagaagtagattttcaataatttgtctgttgatagaccacatttactatcagatmcagcacaagtatgtagaagaaaaacatacaaaacagagaagccatcaaaatcaactggccatggcagctgtatgttgaaggaaaactaacccatcaattactttttccactacagtaacttctataaattagcatgtgaaatagtccttttgaaataaaaaccatggaaatatcaccagcaagaaaagtgaaaatgtcaaagatgaagtcaggaattacatcaagctaaacccaccaaggggaacaagcacttctagtgaagatttccatacgtactgcacattacacagggtaaaggca

SEQ ID NO: 49918 - DNA, 454 bp, Chicken  19866894296310_1
  misc_feature (1)..(35): n is any nucleotide
nnnnnnnnnnnnnnnnnnnnnnnnnnnnnnnnnnncggggcggggcggggcggggtgccgggcccggggcggccgcttgcttgcctggctgcacgccggcctgagtgcggcctcgcaggcggtgtggggagttcgcgggtacttcgcgtctccgctcttcttcttccttcctcttctcgctcttggccgctctgccacagacctcaggtccggagaccgacggggcggagcgccttccggcccaggtaggtgctcggagggtgggttgcgacgcggctcttcacttaccccgtgcccgcytcagtgcctggtagcccggcctgcccctcgttccctgcccctgtagctctgctgtcaccagccgagttggtgagagtgactcgtactttcccccacatcagttatttgtttgagaagttacttttttccttcttcttttttttttttttttttt

SEQ ID NO: 49919 - DNA, 600 bp, Chicken  19866894296314_1
cacttctagaagtttctgtgtaacatgtttctataaacagatggtgtgaaacaatggttttattaatgctcacttggattgacctgcatgtctccgagttctgctgctcacaaataatgttccagttcagaatgatgaaacatttacacttaccacaatgtcatgtattacacatttataaatgcattagaggtggctaaccaacaaaaattataatgcaaattttgctttgattgaaaagtgaggggtaaaacatcatcctcctttaatctacttacttgctgtctgatgcttactgarcaatttaataagcattgcactagtggatggctgtcagtatgtgtatttggatgtctctctgaagtaatgggttctacactgatttatcagctcttgcttgttgctatcatcatctgagtttaggaacattgttcttctgatagggcccctgttctataaaacagcttctgtttagagtactgaactgtgagatgttttcaaaatgttagagctgactttcaaactgagataattgctgacattctttatcttttttggcatcgttttcaataaatgtgtttttctgctctaggaaagcaa

SEQ ID NO: 49920 - DNA, 600 bp, Chicken  19866894296322_1
gccatgtccctgggaagatggcagcgtgcctgggaaggtggcagtgttcccagaaagatgccagtgtcccataggaaggtggcagtgcctccacgaaggtgacagcgtcccaaggagggtggcagcgtcgggggaaggtggcaaagtccccaggacagctctgatgccatacccactgtgtgccaacctggtggcaccgggttttgtgtccgtccccccgtgctgtccatgcagcagtgccatgaagggctgcagagccgagtgtgggggcagcaccggggtcagcacgagtgcccccawctcctaagcagtgctgtccccaagggccaccccccacgtgccgcttcagcatcatgcagtgatgccttgcccgttgggacactttggcagtggggatgctctggggacacccagctggcagctgggctggtggtggtgcccactgcatgcagctcggcctgtgagggtggatggaatgggggagcagtgtggagacgggttgggctttggtgggcatcgcaccccagcactggtacgtccctggcatcgtccccattgcgcccaggtgtgggtgcrcccagacattgtgcccaagcatca

SEQ ID NO: 49921 - DNA, 600 bp, Chicken  19866894296322_2
cggggtcagcacgagtgcccccawctcctaagcagtgctgtccccaagggccaccccccacgtgccgcttcagcatcatgcagtgatgccttgcccgttgggacactttggcagtggggatgctctggggacacccagctggcagctgggctggtggtggtgcccactgcatgcagctcggcctgtgagggtggatggaatgggggagcagtgtggagacgggttgggctttggtgggcatcgcaccccagcactggtacgtccctggcatcgtccccattgcgcccaggtgtgggtgcrcccagacattgtgcccaagcatcagcacactcacacacgagtgcagccccagcactgcatctcagcgttgcacacaggcatgggtgcaccctggcactgcattctagcagtgcaccccatggcagtatatcccaagcatgggtgcaatctcagcgctgcacctcggttttgtatccacacatcagtgcacctgggcactgcaccaccaacactgcatccaggcactgatgcaaccccagcattgcatccacacattggtgcacccaggcactgcacacacgccgtgcatccagacactga

SEQ ID NO: 49922 - DNA, 599 bp, Chicken  19866894296324_1
  misc_feature (1)..(238): n is any nucleotide
nnnnnnnnnnnnnnnnnnnnnnnnnnnnnnnnnnnnnnnnnnnnnnnnnnnnnnnnnnnnnnnnnnnnnnnnnnnnnnnnnnnnnnnnnnnnnnnnnnnnnnnnnnnnnnnnnnnnnnnnnnnnnnnnnnnnnnnnnnnnnnnnnnnnnnnnnnnnnnnnnnnnnnnnnnnnnnnnnnnnnnnnnnnnnnnnnnnnnnnnnnnnnnnnnnnnnnnnnnnnnnnnnnnnnnnnnnnnnnctgtcagaagtgcagcagtgggaatctgttctgcagttcctagaactcttggtcttgccccractcacaggtcttaccaaccctttaccaagtttttccatagatctcctggaacacccmccgatctaggaagaagaaaagcttggatatcatttgccagctgtattttactaagtgttagctttgtaggtacttccaaaaaatcagatgttctctgatactgaacactgaggaattttattccgaatatattaccaatctaaactgaagatacaggatgaactttcaatggctactgagtgatatgtcaatagcaggaaccttagtatttccatctctcctctcacaacccagcactgaa

SEQ ID NO: 49923 - DNA, 599 bp, Chicken  19866894296324_2
  misc_feature (1)..(180): n is any nucleotide
nnnnnnnnnnnnnnnnnnnnnnnnnnnnnnnnnnnnnnnnnnnnnnnnnnnnnnnnnnnnnnnnnnnnnnnnnnnnnnnnnnnnnnnnnnnnnnnnnnnnnnnnnnnnnnnnnnnnnnnnnnnnnnnnnnnnnnnnnnnnnnnnnnnnnnnnnnnnnnnnnnnnnnnnnnnnnnnnnnnnctgtcagaagtgcagcagtgggaatctgttctgcagttcctagaactcttggtcttgccccractcacaggtcttaccaaccctttaccaagtttttccatagatctcctggaacacccmccgatctaggaagaagaaaagcttggatatcatttgccagctgtattttactaagtgttagctttgtaggtacttccaaaaaatcagatgttctctgatactgaacactgaggaattttattccgaatatattaccaatctaaactgaagatacaggatgaactttcaatggctactgagtgatatgtcaatagcaggaaccttagtatttccatctctcctctcacaacccagcactgaacaacagttgctgctgttccttggctgctgatggatgcccttctgtaagaatgggcaga

SEQ ID NO: 49924 - DNA, 600 bp, Chicken  19866894296324_3
ttcagattataaaaaaattaagctggcatttaagcactacagacctaaaaatagcaatctaacaccccattaaaattattacaagaacaagtaacatttgatactctgacagtggttttccaaagtacattttagtaatgccactgcagtgtctgatgtttctgaatggctgctctgtgattctgctttgtggctaattggtcttaactgtcctattgatgctgtctgcttacttgcagtcataaactcagaagtctgagactcagagagcaagtgtttataaatgtaagactataaacktcrgagcttaacaagaacaagtatggccaagaggatcacttctctttagtctatattctttccatgacatcagtgaaattggaagcattactggattcaagtatcagcttctaaagccctccataaggtcacacctttccatcagatgtcctgaagctcatccttcaattcatgaatatagtcatctgaatcccatgcagcagagctgcatttcattagctctgaattcccactgatgtactgatatcaagtctcaactttcagtcaatttattttctgcactccctcttttgttccaca

SEQ ID NO: 49925 - DNA, 600 bp, Chicken  19866894296324_4
agattataaaaaaattaagctggcatttaagcactacagacctaaaaatagcaatctaacaccccattaaaattattacaagaacaagtaacatttgatactctgacagtggttttccaaagtacattttagtaatgccactgcagtgtctgatgtttctgaatggctgctctgtgattctgctttgtggctaattggtcttaactgtcctattgatgctgtctgcttacttgcagtcataaactcagaagtctgagactcagagagcaagtgtttataaatgtaagactataaacktcrgagcttaacaagaacaagtatggccaagaggatcacttctctttagtctatattctttccatgacatcagtgaaattggaagcattactggattcaagtatcagcttctaaagccctccataaggtcacacctttccatcagatgtcctgaagctcatccttcaattcatgaatatagtcatctgaatcccatgcagcagagctgcatttcattagctctgaattcccactgatgtactgatatcaagtctcaactttcagtcaatttattttctgcactccctcttttgttccacaaga

SEQ ID NO: 49926 - DNA, 511 bp, Chicken  19866894296327_1
tgaggtgtttttatgccttttttttttcttaaatgaacattattccagtcaaaacctccatgctgggagctgttccgctctgccaccttgttgctcttaaaccgcagcatgcttatttgaacagaacagataagatatgcattttaaaagtgaggctcattgccctgcactgatttctcacgtgcttcttgccgatgtcatgtaaggtgagatctgaaaaggggtttggatccctaaaggacataaatggtagagaagtacccgtgtacctgcatgccctgcaagccccatttagactcyatgaggatgctgacctaagcacatcaagaagaggtttgatcacaagcaccacctagcccaaaccatgcagcaccaacgtgttgctgtcctgtgtgggtttttttttgttagctggtgtgctcaaggattatggtattaaggttttctcttcagcatggggggtttgactggaaccaaaattgctggttgtcctcccttttgtcctccctct

SEQ ID NO: 49927 - DNA, 600 bp, Chicken  19866894296329_1
aaaccgcagcatgcttatttgaacagaacagataagatatgcattttaaaagtgaggctcattgccctgcactgatttctcacgtgcttcttgccgatgtcatgtaaggtgtgatctgaaaagggacttgtatccctcaaggacataaatggtagagaagtacccatgtacctgcatgccctgcaagccccatttagactctatgaggatgctgacctaagcacatcaagaagaggtttgatcacaagcaccacctagcccaaaccatgcagcaccaaagtgttgctgtcctgtgtgggytttttttttgttagctggtgtgctcaaggattatggtattaaggttttctcttcagcatggtggtttgactggaaccaaaattgctggttgattccccttttgtcctccctctctttcctgttggagttgagaaccacttcaaaggctcagatgtgttggtgccagacgccacgcagttattgttagaagaatctgaaatacaactgggaacaaacctttgttcagccaagtgtgtcaggctgtaggcttctgctcaaggaggaggtgggtgctgagactcttggttcggtgtctccaca

SEQ ID NO: 49928 - DNA, 505 bp, Chicken  19866894296334_1
gcttcatttacccttatggtaaaaaaacttttttcttacattcaatctaaatctcccctctcttagtttgaaaccatttccccttgaccaaccacaacagacctcgctaaagattctgtcccttctttcttacagcccctatttggatggatactgagaggctgcactcaggtctttccagagacttctaatagccacactattagaatttcctaacactagattcttctacatacatgtaaagcaataagtgcattgggatgcaattgcagttctgtgtgttcaccatgtctgagcacrgtccccagcctccctccacactgtctctatttttctttagggttgaattggaaaatgccaaagatcttgccccgagcatcgctacaggaaaataaaacttgcatctgcaaaaaaaatataccgcttttccacctgaggattgcatagatgggcaaaacagccatgtgctgtttgcactgtcaaacacaagttgtgcacagagcca

SEQ ID NO: 49929 - DNA, 600 bp, Chicken  19866894296336_1
cctcgggcgctccgtgcagcccggctcgccgcaccccccgggatgtgggtcaggacgggggcgccccgtttgccaacggggaagatgggatgtggggacaaccagcattgagggctgatggaaaccccccaccccgcagacccccgtgtggggctgtgtggtggggatgctcagccctacagagctggattggggcagggctgtgtaggaatgttgggcttctggagccataggggagagtgtgtatggggccgcatccccactctgtgggggaggagcacacggggtggtcccagcacraggcttttattaattagcgataatgagtgacatttagggcctccgaacacggcgtgcgtccctgggggagctctgtggggttgcctggacccattgctcctatctcggttggagagatgcgggtgctgagggctgcggccacaaatccaagctctctgctcaccccacagcatcaggaccagagctctgcggccccataagtgtgacccacagccccacagccccggcccctcattcccaggggcgctgctccgcaatgcagacccactgctcgggtctgttttttctgttcccatactg

SEQ ID NO: 49930 - DNA, 600 bp, Chicken  19866894296337_1
aagtgttcatgttggctgggcattatgggatgttgttaaatcttccacgcaaacagaaaggacttgtttgaagaatttttttggccattaaaactgtggggaagtgggactgtgggaggtgttacatctgctggagaacatttgtacctttttgtctgcttgcaagaggaagtactgtagggcaaaaattaacgattaactgaagcactgcagaaatcaggagggttgcttggtgttggaactgacaaaacaaacttaacataaaaaaagacagtcaatactctgcacctggagtaaatkttatgggttttaggaaagggtgctttaattaatatatagtaccaaggagtcaaacctactgcttgatatgcaaatagtctgacataaaaactgccaagataagagatacagtaagatatcttgcgtgcagaagccttttcacaaaggtctggattccaggacagccaaacacgtggccatttgaaaccacatccctacttctccctcctcctctgggactagcctcatctcaaagaaagctgggggatgggggatatcacattacaaagaaggatgggaatacagcaatggagtgtatct

SEQ ID NO: 49931 - DNA, 599 bp, Chicken  19866894296338_1
  misc_feature (1)..(21): n is any nucleotide
nnnnnnnnnnnnnnnnnnnnnctttctcccatatcttatagactcttctccagtacgccacgtggtgattaaatcagggagaatattgtaaagctagaagaaagcgattatcagtccccggtagatgcagctgcacggcggtgtatgcagcatggaatgcagtcactgtgctgtgcaatttactgtcttcattaaatcagacaagcgtcaggtgaaccgtacaaattccatctgcattcacagtgggctctgtgcatattatttacacttttttcttcctctcactttatttaggttccwtatttatatgttgaataagtgaacaccgttggaaattctaatgatcctttcaaakaaatggtgmtatgtactgtgatcaagaatattttctaccttaaaggaaaaatgcttctgtcattttaaaatagaagtaggccctgagttctcctgatgtcattggggacacacgaggatttgtttcagaagctgcagtgcagcaccaggcaatgactggacatacagcytgatgatactgcatcacataaaagcccttccttccctcttatcgcctcaatgctttgatcatcyagaaagtgaga

SEQ ID NO: 49932 - DNA, 600 bp, Chicken  19866894296338_2
cgccacgtggtgattaaatcagggagaatattgtaaagctagaagaaagcgattatcagtccccggtagatgcagctgcacggcggtgtatgcagcatggaatgcagtcactgtgctgtgcaatttactgtcttcattaaatcagacaagcgtcaggtgaaccgtacaaattccatctgcattcacagtgggctctgtgcatattatttacacttttttcttcctctcactttatttaggttccwtatttatatgttgaataagtgaacaccgttggaaattctaatgatcctttcaaakaaatggtgmtatgtactgtgatcaagaatattttctaccttaaaggaaaaatgcttctgtcattttaaaatagaagtaggccctgagttctcctgatgtcattggggacacacgaggatttgtttcagaagctgcagtgcagcaccaggcaatgactggacatacagcytgatgatactgcatcacataaaagcccttccttccctcttatcgcctcaatgctttgatcatcyagaaagtgagacaaaagaaatgttccactgtatattgaccttgattgtaacggcagaaacctttcat

SEQ ID NO: 49933 - DNA, 600 bp, Chicken  19866894296338_3
gtgattaaatcagggagaatattgtaaagctagaagaaagcgattatcagtccccggtagatgcagctgcacggcggtgtatgcagcatggaatgcagtcactgtgctgtgcaatttactgtcttcattaaatcagacaagcgtcaggtgaaccgtacaaattccatctgcattcacagtgggctctgtgcatattatttacacttttttcttcctctcactttatttaggttccwtatttatatgttgaataagtgaacaccgttggaaattctaatgatcctttcaaakaaatggtgmtatgtactgtgatcaagaatattttctaccttaaaggaaaaatgcttctgtcattttaaaatagaagtaggccctgagttctcctgatgtcattggggacacacgaggatttgtttcagaagctgcagtgcagcaccaggcaatgactggacatacagcytgatgatactgcatcacataaaagcccttccttccctcttatcgcctcaatgctttgatcatcyagaaagtgagacaaaagaaatgttccactgtatattgaccttgattgtaacggcagaaacctttcattattttatc

SEQ ID NO: 49934 - DNA, 600 bp, Chicken  19866894296338_4
attccatctgcattcacagtgggctctgtgcatattatttacacttttttcttcctctcactttatttaggttccwtatttatatgttgaataagtgaacaccgttggaaattctaatgatcctttcaaakaaatggtgmtatgtactgtgatcaagaatattttctaccttaaaggaaaaatgcttctgtcattttaaaatagaagtaggccctgagttctcctgatgtcattggggacacacgaggatttgtttcagaagctgcagtgcagcaccaggcaatgactggacatacagcytgatgatactgcatcacataaaagcccttccttccctcttatcgcctcaatgctttgatcatcyagaaagtgagacaaaagaaatgttccactgtatattgaccttgattgtaacggcagaaacctttcattattttatcacgttacttgataccctcaagggcaatgaatttgaaactaagaaatattatttaaaraaggaaagcatgcaaaatttctaytgcataaggagaggcagagttttatacatgtgctctgtgtatttgagtttctcaagattgatggatttcagaatagcct

SEQ ID NO: 49935 - DNA, 600 bp, Chicken  19866894296338_5
atttaggttccwtatttatatgttgaataagtgaacaccgttggaaattctaatgatcctttcaaakaaatggtgmtatgtactgtgatcaagaatattttctaccttaaaggaaaaatgcttctgtcattttaaaatagaagtaggccctgagttctcctgatgtcattggggacacacgaggatttgtttcagaagctgcagtgcagcaccaggcaatgactggacatacagcytgatgatactgcatcacataaaagcccttccttccctcttatcgcctcaatgctttgatcatcyagaaagtgagacaaaagaaatgttccactgtatattgaccttgattgtaacggcagaaacctttcattattttatcacgttacttgataccctcaagggcaatgaatttgaaactaagaaatattatttaaaraaggaaagcatgcaaaatttctaytgcataaggagaggcagagttttatacatgtgctctgtgtatttgagtttctcaagattgatggatttcagaatagcctaagcagcaattygtagaacagttctttagtcaaagactactatgtctgaatwatttgttttgaa

SEQ ID NO: 49936 - DNA, 600 bp, Chicken  19866894296338_6
aaaatagaagtaggccctgagttctcctgatgtcattggggacacacgaggatttgtttcagaagctgcagtgcagcaccaggcaatgactggacatacagcytgatgatactgcatcacataaaagcccttccttccctcttatcgcctcaatgctttgatcatcyagaaagtgagacaaaagaaatgttccactgtatattgaccttgattgtaacggcagaaacctttcattattttatcacgttacttgataccctcaagggcaatgaatttgaaactaagaaatattatttaaaraaggaaagcatgcaaaatttctaytgcataaggagaggcagagttttatacatgtgctctgtgtatttgagtttctcaagattgatggatttcagaatagcctaagcagcaattygtagaacagttctttagtcaaagactactatgtctgaatwatttgttttgaaatgataaaaagttattcttgaaacaggaaaaactcaatcagatatgagactgtaagtggaggaatgtttaactacacagaaataaatctaaatggtactttcagcgttcctattgtgcttgccaagcattctc

SEQ ID NO: 49937 - DNA, 600 bp, Chicken  19866894296338_7
tcctgatgtcattggggacacacgaggatttgtttcagaagctgcagtgcagcaccaggcaatgactggacatacagcytgatgatactgcatcacataaaagcccttccttccctcttatcgcctcaatgctttgatcatcyagaaagtgagacaaaagaaatgttccactgtatattgaccttgattgtaacggcagaaacctttcattattttatcacgttacttgataccctcaagggcaatgaatttgaaactaagaaatattatttaaaraaggaaagcatgcaaaatttctaytgcataaggagaggcagagttttatacatgtgctctgtgtatttgagtttctcaagattgatggatttcagaatagcctaagcagcaattygtagaacagttctttagtcaaagactactatgtctgaatwatttgttttgaaatgataaaaagttattcttgaaacaggaaaaactcaatcagatatgagactgtaagtggaggaatgtttaactacacagaaataaatctaaatggtactttcagcgttcctattgtgcttgccaagcattctctcccagcagcattccagtttgttg

SEQ ID NO: 49938 - DNA, 600 bp, Chicken  19866894296338_8
atcacataaaagcccttccttccctcttatcgcctcaatgctttgatcatcyagaaagtgagacaaaagaaatgttccactgtatattgaccttgattgtaacggcagaaacctttcattattttatcacgttacttgataccctcaagggcaatgaatttgaaactaagaaatattatttaaaraaggaaagcatgcaaaatttctaytgcataaggagaggcagagttttatacatgtgctctgtgtatttgagtttctcaagattgatggatttcagaatagcctaagcagcaattygtagaacagttctttagtcaaagactactatgtctgaatwatttgttttgaaatgataaaaagttattcttgaaacaggaaaaactcaatcagatatgagactgtaagtggaggaatgtttaactacacagaaataaatctaaatggtactttcagcgttcctattgtgcttgccaagcattctctcccagcagcattccagtttgttgtgtccagctgttgaaaaataaagtatcggtttggaggttttgtgagcaaagtgttcagaattccaagatcattcatatgcatgacattaaa

SEQ ID NO: 49939 - DNA, 600 bp, Chicken  19866894296338_9
ctttgatcatcyagaaagtgagacaaaagaaatgttccactgtatattgaccttgattgtaacggcagaaacctttcattattttatcacgttacttgataccctcaagggcaatgaatttgaaactaagaaatattatttaaaraaggaaagcatgcaaaatttctaytgcataaggagaggcagagttttatacatgtgctctgtgtatttgagtttctcaagattgatggatttcagaatagcctaagcagcaattygtagaacagttctttagtcaaagactactatgtctgaatwatttgttttgaaatgataaaaagttattcttgaaacaggaaaaactcaatcagatatgagactgtaagtggaggaatgtttaactacacagaaataaatctaaatggtactttcagcgttcctattgtgcttgccaagcattctctcccagcagcattccagtttgttgtgtccagctgttgaaaaataaagtatcggtttggaggttttgtgagcaaagtgttcagaattccaagatcattcatatgcatgacattaaatgtttgtataatagtgtcacttgtaggatcattattcatt

SEQ ID NO: 49940 - DNA, 600 bp, Chicken  19866894296339_1
tgcttggcctggccaaatcccgacccttcttaatgccagaagtcctccttcacaacaactgcagagggaaaccccccttcagtgtactgatggactggagcacagtgcactgctgtatttccttcccctacattatcgtgctccagtcagttccctttccctcaccttgtgtttctcccatggaagcctttggggcagcctgctctttcctcacaacactgtcaggcccattgtagcttgcccttaagttttagtggggtaaaaatgacagctaagtaagctgagcaaacaccaaacagrtcatctgcttgtggctggaaccacaacctgccattcacattcacaggtatcactctgacaccccttgccatgcttgtatccccttccattctcatcaaaagcaggtactgaccaggctgtgagcagcaagctgcctgctgaccctgctgaaacatgttatgtcagycaggggtagaaatatgtccctgtttttgcaagcctcactttgctgcaatgtgatgagccatcagtaaaagctagaaaaacctcatcctgagaattttaacttggtttgcttcctagagrtagacaaatgagtgc

SEQ ID NO: 49941 - DNA, 600 bp, Chicken  19866894296339_2
ttgtgtttctcccatggaagcctttggggcagcctgctctttcctcacaacactgtcaggcccattgtagcttgcccttaagttttagtggggtaaaaatgacagctaagtaagctgagcaaacaccaaacagrtcatctgcttgtggctggaaccacaacctgccattcacattcacaggtatcactctgacaccccttgccatgcttgtatccccttccattctcatcaaaagcaggtactgaccaggctgtgagcagcaagctgcctgctgaccctgctgaaacatgttatgtcagycaggggtagaaatatgtccctgtttttgcaagcctcactttgctgcaatgtgatgagccatcagtaaaagctagaaaaacctcatcctgagaattttaacttggtttgcttcctagagrtagacaaatgagtgcagacacatgccgctgtgctcagggaaccacggggagagcagtctgatctgctgcaaaagctcaaggtcagattttgatcccaaacaggaaaaggatgtcactgaggtagcagcgaaycctcctgacttgctgagacgacttctatcacagctgaacaaaaaatggt

SEQ ID NO: 49942 - DNA, 600 bp, Chicken  19866894296339_3
caaacaccaaacagrtcatctgcttgtggctggaaccacaacctgccattcacattcacaggtatcactctgacaccccttgccatgcttgtatccccttccattctcatcaaaagcaggtactgaccaggctgtgagcagcaagctgcctgctgaccctgctgaaacatgttatgtcagycaggggtagaaatatgtccctgtttttgcaagcctcactttgctgcaatgtgatgagccatcagtaaaagctagaaaaacctcatcctgagaattttaacttggtttgcttcctagagrtagacaaatgagtgcagacacatgccgctgtgctcagggaaccacggggagagcagtctgatctgctgcaaaagctcaaggtcagattttgatcccaaacaggaaaaggatgtcactgaggtagcagcgaaycctcctgacttgctgagacgacttctatcacagctgaacaaaaaatggtaagccagatgggtggagagacctccagagagcctgcagagacgccacaggcaccttcatctcagagcttttatgatagctggtagggcacagggaggaaccagaagtgtgcagctctgc

SEQ ID NO: 49943 - DNA, 600 bp, Chicken  19866894296339_4
tgtgagcagcaagctgcctgctgaccctgctgaaacatgttatgtcagycaggggtagaaatatgtccctgtttttgcaagcctcactttgctgcaatgtgatgagccatcagtaaaagctagaaaaacctcatcctgagaattttaacttggtttgcttcctagagrtagacaaatgagtgcagacacatgccgctgtgctcagggaaccacggggagagcagtctgatctgctgcaaaagctcaaggtcagattttgatcccaaacaggaaaaggatgtcactgaggtagcagcgaaycctcctgacttgctgagacgacttctatcacagctgaacaaaaaatggtaagccagatgggtggagagacctccagagagcctgcagagacgccacaggcaccttcatctcagagcttttatgatagctggtagggcacagggaggaaccagaagtgtgcagctctgcaccaaggctgcgtaggcactgagaaagcagagtttgaatatagctggcctggagtcagtgagaggggtgatcctttcctctgctttgacaccacttacttagaacagaacactgtaatgccatccttctctg

SEQ ID NO: 49944 - DNA, 600 bp, Chicken  19866894296340_1
cagccccagtagatctgtgggaagcactcagaaagcccacgtggatctcctggggtcagagggctaatgctttttttttttttttaataccttctgataattaatactccacatccacaatgaaagatcattataaaaagatttgctataactacagtagctccttctccaaatgtaatgaacagcaatcccgaggggtcagcttctgtcaaaaaataaatccatagctgcagattcatgtcggcatttcctacagctctaacaacccttcagcagccagcgataacgaaccggcgcggygcagcccctgggacccacactgtggggcaggagcagctgctcaactggggccgggctgccaacagtactgctggttctgatgctggtgttgctggtgctactggtgccatgggtgttgctggtcccagctcctctgcaggctgctgtgatgctcctctccccagggggacatcctcaccattgcctctgtgggggctgaggggctccccttggcttcaggtcccacagcccccccgctgcctccaccagctatccccagggccattgccatcaagcacgcagcagcagcactgcttccac

SEQ ID NO: 49945 - DNA, 500 bp, Chicken  19866894296345_1
tagctcttgcctggggctacttctgcaggtgctcttcatgggctgtacctccttcaggcctcatctgctgctgcactgtggtgtcctccatggctacatatggagatctgctctgtatctggagcacctcctgccctcctccttcactgacactgatgtctgcaggactgtctctcttcattttctcctagctgctcttgtgcagcattttctccttttcttaaatctgctctcacaaatgttgctcagtggcttggctttggccagtgacaggtcccctcttgggctgattggaactgwctcttttctaacactgaacagcttctggactcttcttacaaaggccacccctttagcccactgctaccgaaatcttgccatgtgggacaaacacacaaagtgaccttaatatttaaatatttaaatattgtttcttttaaggtaaaagctatttcccagcatgagataactgtgagtttcttacactttttgatgtaaag

SEQ ID NO: 49946 - DNA, 495 bp, Chicken  19866894296351_1
  misc_feature (1)..(68): n is any nucleotide
nnnnnnnnnnnnnnnnnnnnnnnnnnnnnnnnnnnnnnnnnnnnnnnnnnnnnnnnnnnnnnnnnnnncacttagccctctctgctccgtatcagcctgccgtagagccctcctatgggtaggcagagcggctcaggcgtatcctccagcacgttatggggctcggctctctgaggcacaaacctgaggcctgcgacacagcctcgcgctttgaccacgcaacggtgtaagagcagaacttcagggctcctaaaggcacaccgaggcgaggtgccggacaggaaggagccccacacggcrctggggaggcggccacacccgcgtgccacacrccggagaccgccagggagcacctgggccccgaggacggccgcagcacggagggaagcggccatgactcatgcttttgtccgcctcaccggagcgcggcgggggtggccgctgacagggagggggcggcccctcgccgcagccccgtctcgatggttcgtgggg

SEQ ID NO: 49947 - DNA, 463 bp, Chicken  19866894296351_2
  misc_feature (1)..(36): n is any nucleotide
nnnnnnnnnnnnnnnnnnnnnnnnnnnnnnnnnnnncacttagccctctctgctccgtatcagcctgccgtagagccctcctatgggtaggcagagcggctcaggcgtatcctccagcacgttatggggctcggctctctgaggcacaaacctgaggcctgcgacacagcctcgcgctttgaccacgcaacggtgtaagagcagaacttcagggctcctaaaggcacaccgaggcgaggtgccggacaggaaggagccccacacggcrctggggaggcggccacacccgcgtgccacacrccggagaccgccagggagcacctgggccccgaggacggccgcagcacggagggaagcggccatgactcatgcttttgtccgcctcaccggagcgcggcgggggtggccgctgacagggagggggcggcccctcgccgcagccccgtctcgatggttcgtgggg

SEQ ID NO: 49948 - DNA, 600 bp, Chicken  19866894296361_1
gtttatttcatcctaaaatcaaaagtattctcttttggaattgcatgtttctttatgtggactgtgaagaatgtcttaaggtgacaaattgacatgcaaccttatgctaaggtgtgggaatatggaccccaccaataccatcaggtttgtctgcttatttttacatcacacagtctataaggtattagttctcacgtttgattttacagtgggtcttgtattcacagtgtttcaccatgttacatacttttccctactctgatttgttgaagaaagaaaacatttgcttatgaaaggagkagactggagggggactagtgctgcactactgcagtgtttctctggatgctttttgccagctccccttgaatgtagtgcacttacagaacagcagccagcactgtgtagagatagcaactgggttttggagcagaatagctgtattggcagggcagaactctgatgctggcatagccactcttgaaaaaacaactcctctcatcactgctcctatagctgatattgcttttctatgtggcgaaggcattttgaaagatctgggtgatttggactcgttacagtacgatttctgattcatat

SEQ ID NO: 49949 - DNA, 600 bp, Chicken  19866894296365_1
cgtcattgttttgtattggactttgttaggctttgtgctttcctattgattctaaagagttagaataatttctctttgagggagtacaggcatatccagtcagtagaccaaagaaatagacagatgcattctgtactcagcatgttcaaatttgagcattatgagattttcagaggcttgaaactcagctatatataagtacctttttgtatagtaccatttgtattctgtcagctagatttaaattttcactctcaaatatagatttaaatggtatagttatttaaaatttatttcccytgctaccattctaaaatagaactttattgatatttaagaggaaaaatagcatgcggtagatatttcacagtaactagtgaggctcaaactctgaccagatgttgtaggtgacttttttttttttttaaataaatggaaaatgcaaggtgcatcttgctgtagacagtgctgcagctaccagccataattatatgagaatacataaacatatacttcactttttttcagtttctaacaattaagttcttaactgaaaataaatcagaaaccccgagtctgatttgcctggcctacagcctt

SEQ ID NO: 49950 - DNA, 600 bp, Chicken  19866894296366_1
gacctctttcctgggagctgcctcccaaccaacccctggcagaggagcaaggatgttcgtaaggactacctagatgcattttctttggcactggctcttccaccttatcataaacatcaatctcttcctccaaaatagctgtacttgtacgtgtttggacaactggaatacaaaatgagaattctaaagccagttacttcaatagtttacatcccaaaattattccgagtaccttgagttcattggtcctttaatcaagaggaaagaaaagagcagaagtctcatattccttgtgtttcygtgctcagctcccaagtgcctgacagcctgcctcccctgagtcagctcagtgacctgctttagtcacccaccaagtaatgaacagcagggttagagcaaagtacctcttagttagaaatgcactgtttattccaatgcaccaaatacaaaaagccctatatttccagatcactgaacattaacacaacaaaggagttttgcattagtctacttttaaaagatccaaattcatgcctgttgttaggcaatagaaacaaccttctaggactaagcccttgcgtttataaagacaccacaaaa

SEQ ID NO: 49951 - DNA, 600 bp, Chicken  19866894296372_1
tgctgtctgctgcaagagggttcccctgatgttctcagccattctcagctaagcagttctggcccttgaggtagaaattagtgtgtggtcttctagctggaggtgtgttgggggtgacaaaagtgagagcctctgaaagcagtgtgactgatgtttgcattatcgaacagggagaaatgttgaatgccagctgtggtttatactcatatatatgtattcctctccatctccacaaagcaaaaaatccagggaaattcttcagataaagagcagaagaaaactatttttttggaggagaarggagcttagccgtaggctgtgagaggctcaaaggccaactgcacacaaaatacacaatggcactgtgtccttccctcttgcttagttgcttaaatgcttgttaaaatgcttgtcccgtggggtacttcacaccagggtctgtgggaatatatcctgtcatctcttagtgcacacacatacactttttaaaatagcaatattgtgaacttaagaaaggaamttgaggctgatggagtaatactaatttataccagctgagacttagccctgtgtctgttgtctgcacacaaaagtatttat

SEQ ID NO: 49952 - DNA, 600 bp, Chicken  19866894296372_2
tctccatctccacaaagcaaaaaatccagggaaattcttcagataaagagcagaagaaaactatttttttggaggagaarggagcttagccgtaggctgtgagaggctcaaaggccaactgcacacaaaatacacaatggcactgtgtccttccctcttgcttagttgcttaaatgcttgttaaaatgcttgtcccgtggggtacttcacaccagggtctgtgggaatatatcctgtcatctcttagtgcacacacatacactttttaaaatagcaatattgtgaacttaagaaaggaamttgaggctgatggagtaatactaatttataccagctgagacttagccctgtgtctgttgtctgcacacaaaagtatttatcagcaaaacacatgctgggcaatttttttacttgtyggtttttgtttttcccaattctttcctcactggaagagcatgaacctatttttttttttaacagtatgtgtggtttcttataaatgaggaggaaaaaactgaaaaatatccccatgaccctaacattgatgtcttcaggaaaataaaggctttgttctggagaccatccaggtttgcatattga

SEQ ID NO: 49953 - DNA, 600 bp, Chicken  19866894296372_3
aactgcacacaaaatacacaatggcactgtgtccttccctcttgcttagttgcttaaatgcttgttaaaatgcttgtcccgtggggtacttcacaccagggtctgtgggaatatatcctgtcatctcttagtgcacacacatacactttttaaaatagcaatattgtgaacttaagaaaggaamttgaggctgatggagtaatactaatttataccagctgagacttagccctgtgtctgttgtctgcacacaaaagtatttatcagcaaaacacatgctgggcaatttttttacttgtyggtttttgtttttcccaattctttcctcactggaagagcatgaacctatttttttttttaacagtatgtgtggtttcttataaatgaggaggaaaaaactgaaaaatatccccatgaccctaacattgatgtcttcaggaaaataaaggctttgttctggagaccatccaggtttgcatattgatgcaaacgccatttgatgttaactgcagttgaggacatcagctgtgtcagggtgagtgaacatccaggagtgcaccctgatgacagagtgaaagcatcccttaagagaaacattct

SEQ ID NO: 49954 - DNA, 600 bp, Chicken  19866894296373_1
aaaacttgcctagttgtgatcctgagtgatcagaattgcttttgagagtgttatctgttgtttaaaatagctgggttttacaggcaaacatttacttatgtcctccactgtaaacaaacacgcactggcttgactcatctgttctgtttgtgtataccagagcacctccctgcaccatgcaggcagcctggctggtacagcctggagagcccaccagaagagatcctccctggacttggtgccatagggaacagatccacctctactgctatccacaatagcaccaaggcactttaagcyggtctaaaccaggcatattttgtccttgagagacagtgagtggtgtgaatacacctcagctgggctttgggagtatcttgtgtctgctgtggacctcggcagcctttgccatttaaactgctctgaggaggataggagtacgagatacagatctttctatttagttcatttctgtctggttttctagctagataaagtctttttgtaccattctgtcctggctgttggacatcttctcttaatttactctcctttagtaacattatgaaattgcagtttcatgttgacagctcagttggt

SEQ ID NO: 49955 - DNA, 600 bp, Chicken  19866894296380_1
atcttgatttttaccaccaccttcctcctcctgaaggggaatgggctaaaggaaaattaatggaattgctagagccggagttgatttctccagggtcttttccatcctggcagcatacttgcaagtcggcagcaaagatgagtttctcattgggttgctggttggcagcacagttactgcagccaggtgagaaggcagtaagctcttctgagcccagaggtgttccgcggtcacttctgggccttgttgcaatacagtgttgattatgagatacttctgttaagggcatctaacaccagytctggctctgggctgatgattcctttttcttttccagaaagatggaaggaagagacaggctttctcctaagctaagtgtcctaaagctaaagtgatgtgcccagcaaacaattaagccatttgttctttgtactggaacagggaggctgggcagaggacagttcccaggcctgccagttacttgctgtgactttttccatccttgtctgactcatgcgttctggatcatcttgacactgcacctgagggtgcaggtattcctgcatgccatccacagagtgttttgtgtctgccagactg

SEQ ID NO: 49956 - DNA, 600 bp, Chicken  19866894296386_1
ctgccctcacgtcctgcacgtggctgtcagggtgctgctgcccccaatgggcctcctgcagtctgcttggtagcagccgcgtcacttctgtaagtcattcagcgttcattgcagtaatggcttgaacttgactgctttatgttccaaatactactttgacccttgggctataatatcagcccagtgattattcagtttcttttatgaagtgcctgagcaccaacaggaaagagcacaagcatccctgtgcagcctgatgttcagagcgctcatctgggctgtctgagcatggcagtgcartgcttggacgtacatcacttgctctcccatggtagctgtgagtggtttaataatactggagtttatgaagtaccaattaatgctatcacctttggtggcgtttgtttgtttgtttttaatgtttgtatttgtatagttagatctgtttggtttcattaccacaaaacatccatgaaatactgtagtgtgaatcatcttttctaagtgagaagtgtatgagcaatggagtttaaacaagtacggactacaactaggaggtttcctggggaaaatgattcctgaaaaggttttagtgctcaa

SEQ ID NO: 49957 - DNA, 599 bp, Chicken  19866894296397_1
  misc_feature (1)..(4): n is any nucleotide
nnnnttcttaataacctgtaaacttgccaagggcacactatgtcccaccatacaagtcatcaatgatgttgaatatctctggtcccaccatcaacccctggggtacaccagtagcaagcgactggcctccagctggactccaatacccctgaccagacatctgagccaggctgctcagcccgttctcagtccaactcactacacacttacctaggctatgtttcacaatgtttctctataaggatgttaaaaggaagacagtactaaaagccatgttaaagtagagataaacaacatccrctgctcttcccctacctaccaagctaataatttcattaaaatcccaaatataattttaagttaatttcctaaaattattcagaagccattacttcagattttgttgttgctatttattatgttcctgagggaaaagaggccttgttgtttgttttctctattactcacacttactccatcacattaattttccttatgcagtatgattaccactgtatgacaatgttactcgcatctctaccgaacaaattaaagatgaacttctaatttgaccatacaacgttggcaggaacacagcc

SEQ ID NO: 49958 - DNA, 599 bp, Chicken  19866894296399_1
  misc_feature (1)..(56): n is any nucleotide
nnnnnnnnnnnnnnnnnnnnnnnnnnnnnnnnnnnnnnnnnnnnnnnnnnnnnnnnaatctgaggactgtgtagtgactcccccccatttttccaggcccctcattttcctccttttactttcatgaatgttatcaatcaaagatgttgtcttttctggacacatctcagggttttgagggcagcactatcacaaatctgtatcaaagactgatttgagtatcccagagaaagatcactccttccaaactcctttagaaataccaatcaatgttgccatctggaggacacacagctttayggtagactctgcttccattttaagctgctgctgtgataccctcatcacgaaagcccaactcaccacaaacagttgttattctgcttttcatgtcccagattttctttggttccttctgcaastgattatatttgttagtcttcttttcgtatgttccatgaagcctatcattattgtattacttttacatctaagaaattgttaccattatcattattagataataacaaccacatctgctatctcaaattgatagaaacagaaaaaacgccaacccaaatcttgtgtttcttttacca

SEQ ID NO: 49959 - DNA, 600 bp, Chicken  19866894296399_2
catgaatgttatcaatcaaagatgttgtcttttctggacacatctcagggttttgagggcagcactatcacaaatctgtatcaaagactgatttgagtatcccagagaaagatcactccttccaaactcctttagaaataccaatcaatgttgccatctggaggacacacagctttayggtagactctgcttccattttaagctgctgctgtgataccctcatcacgaaagcccaactcaccacaaacagttgttattctgcttttcatgtcccagattttctttggttccttctgcaastgattatatttgttagtcttcttttcgtatgttccatgaagcctatcattattgtattacttttacatctaagaaattgttaccattatcattattagataataacaaccacatctgctatctcaaattgatagaaacagaaaaaacgccaacccaaatcttgtgtttcttttaccaaagatttctggtatcttggagaaagcattccccctcaaaacaaggactgcagtgctgctggctgggagcaggcagagttctggctttatctcttttgggaagtcaaacagcaacatttggcat

SEQ ID NO: 49960 - DNA, 599 bp, Chicken  19866894296405_1
  misc_feature (1)..(42): n is any nucleotide
nnnnnnnnnnnnnnnnnnnnnnnnnnnnnnnnnnnnnnnnnnccctacaacgttttctcagagtctgtattacatttctatggaacgatttgtaatgacgtggttgcttttctgctggcttgtctcagcgtggcacattggtgaggtgtgttggctccttccagctgcccccagagctgctcagcagggctgtaccccagcagcgcctgcaacacagccctgtgttgcggaatcccaattaacaaaatgaggccaggcgagggcacgctgctctgccaggcaaatgggtgcttctgaacrgaaagctgatggcacagattgggatcccggggctttatggtgatactaaaaatggtgtgcgggttatgggaagtgaaaaggtggacttagaggaaacgtttcaaaagggttaaaatctgtaagtggcactgagtaaaaatgtaacgagatataaaagtgcctttaatgattaacagtgtgccttcagtcgcatatctgctaacatctaccttaaaacgactgtcaagaagtggacgtacctttttctggacgctgccaacgattatcagctccgatcatctgtggcttttactcaaagt

SEQ ID NO: 49961 - DNA, 600 bp, Chicken  19866894296407_1
attcagtagtataaataatataacttaccaagttatgtgactggggaaaagcatgttttgtgaggacttcaaatatatctcttctactgtgcccttcttgctttaacgcaaagcgtaaatttctcatatcctaaaacaaaggcattagcttttaagagaaccaagaaccaaggcagtaagatacttctacctgatggacaaatgttgtattatacaccaaatatgattcagaatctgcttgcaacatacctcaagctgctgcaaatgctcagtttttttttccttatcccacaaaatacraaagagcttaagaattctaaaaacaacgtggtatcacattctgtgtggtgcacacactgctttggcataaagctacccaaagtgacttcatatgattcactaaaaaaatcccatagactactgaatgcttgcaggatgttttccaagtttacaagtgaaaatttgccagtgactgctctagactacattgtcccaagttgcttgcttctgaagcaacttgtaatgtacagaagacaatctgtacattaacgattgatgggaaaaaaagcgagtctatgtgtgtacatactccattagcaa

SEQ ID NO: 49962 - DNA, 600 bp, Chicken  19866894296408_1
tagcgctactaatggtgctttaaacacagagatagtttggtgctgccagtctttcttcgacagctcttaacatatgcagattgtctcttctgctacaaagcagacatcaggttactcatttctaaaaatgtgttcaaagctgttaagtgtttgccttcagtacaatcaggacaatgtcattcactcagaggtttgctaaaggagtgcgtgcattcaagatagttgattcccaaagccgctgcagttgaatgcgctgcattttcctttgcacactcagtagtagaggaggttgaatgttgyttcaagcctgtattcctgttaccaaatcttcccttctggtcactatggctgctcatttctgtgttcatgtagtgtgttatcacactgacttggtgcataagctccttggtgtttgtttcgatcgtttgctctctgtctgatctggtggggtcagacctcatttaactcctaagatcacgttgtacttttatttaagcaacagttataccaaattctagttgattctttaatatacatctcattctcttgaatatttcattaaataaccagtgttttcctcaatcttaaccaattattgca

SEQ ID NO: 49963 - DNA, 600 bp, Chicken  19866894296418_1
ttagcttaattatttttaaattcagtggtgatcatacaaaaagcagcaagcaaaaccaaagaaaagtaactaaagcaaagcaaaaatcataccgattttcagtctagcagtggcaagaaatcttgaatgctgtcatttttctttaagtcttttcctccactgcaaatagaaaatattaaatcatcttttcagcttctcacgagatctatgcaaaccaatatccatcagcgttctattctaacgcaaaggagagttaaacttaacttgctcgacaggaaaaaatattgagcagagagaaayttatttatcagagagacacctttaaaaacagatcttctaaactcatattgtatggatatacgggaatraattaagcatgggaataaaggcacacacatacatacacttacacagaaaaacagaagttttctcctgcagtttcgaaggaaactgcacaactacttcagaaaataatgatctcctaatggaataatcatgcaccagtaattttaagttaattgttcagtgtgaaatgccatatacagaagaaaacttcagcaagtgaagattaattgtgacctgctttttaagtgggtaggg

SEQ ID NO: 49964 - DNA, 600 bp, Chicken  19866894296418_2
actaaagcaaagcaaaaatcataccgattttcagtctagcagtggcaagaaatcttgaatgctgtcatttttctttaagtcttttcctccactgcaaatagaaaatattaaatcatcttttcagcttctcacgagatctatgcaaaccaatatccatcagcgttctattctaacgcaaaggagagttaaacttaacttgctcgacaggaaaaaatattgagcagagagaaayttatttatcagagagacacctttaaaaacagatcttctaaactcatattgtatggatatacgggaatraattaagcatgggaataaaggcacacacatacatacacttacacagaaaaacagaagttttctcctgcagtttcgaaggaaactgcacaactacttcagaaaataatgatctcctaatggaataatcatgcaccagtaattttaagttaattgttcagtgtgaaatgccatatacagaagaaaacttcagcaagtgaagattaattgtgacctgctttttaagtgggtagggtggcaaatgtggttctacacaatgattggaatgcttattaaaatgtgggcgctaattctatggcaatt

SEQ ID NO: 49965 - DNA, 600 bp, Chicken  19866894296423_1
cactgcatttaataattgcacgttaagttagttaaataccaataataaaagcaacaaaagcaccaccaacaagaaaatgtatgttagaataaaatagtggtggctattttttgtactgtgtgtttgatgagaattggaggtaattccatcaagatgcacacagttcttggactcacctgctcagcgtgcagcactgagcttctcagccaggcacacgtgcttgtacagctggacagtaaatacatttattcatacattacttgctcctaatttgttggcaaagctacataatctcattarggtactaaaaaaataaataaatactttctgcatgcgaagctacagctatataattaagagtcattaatccaagtaattatttttaaatcatattaatggtcttgtccttatggagtgtgtggttttgatgtgcagctgttttgtgtcattggtgagcaaacagttatttaatcaataatttcttcaacttctttttcatgactgctgaaaaaatatggtgttttaattaaacaaatttgactagagaataaaatatatctgaaagcagttcacttctgcgagctgtaatgctgctgtgtt

SEQ ID NO: 49966 - DNA, 599 bp, Chicken  19866894296426_1
  misc_feature (1)..(45): n is any nucleotide
nnnnnnnnnnnnnnnnnnnnnnnnnnnnnnnnnnnnnnnnnnnnnacccagcccattcctggggcagagcagggcactgggtgctatgtgcaggcgggctgtgctgcaacccctccactctgcagttgctgaggttctggggatgccccaaacatcatctactggatgtccaatggctgcagagggatctagagggggctgccaaagcccgtctgagggcatgtggggtgaagtcactccccatccagcagcctttgggaagaacaggctggaccagtttgtcctcatcccagaaaaaamcagtttaacccttggcctgacgcaaccagagtggccacctttgccaaaaagggaacaactctttggaactgaggattcctcgatccaatcctaccgcaggatctggccaaggtaggggtaaaaagccctaaagaaatgggattcactttgtgccttggaatccacccctccacccaacccctttataacttcattagcactttggggaaaaaaaaaacacatttttagagtcaagcagccagtattctgttaatcatgcctttaagattgcatcctggaacccccagatgaacagggtc

SEQ ID NO: 49967 - DNA, 600 bp, Chicken  19866894296431_1
gattacaggttagcttctgtactctacgtcaatgagagcttacaggtgtagagaaaaattccagacctgctagtcaatggaaattttgcttttgacttcagaggggccaggttttcatacatagactttctgtgcattgtttttgttttccacaagtctactctgcttatttttaattgggtggaagaaaatatgctcaaaaatctaattgcaaatcatagtgcagtgatttagatatattctcttcattctcataacttggtttgctatgtctagcttttgctaagttctttctatctmtcttcttctttttttctttcttttccatagtggctttagctactagtgcagcgttttataaatttacattttttttagaaaattatttggaaacatgcttttctaattaaaaatcracttcttccttctacacaaacatgttaacagctaagtaaaagccaaactattaagtagcatttatttaattgtgattttctctagttatttatgaggattcatttggctataattatttaaatacgcttacaatgacctgactattcattgtacagaattacatcaaatttgcacctgtaatat

SEQ ID NO: 49968 - DNA, 600 bp, Chicken  19866894296431_2
attacaggttagcttctgtactctacgtcaatgagagcttacaggtgtagagaaaaattccagacctgctagtcaatggaaattttgcttttgacttcagaggggccaggttttcatacatagactttctgtgcattgtttttgttttccacaagtctactctgcttatttttaattgggtggaagaaaatatgctcaaaaatctaattgcaaatcatagtgcagtgatttagatatattctcttcattctcataacttggtttgctatgtctagcttttgctaagttctttctatcttmcttcttctttttttctttcttttccatagtggctttagctactagtgcagcgttttataaatttacattttttttagaaaattatttggaaacatgcttttctaattaaaaatcracttcttccttctacacaaacatgttaacagctaagtaaaagccaaactattaagtagcatttatttaattgtgattttctctagttatttatgaggattcatttggctataattatttaaatacgcttacaatgacctgactattcattgtacagaattacatcaaatttgcacctgtaatatg

SEQ ID NO: 49969 - DNA, 600 bp, Chicken  19866894296431_3
ttacaggttagcttctgtactctacgtcaatgagagcttacaggtgtagagaaaaattccagacctgctagtcaatggaaattttgcttttgacttcagaggggccaggttttcatacatagactttctgtgcattgtttttgttttccacaagtctactctgcttatttttaattgggtggaagaaaatatgctcaaaaatctaattgcaaatcatagtgcagtgatttagatatattctcttcattctcataacttggtttgctatgtctagcttttgctaagttctttctatctttmttcttctttttttctttcttttccatagtggctttagctactagtgcagcgttttataaatttacattttttttagaaaattatttggaaacatgcttttctaattaaaaatcracttcttccttctacacaaacatgttaacagctaagtaaaagccaaactattaagtagcatttatttaattgtgattttctctagttatttatgaggattcatttggctataattatttaaatacgcttacaatgacctgactattcattgtacagaattacatcaaatttgcacctgtaatatga

SEQ ID NO: 49970 - DNA, 600 bp, Chicken  19866894296431_4
atacatagactttctgtgcattgtttttgttttccacaagtctactctgcttatttttaattgggtggaagaaaatatgctcaaaaatctaattgcaaatcatagtgcagtgatttagatatattctcttcattctcataacttggtttgctatgtctagcttttgctaagttctttctatctttcttcttctttttttctttcttttccatagtggctttagctactagtgcagcgttttataaatttacattttttttagaaaattatttggaaacatgcttttctaattaaaaatcracttcttccttctacacaaacatgttaacagctaagtaaaagccaaactattaagtagcatttatttaattgtgattttctctagttatttatgaggattcatttggctataattatttaaatacgcttacaatgacctgactattcattgtacagaattacatcaaatttgcacctgtaatatgagacaaatatatcagaggagggccactaagatgagcagagggctggagcacctctcctatgaggaaaggttgagggaactggacttgtttagcttggagaagagaaggctctggg

SEQ ID NO: 49971 - DNA, 599 bp, Chicken  19866894296436_1
  misc_feature (1)..(109): n is any nucleotide
nnnnnnnnnnnnnnnnnnnnnnnnnnnnnnnnnnnnnnnnnnnnnnnnnnnnnnnnnnnnnnnnnnnnnnnnnnnnnnnnnnnnnnnnnnnnnnnnnnnnnnnnnnnnncccagtggctttctttgccttgctggaagtgaggagaggtggaatccagggacaaatgctacagccagaggagtacaagaagtacaagaaaggcttttgggcaagcagtggcactgagcagtctgcagggctggaataggatatcagctgcccattgggcagctgagaagcccccatcccatcacagtcayccccctacccccagcacccaaccatgttgcactgatgtattccccacagacatcacattggctgtgctcaacactgcacggccatcagccaagccgaatcaggcggttggaggcayacagcgagccccagccttgctcacagcccttgttatcaggaagaggaaggcgcagcccttgaccctctgcaagcagatggggatgaaaagcatcccagcaggagcagggtgggcatttgccttctctgcgctctgacctccactgctttgaagaagagcatccgtaatctttacaaggccttg

SEQ ID NO: 49972 - DNA, 600 bp, Chicken  19866894296436_2
gctttctttgccttgctggaagtgaggagaggtggaatccagggacaaatgctacagccagaggagtacaagaagtacaagaaaggcttttgggcaagcagtggcactgagcagtctgcagggctggaataggatatcagctgcccattgggcagctgagaagcccccatcccatcacagtcayccccctacccccagcacccaaccatgttgcactgatgtattccccacagacatcacattggctgtgctcaacactgcacggccatcagccaagccgaatcaggcggttggaggcayacagcgagccccagccttgctcacagcccttgttatcaggaagaggaaggcgcagcccttgaccctctgcaagcagatggggatgaaaagcatcccagcaggagcagggtgggcatttgccttctctgcgctctgacctccactgctttgaagaagagcatccgtaatctttacaaggccttggagataggagtgctcaggacacacacaagccatctgctcccattttcctctgctttcccaccaaatccctccccactgacccaatccaagctgaagtccttgcctctgcagtaatga

SEQ ID NO: 49973 - DNA, 600 bp, Chicken  19866894296445_1
aagttctgcatgacatggagtgaggtaacaagggcattttttattttctcaatgagtttattattttatcttgatgcactcttcattactcaacacagtatgcttggtgctgcactttctcctacgttatcgttacttaatatattaagatgaagaatcagtgtaaccccagattttcagctccaccctgatctcagtatttttgcattattttactcgtgcctatttattttgctttttattatttcttagattccaaaattctgtaatcacctgtgattttatgcattttctctcacrttatatattctgttgccaccttttaaaggagcccaggaccccgctgacctgctgcgttgtcagaacccactgcttgctccagtgcaccttgctatccaccaagatccacagatcctttccagcagagctcctccacaaccagtcagaccccagcctgtgtcattgcagaggttattcccactcaggtataagatttkgcagctgagcttgctgaattttctaaggatcctgtttgcccatttctctagtatgccaaggttgctctggatgaaagcactgccctcaagagaattacctggt

SEQ ID NO: 49974 - DNA, 600 bp, Chicken  19866894296445_2
tatttttgcattattttactcgtgcctatttattttgctttttattatttcttagattccaaaattctgtaatcacctgtgattttatgcattttctctcacrttatatattctgttgccaccttttaaaggagcccaggaccccgctgacctgctgcgttgtcagaacccactgcttgctccagtgcaccttgctatccaccaagatccacagatcctttccagcagagctcctccacaaccagtcagaccccagcctgtgtcattgcagaggttattcccactcaggtataagatttkgcagctgagcttgctgaattttctaaggatcctgtttgcccatttctctagtatgccaaggttgctctggatgaaagcactgccctcaagagaattacctggttgccccaattttgtgtcccttgaaaatttgacaagagtcccgttatctcctccaggtcaccgacaaaaaagttactggacaggtcctaagatgtagtactccccattttaccagcattcaggtagagcataatccattaaccactacttcctgatgtcaatcatccaaccactcacccaactagctgatcacacttt

SEQ ID NO: 49975 - DNA, 600 bp, Chicken  19866894296447_1
ttgctagatctgcccgtgagctgtgtgcatccttccatgcagcatctgttactggccactgagacaggatattagattagatggactcctgtgtgaccctgcctggtaagccctgctccatggtgtgccagtgctgggcttatctcccatgtgtgcaactgctgccagtggaaagcagctctccaaggtgctgtggttggatgctgtgcctcacaaggagcactgcccccgcagttcttgtgctcagagagcctttcttacaattaaccctatcttgaggtggataggattgaattttcyatgtccagggacgcagtagaaagaggagagcagaggagctgctgccttgtgctcaccatgtcttggccagcagtgtgtcttgcaggctggggtcagccaggtcctgacttctcaagttagctcacttgtgccttcttccctttctgctccgattgatggctcagaagtggacatgtattgcagtttggaaaacatcagcattctgatttcggtgttattattcctttccccaccaaaaaaaagtttatgaacctgaaaggatagtgcctatggcacacagtgcccagcacaaggaaactg

SEQ ID NO: 49976 - DNA, 600 bp, Chicken  19866894296447_2
cagggacgcagtagaaagaggagagcagaggagctgctgccttgtgctcaccatgtcttggccagcagtgtgtcttgcaggctggggtcagccaggtcctgacttctcaagttagctcacttgtgccttcttccctttctgctccgattgatggctcagaagtggacatgtattgcagtttggaaaacatcagcattctgatttcggtgttattattcctttccccaccaaaaaaaagtttatgaacctgaaaggatagtgcctatggcacacagtgcccagcacaaggaaactgggacygaggagkgggtctggggtgctgttctgctgtaaatacaccaggagcaccactggtgatgggcagcaagcragcaggtgtgatggggttttccactccaatttaaaccagactaaaaacctgccccactcactgctcccagctattgggtggatcagtttggttgccgtgagcgggagctttattgtagctgtttctttctgacactcagggttgtttgtttttatatgataggactacaaagctgatgaagaccctgcgttattccagtcagttaagactaagagaggacctttggggcc

SEQ ID NO: 49977 - DNA, 600 bp, Chicken  19866894296447_3
gcagtagaaagaggagagcagaggagctgctgccttgtgctcaccatgtcttggccagcagtgtgtcttgcaggctggggtcagccaggtcctgacttctcaagttagctcacttgtgccttcttccctttctgctccgattgatggctcagaagtggacatgtattgcagtttggaaaacatcagcattctgatttcggtgttattattcctttccccaccaaaaaaaagtttatgaacctgaaaggatagtgcctatggcacacagtgcccagcacaaggaaactgggacygaggagkgggtctggggtgctgttctgctgtaaatacaccaggagcaccactggtgatgggcagcaagcragcaggtgtgatggggttttccactccaatttaaaccagactaaaaacctgccccactcactgctcccagctattgggtggatcagtttggttgccgtgagcgggagctttattgtagctgtttctttctgacactcagggttgtttgtttttatatgataggactacaaagctgatgaagaccctgcgttattccagtcagttaagactaagagaggacctttggggccaaactgg

SEQ ID NO: 49978 - DNA, 600 bp, Chicken  19866894296447_4
tgtcttgcaggctggggtcagccaggtcctgacttctcaagttagctcacttgtgccttcttccctttctgctccgattgatggctcagaagtggacatgtattgcagtttggaaaacatcagcattctgatttcggtgttattattcctttccccaccaaaaaaaagtttatgaacctgaaaggatagtgcctatggcacacagtgcccagcacaaggaaactgggacygaggagkgggtctggggtgctgttctgctgtaaatacaccaggagcaccactggtgatgggcagcaagcragcaggtgtgatggggttttccactccaatttaaaccagactaaaaacctgccccactcactgctcccagctattgggtggatcagtttggttgccgtgagcgggagctttattgtagctgtttctttctgacactcagggttgtttgtttttatatgataggactacaaagctgatgaagaccctgcgttattccagtcagttaagactaagagaggacctttggggccaaactggaaggtaataagaactgactttacagccttatgaagtgtcatcagtaaagaaaaaaaccatttg

SEQ ID NO: 49979 - DNA, 600 bp, Chicken  19866894296447_5
actgatgggaggtgcttccctatctgtaggaacagccaggaagtctgtaattcattcaaaaatgcatatgtaaattatgccacgcagctaggaatcatgtctatgtatgggtaagagcacacctttctgccatcatcttcatggaagggaaggtgaaggagagaggaataggggagagcatgccagggtttgattcctttttgtggacaaagcagaacccaattgcatttgttttgtgtttttgtgagaagtaaactttcatgggtgatgatgtgatttttatgacctgcatcttttctkmagtgagtgttttccaccattatgctgagcaaattgatgcagctcagattataattgcctctgggtaatagccccagaagtataaaataatttggcaccagctattgtaattaagcttcattgtcccctcagaacctcaggaagtgtattgcagtggaagtgatgaaaatggaatcgatgctacaacttagatttaaaatatatatttgcagcattaatggaattgacttatagatatataagacagctatgcatgcagctcagttgtttgttaatccctgttgctctgtgttgagatta

SEQ ID NO: 49980 - DNA, 600 bp, Chicken  19866894296447_6
ctgatgggaggtgcttccctatctgtaggaacagccaggaagtctgtaattcattcaaaaatgcatatgtaaattatgccacgcagctaggaatcatgtctatgtatgggtaagagcacacctttctgccatcatcttcatggaagggaaggtgaaggagagaggaataggggagagcatgccagggtttgattcctttttgtggacaaagcagaacccaattgcatttgttttgtgtttttgtgagaagtaaactttcatgggtgatgatgtgatttttatgacctgcatcttttctkmagtgagtgttttccaccattatgctgagcaaattgatgcagctcagattataattgcctctgggtaatagccccagaagtataaaataatttggcaccagctattgtaattaagcttcattgtcccctcagaacctcaggaagtgtattgcagtggaagtgatgaaaatggaatcgatgctacaacttagatttaaaatatatatttgcagcattaatggaattgacttatagatatataagacagctatgcatgcagctcagttgtttgttaatccctgttgctctgtgttgagattag

SEQ ID NO: 49981 - DNA, 324 bp, Chicken  19866894296447_7
tataaaataatttggcaccagctattgtaattaagcttcattgtcccctcagaacctcaggaagtgtattgcagtggaagtgatgaaaatggaatcgatgctacaacttagatttaaaatatatatttgcagcattaatggaattgacttatagatatataagacagctatgcatgcagctcagttgtttgttaatccctgttgctctgtgttgagattagtgcagtcatttactaagatgtagagtaatattaaatgcatttcactgaaatcaagtttaaaaacgaacctttccaattrtccataaacagaaagagctagcaa

SEQ ID NO: 49982 - DNA, 600 bp, Chicken  19866894296462_1
agcatccactgggtgctccttgtcctggacgatgtgctcaagtctttatcttgctgcatgcatagcagtgtgcagcaggcttgttgacagcattcagcttcttttcagacaaaaaaatatcggaagtacttctgagaatagagtccctaaattatccattaagatgtacttgtgtgtcagcttctaagtcaaatgtcttggggccactttgtttacccattagaatcctgttctcttttatgcagacctattcagaagagacagaactaagccacaaacctatatcttctgaagttgccrtatacgctagtctgttaatcaggcatttactattgcatatcttgggtgactgacaagcttagtttcttggagtggaggtgctttgtgctgcccagtggtcgcctggctccacatttgccttcctgaataaatcatacattctcctttttgtatgacatgtctagttctgtgatttaagagctttaacatatagctcttgtttgttcttgcttttgttaataactaatcatgaattatccatgaatgggctaattaggcattaaccatatattatataccaaccgaaagaccagatttttc

SEQ ID NO: 49983 - DNA, 600 bp, Chicken  19866894296479_1
actgatccactggtgaaaaggagggtgagagaggaggcaacaggacattaccattttacccaggggaggaaaggaaggactgtgggaagcaaaggctgcggatagcaagaaaaagaacaaacggaagaagagacagtgaagctgcccagaactgaagggactgtgtcagatggatggcaaagaggttggctgaggaggtagtggtacacggcccagtgtgagcacctcatctgcaccccctcatgctgctcttgcttaaatgcagtccctgcatcagctggttctgctgctgctgacagrgagacagaggctgttcagtgcagagcagatatcagtcagcacagccctgaagagcagcagtgttagattagtatcacaccaatttctgtgacagaaggtgcgatatcttaactggctgctatatatacgctaagatatagcccagctcctaaggccgagatagagctcattatgtggtgatgcttttattccaagctccagactcttctacaactaatcaaagcatgattcttgttttgtctgcctgtgcccacacatgaatttcagatgcatgattgtaacacttgttaagatcatgag

SEQ ID NO: 49984 - DNA, 600 bp, Chicken  19866894296479_2
caggaagctgaaatattgcctgcttgtaggcaaatatataaagaactgaacataagcaccctcatttggagttgtaaacaggatttaaatgctacataggccttgtgacttctcttttgagttctgccatccataattcattatttgttacacgtgactcatcggttaaatcatgcatatcttcatttgcttgctagtgagtttatctaaagcctatctatgacaaaaaagattcccgaaatgtgagtaaaagaaattccttttgcaaatgttgatagaaaatgaaaggaaaacagaagyagggtcagtgtgagaaaagacagaccctgaatgcgtaaaagatttagatgtccttcagttttcatttaagccaagctgtgccaattcacacagagagagatgaggcacaaaagatgcacatctatttgatataggtaaattactattttatcacattctgtggtctcttttggagctgtaatctgagctgcggatcaagtaaaggtgacacagacacaaagagttagccaggctccagtgggcgtaaggcctgggaatcagtttccaaattttccagcttgtgctgagcatcagatatca

SEQ ID NO: 49985 - DNA, 600 bp, Chicken  19866894296482_1
agcacagatacaggttgggtggagaacggctttagagcagccctgaggagaagtatttgtgagtgtcggttgatgaaagatgtaacatgagccagcagtgtcctcctgcagcacagaaggccaactgtatcctgggttgcatcaagagaagtgtgaccagcaggtcaagagaggtgactctgcccctctactctgctctcatcagaccccacctggagtacggcatccagttctgccctcaaaacaaaaaggacatggagttgttggagcagatccagaggagggccacaaagatgatckgagggctggagcacctcccctacaaaaacaggctgtgagagctgaggctcttcagcttggagaagagaaggctccgyggggaccttatagtgaccttcctgtagggggcctacaggaaagctggggatggaacttcagggtctagaaggaggtgtatgtgcccattgtcaggggcgttggaactaggtgatcttaaaggtcccttccaacccagaccattctatgattctaaaaggaaccccaccctttcaagggcttagagctaattgcaaacatattctaaatcccatcaaaatgaag

SEQ ID NO: 49986 - DNA, 577 bp, Chicken  19866894296482_2
agatgtaacatgagccagcagtgtcctcctgcagcacagaaggccaactgtatcctgggttgcatcaagagaagtgtgaccagcaggtcaagagaggtgactctgcccctctactctgctctcatcagaccccacctggagtacggcatccagttctgccctcaaaacaaaaaggacatggagttgttggagcagatccagaggagggccacaaagatgatckgagggctggagcacctcccctacaaaaacaggctgtgagagctgaggctcttcagcttggagaagagaaggctccgyggggaccttatagtgaccttcctgtagggggcctacaggaaagctggggatggaacttcagggtctagaaggaggtgtatgtgcccattgtcaggggcgttggaactaggtgatcttaaaggtcccttccaacccagaccattctatgattctaaaaggaaccccaccctttcaagggcttagagctaattgcaaacatattctaaatcccatcaaaatgaagacttttagtagtcccttttgtttaaatacattattttggtctgcaaattattta

SEQ ID NO: 49987 - DNA, 600 bp, Chicken  19866894296484_1
cccagaaagcccccaaaagagctgatggggacgctgaaccctggggacatctttttttggtaaataaattcccgacttcactcacaccatcctaatgtggaggctgttgtcctgcctcaaggaatgaggcttgggctctggtgcctggctctggagctcttttcagcttcaggttcctcatcttgaggagtctaccaatgtataggatttgggagtgctgtctcagcactaaagagaacatgggaactcggtgtccagacaacagggtcaatgaagaccagtgcttttattgccttaacrctatagaagtgctcccagtagctgagaacatgcttgtgttcccatcgtgtggcagggatttgcactgagttccctcataggatgtctccaagatagaaacctgaagattttggaaaaagaatgaatatcatttgctcctcagctgtgatttttgcagagtatggtggcagaggaatcactgccagtgtggaatctggtgagtgctctggggatatccagacccatccctctgcagccagtgatgcctcctttccccagcctgcccactcccagtttaaccattaacaggctggctggccc

SEQ ID NO: 49988 - DNA, 600 bp, Chicken  19866894296487_1
atttttttaaattaatgctgatttagtctttcctctttttctgaagaaaaaacaattcaagttgggatttttttccctgctggtaccctggcacatatgaaatttatagcatgaatatacagtatgttcattggaacttatcgtctcagctgctgaagtgataaaggcactcatcagagtatggacgggtaactttttctccctgtaatgattactccagaatcagaagtacaacagaacttgagggcagggagttgcatcttgtaacttgcttcgtattgtactcttggacagggccaygtgttttgaaagcagcaacagttccaggggtgtttgccctaggagattagcagaatctgtgcactaagaagctacatttgcatttctgattatcacctgctgagtccaggccacagagtgatttctgtttccaagtcagctgaaagtaaaatgaaatggaagcatgcccctccccaaaataagcaggtaaattaatcagtaatgcatttttttttaatggacttaacaattacataatatttttttttatgagaccatgtcacattgttggtgaatctagatgcccggttcagcacatgg

SEQ ID NO: 49989 - DNA, 600 bp, Chicken  19866894296490_1
acagtatccttagagttggaaaggacccttaaaggccattgagtccaacaaccctgcaatgaacaggggtatccacagctcaagcaggttgctcagagcctggttcagcctggccttgagtgtctccatggatggggcattcaccacatccctggcaacctgttccagtgtctcaccaccctcactgtcaaagacttttccttatattcaaatcccctctctaagttggaaaccactttccttcctcctgtgaccacagacccttctaaagaacctgtccccttctttcctgtagctccycwttatgtactgaaaggtcgctatcagctcaccttgtagccttctcttctccatgctgcgcagcggcagctgagaatttgctctatcaaattgtgttattgtgctctttgtgtctgttgcagtttccatggaaatacataggaaacattccttttggaaagactgtgtggcccaggacaatttccattcactaaatgtggcccaggcaagacaaaaggctggacacccatgggctaaggattggagtgggcaagagaggaaaggttttgctgggggtctggagttctcttaatttgggct

SEQ ID NO: 49990 - DNA, 600 bp, Chicken  19866894296490_2
agtatccttagagttggaaaggacccttaaaggccattgagtccaacaaccctgcaatgaacaggggtatccacagctcaagcaggttgctcagagcctggttcagcctggccttgagtgtctccatggatggggcattcaccacatccctggcaacctgttccagtgtctcaccaccctcactgtcaaagacttttccttatattcaaatcccctctctaagttggaaaccactttccttcctcctgtgaccacagacccttctaaagaacctgtccccttctttcctgtagctccycwttatgtactgaaaggtcgctatcagctcaccttgtagccttctcttctccatgctgcgcagcggcagctgagaatttgctctatcaaattgtgttattgtgctctttgtgtctgttgcagtttccatggaaatacataggaaacattccttttggaaagactgtgtggcccaggacaatttccattcactaaatgtggcccaggcaagacaaaaggctggacacccatgggctaaggattggagtgggcaagagaggaaaggttttgctgggggtctggagttctcttaatttgggcttc

SEQ ID NO: 49991 - DNA, 600 bp, Chicken  19866894296502_1
agaactctgcaaaacccatttgtttatctgtgggcagacatcattcactactgcattaatttttaaaggagctacagagtaaaaaggtgatgttcttaagccattacagcagtttgcaaacttccagcagctttttctaaattttcagtagtaaaaatgttggcaaaatacttttagccaactactcttcctacttctgacaggatgctcttttttattacatcttcagaatgcattcatcctcctctcctctagttatggaacttagtttgtccttaaatagaagatgcaattaaaatwttgcagcctcaaatgatctgtagtactactttgctgtattaatgctcatcagggaaaaatgtatgctaataaactaaaagctaatgaacaatacttactctagtccatgcagttgtttccaagccagcttttaggcaaacagtgactacaacatactgtaaaggaaaaagacaaaagacagcttcagtatcagcactcaaatttggaggtgttcacaagccgatctccctttaacacctaaaaatggaagtaccatttaggtaccaacccacctcctggagcctggcaggatgggggggg

SEQ ID NO: 49992 - DNA, 600 bp, Chicken  19866894296510_1
cacgacttacaggtaggcagtacccttaagtaatgttgtttattacccaggtagctgtcacagaaactcacctgaccagggaattggagagcctacctgaaaatactccagtacctgctggagaactcactattcctctagtccgcagagtgtctgaagagcttatcctatctaggttgccgaaattgtcactgaaacttgggaataaaactgaccaacccaaatgaaagggtagaagtccgacatcactttattgtagtgctggatgcatgggcgatcactctgtctcagcatgcacasccatgatcaaaagcacacagattttatatgtgttaataatatgtgmatattcatacagtttctacgaagtgtctgcctattcctaggattgctatgcatattaaaatctagtactatgcatgcactgtcttaatttggcgttctggtaagaggtcttttgtgatcatatccaggcaaaaggttgtgtgttacagaagccaggtgccatatatagtcagaaacctatttacaaatagatattggtgttgactaggttttcagttggtctttcagccttgctgtggtgcctattatcagccc

SEQ ID NO: 49993 - DNA, 600 bp, Chicken  19866894296510_2
ccaggtagctgtcacagaaactcacctgaccagggaattggagagcctacctgaaaatactccagtacctgctggagaactcactattcctctagtccgcagagtgtctgaagagcttatcctatctaggttgccgaaattgtcactgaaacttgggaataaaactgaccaacccaaatgaaagggtagaagtccgacatcactttattgtagtgctggatgcatgggcgatcactctgtctcagcatgcacasccatgatcaaaagcacacagattttatatgtgttaataatatgtgmatattcatacagtttctacgaagtgtctgcctattcctaggattgctatgcatattaaaatctagtactatgcatgcactgtcttaatttggcgttctggtaagaggtcttttgtgatcatatccaggcaaaaggttgtgtgttacagaagccaggtgccatatatagtcagaaacctatttacaaatagatattggtgttgactaggttttcagttggtctttcagccttgctgtggtgcctattatcagccctagcagggtacagtttacctcctactcaaagctggtagaatgttga

SEQ ID NO: 49994 - DNA, 600 bp, Chicken  19866894296513_1
atttgtctgaaattatgtacatgtagccaaactagtgagtcttcacaatcatgccttaatattctcaactgaagtaggtaaatggttgttatgcattgtcagaattgacaggggtcaaaaatgcataccagagcagctgggagtacattacacactattgccctgtcctatggccagcctaaattcatttgtctggaacagcactgagtgaccaaacatgcagtaccctgaatgctctgagacgacaaacctccagccctcattgcatttccatacccacttgcactgtactttgaacaytgtggtggcatcaggatggcctttgtgactacgtattttgatgtcttctgcagaaaacagcacacaatcaaaactgtgtacctatgagtccaaggaaacagacttatttttcgttgatatcatgacaggactatgcctattttggtacagtctgggatacaggggaaggacacacattaattgtaacacctacgtggaggtgacatttaatttgaatgcacaaaccatagcgagtctgattttattaaagccagctttgggtacagatctgagaagagaacctcaaatcgcctgaagcct

SEQ ID NO: 49995 - DNA, 600 bp, Chicken  19866894296520_1
gacatttacagcagctgcagtccttttgccaacttcagctctcagttttaaactaaaagttgttacttgcttagtgttcttggcacaggttccttgattctggagtttgtccttttcttttggctggaggagccacccatagggcattcagaaattctcagttctcttccaagatttcagtttttattatactgtatcccttctcactgtggtttgagtaatgttttagagtggtctgaatgagcaaagattgttttggtggctacaagactttctctttttgatgctctgtcagctgcygaattgtgtgatgacttgtacaggctaaaaggggagagcttttgcgtgtgcgaagcaggtatgtaatggctcagctgctgagaagtcttttgagctctgagtaactgctaaagaaaaaagaattcgtgcttggaagacaaattttgacagctggtcagctgtgctatggccacgccaaatggagcagtggtccagctgttttgtacaggcactatagggaggaacaaattaacttgcttattccaaaagagagctaaggatataaggtgctctcagtagtgcaaagagggtcacagagat

SEQ ID NO: 49996 - DNA, 600 bp, Chicken  19866894296522_1
tttttctttcagattaccacaggacatcccttcgtgcttttcaaaggctaacgtcaatactgagacccattactctttcttgttccagtaggtaagaacacacgctacatactgcagcatagcttcatcatcagagctacataatcctcacttgtaatctttcaataaaaacatatattttaactagggttgatctgaacagcatctgagaatgatacagagagctgaccttagtttccatgccatttcgtgctttgtttgggacatatttaagttcctagtttctgtgcaataaccacrctttcatagtccttccctcagcaggaaggacttaaataagacttttgtgttttagaagcctttaagcagcagctttgctgcctactgttctcttcatacattcagagaaatctttgtgcctggaaaaacaccatttagttttgcagaacttgccgtagcttctctcggttattttaatctcctgtcagcgctttcttgaatcacagcaaatttcctaccattttacagctgatgccactctccctgttctcacgacagcccctactaccagcttcaaagacagacctccacagtgcagta

SEQ ID NO: 49997 - DNA, 600 bp, Chicken  19866894296529_1
ttgtatgccatgtctgctagggtgcataaactctgttagttagctactgtgatgagctcttactaagcagttgtgttctctttagccatctgcatacggcggtgagaagatgcacagcccagcacatggcagatattgtagaacgtatgggacctgagtgggtgctgtctggaaccaaaggtgtcactgataggactttccctgcgattgccaggtttgcactggatagttcacagcaaacaaggttagtaaagtcaataattaagcaaagcatgctagaggtggctgaaacgtctgcayagctcagtgtacggccctccgcagtggtagatggctgttaagataatacgtgatgggaattacctgaatgcctcctgcagctgtgcccacttggcagcaggaaagagagggaatcaatgggcatactcttctggccatatgccctatccaggctgtgctgggaatctgagcactaggatgcacgctgtctgactggcagagctgggccaccctgtccaaacacagccaatacttgaacactgaaatggaagactgttctcaatttttaacttgctcagttgttggtcagataaatattgt

SEQ ID NO: 49998 - DNA, 600 bp, Chicken  19866894296552_1
tagttctgcatccttcttccagactgattattttgtcatgttaaagcccttaaagctgtaaaatacaaaccaattgtgaccttactactggactgcaaggagcctaaaaagaggcagggctcagttctttaatctgtctttagcttctccaagctgatgtattctggatactcaatcatcaaaagaagcaaaaacctgacttaaagttgtaatggcttccagggaggcatagaaatgtaccagagaagattactgtgtgttgtgtgcacattatggaagaaaggatacttacagtgatgwgaattttgctgactttgtaaaaggggtgcagtgtcgcaagctgaggcatcacacaagcctgaaaatgagttttgccttggggttaaagtttactttgttttcaagactgcttgtggtttttcaaggttaaaggaagagactccccacacatgaggtctcaacctaaggactgccagagaggctgaaggcctcctgctctgttgtcacattttctgcaatgtcttttgtgcaagcaggcatccacatgagctggctcagtaggtggttagcagcactcgttggcaaaagctgcttgtcagg

SEQ ID NO: 49999 - DNA, 599 bp, Chicken  19866894296559_1
  misc_feature (1)..(23): n is any nucleotide
nnnnnnnnnnnnnnnnnnnnnnntctacataaaaaaaagttttactgagcatgttcaagcttctggtgcatgaatcaactcatgaaatggacttaagcacatacttttttttttttccaatagcctattttttggaaaaaaaacttctagttttggtggtgtaggtatgaaattcaaaaagaaccagagatggtattctgatcctgaaataaatttgcgctgctggtgtatgaggagagaaaactccctagggaacccatcctatcagtgagattcttgttagaccttaccaattacttygtaaagctgaacgacactttgtcatgtcaatgtagcataatttgtctttttttataaatgttcccctcgtcagctaggatagccaacctgcatcttacagctgaggtactggaattgatttgcctttgtcattttattttacaaatgacatctcatttcaatttgaactttcaatttcattcaacagtggaaagaacaggatctcataatggttaaaagttgtctgtctgcaaacgaaattgagctctgttattgtattatctacacctatgaaagggggagtaattcactgcagttct

SEQ ID NO: 50000 - DNA, 600 bp, Chicken  19866894296560_1
cattatgttgtccacaaaatgctgcctttaaatctaatgaaaaaagaaaaaaggaagttgggcctgtaaatgactaactcttttaataaacagtcctagtttactctttatattctctctatatttttattacaatgttcaatatatatcaatgaagaaaattcctggattgcaagtaatggatgcacattcttaaaaattaataaatgtagtagacttcatattgcaagttacaacaaaaaagaactgctatgaggaacagttttatagtatagcagcaccattcattactttcatcgytctcaatgcaagtaatctttaacaagaaactcaaaaaagtcagaaagaaataaggatccaagtcatagcaggactgaaactggmrttgtgtatggcattaaaactttgtatcttacctatattcacagtcatcttccacacaaaatgcatgtcaacacttgtcatctaaaagcagcctcaagatcaggtccagaatacagacaactatccaaaaaggtctaataggtatgcccaggcatactaaactgcataccattatgaaagagcagtgtgtaataagcatactccttgttggttcag

SEQ ID NO: 50001 - DNA, 600 bp, Chicken  19866894296560_2
aataaacagtcctagtttactctttatattctctctatatttttattacaatgttcaatatatatcaatgaagaaaattcctggattgcaagtaatggatgcacattcttaaaaattaataaatgtagtagacttcatattgcaagttacaacaaaaaagaactgctatgaggaacagttttatagtatagcagcaccattcattactttcatcgytctcaatgcaagtaatctttaacaagaaactcaaaaaagtcagaaagaaataaggatccaagtcatagcaggactgaaactggmrttgtgtatggcattaaaactttgtatcttacctatattcacagtcatcttccacacaaaatgcatgtcaacacttgtcatctaaaagcagcctcaagatcaggtccagaatacagacaactatccaaaaaggtctaataggtatgcccaggcatactaaactgcataccattatgaaagagcagtgtgtaataagcatactccttgttggttcagtgttggtgctattctgaatgcagtatatgcaatatcttctcagagatatacttcccattacgaagtatgtacactaaatcagtc

SEQ ID NO: 50002 - DNA, 600 bp, Chicken  19866894296560_3
ataaacagtcctagtttactctttatattctctctatatttttattacaatgttcaatatatatcaatgaagaaaattcctggattgcaagtaatggatgcacattcttaaaaattaataaatgtagtagacttcatattgcaagttacaacaaaaaagaactgctatgaggaacagttttatagtatagcagcaccattcattactttcatcgytctcaatgcaagtaatctttaacaagaaactcaaaaaagtcagaaagaaataaggatccaagtcatagcaggactgaaactggmrttgtgtatggcattaaaactttgtatcttacctatattcacagtcatcttccacacaaaatgcatgtcaacacttgtcatctaaaagcagcctcaagatcaggtccagaatacagacaactatccaaaaaggtctaataggtatgcccaggcatactaaactgcataccattatgaaagagcagtgtgtaataagcatactccttgttggttcagtgttggtgctattctgaatgcagtatatgcaatatcttctcagagatatacttcccattacgaagtatgtacactaaatcagtcc

SEQ ID NO: 50003 - DNA, 600 bp, Chicken  19866894296561_1
ggctcaaaataccagtttccccagaaacgcttgaaggcagtgggaaggtaatgccaaatgccctccctttgaaggccctcagcaggtaacacccaaaaacactttgcttgttcccagtacagacagcgatttcgttcctatcaataaatcagcagggtggggtggaggaggctggctgctcactgcgaaatctgggctgcaggctcctgctggcaacacggaggaggcaaagctgctgggaaaatgtttgctagttggacttttgcaggctggagtctaatctgagaacagagaaactcrattaatgacagcaagaaggactgattcttgggtgatgcgctcagagactggaatagagtgggggaaaaaaggagaaaccttttaaatgtgacatgatggtctcatatgtcaaacctggggtgggttatgrggttttgcagcttgcttctgctagccaggaacatgagttcagctrcaacacggttgtgctgctctgcaaggcttcctgagctgagtctgcccgygcacctaytccaaacacatctttgcttttgttaacaattctcagtaacaatgatttggttaaaataaaccagtgat

SEQ ID NO: 50004 - DNA, 600 bp, Chicken  19866894296561_2
ttcgttcctatcaataaatcagcagggtggggtggaggaggctggctgctcactgcgaaatctgggctgcaggctcctgctggcaacacggaggaggcaaagctgctgggaaaatgtttgctagttggacttttgcaggctggagtctaatctgagaacagagaaactcrattaatgacagcaagaaggactgattcttgggtgatgcgctcagagactggaatagagtgggggaaaaaaggagaaaccttttaaatgtgacatgatggtctcatatgtcaaacctggggtgggttatgrggttttgcagcttgcttctgctagccaggaacatgagttcagctrcaacacggttgtgctgctctgcaaggcttcctgagctgagtctgcccgygcacctaytccaaacacatctttgcttttgttaacaattctcagtaacaatgatttggttaaaataaaccagtgatttaattcttggcatagtatctacctcagtccagcaaagtcttcaatgttggaaggatgttgctattcctattgtgcaaagcaaaataaggtttatcctgaacattagtctagacagagcaggttaccata

SEQ ID NO: 50005 - DNA, 600 bp, Chicken  19866894296561_3
ctgctcactgcgaaatctgggctgcaggctcctgctggcaacacggaggaggcaaagctgctgggaaaatgtttgctagttggacttttgcaggctggagtctaatctgagaacagagaaactcrattaatgacagcaagaaggactgattcttgggtgatgcgctcagagactggaatagagtgggggaaaaaaggagaaaccttttaaatgtgacatgatggtctcatatgtcaaacctggggtgggttatgrggttttgcagcttgcttctgctagccaggaacatgagttcagctrcaacacggttgtgctgctctgcaaggcttcctgagctgagtctgcccgygcacctaytccaaacacatctttgcttttgttaacaattctcagtaacaatgatttggttaaaataaaccagtgatttaattcttggcatagtatctacctcagtccagcaaagtcttcaatgttggaaggatgttgctattcctattgtgcaaagcaaaataaggtttatcctgaacattagtctagacagagcaggttaccatacaaaggcatagttctttaagtgtaacaatctcttctgcttgattc

SEQ ID NO: 50006 - DNA, 600 bp, Chicken  19866894296561_4
aggcaaagctgctgggaaaatgtttgctagttggacttttgcaggctggagtctaatctgagaacagagaaactcrattaatgacagcaagaaggactgattcttgggtgatgcgctcagagactggaatagagtgggggaaaaaaggagaaaccttttaaatgtgacatgatggtctcatatgtcaaacctggggtgggttatgrggttttgcagcttgcttctgctagccaggaacatgagttcagctrcaacacggttgtgctgctctgcaaggcttcctgagctgagtctgcccgygcacctaytccaaacacatctttgcttttgttaacaattctcagtaacaatgatttggttaaaataaaccagtgatttaattcttggcatagtatctacctcagtccagcaaagtcttcaatgttggaaggatgttgctattcctattgtgcaaagcaaaataaggtttatcctgaacattagtctagacagagcaggttaccatacaaaggcatagttctttaagtgtaacaatctcttctgcttgattcatgttcagcacrgtatcacaccatagattcaacaaacatagatcatttt

SEQ ID NO: 50007 - DNA, 600 bp, Chicken  19866894296561_5
ctgctgggaaaatgtttgctagttggacttttgcaggctggagtctaatctgagaacagagaaactcrattaatgacagcaagaaggactgattcttgggtgatgcgctcagagactggaatagagtgggggaaaaaaggagaaaccttttaaatgtgacatgatggtctcatatgtcaaacctggggtgggttatgrggttttgcagcttgcttctgctagccaggaacatgagttcagctrcaacacggttgtgctgctctgcaaggcttcctgagctgagtctgcccgygcacctaytccaaacacatctttgcttttgttaacaattctcagtaacaatgatttggttaaaataaaccagtgatttaattcttggcatagtatctacctcagtccagcaaagtcttcaatgttggaaggatgttgctattcctattgtgcaaagcaaaataaggtttatcctgaacattagtctagacagagcaggttaccatacaaaggcatagttctttaagtgtaacaatctcttctgcttgattcatgttcagcacrgtatcacaccatagattcaacaaacatagatcattttaaattgac

SEQ ID NO: 50008 - DNA, 600 bp, Chicken  19866894296561_6
gctgctctgcaaggcttcctgagctgagtctgcccgygcacctaytccaaacacatctttgcttttgttaacaattctcagtaacaatgatttggttaaaataaaccagtgatttaattcttggcatagtatctacctcagtccagcaaagtcttcaatgttggaaggatgttgctattcctattgtgcaaagcaaaataaggtttatcctgaacattagtctagacagagcaggttaccatacaaaggcatagttctttaagtgtaacaatctcttctgcttgattcatgttcagcacrgtatcacaccatagattcaacaaacatagatcattttaaattgacagctatgtacaaaactatggtacaacgttattacaaaacatgagaaataaagctctgaatctttaaatcacaatactgcacggtcccagtttcaaagcaraagtaatgtgaaaatacacgttctgcagcttgaatgcaaagacttaagagtgtaagcagctgagaatgggatttaaacccggagacttactaaaggatgagctgaaaatgtgtttaacacagtaccctggaaaacttttttcttttgacaggaac

SEQ ID NO: 50009 - DNA, 600 bp, Chicken  19866894296561_7
gcaaagtcttcaatgttggaaggatgttgctattcctattgtgcaaagcaaaataaggtttatcctgaacattagtctagacagagcaggttaccatacaaaggcatagttctttaagtgtaacaatctcttctgcttgattcatgttcagcacrgtatcacaccatagattcaacaaacatagatcattttaaattgacagctatgtacaaaactatggtacaacgttattacaaaacatgagaaataaagctctgaatctttaaatcacaatactgcacggtcccagtttcaaagcaraagtaatgtgaaaatacacgttctgcagcttgaatgcaaagacttaagagtgtaagcagctgagaatgggatttaaacccggagacttactaaaggatgagctgaaaatgtgtttaacacagtaccctggaaaacttttttcttttgacaggaactggagccctgcttctccaaatyttatgtatgtaactgcatgtgagattactgcaggaccacagccgtgcttcaacttaattgcccataagtgttatctgggagccagatgctgtttacacagccatatgttgaccaaaatgcata

SEQ ID NO: 50010 - DNA, 526 bp, Chicken  19866894296561_8
aacatagatcattttaaattgacagctatgtacaaaactatggtacaacgttattacaaaacatgagaaataaagctctgaatctttaaatcacaatactgcacggtcccagtttcaaagcaraagtaatgtgaaaatacacgttctgcagcttgaatgcaaagacttaagagtgtaagcagctgagaatgggatttaaacccggagacttactaaaggatgagctgaaaatgtgtttaacacagtaccctggaaaacttttttcttttgacaggaactggagccctgcttctccaaatyttatgtatgtaactgcatgtgagattactgcaggaccacagccgtgcttcaacttaattgcccataagtgttatctgggagccagatgctgtttacacagccatatgttgaccaaaatgcatacttttgttgttgttcttgtaactgatttttgcttgctttaaatgattgagcacgcaaatacattttgtgtcttggtcctggccaaatacaaactgactgtggg

SEQ ID NO: 50011 - DNA, 599 bp, Chicken  19866894296563_1
tcctttctgtgcttaagaataagtcacacaaatatctgaagagcaggaaatattgtgtgagtaagagaagtctaaaagaatttcctggctactgtttattcaacaaatataaaaataataggttgtgttttaaagtaccaaaatatgagacagcctgacatatggtgatgatgttaaagcctggagctctaatcctagaattatggtagggaaaccctgaaattggagtgtcttttttattcttccaactccaataatttacctctgaagttcatgtagtatggtgatttttgcctgagyagaagtctccaaaggccttactttccatgctgcagtctcacaatgtcttttgcaggcttggtctggaaatttgcagcacccacttcttccatggtttcattgctaaaaatttggtttgctggtggacagttgtaattgtctgacaatttggagaagagctgtacgtgcttattgcactgaataaaggctatctctatgtatctagttccttgctggctgtatatattcgtaaaatacagtgctgacaactttagagagtgggtgcgtttggaaagacagtagtagttgaaaggctgaat

SEQ ID NO: 50012 - DNA, 599 bp, Chicken  19866894296566_1
  misc_feature (1)..(83): n is any nucleotide
nnnnnnnnnnnnnnnnnnnnnnnnnnnnnnnnnnnnnnnnnnnnnnnnnnnnnnnnnnnnnnnnnnnnnnnnnnnnnnnnnnnttgagatgttggaataatgaatgttttacctccctcagaagtgatcaaaggacttactagcacagacaacacaagtaaacaatgccatgaatgttaccagaagaaaacattgacattattgtcaaacattcaagattaattgcatatttccactgtaattgtcctagattgttcttcttggagttgcttcatgctgcaataacatgatcattgcaaytctgaaatttatgtatggtcttaatcgcattatgtataaaataagatgaatatgagcagagtgctgcacagcattacatttggaagattagaatcatagtcatattttggatgttctaaaaactatagaataacataaaagactgtgcaacaatgtctgaattttgtgagaaggtaaatacactgaataatttaatatgaaaattccaaggaatttgatttctggttccctgaaaacctcctgggaactgtttttaattcaaggtgtgtagcaagcttacaatgtacagaattactttc

SEQ ID NO: 50013 - DNA, 599 bp, Chicken  19866894296581_1
  misc_feature (1)..(136): n is any nucleotide
nnnnnnnnnnnnnnnnnnnnnnnnnnnnnnnnnnnnnnnnnnnnnnnnnnnnnnnnnnnnnnnnnnnnnnnnnnnnnnnnnnnnnnnnnnnnnnnnnnnnnnnnnnnnnnnnnnnnnnnnnnnnnnnnnnnnnnnnaacagttttagaactgcattttattgggaaactcgcatcagtaacttgaagtatgctaatgaattcatcattatttagggacacagaatattctactaatggtagtattgcaaaaacagctgcatctttcacacagtcactgaaaacataaacaacaaatacakttttcaaagactactgccatggatatgctataaggagtgcttcagtcatcccaaaatatgtctatataaaagaataggtgaagactggaaatggaagatagcattttttgtacagacttacatagcttttttggacagttttccaaaaacccttgctgaaaggctgagaatatgtcactagaaactagggtttttattcagatgtactgcaagtaatatggtgtgcatcctgtagatatcaaaggctaaatacaatctaagtcatatcccatttggacatgttaggagaagacattagt

SEQ ID NO: 50014 - DNA, 600 bp, Chicken  19866894296585_1
cacaacaggagcagtgcagcactcccatccaggcagagcaggctttgccctgtgctgcctgcagagctgtcagctgctgtgtgccagcccacagccgtgcaaagggatacagcactgcactgccagcatggccctgctttgcctggccccaccagccccctctgaccaggacttggcagcactgaagcccggcccttcccttctcccctccaaaagtctgcagcttcctactgggcttcttcccagctatttatagagaaggactgacaaggtgtcctgcaagcagccagtcttgggaarctgctgccctgagtgtgcttgctggaacagagggtctctctggtgctgctgctgcctgctgcctctatacatgtacctgtatagaggtacatggccctctataccccagggccagatttactctgacatgcagagccctgcatggtgcaagtgtctcctggctgtcatacacccactgggtaaaagcacagagtgactgaccctgcagcacttgaccgggcaaggactgttcctgacttgcagcaggggagcaaagccctgcagttcccctgcctgcgccacccagcacctgcatgcagc

SEQ ID NO: 50015 - DNA, 600 bp, Chicken  19866894296589_1
ctttttgcgtggaaaaaaaaatcaatactctcatcagggaacttcaacacagaatacttttgaatgagcatatgataaataatattcttgtctgcacttgggatataaggaaaataattttcctggtataatgagtgataagtagaacaaagatcacatgggaataaaatttagctgttagatccacttgataatttccatctggatggcatttgcttttctctgtaaagggaatgggagctgcctatttctaggcaatctgttcagtttcttttacaggaaaggacactttagctattycttccatatgggcatacattattacatctaacaaacatgttcatctctcattttagccagaccctctaagcgctcttaattcctgggtgggttgkgatggggattgaatatcctcttttcttcttgtttcctcttaagaaagcaataaggagtagagaagaactatgttggttatatggttaggtgctagtttgctaaaaaataaactttacttgagggagtggaaaacaagatagctgtaacagtgtaatcattgcatctcctggcctgatgatgctgtatgaacacaggtcggcaagt

SEQ ID NO: 50016 - DNA, 600 bp, Chicken  19866894296589_2
acttgggatataaggaaaataattttcctggtataatgagtgataagtagaacaaagatcacatgggaataaaatttagctgttagatccacttgataatttccatctggatggcatttgcttttctctgtaaagggaatgggagctgcctatttctaggcaatctgttcagtttcttttacaggaaaggacactttagctattycttccatatgggcatacattattacatctaacaaacatgttcatctctcattttagccagaccctctaagcgctcttaattcctgggtgggttgkgatggggattgaatatcctcttttcttcttgtttcctcttaagaaagcaataaggagtagagaagaactatgttggttatatggttaggtgctagtttgctaaaaaataaactttacttgagggagtggaaaacaagatagctgtaacagtgtaatcattgcatctcctggcctgatgatgctgtatgaacacaggtcggcaagtttagctatcataggctccaattcatgccagctctgtcataaattaagctggttctgtctcagtattcwctcttctttagaacagaaaaatattct

SEQ ID NO: 50017 - DNA, 600 bp, Chicken  19866894296589_3
agcgctcttaattcctgggtgggttgkgatggggattgaatatcctcttttcttcttgtttcctcttaagaaagcaataaggagtagagaagaactatgttggttatatggttaggtgctagtttgctaaaaaataaactttacttgagggagtggaaaacaagatagctgtaacagtgtaatcattgcatctcctggcctgatgatgctgtatgaacacaggtcggcaagtttagctatcataggctccaattcatgccagctctgtcataaattaagctggttctgtctcagtattcwctcttctttagaacagaaaaatattctaaggattaagagaatcactatagttgtcttggctaaccaaagggggaaaaaaaggccacaaattaataagataaataaaatactacaaataagaatgtggtgttttaggactgcacctccctcatccctctattgccagtgacccctggatactggctattctcccttttttgctttggtttggcttgctgggctcttttatcagtgagtattaattttgttttaccacacccagcatcctatggacactgctggtcttggtgtgcctgggca

SEQ ID NO: 50018 - DNA, 600 bp, Chicken  19866894296589_4
cagccttttgttactgtcactgatatacatttgcacagtcattgaaagttgtcattcggcatcagatccatgatgctatttttaaaaaagggtgaggataattaaaaaaaaaaaaaaaaaaggtatgtggagtatactttctgttctccagagtttcatgaacagctctgttgcattttccatgtgaaattgaatctcagcatgctggaggcctttgtccctccacagcatacagccagaactagagatcttcaggtgggttgagtcagacttggtaaataatgagacagcaaaacacastgtgttcagggctgggaaagacgtgtrcagctctacagagcccraatgccaaagggcttactgggaaaggtaggagaaaagtgtcaaaatgaagaaacagatgctgtctaggcaggaattcacattcattttgtttactcacctggctatcgagaaaaccccatgacaaataacgtgtgctttcagctgctgacctttttataagactatgacaaatacaatgccttgttttccacagatagctgatgtgtattactgctgcgtcacttaagttgcagctgtggattttcttcttctctg

SEQ ID NO: 50019 - DNA, 600 bp, Chicken  19866894296589_5
catttgcacagtcattgaaagttgtcattcggcatcagatccatgatgctatttttaaaaaagggtgaggataattaaaaaaaaaaaaaaaaaaggtatgtggagtatactttctgttctccagagtttcatgaacagctctgttgcattttccatgtgaaattgaatctcagcatgctggaggcctttgtccctccacagcatacagccagaactagagatcttcaggtgggttgagtcagacttggtaaataatgagacagcaaaacacastgtgttcagggctgggaaagacgtgtrcagctctacagagcccraatgccaaagggcttactgggaaaggtaggagaaaagtgtcaaaatgaagaaacagatgctgtctaggcaggaattcacattcattttgtttactcacctggctatcgagaaaaccccatgacaaataacgtgtgctttcagctgctgacctttttataagactatgacaaatacaatgccttgttttccacagatagctgatgtgtattactgctgcgtcacttaagttgcagctgtggattttcttcttctctgaaagtagctccaaatgagacagaagta

SEQ ID NO: 50020 - DNA, 600 bp, Chicken  19866894296589_6
aaagttgtcattcggcatcagatccatgatgctatttttaaaaaagggtgaggataattaaaaaaaaaaaaaaaaaaggtatgtggagtatactttctgttctccagagtttcatgaacagctctgttgcattttccatgtgaaattgaatctcagcatgctggaggcctttgtccctccacagcatacagccagaactagagatcttcaggtgggttgagtcagacttggtaaataatgagacagcaaaacacastgtgttcagggctgggaaagacgtgtrcagctctacagagcccraatgccaaagggcttactgggaaaggtaggagaaaagtgtcaaaatgaagaaacagatgctgtctaggcaggaattcacattcattttgtttactcacctggctatcgagaaaaccccatgacaaataacgtgtgctttcagctgctgacctttttataagactatgacaaatacaatgccttgttttccacagatagctgatgtgtattactgctgcgtcacttaagttgcagctgtggattttcttcttctctgaaagtagctccaaatgagacagaagtactatctgatttgctagc

SEQ ID NO: 50021 - DNA, 600 bp, Chicken  19866894296595_1
tggatagtagaaaagcatatgtcatggaaggcaatgtacttaagtacaagaagtatgacatttccataagcatgttagagacatctagtctagatgaaagtacagcagggtgggccaggggagcttggaagaattaaatgagtcaggtttcattaggaattgtcctgtgtccagttctgctcagtgcttccattaaccatccaaaccacgcctcagcagatgcatttattaccttttcagaaagctgggaggaatactgtatgatgttgacagatagagtggtggggaatgttttcattrgaatacaaacgtacagccaagcaaaatagccagcrctcatcagacacacacatacaggggatagaaagggttagggctatacgttaacgcagcactgtgtcttaagtacaagaaatccagcgtgttccttcacctctgggagagatcccagtaccaagagaagctgtcagagcaacagcatctctgggcagagactaatggcatttgactgctgattgcagctgcagaaatgccagtttagcaagcgatacatcagctgcagtgcctgcccaggctccagttttattgccttctagccac

SEQ ID NO: 50022 - DNA, 600 bp, Chicken  19866894296595_2
gtacttaagtacaagaagtatgacatttccataagcatgttagagacatctagtctagatgaaagtacagcagggtgggccaggggagcttggaagaattaaatgagtcaggtttcattaggaattgtcctgtgtccagttctgctcagtgcttccattaaccatccaaaccacgcctcagcagatgcatttattaccttttcagaaagctgggaggaatactgtatgatgttgacagatagagtggtggggaatgttttcattrgaatacaaacgtacagccaagcaaaatagccagcrctcatcagacacacacatacaggggatagaaagggttagggctatacgttaacgcagcactgtgtcttaagtacaagaaatccagcgtgttccttcacctctgggagagatcccagtaccaagagaagctgtcagagcaacagcatctctgggcagagactaatggcatttgactgctgattgcagctgcagaaatgccagtttagcaagcgatacatcagctgcagtgcctgcccaggctccagttttattgccttctagccacctaattgcatgtcttgtcgttaatggagatcaaac

SEQ ID NO: 50023 - DNA, 600 bp, Chicken  19866894296599_1
ctaacaattctatgttaaatccattttaactgtttctgcaggtattatgttcaccacgggttgacaatcacaaggaaaagacatcattcagcactaactaatattgaatttagaaggagtcaacggcataaactcaaatggctgattttgcaaagcctgtcctcaaagcctctgaagggctgacagagacaaatgcctaaatgttgaatatatattccaagatatagatgctctatcagctgctatggccttggtgatgctccttcttcagagcattgtgctctccacaaatccacaggstttactgtcacttactgctccttcctagcaatgtgtgcactgtgtcccctttcaggctttctctaggtgttccgatcacccacagcccataggcttggtttgcatcagcactgcgctgctccttgcttgccctgctttgtgtccacaggattgtattgggagaggagggcaagggggaaagagcttctgaggttatgaaaaccagcttgaaacccaaaggatgcaaaccaaagacaaatcacaccacaaagcctgacactctcactgtactcaagccatccaatgaccagaggagctcca

SEQ ID NO: 50024 - DNA, 600 bp, Chicken  19866894296608_1
tataacaacaactcttaattcgagttctgaaactaccggtcctcataggtatattacatagcttttcctatttcacgtagactttattctattttagaggaaatactgttttctaccttaaattataaatattttctcagatgttgttgacttctagtatgactggagtgggtgaattccttatatgggaatgacagatttttagtggccaattgtgacagttaaaattgtcatcaagacaacaaatttagcaagacagtacttgctattttagagaggcggaatgttattcccagacamactctgacagtctgtcctcttgatcaagactcattttttatgtgagctctgcaaaactaatggccttcatgagttttgaamtgatatttcctttgaaaagttttaatgtggtgcttgaacaacaatatattgtattaatatcaatacatgtataatagtaatatatggttaatacaagctgtagaaatcatatccttaagcatmccctctggcaattaccaaaatatatgcctcaccttttatacatataaactcacagtttcctttgttccttcatgctggccttcatgttttttctcc

SEQ ID NO: 50025 - DNA, 600 bp, Chicken  19866894296608_2
ctttattctattttagaggaaatactgttttctaccttaaattataaatattttctcagatgttgttgacttctagtatgactggagtgggtgaattccttatatgggaatgacagatttttagtggccaattgtgacagttaaaattgtcatcaagacaacaaatttagcaagacagtacttgctattttagagaggcggaatgttattcccagacamactctgacagtctgtcctcttgatcaagactcattttttatgtgagctctgcaaaactaatggccttcatgagttttgaamtgatatttcctttgaaaagttttaatgtggtgcttgaacaacaatatattgtattaatatcaatacatgtataatagtaatatatggttaatacaagctgtagaaatcatatccttaagcatmccctctggcaattaccaaaatatatgcctcaccttttatacatataaactcacagtttcctttgttccttcatgctggccttcatgttttttctcctctctgcctctgacggttcagcagcccaccccatgcacagagaagggtgtcccatttcacaacaaaaattgggatgttttc

SEQ ID NO: 50026 - DNA, 600 bp, Chicken  19866894296608_3
gtggccaattgtgacagttaaaattgtcatcaagacaacaaatttagcaagacagtacttgctattttagagaggcggaatgttattcccagacamactctgacagtctgtcctcttgatcaagactcattttttatgtgagctctgcaaaactaatggccttcatgagttttgaamtgatatttcctttgaaaagttttaatgtggtgcttgaacaacaatatattgtattaatatcaatacatgtataatagtaatatatggttaatacaagctgtagaaatcatatccttaagcatmccctctggcaattaccaaaatatatgcctcaccttttatacatataaactcacagtttcctttgttccttcatgctggccttcatgttttttctcctctctgcctctgacggttcagcagcccaccccatgcacagagaagggtgtcccatttcacaacaaaaattgggatgttttcacaacgctcctccctagctgtgggtttgaaaagctctgcagcggttgaatgagtgtcatcatgtgcaaaactgtggacaactttatttgacatctcctatcatggtatctagctggcttaaac

SEQ ID NO: 50027 - DNA, 600 bp, Chicken  19866894296608_4
aagatgtccctttatctcctaagtcaggaaagtgatttcaaagttgtcatctatcacttggaaagataataaatcatctaaatgattcttttcctttgaatgctgtactgtgagagtgatggatctcttcagccattataagagtaaaactgaatttcatttaaagcatggatcttaggtttcccagttcgacccctgttctgcatccaaaaagtcttctccttctccatcccccaatttcagagaaatagaaaggtcactgcagagtacatgttagtatcttttatagtattatacatygactgagagtttaaatatggaaagtattatagcactatgcaatgttacatgattagaagcacattttgctggagatatgatctgtgttaccaacaaaataagtatgtataggatctggtttaacttagttatccttttgtccttttttttctgcttattggtatgtaacagttgtgatggtgaaatgcataataactattctggacagtatgatagagcattgtatggcatttatattgggagggtaaagcatataaacatatgaaagtcatttaaagatacaattaaacttctaaacaa

SEQ ID NO: 50028 - DNA, 600 bp, Chicken  19866894296615_1
tgaacttgttgccactttgacgggaaagctgtaatagcagattaaaaggaggaggtttcacagaccgggcagaacggtcacagatccagaaatcatgatgggaagaatgaataaatgatctgtcttttgaagaagggattgagggaagacaaagcaggccttaaatacatacaagggagaaaatcaactgtttactttgcataagacagaagtaataggttcaaatagcaaacagaggttagtcattagggaagaaaaaaaaaacaacttcataatggtaagaatagttaagacttgctrgggagattaaatcgccttcaataytgggaggcttaatgaacaagttgggtgagcatctgtcaaaatgacgcaagcattgctgatcttgtgtttggacagagaggtgagctagatttcctcctaaggtcccttccagctgctttctgctgtaaaatttgattctttaaaatcagcaacataacgtgtaagctggctgtgggccttaccttgctgagcccttgcctctacaactacctgaaaggatgttgtagcaaggtcagtgtcggtctcttctcccaagtaacagcaacaggacaagag

SEQ ID NO: 50029 - DNA, 600 bp, Chicken  19866894296615_2
aaagctgtaatagcagattaaaaggaggaggtttcacagaccgggcagaacggtcacagatccagaaatcatgatgggaagaatgaataaatgatctgtcttttgaagaagggattgagggaagacaaagcaggccttaaatacatacaagggagaaaatcaactgtttactttgcataagacagaagtaataggttcaaatagcaaacagaggttagtcattagggaagaaaaaaaaaacaacttcataatggtaagaatagttaagacttgctrgggagattaaatcgccttcaataytgggaggcttaatgaacaagttgggtgagcatctgtcaaaatgacgcaagcattgctgatcttgtgtttggacagagaggtgagctagatttcctcctaaggtcccttccagctgctttctgctgtaaaatttgattctttaaaatcagcaacataacgtgtaagctggctgtgggccttaccttgctgagcccttgcctctacaactacctgaaaggatgttgtagcaaggtcagtgtcggtctcttctcccaagtaacagcaacaggacaagaggtaatggcctcaggttgcactagg

SEQ ID NO: 50030 - DNA, 600 bp, Chicken  19866894296617_1
agtgagtgccaaagttctacttgcattgctgaagtgtgggtttttcccctttttaattttgtttctatgggttttgttttggcattatggctgtctctttcctgattgtctcatattccctcaagagttttttagataggttactaagagggttagaaaagacaagaagcaaaagtttaattacttacaaaaacatgcacattacaagagaaatgcacacattctggacattttgcagcctgatactgtctttgctggaaaacagttgacagagagggaagcagaactgggaacaaaaasctcagatgtcctggaaggaataataaatcataatttgctattgtaaatyctactggcagctcttaaaagtgaccacaagtagtctctctgatacatagtgcagggatccagaactgctgacaggtttgtatataccagactgattaacactttatattacattgacaattattaggggctttaagtttgagttcttacattgctcttactttgaagaaaccagctgtatttttttttctgatgatactttctgtaaacagcatgtagaacctgatgattatcattcatttttatatagtt

SEQ ID NO: 50031 - DNA, 600 bp, Chicken  19866894296617_2
tttttaattttgtttctatgggttttgttttggcattatggctgtctctttcctgattgtctcatattccctcaagagttttttagataggttactaagagggttagaaaagacaagaagcaaaagtttaattacttacaaaaacatgcacattacaagagaaatgcacacattctggacattttgcagcctgatactgtctttgctggaaaacagttgacagagagggaagcagaactgggaacaaaaasctcagatgtcctggaaggaataataaatcataatttgctattgtaaatyctactggcagctcttaaaagtgaccacaagtagtctctctgatacatagtgcagggatccagaactgctgacaggtttgtatataccagactgattaacactttatattacattgacaattattaggggctttaagtttgagttcttacattgctcttactttgaagaaaccagctgtatttttttttctgatgatactttctgtaaacagcatgtagaacctgatgattatcattcatttttatatagttagcagatggcttctagcagcaattccttaaaagtttcttcatttataaa

SEQ ID NO: 50032 - DNA, 600 bp, Chicken  19866894296617_3
gaagaaaccagctgtatttttttttctgatgatactttctgtaaacagcatgtagaacctgatgattatcattcatttttatatagttagcagatggcttctagcagcaattccttaaaagtttcttcatttataaaatatgaagtggctgacctaagttaaaccaattagtgactttcctttatcatttttccaggtgctttcttcattatgagatatcaatcaactgcagggcagtaaacatgctagttctggtattcatggaatgctcagatcatcaattgaagtacacatagttcraatctaaaatattagcagttcaaaaatccattaagatcagtatcagatgagttgttacactactcgtactgggacgtgttgcaaggaaccagcatgtcacacctcggaagtgaaagaaatatttcctgttactacagtattcaaaaccccaaaacaaagagattgcataaaccagattgcattcattggactcatttttaagtaataccatctacattaacagtggccacatttgtttcttcagcatacttggtatctccaggtctataaggtagagaaaatgttttgggatgaaagtgt

SEQ ID NO: 50033 - DNA, 425 bp, Chicken  19866894296620_1
ctccctttcttacaaagtgctgttaaagcaaggaaaatttggaactagtagatgttagcttagatctgttattttctaggaagcagagtaaaactaagaaattgtgacattccttttggagtaggtcaagctttacaagactacataatgtttaaaacacgtcaagtgaaaaacttactaaattatgaatcaaacttctttcacttggctaaaccccaagtacagtatttcactgattattactgccaaatactcttagttctatggcaatttaatgtctcatactggggattacttaarctatttttctgacttgctttagattctgattttggttctacacagagtaaggataccataactagtgacacacttccacttagcagtacggtgctacaaacgaaaaacaaacagaaaaaaatggt

SEQ ID NO: 50034 - DNA, 599 bp, Chicken  19866894296625_1
  misc_feature (1)..(9): n is any nucleotide
nnnnnnnnnttccttcagtcactcctcgtagggcatattcaaattaatttgaagactaaaactaatttttgtagattagctgcaatagaagatctgtgtatgttatttcacacctaaatacaagagagtaagaagtctggagtgaaggaggaagtcagcatttgtagaaaagcaaaaatatcaactgacaccttagaatgcctggctatttaaatatgtgtcttgctttctttttaatgtcatcccaatgctattgctcccctcttgctggaggagatcaatgtgatgtatagaaacatyttcatacttttctcttaagaatgataattattcttaaacactcaccacaacatctgtctacctgagatgaagattataccctgggaaatgaaggctctttttaatacctgttctaaaacaacatacgatacaaccagaattaaagtaaaacagggcttaatccaaaggagcaacactggaatgttgactcaaagaatggacatatgcattaaaacttaagcagactccatgctgctcggggtatttgttgtgttagtgyatttttctatactattattgttttcaatagtgtatgaggg

SEQ ID NO: 50035 - DNA, 600 bp, Chicken  19866894296625_2
ccctcttgctggaggagatcaatgtgatgtatagaaacatyttcatacttttctcttaagaatgataattattcttaaacactcaccacaacatctgtctacctgagatgaagattataccctgggaaatgaaggctctttttaatacctgttctaaaacaacatacgatacaaccagaattaaagtaaaacagggcttaatccaaaggagcaacactggaatgttgactcaaagaatggacatatgcattaaaacttaagcagactccatgctgctcggggtatttgttgtgttagtgyatttttctatactattattgttttcaatagtgtatgagggtttccatgcaggaaaatttgcactcgttggcattcactgattcctgatgaatgtatatggaaaccaagcagtggatgtcagcacagtagggtgctgggtggtgctctcagcagtgctgacagcaaagtggaagacaagtcatgttcaaacatccatgcagattttttaagagcttggcatgcaggttcaatttcatgtgtggcaaaaaatgcataactaatagtgataactgtattgaaaaatagcattttgtagctgag

SEQ ID NO: 50036 - DNA, 600 bp, Chicken  19866894296627_1
ctaaaattaatgggtgccttgtggcctattaatgagctattgaagcaaacctatagatggctgtaaatatctcagacagattcttggttgactggcatggtatgtgacaattttaggagcagctttgatgtttgaataattagaccattagctttctgacagggggactttttgttgtggtgtacctctcatgtgcttgggattaaaaagattctgggagtttctgtatcacgagcaaatacattaacaaataaataattacagtgctgtgacagaccttactgccaacaggactggagragacgcagcagtacatggttgtgtgatgtgatttaaagcctggagcactgcagggcttttcgtgtggtagggatgagggaagctgtattggggcagggcacattgctgcaggagatggatttggtgcctaccccattcctgaagtggaaacagcgttacctgcacctccacattcactgctgtctgcttgctgtgtgctgctgttgctctctctcccagtgtcctgcctgaccttggagcatctgattaggtgcagatgctggaatgggtccatcagtgaccaattcccaaattagagct

SEQ ID NO: 50037 - DNA, 600 bp, Chicken  19866894296631_1
tagaattactcaggttggaaaggacctcaaagatcatcaagtccaaccacagcctaaccacagtaccctaactctaacaatcctccgctaaattgtatctctgagcaccacatccaaacgactcttaaacacatccagggaaggtgacccaaccacctccctggggagcctattccagtgcttagccatcctttctggaaagaagtgtttcctaacatccaacctaaacttaccttggcgcaacttgaggccatttcccctcgtcttgtcacctgtcaccagtgagaagtgacctacccsgctctcactgtaaacacctttcagrtgctagaagagagtaataatgtctcccctcagcctcctcttccccagactaaacagccccasctccctcagcctctcctcatagggctgattttccaagtccttcactagcttttgttgtccttctctggacctgctccagtaccatcatgtccttcttgtactgaggtgcccaaaactgaacacagtactcaaggtgaggcctcaccaatgccgagtacaggggcaggatgacttccctagtcctgctcaccacaccagtcctgatacaagcca

SEQ ID NO: 50038 - DNA, 600 bp, Chicken  19866894296631_2
ctcaaagatcatcaagtccaaccacagcctaaccacagtaccctaactctaacaatcctccgctaaattgtatctctgagcaccacatccaaacgactcttaaacacatccagggaaggtgacccaaccacctccctggggagcctattccagtgcttagccatcctttctggaaagaagtgtttcctaacatccaacctaaacttaccttggcgcaacttgaggccatttcccctcgtcttgtcacctgtcaccagtgagaagtgacctacccsgctctcactgtaaacacctttcagrtgctagaagagagtaataatgtctcccctcagcctcctcttccccagactaaacagccccasctccctcagcctctcctcatagggctgattttccaagtccttcactagcttttgttgtccttctctggacctgctccagtaccatcatgtccttcttgtactgaggtgcccaaaactgaacacagtactcaaggtgaggcctcaccaatgccgagtacaggggcaggatgacttccctagtcctgctcaccacaccagtcctgatacaagccaggatgctattggccttcttggccac

SEQ ID NO: 50039 - DNA, 542 bp, Chicken  19866894296631_3
ctaaattgtatctctgagcaccacatccaaacgactcttaaacacatccagggaaggtgacccaaccacctccctggggagcctattccagtgcttagccatcctttctggaaagaagtgtttcctaacatccaacctaaacttaccttggcgcaacttgaggccatttcccctcgtcttgtcacctgtcaccagtgagaagtgacctacccsgctctcactgtaaacacctttcagrtgctagaagagagtaataatgtctcccctcagcctcctcttccccagactaaacagccccasctccctcagcctctcctcatagggctgattttccaagtccttcactagcttttgttgtccttctctggacctgctccagtaccatcatgtccttcttgtactgaggtgcccaaaactgaacacagtactcaaggtgaggcctcaccaatgccgagtacaggggcaggatgacttccctagtcctgctcaccacaccagtcctgatacaagccaggatgctattggccttcttggccacctgg

SEQ ID NO: 50040 - DNA, 454 bp, Chicken  19866894296647_1
ttctgtggaggtcaggaggttactgaagagttttatattttttggatgatttctttgggagtcgaaaggcacttttgatttcaaaatctcccatctcatttcccttccttcttgcactgaaagcaagcttctactgcacttctaaataacatctccatctaaagaaagccgattctttggaagattttatgctattggtagacttaaatgatcattggtgtatgtgggtagcttagcaattgtcagattctagttgctgttgaaagtcaaatatctccattcttctgaagagaataaatmtctgaaattaatacaattctcatatatacagcaaagtaccattatactgcataacaaactgcaatctgtattacagttatcaatattaaaatattaagttctatgaatttttgttaacttccgtcagatgcaatygatatgttaacattttaag

SEQ ID NO: 50041 - DNA, 319 bp, Chicken  19866894296647_2
gcacttctaaataacatctccatctaaagaaagccgattctttggaagattttatgctattggtagacttaaatgatcattggtgtatgtgggtagcttagcaattgtcagattctagttgctgttgaaagtcaaatatctccattcttctgaagagaataaatmtctgaaattaatacaattctcatatatacagcaaagtaccattatactgcataacaaactgcaatctgtattacagttatcaatattaaaatattaagttctatgaatttttgttaacttccgtcagatgcaatygatatgttaacattttaag

SEQ ID NO: 50042 - DNA, 599 bp, Chicken  19866894296651_1
  misc_feature (1)..(128): n is any nucleotide
nnnnnnnnnnnnnnnnnnnnnnnnnnnnnnnnnnnnnnnnnnnnnnnnnnnnnnnnnnnnnnnnnnnnnnnnnnnnnnnnnnnnnnnnnnnnnnnnnnnnnnnnnnnnnnnnnnnnnnnnnnnnnnnntacaggcttggggcagagtagctggaaagctgtgtggaggaaaaggatctagccagtaatgagcccaggtggccaagaaggccaatggcatcctggtttgtatcagaaatagtgcagccaacaggagcagggaagttattgtccctctgtactcagatttgaactgtgttcmgttttggacccctcactacaagaaagacatcaaggccctgaagtgtgtccagagaagggcagcaaagctgtgaaggatctggagcacaggacggctaaagaaactgagattaagtctgaagaaggggaggctcgggggaaaatttaccaatctatacaatgccagaaaggaggttgtggtgaggtggatgtcagcctcttctcccaggtaacagtgaaaggacaagagggaatggcctcaagttgtgctggggaagctcaggttggatattgggaagaatttattctcagaaagaatgg

SEQ ID NO: 50043 - DNA, 600 bp, Chicken  19866894296661_1
gtatgttctgcccaggacacagacaggcactctttgaagtgcttaatcataagtcaaagcaaataccacttccaggcagggaaaggcacacgtgctggaattgtgcacaaagccttgcatcgtttttctgttcctctaagccagagcacatttccagaaaggctgtaagtcccagatcccgtggaattcaaaaaggatacaaattgtgacctgtttatgagatacttagctccactcaacgcggctatttagactcagcagcacagctcaatctgactgtattccatttaggaatgggcscaattaaaggctgatggagccctctcttacaccacaatcaataggtgtcatttggcagccatcagtgctgcgcaacaactcgggcaccggagagactgtccctcctgcaaggcttcgtgcctgtatgacaccaagggcaggtacaattggaggcttcagcctgagtggctgttgctccttgcccaaaagatgcagagcccgggcttttcaaaccatttcattcaaaacaacagaaggaaaaaaggagggcygtgaggggatggggaaggaaagctatgcctaagtgcacctgggagatgt

SEQ ID NO: 50044 - DNA, 600 bp, Chicken  19866894296661_2
gactcagcagcacagctcaatctgactgtattccatttaggaatgggcscaattaaaggctgatggagccctctcttacaccacaatcaataggtgtcatttggcagccatcagtgctgcgcaacaactcgggcaccggagagactgtccctcctgcaaggcttcgtgcctgtatgacaccaagggcaggtacaattggaggcttcagcctgagtggctgttgctccttgcccaaaagatgcagagcccgggcttttcaaaccatttcattcaaaacaacagaaggaaaaaaggagggcygtgaggggatggggaaggaaagctatgcctaagtgcacctgggagatgtttttaaagactgtaatggaataggcctaggtcttggataagagtggaatctgccctccggatgccacctacaaacaggcttgagcacattgatgaaactgttcagctgaagtgattcctgtcaatacaatgagcactggctggaaagaacagcgtatacaaatgccctactttaaagcctctgtgcgaggaagagaaaacaaaatatttttaaacaacaaaaccagacagtctcccctatgcagtctaaat

SEQ ID NO: 50045 - DNA, 474 bp, Chicken  19866894296661_3
gcctaagtgcacctgggagatgtttttaaagactgtaatggaataggcctaggtcttggataagagtggaatctgccctccggatgccacctacaaacaggcttgagcacattgatgaaactgttcagctgaagtgattcctgtcaatacaatgagcactggctggaaagaacagcgtatacaaatgccctactttaaagcctctgtgcgaggaagagaaaacaaaatatttttaaacaacaaaaccagacagtctcccctatgcagtctaaatccttccctgaaaataatctcctcttrctcttcctcctctcatgcctggcactcagtgcaggtcagcctccagaagcagatgagagaggaaggagtggggtttttgtatccttgctctctgcctagatagaggatggctctcaggcctcctccgccttcagctgcttttcatcccttactgtgctgcccacagagcagcaa

SEQ ID NO: 50046 - DNA, 599 bp, Chicken  19866894296663_1
  misc_feature (1)..(172): n is any nucleotide
nnnnnnnnnnnnnnnnnnnnnnnnnnnnnnnnnnnnnnnnnnnnnnnnnnnnnnnnnnnnnnnnnnnnnnnnnnnnnnnnnnnnnnnnnnnnnnnnnnnnnnnnnnnnnnnnnnnnnnnnnnnnnnnnnnnnnnnnnnnnnnnnnnnnnnnnnnnnnnnnnnnnnnnnnnnncttcgtgcagcgtgcggtctgcaggagcccctcgtgcaccatggaatagatgcagggtctgcttcgttgctcctcccgtgcaatgtccctctgtgccccccatggaccccttcctgacccccccccgrtgcagccacagggcggctcagctcggctcggctcagctcagcttggccyggctcggttcagctcagctcagctcagctcagctcagctcagctcgctcccatctcctggctgtgctcccgggcactgttgatcttggccaggaggaagcgttgctccatcggacagctggttaatgtgtagtgacggctcttctgtgctygagaccgttgatcccagcccatgctgctatcgggcctggccccccccgcgcaccacggggggttcttgcagcagctggggggagcagagcacggccaca

SEQ ID NO: 50047 - DNA, 599 bp, Chicken  19866894296663_2
  misc_feature (1)..(123): n is any nucleotide
nnnnnnnnnnnnnnnnnnnnnnnnnnnnnnnnnnnnnnnnnnnnnnnnnnnnnnnnnnnnnnnnnnnnnnnnnnnnnnnnnnnnnnnnnnnnnnnnnnnnnnnnnnnnnnnnnnnnnnnnnnncttcgtgcagcgtgcggtctgcaggagcccctcgtgcaccatggaatagatgcagggtctgcttcgttgctcctcccgtgcaatgtccctctgtgccccccatggaccccttcctgacccccccccgrtgcagccacagggcggctcagctcggctcggctcagctcagcttggccyggctcggttcagctcagctcagctcagctcagctcagctcagctcgctcccatctcctggctgtgctcccgggcactgttgatcttggccaggaggaagcgttgctccatcggacagctggttaatgtgtagtgacggctcttctgtgctygagaccgttgatcccagcccatgctgctatcgggcctggccccccccgcgcaccacggggggttcttgcagcagctggggggagcagagcacggccacacactgcaatctgctccggcgatgctgctggtggccaattatcatccaga

SEQ ID NO: 50048 - DNA, 600 bp, Chicken  19866894296663_3
ccctcgtgcaccatggaatagatgcagggtctgcttcgttgctcctcccgtgcaatgtccctctgtgccccccatggaccccttcctgacccccccccgrtgcagccacagggcggctcagctcggctcggctcagctcagcttggccyggctcggttcagctcagctcagctcagctcagctcagctcagctcgctcccatctcctggctgtgctcccgggcactgttgatcttggccaggaggaagcgttgctccatcggacagctggttaatgtgtagtgacggctcttctgtgctygagaccgttgatcccagcccatgctgctatcgggcctggccccccccgcgcaccacggggggttcttgcagcagctggggggagcagagcacggccacacactgcaatctgctccggcgatgctgctggtggccaattatcatccagagatgataatcgatggtggccccagccagagtgtgaccctttgcaaatctgccccatttcaccctatgggggagcgtgccctggggtgggctttggaaggatgggagtactggaaaaagcagagcacgcttagcacccagggccgagctgcct

SEQ ID NO: 50049 - DNA, 599 bp, Chicken  19866894296664_1
  misc_feature (1)..(101): n is any nucleotide
nnnnnnnnnnnnnnnnnnnnnnnnnnnnnnnnnnnnnnnnnnnnnnnnnnnnnnnnnnnnnnnnnnnnnnnnnnnnnnnnnnnnnnnnnnnnnnnnnnnnncgacttgaaggccaacattccagctgaatctaactccatctctgtcctcattctgctggataaattccaggaaggtggtcatgatcaactcctctgggtatcactaaaataaaatataatcattagtggaatgtggaaatacaagtgttttaaaacacaaatctttggtttatatgacagttaaagacttataaagttytttttagattgtagcttaacttagtagcttgatcctaaagatagcttttaacaaagcagattaacacaatccattaaaaaaatctacatttcacagttaatgtaattaggaaattatcaaccatccacaagtgaggaaaactacaaaaaagcaccctcaaaactgctcctatgaaacaaagactagatacaaacttaactataaaatatcccctcttgcagttttccacaggtgctatcactgatctccatgctgtagcacaaacactatgacaacggtctgtcaacattttcatgagc

SEQ ID NO: 50050 - DNA, 582 bp, Chicken  19866894296664_2
acaaagcagattaacacaatccattaaaaaaatctacatttcacagttaatgtaattaggaaattatcaaccatccacaagtgaggaaaactacaaaaaagcaccctcaaaactgctcctatgaaacaaagactagatacaaacttaactataaaatatcccctcttgcagttttccacaggtgctatcactgatctccatgctgtagcacaaacactatgacaacggtctgtcaacattttcatgagcatctcactgacaccaggagcagatccatgcatcactgtaattgcagcacargaagccacatggaactctgcacacaggaatgtttccactgctgcttctactcaagctgcaatcccatcgggcaaaggacaaaaatacagggtgagagacatgctcagatgccagagagatcagagatagaaaataatttcactgagggaggaaaggctagactaggatctgaaaaggacgcagaacacagtaagtttgtctcctaatacatcaggattaattcatccttgttctgtacaaaagatgaaggaaaattacccctgagaaatgggagtagtgcta

SEQ ID NO: 50051 - DNA, 600 bp, Chicken  19866894296666_1
tagtttcaggtacatgataatcagattccattagttagaattaagaatctgattgttctcttaacttcgcaggttccagatgactgcaattctaccagctatactagagatgctaccaacagagacctgtatcagccaggtagagatcacttctgatattgagcagctttaattttaggaaatagttcctcttctccccattctgaggggcttcatgttatatgaagccaaagccatgccacagtttgtctccttttcaaaaaatcccatctgagagctaaacagactattgggactttytgccatatgtgaatccactcagaaggacattaaaaagcatacagtgcaacttgcatcaaattcagatccatcaaaatagaaattctttgatgttctgtagacagcattatttttccttgaggtgagtagtccgttgagtatactagctggaaaagatctggttttatggaaggcacttgttattcacagaatggcttaggttagaagggaccttaaagaccattgagctccaatccctctgctgtgggctgtttgccccccactagatcaggctgtctatgtccccatccagcccccccc

SEQ ID NO: 50052 - DNA, 600 bp, Chicken  19866894296667_1
atgacacagtaggagctgggttttctttgctgaaatcagtaattagcatgtaagcatttattagcaactaccactctttggagatctgcaaacaaacttcagtacaatcttaacaaatgctacagcatggactacatgcatctgtcatgtcttcttttggtgtattattgtaacactaattgcttcaagactttatgatgtaattataacaacattatggagacaaaacaatgtttccacggttgtatcaccaggatgttgtaatagcaaaatgagacaagtgagggctcaggtatgggrgcaattctgggttgtcaaartgaactgaggggatgctgcagcgaattattgatgagcaaccctcagcaagaaaatggaagtgacaccaatatgatggcatgatagccaaattaaataaaacaaaaaatcaatgatattctacttaaattacgccaggaatgggagccatttacacagttctgatttggcttttaaaatgagtcaggtacaataaataacgttttgacagttccatcatacactgagctgtgtgagcctgtttgctttcctctaatcaccttccaaagagattatgaactg

SEQ ID NO: 50053 - DNA, 600 bp, Chicken  19866894296667_2
ttttctttgctgaaatcagtaattagcatgtaagcatttattagcaactaccactctttggagatctgcaaacaaacttcagtacaatcttaacaaatgctacagcatggactacatgcatctgtcatgtcttcttttggtgtattattgtaacactaattgcttcaagactttatgatgtaattataacaacattatggagacaaaacaatgtttccacggttgtatcaccaggatgttgtaatagcaaaatgagacaagtgagggctcaggtatgggrgcaattctgggttgtcaaartgaactgaggggatgctgcagcgaattattgatgagcaaccctcagcaagaaaatggaagtgacaccaatatgatggcatgatagccaaattaaataaaacaaaaaatcaatgatattctacttaaattacgccaggaatgggagccatttacacagttctgatttggcttttaaaatgagtcaggtacaataaataacgttttgacagttccatcatacactgagctgtgtgagcctgtttgctttcctctaatcaccttccaaagagattatgaactgaatttcttatatggagagtg

SEQ ID NO: 50054 - DNA, 600 bp, Chicken  19866894296668_1
gcaaattacatacactccattttaagttttgcttaactgttaccagaaatttcttgatatgatataaaagtttattactactgagtgtgtataggcaagtgtcatgatagcaaagtttatgtattgattactgtgagttcaagtgagtgttttgaattcatgcaaatcctgcttttgaaccttgcagtcacaaggttcgtattagtaaaaaaggaagtaagaatattttacccttaccccttaagaacctagatcattttgcaagcatctttagagagaacggaatagaatagtctcaaytcattgaccagcttttcctctagctgtccctttcctgacataatcatgaacttttggacatctttgcaaaatacctatttaaaattgtcctacggtataaaatccttcaaggaaagcagttccttgtgaactgtcaacgtgaattggtctgaaagttttttagctcacgtagcttccttgaatttctggatagggagattctcacaaagattgtgtgtattgcattgagatgtcttgcaaagctacagtaagatacgtaagagtgctctctgtgaagatagtgaagtttgtgggttctgg

SEQ ID NO: 50055 - DNA, 600 bp, Chicken  19866894296673_1
acataagcatcgtagagtaggagcacagagcaggcaataggaaggttaggaacagtagaaaacttcatcttcttccagaagaccttgaaaaactgtagggtatatgatgcctccttgtacaatcaattgtacgatgaatagctttctaaacttttattcaattacatcaaaagcaaagctgatcaaaaaccatgcaagtgctctgctcttcacttaggaatgacttacgatgttccatctctatgcaatcatatactgtgaatgtgaaaaaaaagtaaaaaaatggctcagcctccatcratccatttctaccatagaatggcttgggttgtaaatgaccttaaagatcacttagttcaaacacctctgccgtgggcagggctgtcaccactagatcaggctgccctgggccccatctgagctggccttgatcgccttcagagatgaagcagtcatgacctctctgggcatcctgtgccactgcctcacagtttaaagccgtcccaccttgtcytctcactatcagactgtagcagaaatgctaaagtcatggcctgaagcagtgactgagcacctggtgagaaggcagagctaacccag

SEQ ID NO: 50056 - DNA, 600 bp, Chicken  19866894296673_2
taggaatgacttacgatgttccatctctatgcaatcatatactgtgaatgtgaaaaaaaagtaaaaaaatggctcagcctccatcratccatttctaccatagaatggcttgggttgtaaatgaccttaaagatcacttagttcaaacacctctgccgtgggcagggctgtcaccactagatcaggctgccctgggccccatctgagctggccttgatcgccttcagagatgaagcagtcatgacctctctgggcatcctgtgccactgcctcacagtttaaagccgtcccaccttgtcytctcactatcagactgtagcagaaatgctaaagtcatggcctgaagcagtgactgagcacctggtgagaaggcagagctaacccaggggagctcaggtgcatgcagtgtacctgagtgaccggtaggggtggagtcaggatccagcccttcccagatctcatttaagggttggcagtggagggaaaggtaatctgtctggagattgcttcctatttgaggtcttctgtgggtgagcagcttttttgtcttcttttttgcatccccggctgctgtatttaggctcattctcctttgctaca

SEQ ID NO: 50057 - DNA, 385 bp, Chicken  19866894296673_3
tgctaaagtcatggcctgaagcagtgactgagcacctggtgagaaggcagagctaacccaggggagctcaggtgcatgcagtgtacctgagtgaccggtaggggtggagtcaggatccagcccttcccagatctcatttaagggttggcagtggagggaaaggtaatctgtctggagattgcttcctatttgaggtcttctgtgggtgagcagcttttttgtcttcttttttgcatccccggctgctgtatttaggctcattctcctttgctacagctgaagactttgctactctgctaytgctgctgtattctctatcacattatggcattatacaggctatgggaagaagtggatccccttcctgtttaaaagctctcttcga

SEQ ID NO: 50058 - DNA, 600 bp, Chicken  19866894296681_1
ctgctgcattcggcctgtgactggagcctgtgctacactgcatggtttaaaacggtatcttcagaacataatcaactctgttattaaaagcttccttattgctatgtgtatagagtgtgctgaagaattacggtattcaaacagaaggaaacaggctgcatccatttgaagataaatcacatcaaacaggcaattaaaatgtccccatcggtaaggcagagagaccatggagagtgattgctgaaacagcagaatctaacgcttgaagtcgtgtagtgtagagaaaaagattttgataaygactgaagtgaaaattaacaatttaacaattgttcataacgtgcccagtgaagtcatttgtgtggcggcgcttttatccgaggtaaactgctttgctgatgtagtattttacattgggtgccaaaggacagccctttagttaggaaaatatatgttaattttaaaaagacaaaaaacttctatttcacaaaagctgtaagactgcttaagtagggcaatttattacaagatacaggtgctctgtgcagccagggagaaagagctgctttgcatgacaagaaaaattcccatatagaatgt

SEQ ID NO: 50059 - DNA, 599 bp, Chicken  19866894296683_1
  misc_feature (1)..(129): n is any nucleotide
nnnnnnnnnnnnnnnnnnnnnnnnnnnnnnnnnnnnnnnnnnnnnnnnnnnnnnnnnnnnnnnnnnnnnnnnnnnnnnnnnnnnnnnnnnnnnnnnnnnnnnnnnnnnnnnnnnnnnnnnnnnnnnnnnaattgtaaaggtacaaaaaatccttccatctgaagctctgttgagattgtttaactatcatacatagacagagcaaattccagtgggaaaagaatgacacagtatgaagcatctcttgctcttgcatatggcagcagctgttggtgccagcaactgcactctggagacaasaactcaggaaacacacagtccattacatgaattgttctcatgctctagcacagaccagtgacatttttaagaatgacctactagataactgttttcaaaattgtgagtgtttatagagtacaaagtaagtcagcaaaagctaaggggcaagcagcaggaatagctcttacttaatgtgttacaaattgtgctggtggattagctcccaaaagttcaactgagttttgtagtttgaaaaaaaaccacaaacattaaacatttmtttttcaccaccaaggatgaagctagaacagtatcga

SEQ ID NO: 50060 - DNA, 600 bp, Chicken  19866894296683_2
gcagctgttggtgccagcaactgcactctggagacaasaactcaggaaacacacagtccattacatgaattgttctcatgctctagcacagaccagtgacatttttaagaatgacctactagataactgttttcaaaattgtgagtgtttatagagtacaaagtaagtcagcaaaagctaaggggcaagcagcaggaatagctcttacttaatgtgttacaaattgtgctggtggattagctcccaaaagttcaactgagttttgtagtttgaaaaaaaaccacaaacattaaacatttmtttttcaccaccaaggatgaagctagaacagtatcgataactgaaggtatcatggcagcaaacctctgcatgcacaacagcttccagcaagtgaagctctgtttccttattcatacaggtgttggtattaagggaagagatattttttcagtttcttttagatacagcaggtacttatatcttctttatgtgggaggtaactgaaaaagaagtcctaattcaaatcagaagtatctagaaaagttgctgacatatgtatgtgtgaaggaagaattccaattatatttaaaatctgtttaa

SEQ ID NO: 50061 - DNA, 600 bp, Chicken  19866894296689_1
gaacaatcagaaacactagggcaggatcagagaacaaaatcaaaatcatccctatgatgccttagatacataaacatttgactctgacattctgtggagagttctgtctatctcccataaacaaaaatggaaaaagaaaagagtaagagaccttagggcaaaaaagattgggacaatttttctttgaagaaagcactaaatatgctgtatattttcagttgggcgggggggggggggggaaaaaggaaaagagggaaaatatgatgaaagtgaaagcaacaatggaatttaaaagtactyagtaggaacggtgctattatcagacagcaggcttaaatgaaaagtaagaccagttccttcttctgcccctttttctgtccaaggcagagctaaatcatgaaagtgctgtagaaagctttcagataccaatasgttgaagagatcaggtgtatgtaatatggaaaataaatcytcttagtaatttctaatgatgcaacttccaaatcagaaagtttagaaatctatttttcctggaatatggaaaaatcggtgtgtttgagaagaaaacgagtgatcctcagtgggtgttgttggccactg

SEQ ID NO: 50062 - DNA, 600 bp, Chicken  19866894296689_2
aaagaaaagagtaagagaccttagggcaaaaaagattgggacaatttttctttgaagaaagcactaaatatgctgtatattttcagttgggcgggggggggggggggaaaaaggaaaagagggaaaatatgatgaaagtgaaagcaacaatggaatttaaaagtactyagtaggaacggtgctattatcagacagcaggcttaaatgaaaagtaagaccagttccttcttctgcccctttttctgtccaaggcagagctaaatcatgaaagtgctgtagaaagctttcagataccaatasgttgaagagatcaggtgtatgtaatatggaaaataaatcytcttagtaatttctaatgatgcaacttccaaatcagaaagtttagaaatctatttttcctggaatatggaaaaatcggtgtgtttgagaagaaaacgagtgatcctcagtgggtgttgttggccactgttaaatttagtttgtctttcctgactgtcttcaggaagacacctaaggtctagctctgtgcagttatttaaggctacctgtatagttagtgggtggggagggagggagtggctgaggtcattcatgtgagcc

SEQ ID NO: 50063 - DNA, 600 bp, Chicken  19866894296689_3
acaatttttctttgaagaaagcactaaatatgctgtatattttcagttgggcgggggggggggggggaaaaaggaaaagagggaaaatatgatgaaagtgaaagcaacaatggaatttaaaagtactyagtaggaacggtgctattatcagacagcaggcttaaatgaaaagtaagaccagttccttcttctgcccctttttctgtccaaggcagagctaaatcatgaaagtgctgtagaaagctttcagataccaatasgttgaagagatcaggtgtatgtaatatggaaaataaatcytcttagtaatttctaatgatgcaacttccaaatcagaaagtttagaaatctatttttcctggaatatggaaaaatcggtgtgtttgagaagaaaacgagtgatcctcagtgggtgttgttggccactgttaaatttagtttgtctttcctgactgtcttcaggaagacacctaaggtctagctctgtgcagttatttaaggctacctgtatagttagtgggtggggagggagggagtggctgaggtcattcatgtgagcctgagataagcacttaaaataggggagtgaattgcccgggg

SEQ ID NO: 50064 - DNA, 600 bp, Chicken  19866894296690_1
tgatttttttttttttgaaacattctttcaatagtttagcctgggttttgagcaaccttttcagaattaagcaccctaccagactgctgccaacaaaggttggttcattcctcagtaaagtggaagtcttgttatttaaataaagtagctactgtagtagatttgcagatatgttaagagtattacaggatctagaggtagatttaggaagaaaatactataaagcaggaaaaaattaaacagcgtacttattgaaacttaagagacattatgacatgtgacatgattgcatcagaaaaygagcaggtggaactgtgctacctgcatgtgtaatgcaatgagtgtcacaaagtgaaacctgtttatagttaggcttttcctttacaacacagtcgccttttaaaacctatgcaccaccatccacyacattaggggaggagtaatgaagctactgggtccttctgtccctttttatgacctgcaaaacaccatactgtgttttcctatgcacaggcagattgtccaccaccttttttcatcagcacctgaagctgaagcggtgcatgcacatgccaaacactcactgtgacaggatggtag

SEQ ID NO: 50065 - DNA, 560 bp, Chicken  19866894296690_2
gtcttgttatttaaataaagtagctactgtagtagatttgcagatatgttaagagtattacaggatctagaggtagatttaggaagaaaatactataaagcaggaaaaaattaaacagcgtacttattgaaacttaagagacattatgacatgtgacatgattgcatcagaaaaygagcaggtggaactgtgctacctgcatgtgtaatgcaatgagtgtcacaaagtgaaacctgtttatagttaggcttttcctttacaacacagtcgccttttaaaacctatgcaccaccatccacyacattaggggaggagtaatgaagctactgggtccttctgtccctttttatgacctgcaaaacaccatactgtgttttcctatgcacaggcagattgtccaccaccttttttcatcagcacctgaagctgaagcggtgcatgcacatgccaaacactcactgtgacaggatggtagcttctggtaatcctaatgagcagatcagaatgacacagaaagatcacttgatgcacagcctccctaaataaaatatctgcaaatt

SEQ ID NO: 50066 - DNA, 600 bp, Chicken  19866894296692_1
atctcatcaattcccctgtgaccagctgcaaagatagtatctgtctgcaccaatctagggaggagaactgcagcaagactgcagtggtgctggtaactctgtgttggataatggaaaggtactgggcaataaaaaaggatcagaaaaatactttaaagaatcaaggagcagagaaaggcgtaagggaggaaatcagcctttgttaacaacgacaggcttatccagcatgaataaagatttgcattcattttggcagacatgatggtgcacttttgactcacagtcagcagaaatagaaawgcatggcagttgtaattgctcaacattgcaagtgataatttaaatattgcggtttgttctaacagctttcaagtatgtgctactctgtgagtactctggattttagctgcgtgtagtgcagactaattctctcataaggaaaaaaaatatcgtcaaacttctgaggcttttaagtattggcagctctccaataactgtatcataatgttcatttatgcagtaccacaaccctgagttgaggttttaatcattttaattaagggtattatttcattctaaacccaaaaatatgggtataat

SEQ ID NO: 50067 - DNA, 600 bp, Chicken  19866894296694_1
agcattaatttatttctaggtactccaaaccaaagccaaacatccagcagtagaactacttttccctcgcaaaacctcattatacttttgaattgtgtcataaactcatgaacttcatgatgactagtcctattttcacttgtgcttaaagaaatacccaatctaaccatgggtcatcttcaaatgcttcagtttagtaacatattttcattacacgatcaataagcaactctaacatggaaatattatcaaacatttcttagttgaaatgaagcatcttagtcagaaaagatatccaastgtcaaagatgctcatagaagggaaaaatagaagtgctgaatggctttgcaaggcagtccaaacaatcaatcttttgcaaataactgattctagtctttcaacttcaaagctgaaatcctgcttctcttgacttttctaactctctgagaagtaaatgccaactctccatcttttggagttgacttttgactctgacatgcaatgtaaatttaacagcccataccagcatgaatctaaatagaaatgcataaaaggcagctgagaggaggaggaggtgttgatcacaagcctaacatttt

SEQ ID NO: 50068 - DNA, 599 bp, Chicken  19866894296699_1
  misc_feature (1)..(199): n is any nucleotide
nnnnnnnnnnnnnnnnnnnnnnnnnnnnnnnnnnnnnnnnnnnnnnnnnnnnnnnnnnnnnnnnnnnnnnnnnnnnnnnnnnnnnnnnnnnnnnnnnnnnnnnnnnnnnnnnnnnnnnnnnnnnnnnnnnnnnnnnnnnnnnnnnnnnnnnnnnnnnnnnnnnnnnnnnnnnnnnnnnnnnnnnnnnnnnnnnnnnnnnttaagctgcattcagggttggttaggaggaagattcatggggaggaaacagattaaacatatataaagcttcagcgccatcagaggcaccacttgacaaarcacatttctttatatgtgtttatatgagataaataggaatatctttgaaagatttaactgaacagtatcccttaagtgactacttcagagcacatcacagggtatttaggtgaagttacaacactgctctaagtaaacagacaaacaattctgacatcagacaatcaaatctctgggaaatactgattcacagttcatcagcagctatttgaaacaagcctcctatttgcttttattgcattattcagcctcctggacctctaaggcaagggatggaaaatgcataaagcacaccagaa

SEQ ID NO: 50069 - DNA, 600 bp, Chicken  19866894296704_1
ttacgaactattgaatttctttgatgctgtaagaacagtcaagctatttattttgtaactacgtcttaacttgtcagggtctgcacttgtttgataaggtgtcattacaagaaggacactcggatcaaagccagtgctctgatgacttagtattgaactactctggctttgggggctgtatcccagatctggagatcttccttctgctgtgatgcagttgtacttcttgttggtttcttcattaagccctcttgcgttgatgatgagagatgtgtctcccaccactcctcctctactgcrtatgaatctggttagtgacttgtttttccatctgggtggatctttcacagcttctaaagagagtttttaaagagtgatgttgtttgaaggctggttctgcttctggattcccagctggtcgatttcagaacttggcagtttcttaacctacatttatatcatgatatattctggataaacaacacttgtttctccctctagagttttctaattcatgtagacaatagaaacaatccttaactcaagtcttcaatagcttttggttgaggaataattgattggattacgtgtaaaagtgtg

SEQ ID NO: 50070 - DNA, 600 bp, Chicken  19866894296708_1
caggctgcctcacaggcgtgggggaaaacaggcagctctgtggcacagtgtgcagatatagggcagagtactgccagcactgtctcgactgggctgctggttctgctggggcatggaaactggctgaagcaaggagctcatgtaacatgatgtgcgtagtgctgcttcagtactgtgttgtgtatagcacttctagatcagactggctgccgtactgactctgtgagaccgctgtcctgtgcctggccagggggatgctgtgcctcagtgctttcttcttgaaggctgttatgaatccakcttgcttctgtctcagctgcagaatctagctttggacttggaagctgcctgtgcctttttttgaaactcttactggctgttggtgactgtacttcttgttcttgtgcaccagctttactaatctctggctggcaaatgcgtttctggatacccttcaaatttgctagttcaggttcattgagtcaggcaatgtgyagtgcttgttcctaattctgagctgcccaaattcatgattagtatctgaactgaaagtctgcttctctgagtcatgctctgatttaatgtgctaaatataaactg

SEQ ID NO: 50071 - DNA, 591 bp, Chicken  19866894296708_2
gatcagactggctgccgtactgactctgtgagaccgctgtcctgtgcctggccagggggatgctgtgcctcagtgctttcttcttgaaggctgttatgaatccakcttgcttctgtctcagctgcagaatctagctttggacttggaagctgcctgtgcctttttttgaaactcttactggctgttggtgactgtacttcttgttcttgtgcaccagctttactaatctctggctggcaaatgcgtttctggatacccttcaaatttgctagttcaggttcattgagtcaggcaatgtgyagtgcttgttcctaattctgagctgcccaaattcatgattagtatctgaactgaaagtctgcttctctgagtcatgctctgatttaatgtgctaaatataaactgctgatgagtaagaccctttacaacatcatttaagcttatctgtggtaattggagtagcgctttgtcatgactaaactgtggagcagtatcttttgaagatgaaaggagaggcttattcattttaaagtgcactagagtggtgcaaaggttcttcgagtaccaactggtgagggcagcactgaagaa

SEQ ID NO: 50072 - DNA, 600 bp, Chicken  19866894296710_1
atttagattatgatgtaaactaaccgaacgtgacacagctgctctcctcaataactaaggagatgccggctgccactcaccctggcgtgttggtggttcacagcggggcacacggggctgatgggggccctcttttttggcatctgtctgtaccatcttcatgcagtttgctgaaacaaaaccaacgatgttagcagcatatgggcagccagaataggggtcatttaccttatttgccaacaaagtaaaggacaaggcccagtggaacagcagtatattgagaagagctggcagcacagyggcagaggaggaaaccaggaaggatcccagaagtcacctctgcccatacgtccctttcctttgaaatgtttagttgatgaggtctatacaggctcttgggttgtaaattctatcagtttggaaagctgagctgcctctgctaaagcaagccaaacacatctggtcagggtgagcaccccacstccaatgcaaaggtctattccagagtttgctgaaagctgacaaagattttgttgacaatcaaatttgtgtaatggctaacaaaaaataaatcatttccatctgcatacgctctgatta

SEQ ID NO: 50073 - DNA, 600 bp, Chicken  19866894296710_2
caacgatgttagcagcatatgggcagccagaataggggtcatttaccttatttgccaacaaagtaaaggacaaggcccagtggaacagcagtatattgagaagagctggcagcacagyggcagaggaggaaaccaggaaggatcccagaagtcacctctgcccatacgtccctttcctttgaaatgtttagttgatgaggtctatacaggctcttgggttgtaaattctatcagtttggaaagctgagctgcctctgctaaagcaagccaaacacatctggtcagggtgagcaccccacstccaatgcaaaggtctattccagagtttgctgaaagctgacaaagattttgttgacaatcaaatttgtgtaatggctaacaaaaaataaatcatttccatctgcatacgctctgattaataaaggcctgacaccagaggagccaagaacctgtcagggatctgatctaattgcacatctaacctgaccagaagtaagaataattggaaacctctcaagtagattgttctttgtaacttagcgggacaagccacacaccaacagcttgcacaacccaacttctgcaaacaaaagcagtgag

SEQ ID NO: 50074 - DNA, 600 bp, Chicken  19866894296713_1
aagggttccctgcagggcagcacgttgctgaggagctcctgctattgcgcccagtcatttgctgcaggctgttggccatcagctgtcagagcctggtgccttgggagcaaacgtgtgtgtctggaaggagcattaattaccactttttgagctgtgtgatttgggaattgatcatctttctcagttccttagtgctgtgaaggagctggttgctttgtgtttttcttggcacagctttaggatgggcattagccagcaagatctgcactggctcctgcagaggggaattaagatggatgyggtgctcggggagtttcacaccagccttataatgctctcgttctgtctcattttaaactaacagcgcgtcattttggctggtatgagtggtgtcgctgagcagcaaggctgcccatttaatggtactaattgcaggtaatgggaartactggctgtgaaatagtaacgcttacctctgaaggcgcctctcttttctagccagccaactaatgagtacttcaggcagaagtggtggctggacttgccccaggacgttcagtgctagctggaatattccttcttgttggagggcatggggga

SEQ ID NO: 50075 - DNA, 600 bp, Chicken  19866894296713_2
ttgagctgtgtgatttgggaattgatcatctttctcagttccttagtgctgtgaaggagctggttgctttgtgtttttcttggcacagctttaggatgggcattagccagcaagatctgcactggctcctgcagaggggaattaagatggatgyggtgctcggggagtttcacaccagccttataatgctctcgttctgtctcattttaaactaacagcgcgtcattttggctggtatgagtggtgtcgctgagcagcaaggctgcccatttaatggtactaattgcaggtaatgggaartactggctgtgaaatagtaacgcttacctctgaaggcgcctctcttttctagccagccaactaatgagtacttcaggcagaagtggtggctggacttgccccaggacgttcagtgctagctggaatattccttcttgttggagggcatgggggagatgccactggtttgcagagatgggccatgtccctgtccagctcccatactcagtgcccgcccaggctggtgctctatgctgctctggggagcttctgctgggtgctctgtgctgtgtttgtcccctccaggcaggtgacctggca

SEQ ID NO: 50076 - DNA, 600 bp, Chicken  19866894296722_1
aaagactgcttctgctttttgtaagatgataaaggtaaacaagaaagaaaaaaagctaagtgattaaatacgatacctgctacagcataaagaaactccaccaaagcattgcacagcctctagttaaggagcagggataaaggattaagacacattttgccactgaaaactcttacaaaagaggatctcaaatttgagggcaataagcaagacctcatttgagttcagcttcccctgacacagaactctaaggcttgattaccttcacctgggtaactaagatcatcaaggacaacagcraaaaaaaaaaaaaaaaaacatggcttccttattcatgctactgtacagacacatctaattaatgatacaagttttaaagaatagcacttcgaatatgtagtactactaataaataattataataataaaaataataaataaataataatgcaaatgaactaattgctagcaatgagtgctgttagtaagtattaatgtagtagagtttaaaactggtttcatttaacagtctatcaaacattactatcaaaatctttaattttctgattgtatatgggtacatatgtatgtatgaaactg

SEQ ID NO: 50077 - DNA, 599 bp, Chicken  19866894296728_1
  misc_feature (1)..(47): n is any nucleotide
nnnnnnnnnnnnnnnnnnnnnnnnnnnnnnnnnnnnnnnnnnnnnnngattttctgcaagttttgctgaggtttctcaggaagattggtggttatcacattgtgtgcagtgagcgttcacatctgcggagcgctattagtgacatggaggtgacccaaggagtaagctcctgtacatagtacggtgaggtgcaattagagaagtagagcagagactgcctaaggcttcaaccagcctcaaactcttcatgtcagagacagatctcacaggtgtgtgtatgactgtgatctgccatgctgytgagctctgcagccgcttccctctggcagcttacaaaactcaagctcagcgaggcttgcatgctgggagtacctctacagtaccactatagttcatctcaagagtattttggcagtaaatctcatgaacatctagacttacactgcgctttggtcggtaatttgacatccatcagaaagcaagctggattccctctgaataaaagcagaccagaagatgtgcttcaggggttcccctaaggtactccatccaccagtgaatatccagcccacaggtccaggcaaaagcctgcctacagt

SEQ ID NO: 50078 - DNA, 600 bp, Chicken  19866894296729_1
caggctgaacaaaagtcttaagtgtgcctttttggaaaagggagacaactgcatcctgcattttactagcaagtgtgtagccagtagttccaaggaagagtttcttcctctctgttcagcaatggtaagagtatccgctgtgtctggaatgctgtgctcagttttggactccccattaaagaggtcaaggagtaagtgcactggaggctgccaaagtggtgagcactggacatacaagaagagtatgagagaggtggctctgctcagcctgaaaaagaggtagcatggagtagaccctaytgatatctacaagtactcagtcagaggacagagagatgatgaagccagacttcatagaggtgcaccccaataggataagaggcaacagacacaagctgaaacactgaaaactttaaatggagagtaggaactcatttcttaatgtaagagtgctccattgttgtaaatacagcacagctcccagtccttgagtgcgttcaagacttgattggaactctgaacagcatgacctgattagatgctctttgagcaggagtttgaactaaatgaccttcaaagttcctttccaacgtacagtcc

SEQ ID NO: 50079 - DNA, 599 bp, Chicken  19866894296730_1
  misc_feature (1)..(245): n is any nucleotide
nnnnnnnnnnnnnnnnnnnnnnnnnnnnnnnnnnnnnnnnnnnnnnnnnnnnnnnnnnnnnnnnnnnnnnnnnnnnnnnnnnnnnnnnnnnnnnnnnnnnnnnnnnnnnnnnnnnnnnnnnnnnnnnnnnnnnnnnnnnnnnnnnnnnnnnnnnnnnnnnnnnnnnnnnnnnnnnnnnnnnnnnnnnnnnnnnnnnnnnnnnnnnnnnnnnnnnnnnnnnnnnnnnnnnnnnnnnnnnnnnnnnncggtacccgcagggacgaagggcgcgaggagcggagcgggtgagccttacctackgtccgggcgagcgcttccccgccgcgccgcaccgccccgccgccgccgtgcgggattttatacatttctccccgatacacttataaagatctggaaattttgcaacccacccgcaccattttatacatgatgagccatcagtaataggattattaaacaaaaaccgtctgaggcgctggcgttaaccttttttaaaatggctaattaggttttgcacagaaaaattagatttaacgttgcttacattgcctacattttcagttgatgctacaataatttcgggggtaggacgggtaaaa

SEQ ID NO: 50080 - DNA, 599 bp, Chicken  19866894296732_1
  misc_feature (1)..(155): n is any nucleotide
nnnnnnnnnnnnnnnnnnnnnnnnnnnnnnnnnnnnnnnnnnnnnnnnnnnnnnnnnnnnnnnnnnnnnnnnnnnnnnnnnnnnnnnnnnnnnnnnnnnnnnnnnnnnnnnnnnnnnnnnnnnnnnnnnnnnnnnnnnnnnnnnnnnnnnnnnnnctatactcatttgcttgtttattgtcatcactgtcaatagctgcattgcacttctgggaaagccaccacgtggtatgtttgggtccccatgacgtactgaagatccaaaggtcttgtgaatcacacagcaccatttatatcacartggttagccagcctgatgcatcacaccagagaatgagagaacagcagaactcggtgaaggtgcatagcctcccagacagcaccaactggaacgaaggcagctgtgccccacacggttagaaatggagggctgcaatgccatcagcagtgaagtgtccccttcagctgagatctgagcactcccacctgtgtgatgctgcacggcatgggtgtccaaccttctggcttctctgggccacactgaccgaagaggaaatgtcatgggctgtgtatacataggctgcactgcaaacagtgcct

SEQ ID NO: 50081 - DNA, 600 bp, Chicken  19866894296737_1
tacctcagtggttggattgtgctgagtacctgctgatggtctcctgattgctgtgtgacagcccaacctctcacccctccttactgatacaggaaggctccctgtaaactggaaagcagttggatcttcagttgtcttgctgtgcctggctgcccttcctccccagggggcctccattcacccatcagcagttggagctcacacccaggtgcagtcccctcctttctgagttggtttcttgcagctctgccctcatctcctcttcctctggtcctttttatgggcattgtctatgcccaycattctcatagctgccttcccaggcagtgcttgtgcaggatgcattgggcactcattagccaagytcatagaaccagagatgcatagaatgtcctgaactggaagagacctatgaagatcatgcaacacccaagaagttgttgaggtgtgtggtgcaatgagagtctgtgctgctcactgatcttgtccacagaaagaaggggattacaaagagagcaaggggcaggatcacccaccaccccgatttaacatgtgagaaaatgtgtgcttttaattcctgcaagatatcgaactgcagtg

SEQ ID NO: 50082 - DNA, 600 bp, Chicken  19866894296737_2
acctctcacccctccttactgatacaggaaggctccctgtaaactggaaagcagttggatcttcagttgtcttgctgtgcctggctgcccttcctccccagggggcctccattcacccatcagcagttggagctcacacccaggtgcagtcccctcctttctgagttggtttcttgcagctctgccctcatctcctcttcctctggtcctttttatgggcattgtctatgcccaycattctcatagctgccttcccaggcagtgcttgtgcaggatgcattgggcactcattagccaagytcatagaaccagagatgcatagaatgtcctgaactggaagagacctatgaagatcatgcaacacccaagaagttgttgaggtgtgtggtgcaatgagagtctgtgctgctcactgatcttgtccacagaaagaaggggattacaaagagagcaaggggcaggatcacccaccaccccgatttaacatgtgagaaaatgtgtgcttttaattcctgcaagatatcgaactgcagtggttttgttccatgtggaaagcagcttgttctgttcatactctgtgagtgaaataggtgtgatttt

SEQ ID NO: 50083 - DNA, 599 bp, Chicken  19866894296743_1
  misc_feature (1)..(132): n is any nucleotide
nnnnnnnnnnnnnnnnnnnnnnnnnnnnnnnnnnnnnnnnnnnnnnnnnnnnnnnnnnnnnnnnnnnnnnnnnnnnnnnnnnnnnnnnnnnnnnnnnnnnnnnnnnnnnnnnnnnnnnnnnnnnnnnnnnnntctttaaaaataattgagcaaatttcaccaggattgttagaatagaacatagaatttgtttcaaaattaagctctcaaaaaagtcttgattactcacgtgactttgagtggtctcttgaggatttattacagtagtatttacttacatgaatacatcccatttttccrgcaaattgtgtttgatttgatagagcatagatggtgatcagagatcattatactgcttattgcattccttttttatttcgtatatgagctggaaagtctgctgagagctacacgagggctactgttaaaaagaagatgccaacctaggcaacgcagtgttaacccttctctgctgcagctttcctgcacagtgtgtgagccacttgaagtaattggtagatggttgataagtccacatgttcattttctgcccctcagataaaaaaatagacacacatgaacactctaaagtgaaaatt

SEQ ID NO: 50084 - DNA, 600 bp, Chicken  19866894296745_1
tgttattagcttggccagggaaacagccccagggcagtcctggcgtcaaggcagacttctccaaactgcaattaacctctcagaaaccatctgtgagaccaaagagtgcctggcagccatggcaggctcttggtacagtctgtctcaacaagtgcttggttttatcatggtcgctgacttcgtgagcagcaaacaggctttggatgagaccatgatgggtttagcaggagtggttcagatagcagaggacattgcaagcatggcctgtagtaagcagaatcccatttgtcctgatgtccrggaaaactttctacaggtccaagccaaatttgcacatgctcagatgaacaccaaagtgttacttgagaaagcaatgcccttcaagcgctcctgcgagttgggagaggccagcctggatgctgcactgtatccactgggctatcagcatgcatgtgctcctgggtgctgtggatcagttcataggcagagacatcctgttcctgagggagctaagaagtgccatggagatcaagctttgttcacagagccttttggctgccgtgtctgagatctccctgaggctgcaggaagctgcccggc

SEQ ID NO: 50085 - DNA, 600 bp, Chicken  19866894296746_1
atctgttatgcttaattcataattgaaatagtcttttttttctagctgttttaaaaaaatgtagctgttcctggccaaacatcagatatttcagtgtcggtggtatggttcctctgaggcacaatgcaaagcacactgatgaatcagtgaagagtgaagtctgctaatataaaaggacaatttaagactaaatcaaatttattttataaaagaatgatgttatccatattaatggctttatattactttcacagttgaaagctgtcctctcttgtgtcaagcgttgtataaaaaaggaarcctgcttctataaaggggatacaaacttgttaaaaatgatgaaagaacaagagagaagatgaggacaaaggaatayagggtagtgatgaggtgctgaagtgaatttgctaagctgtggctcaggtattatgtacatcctcaatgcttctgtgaaatcataggtttcctacattctaaaaaaaattacatatatctatatatctatatcctgttctacactggtatgttaaaattcatacattccaaggaaaaataagttaagtgttgtgcatttgacttactgcatagatagaacagaaa

SEQ ID NO: 50086 - DNA, 561 bp, Chicken  19866894296746_2
aaacatcagatatttcagtgtcggtggtatggttcctctgaggcacaatgcaaagcacactgatgaatcagtgaagagtgaagtctgctaatataaaaggacaatttaagactaaatcaaatttattttataaaagaatgatgttatccatattaatggctttatattactttcacagttgaaagctgtcctctcttgtgtcaagcgttgtataaaaaaggaarcctgcttctataaaggggatacaaacttgttaaaaatgatgaaagaacaagagagaagatgaggacaaaggaatayagggtagtgatgaggtgctgaagtgaatttgctaagctgtggctcaggtattatgtacatcctcaatgcttctgtgaaatcataggtttcctacattctaaaaaaaattacatatatctatatatctatatcctgttctacactggtatgttaaaattcatacattccaaggaaaaataagttaagtgttgtgcatttgacttactgcatagatagaacagaaaaaaaaatatttttaagttctctctgttatgacaattt

SEQ ID NO: 50087 - DNA, 599 bp, Chicken  19866894296747_1
  misc_feature (1)..(241): n is any nucleotide
nnnnnnnnnnnnnnnnnnnnnnnnnnnnnnnnnnnnnnnnnnnnnnnnnnnnnnnnnnnnnnnnnnnnnnnnnnnnnnnnnnnnnnnnnnnnnnnnnnnnnnnnnnnnnnnnnnnnnnnnnnnnnnnnnnnnnnnnnnnnnnnnnnnnnnnnnnnnnnnnnnnnnnnnnnnnnnnnnnnnnnnnnnnnnnnnnnnnnnnnnnnnnnnnnnnnnnnnnnnnnnnnnnnnnnnnnnnnnnnnnccatctgcattaacagtggctttatgactgtttaaaattggtgacagctaactgagaaraaaaaataaaggaataagaaaaacaaattaaaaagaaataatgtatttttaactttaaggaaaactaggacatgaaggaataatcaaagaaagccacaaaaaggcactaaagcaccaggcagaaagacaccaaagattwaatgtctgaattaaaagatctcatagaaagcacagaaaaaaagggaaacattctgctggaaccatgaaggatcagtttagttccaaatgcactctgcttgtgcttttaattcctaagattccacataatcaggtttgtctagtcatgcacacacatattg

SEQ ID NO: 50088 - DNA, 599 bp, Chicken  19866894296747_2
  misc_feature (1)..(102): n is any nucleotide
nnnnnnnnnnnnnnnnnnnnnnnnnnnnnnnnnnnnnnnnnnnnnnnnnnnnnnnnnnnnnnnnnnnnnnnnnnnnnnnnnnnnnnnnnnnnnnnnnnnnnnccatctgcattaacagtggctttatgactgtttaaaattggtgacagctaactgagaaraaaaaataaaggaataagaaaaacaaattaaaaagaaataatgtatttttaactttaaggaaaactaggacatgaaggaataatcaaagaaagccacaaaaaggcactaaagcaccaggcagaaagacaccaaagattwaatgtctgaattaaaagatctcatagaaagcacagaaaaaaagggaaacattctgctggaaccatgaaggatcagtttagttccaaatgcactctgcttgtgcttttaattcctaagattccacataatcaggtttgtctagtcatgcacacacatattgtgcatgtatgtgtatacacaactcatggaaaaattgtattaagggaacataaaactgcaatgtcaaataytttaaaagctcrgtgaaaaacaaccatccaaatggtcctcatccaccagaagtcctgatcatgcagctt

SEQ ID NO: 50089 - DNA, 600 bp, Chicken  19866894296747_3
acatgaaggaataatcaaagaaagccacaaaaaggcactaaagcaccaggcagaaagacaccaaagattwaatgtctgaattaaaagatctcatagaaagcacagaaaaaaagggaaacattctgctggaaccatgaaggatcagtttagttccaaatgcactctgcttgtgcttttaattcctaagattccacataatcaggtttgtctagtcatgcacacacatattgtgcatgtatgtgtatacacaactcatggaaaaattgtattaagggaacataaaactgcaatgtcaaataytttaaaagctcrgtgaaaaacaaccatccaaatggtcctcatccaccagaagtcctgatcatgcagctttgggctgtgattcatttgccctgaaataaataatcacagctatttaaaggtctgcctgattcgagctctgttctccatggcagaccacggacagcagaaacaaagtcgtrgcatgataaggttcccattgggaactgcatcccacgtttctgtatccctgctacagtgagagtgaccccatggaaaagggctgagcrggcagtgagacacagaaatatcttgaataaccaa

SEQ ID NO: 50090 - DNA, 600 bp, Chicken  19866894296747_4
aatcaaagaaagccacaaaaaggcactaaagcaccaggcagaaagacaccaaagattwaatgtctgaattaaaagatctcatagaaagcacagaaaaaaagggaaacattctgctggaaccatgaaggatcagtttagttccaaatgcactctgcttgtgcttttaattcctaagattccacataatcaggtttgtctagtcatgcacacacatattgtgcatgtatgtgtatacacaactcatggaaaaattgtattaagggaacataaaactgcaatgtcaaataytttaaaagctcrgtgaaaaacaaccatccaaatggtcctcatccaccagaagtcctgatcatgcagctttgggctgtgattcatttgccctgaaataaataatcacagctatttaaaggtctgcctgattcgagctctgttctccatggcagaccacggacagcagaaacaaagtcgtrgcatgataaggttcccattgggaactgcatcccacgtttctgtatccctgctacagtgagagtgaccccatggaaaagggctgagcrggcagtgagacacagaaatatcttgaataaccaaccccctgcaaca

SEQ ID NO: 50091 - DNA, 600 bp, Chicken  19866894296747_5
ttcctaagattccacataatcaggtttgtctagtcatgcacacacatattgtgcatgtatgtgtatacacaactcatggaaaaattgtattaagggaacataaaactgcaatgtcaaataytttaaaagctcrgtgaaaaacaaccatccaaatggtcctcatccaccagaagtcctgatcatgcagctttgggctgtgattcatttgccctgaaataaataatcacagctatttaaaggtctgcctgattcgagctctgttctccatggcagaccacggacagcagaaacaaagtcgtrgcatgataaggttcccattgggaactgcatcccacgtttctgtatccctgctacagtgagagtgaccccatggaaaagggctgagcrggcagtgagacacagaaatatcttgaataaccaaccccctgcaacaggatctgccagaaccggcctgccagagacattattgaaagcaggaggattactctgagtcataggggaccagatgatttcattagggactctggaacctgcttgtacacaagctatctcaggatgtgtagctcatcccctatgagcatgtattgtggtatctgtcca

SEQ ID NO: 50092 - DNA, 600 bp, Chicken  19866894296747_6
tattaagggaacataaaactgcaatgtcaaataytttaaaagctcrgtgaaaaacaaccatccaaatggtcctcatccaccagaagtcctgatcatgcagctttgggctgtgattcatttgccctgaaataaataatcacagctatttaaaggtctgcctgattcgagctctgttctccatggcagaccacggacagcagaaacaaagtcgtrgcatgataaggttcccattgggaactgcatcccacgtttctgtatccctgctacagtgagagtgaccccatggaaaagggctgagcrggcagtgagacacagaaatatcttgaataaccaaccccctgcaacaggatctgccagaaccggcctgccagagacattattgaaagcaggaggattactctgagtcataggggaccagatgatttcattagggactctggaacctgcttgtacacaagctatctcaggatgtgtagctcatcccctatgagcatgtattgtggtatctgtccacctcttcagggaggacgcagcccagcgctcctgagtcacagctctgtgctggaagccctgcgctctgcttgcaattccatggttaat

SEQ ID NO: 50093 - DNA, 544 bp, Chicken  19866894296755_1
gtaaaactatgtgttaagtggcacattttatttcctttccatattaaaaataagagcttcctgcatgctccctgctcaaattacatggattttctttaagattagggcatacattgtaacagcagcatataattttcctgcacaataattttttttccagttgaaaggtatcctataatatcatcagcatcaacaggaacagacacctgattctcagtgagacaaagcttctacgtttggtgactttattctctgtaaaaagcagctttcagatgcaaagcagctacagaaaaacttgcmaacaatctggcaactcattccttgaccacaaaaggctaggccaaaagatgtaaaaactgtaccagtaagactgtgtaatttctccttcttactctgattttatcttctgctagttttatacacgctcagaaatgggacgtgggcattgtctctcataaaaacatttacccaattatgaatttttattgttaaaactacagtatgtataatggataagaaggtcatacatatatcacatctcaaa

SEQ ID NO: 50094 - DNA, 600 bp, Chicken  19866894296759_1
atgaaaagagatattatgtggctataatttccacgcgggattaggtgtttgtcttgtaaagcattcaggtgccgctgggtgtataaatgagtgtgtaattatggtcatcaggttaaacagagggagcaggaatccgacccgggctcgggcgtgcacagatgggcctggcagtagctgttaatttgcagctatgaatggctcttacaggtcccgattatttgagtgactcgacttctatttatggttcccgaaagcagagcctgacccaaggctcgcaggggtccacaggagccttctctscagtttgatactgagcctcctttagaacagcttttgttcacctgattttttgtgtaaatcaagagtgcttaaagagcttcttacactgctcccagacagcatggacctcatctgcctatgaaagctttttgtttgatgaagaagaagcactggggcaggaataatgcagggacaccacagaaccctcgctctggagaagtttggacagtgatgggatggcagcacatgctacatttcctcctcaaatggtgctttgctccctgaagctggaatagtaccaacccatctaccccagatcag

SEQ ID NO: 50095 - DNA, 600 bp, Chicken  19866894296764_1
aacaagtaatgtaggttgcacagccacttgcacaactgaaatgccaagctacaaacacataagtgacataagagctctttcaggtaatgcacaaaaaggaagcaaatatgaattaagaagtggattctcactgcttttgtgcattacatgcactcatgatgaaagccagcctgaattagcctgaattaactcagtgaattttcaatcataggttagtgcttatttacctacactacttttaaatctattttaattaagctgtcgcttatgcacagactgggctggagctcggcatgtacwtattaccaaaaaaaccttaaggaaacagaacaggaatctatgaagagattgaaaataccatttatctgcttgatagcaattagggaaaaatctacctcaagagcagaaggaattaagacatctcttttacacaactgattgttttaacatgaatttgaagctgttctgctacgtgaagatagcagaatactagggtgttgctgtctccttgttctgtaagtttttttgtgtcttttttgatgtcctggagtttcctatttgaaatgtgaaattaagatcagtcagtctcagtgtcctaaa

SEQ ID NO: 50096 - DNA, 600 bp, Chicken  19866894296766_1
aagtattgatgcagagattattaatcaaaggccatctatgggctctgatcagtagaagaccacagggcactgggttttctcttttttcttcttttccaggagcctcctttttattcttaatttcctccttaagctttcctctcgtccaaatcctttccagtgctgctctttttttttttttttcagagagaggaaccatttcttcagagacagcgacacatcactcatattcagccaggaaatgagggttacctcagtcggataggcagggtgctcaaatggtggctgtgctttatgaastgctctgagctgtgtcaggaagaaccgtgctgtggagctatagaacatggctcctgctaggatgttatctggggaaagcaagacccctcctgttgttgatatgaacctattaggagcgaactggaaagcagaagagaggaatgtatctgctggtgtatttgaagtggctgctgatacggagtggggaacaaagccatcttgagtgtcagctaatctccactggactgtgctttgtcagctggatgctggtttggcaaacacttgggtctgcgacgtggcgtgtattcacgtgagctgtgc

SEQ ID NO: 50097 - DNA, 600 bp, Chicken  19866894296767_1
gggatgccaatacagcattaccgccataaaactgctctgccagtgtgcctgctatcttgcatcttttgtctaaaaataagcaagaggagctgatccaaaataaatcagtagactggacaagacaatttctctccaaaaccaaaccccgtgatttacggctggagtcatgacttcaggggggcagttggctcaagcaatcttccccccccccccccagccagcccagtggagccaagcctccttgctttcaggtttccacaaccactcatggctcttctaggcaacttctgctcacctcaycacctagtcccttcctatataactctgcaagaagatttatataagaactttgcagaatagtcacctaagccagcagtgctttattttcacttattacaaaaccataactgcatcaaatttgtaatcatcaggaaagggctcacaasaggatgtaagtgtaagaacacatatttactttttttctcctcacgcctaaataaactccttgaaaaacacccaaagaagacaaatgcaaagtgtgataaaaatcagcataagacccatgaagagctctaggagagaagagaayagttagatgca

SEQ ID NO: 50098 - DNA, 600 bp, Chicken  19866894296767_2
cgtgatttacggctggagtcatgacttcaggggggcagttggctcaagcaatcttccccccccccccccagccagcccagtggagccaagcctccttgctttcaggtttccacaaccactcatggctcttctaggcaacttctgctcacctcaycacctagtcccttcctatataactctgcaagaagatttatataagaactttgcagaatagtcacctaagccagcagtgctttattttcacttattacaaaaccataactgcatcaaatttgtaatcatcaggaaagggctcacaasaggatgtaagtgtaagaacacatatttactttttttctcctcacgcctaaataaactccttgaaaaacacccaaagaagacaaatgcaaagtgtgataaaaatcagcataagacccatgaagagctctaggagagaagagaayagttagatgcaagatgctgtaatagatatcttggtgaaaagaaaatgctttcttctccagatgcatgcgtggtttatatttgagcagcagcagcacagtaaagcatgtttaacaacagaatggaattattccctcccgtatatcaatcctcaatttc

SEQ ID NO: 50099 - DNA, 600 bp, Chicken  19866894296767_3
gctcacctcaycacctagtcccttcctatataactctgcaagaagatttatataagaactttgcagaatagtcacctaagccagcagtgctttattttcacttattacaaaaccataactgcatcaaatttgtaatcatcaggaaagggctcacaasaggatgtaagtgtaagaacacatatttactttttttctcctcacgcctaaataaactccttgaaaaacacccaaagaagacaaatgcaaagtgtgataaaaatcagcataagacccatgaagagctctaggagagaagagaayagttagatgcaagatgctgtaatagatatcttggtgaaaagaaaatgctttcttctccagatgcatgcgtggtttatatttgagcagcagcagcacagtaaagcatgtttaacaacagaatggaattattccctcccgtatatcaatcctcaatttctgaaacaactgaaatctgtgctacattaagaaatgagttcacaatgactttggttcatttgaaattgttttctgaagcctctttcaaaatccctcagccacccagatttcaagcaacaaccaaagctctctagagatattcca

SEQ ID NO: 50100 - DNA, 478 bp, Chicken  19866894296772_1
acagcacggtgatgtccatatacaacattcactctcacctttctgaaactagcttcgcttcccaccaaaaatgccctcagaaatatcaacctatgatgcattgaacacacactgccctcccatcctacatactcaacagatcagcccctcctttctgggtgtgaacaaagtaatactccctagtaatcaggcagaggaaacatgctgccaaggcggcccacatttgaatttatagctttgctgtcagactgttaccaaaataaagcatctgcatggatttctagcaacaacgacaattamaaagcatagatctatagtctcctttgatggtgaaatctctaatcatcatgacttatcactgtatctagtacctttaagcatctctcaactctaaaaatcagcactccataggctcctgctcagtttagtagaattattgcacacaaaatggattggaattttgtaaggagaaagaaac

SEQ ID NO: 50101 - DNA, 576 bp, Chicken  19866894296774_1
aattgactgaaagcatgaattttacaccctggtgtaaagaacgtcctacttattgctatccacttttatgttgattaacaaaatggtaccttttgctatattcatattggatttttgcatgtatcaggacagtgaagattcctgactctgcagatggacttgggttccaaatccgaggctttggcccttcagttgtccatgctgttgggagaggtaagttgtaagagttgttaatgcaagaggtaattatacattttgtatgtaactggcctggctgagatgaatcaaaataagatccastgagtaattaaggtgaggtacattaaggctgtgattkccttatagatggaggaatagctgataaatccaaaaactcattatcctgtgaatgagggttgggaactgtttcttgaaagtttctttattgcatgactrtgtggttccccaatgttctgtaaacattttacagaaaattcacttttcacaaatcttttcaatggtgctagttaaaatactactttttctattttgtgatatgatggtcaaatccctaacttgataaattttgggagtggt

SEQ ID NO: 50102 - DNA, 539 bp, Chicken  19866894296774_2
agaacgtcctacttattgctatccacttttatgttgattaacaaaatggtaccttttgctatattcatattggatttttgcatgtatcaggacagtgaagattcctgactctgcagatggacttgggttccaaatccgaggctttggcccttcagttgtccatgctgttgggagaggtaagttgtaagagttgttaatgcaagaggtaattatacattttgtatgtaactggcctggctgagatgaatcaaaataagatccastgagtaattaaggtgaggtacattaaggctgtgattkccttatagatggaggaatagctgataaatccaaaaactcattatcctgtgaatgagggttgggaactgtttcttgaaagtttctttattgcatgactrtgtggttccccaatgttctgtaaacattttacagaaaattcacttttcacaaatcttttcaatggtgctagttaaaatactactttttctattttgtgatatgatggtcaaatccctaacttgataaattttgggagtggt

SEQ ID NO: 50103 - DNA, 441 bp, Chicken  19866894296774_3
agattcctgactctgcagatggacttgggttccaaatccgaggctttggcccttcagttgtccatgctgttgggagaggtaagttgtaagagttgttaatgcaagaggtaattatacattttgtatgtaactggcctggctgagatgaatcaaaataagatccastgagtaattaaggtgaggtacattaaggctgtgattkccttatagatggaggaatagctgataaatccaaaaactcattatcctgtgaatgagggttgggaactgtttcttgaaagtttctttattgcatgactrtgtggttccccaatgttctgtaaacattttacagaaaattcacttttcacaaatcttttcaatggtgctagttaaaatactactttttctattttgtgatatgatggtcaaatccctaacttgataaattttgggagtggt

SEQ ID NO: 50104 - DNA, 599 bp, Chicken  19866894296780_1
  misc_feature (1)..(31): n is any nucleotide
nnnnnnnnnnnnnnnnnnnnnnnnnnnnnnnagcttgttagttctgtgtttacactgtgtgaacttaagttaccagcacgacaggagaggatgtatattttagataacaaaatctggtttctatcttttgtatttttagattttgctcctatgaatctcttagccaagcaaacgatattgagtttaactattgttttaaagagggaaaaacccagcttatcctaaaaaaaaagaaaaaaaagaaaaagaaccctattggtttgagtagaaaaaaatgttaaacctagtaattgcacttaraaactgagttgcatttctcaaactccttttttcagttcatgaaccacgcaatgatatagtaaaaggaaatggatttgcaggatttttgattctgttgcctgccttttcatcacagacgaacagaaatagactctcagaactgacttctgcaggcattatttctcaaccattttcataacatttcaagtgaaacatccacttttcctctgcctgccctgtaaacaccaacctgagagtcaagccagaccctttcctcctccagtgagcaccccagctcagggggctgtgggaccttctgg

SEQ ID NO: 50105 - DNA, 600 bp, Chicken  19866894296781_1
gtccgcactgagcaatgcagaggtaaccagattaaccaatgtaaggagtgtaaaccttttatggtttctttaaggatttaaagattttgatgagaaaacactacaagtttcccaggggaaatttgctgttattgatttaatgtttgcttgcatgctacctgtcaattttccaagagcttcagcaacaaaattcttatttgatatttgacagaactcctgctagtttgcatgagcagagcagtggtgcgcagacagcaaaaaggagagtgttgggctcctcctgcacctcaagagctgatygcaggctgaagctaatcccaggactagccgcaagctctgaactctacagagcacacctaaaggtaaaccagaccagctggatttgtcactcaggtgggaaaggttcaatcgcatttacggtttggttgtcccacatggatgccccacattcatgcaaacatggtacatgctcatggactttgtgtgttcacgacgaaagaggattctgcttacccttcatcctgacttagtcagagatcagaaaactgcacttctccargcccattctggcattgctagaagcacatctgttgtaccaaa

SEQ ID NO: 50106 - DNA, 600 bp, Chicken  19866894296781_2
aaggagagtgttgggctcctcctgcacctcaagagctgatygcaggctgaagctaatcccaggactagccgcaagctctgaactctacagagcacacctaaaggtaaaccagaccagctggatttgtcactcaggtgggaaaggttcaatcgcatttacggtttggttgtcccacatggatgccccacattcatgcaaacatggtacatgctcatggactttgtgtgttcacgacgaaagaggattctgcttacccttcatcctgacttagtcagagatcagaaaactgcacttctccargcccattctggcattgctagaagcacatctgttgtaccaaacccaggatatgagaggagcacgagacctttgagcaaacacttgcaacaaatcatccaagtacctccaaatggccaagtgttgagtttaacctgaaaccagtgcacagacaacagaggttatgaaacaacaagtgagcgctccctcccgtgttccttgtgggtatgaaaagggatttcttgggatttcttctgtttgaaagaccaaacatgcctggagggaagcagagctttctgccagtgcctgccacatggagaacag

SEQ ID NO: 50107 - DNA, 600 bp, Chicken  19866894296781_3
gtacctccaaatggccaagtgttgagtttaacctgaaaccagtgcacagacaacagaggttatgaaacaacaagtgagcgctccctcccgtgttccttgtgggtatgaaaagggatttcttgggatttcttctgtttgaaagaccaaacatgcctggagggaagcagagctttctgccagtgcctgccacatggagaacagctcccaccgggcagcgattatcccactgctaacatttccatgataacaaattgcctgatagctgtggagacaaatgcaatgctctctctctcttacagytaattcctcccccatgcaggtgctgacctcctgtctcactggtttggggaaagcaccacgcactgtgattctggccaagcactgctccctgcacaaccctgccagccctgcagctgctccccccgcccaggagcttcctgcacttggtgcaccctggcaccgcacatctctcgtcaggttactgcatcccaactgggcgcagtaaaatggtttgtcatcttgatttttttgctgtagtgtcctggaggaatatgctccaaaacgccttcagcaagagcctctaatatggaagagtcattt

SEQ ID NO: 50108 - DNA, 600 bp, Chicken  19866894296787_1
tagtgctttctcaagacattgagaggaataaagggaaaagaaagaggggagatgaaggaaaataccctcttgaactgcatttcctttgttttttttttttcatttacagttaaagatctgcacttaaaacacaagcctaaagttgcaaaccgattgcattcattctgttcacttaaaagctattttccagattttgttttcgtggccagtcattaatgccatatttgaaaacatgcttgaaagtaggcacagacatgtggtgcatcagtttgtgtccagatgctgttcttggcttggatwtagagagctaacagaagaaccagctactcgtacccacatccagaaacaaagggatacactttccatttcccccaaccaagaggcatacagagcttttaaaagaacatgagaaaggggcagagactccacacccaaaacgttagacctaaccatccatgaagtgtaaatagccttgcaagtaccgacagcccaggtgtgcccatgagtcattctgaatccctgccagctcccaacatgtctttctcctgtctgtgacaaccacaatacatgctcacaaataactcagaacttgaaccgact

SEQ ID NO: 50109 - DNA, 600 bp, Chicken  19866894296790_1
aaaagctctttccgaccagtgcagtgcaaattgtaagtggtaagtttgtttttgggaggttcaggaaacaagcaggatacagaaaaaatatctttcaggataggagctgaagtgtagggatcactctgttgctttttaagctctttgaagagaagtgatactcactgtacataaatactttgtattaggtaaaagagtaataatgtataacctttaggtaaagaatggcaattctgcagcatattcacatcggtgtttcccaggataaaccaaagaggaagatggacttaagcaacaggycttcagcagttgctttcttatgttaggtgcaagtaccgttattgctttttgagccaaatggtaaagaaattcctctcttttaactttatgcatttgggtggttgtttttgttttgttttgttttgttttccagagaaggactgagtaaagactctaggaactgggaaactgagttattgaggccacagagtgagaaaggaaatccaggaagattgaactttttctgatgacctggttcttattttccacaggcttgtgattcgaatgagagccagaagagtccctgaacatgtatctgat

SEQ ID NO: 50110 - DNA, 600 bp, Chicken  19866894296792_1
cctcagatttatcacatccgcactctaaaaacagctgagctgggtgcagcagacctctgtctcagctgccaccagccttatctcgttgggttatccagttacaccaagcctgtggaggaagaatggttcacagagctgtttttgttaccctgtgctcttcttgcacagggaaagaggttagcctacactacttacagcattcctccatatctccttcttcacaatgagccatccactccagtttcctcaccaagctatcacacacaagggatttctatagagcaagaacacttctccagycccagtcaaagccaaagccagagggggtccctcttccccatccatattggagactccaaggagtgaaagatattctatggccattaccacacttagatctccatcaataagaccaggaacttaacttggagagaagggatccatgtctcacggcacaaggtgacacaagtagggctgtgccacattgcaggggacaaaagtcacccaacagccattggatcaaayatttgtcaaaataaaatcaatggcagggctgccatagcagagttcaggctgacacagttcaaagagcaacacatg

SEQ ID NO: 50111 - DNA, 481 bp, Chicken  19866894296792_2
gagccatccactccagtttcctcaccaagctatcacacacaagggatttctatagagcaagaacacttctccagycccagtcaaagccaaagccagagggggtccctcttccccatccatattggagactccaaggagtgaaagatattctatggccattaccacacttagatctccatcaataagaccaggaacttaacttggagagaagggatccatgtctcacggcacaaggtgacacaagtagggctgtgccacattgcaggggacaaaagtcacccaacagccattggatcaaayatttgtcaaaataaaatcaatggcagggctgccatagcagagttcaggctgacacagttcaaagagcaacacatgtgagatgccaccactggctttccattcctgtatagtctccaaaatacgagtttatactttcctacactacaagaattcggagagcacggaagaaaaaaaaaaaaaa

SEQ ID NO: 50112 - DNA, 600 bp, Chicken  19866894296793_1
ctgctcccacaaaagactccaggattctctacctttttctgggctgctcttcaaagcatcactttcaagactatccccagcagatgaaactagaaaagaaaaaaaagttattgctttgagaaaggaggatcaccacttccttttatcaaaaattcttgccttaaggagcaagacccccaaaagaccctccccacaaagaaaccatgtggcaaaatctgtataccttctaaaaaaaaaatagaagccaccgcaaggctggagagggcaaaaaactacaatcagccatatcaagtagataaycttcagaatgctatccatgtggtgaacagtgctaaggacaggacgaacgtactgtggataaggcacttttggatagtttctaaaaatcaaaaaggatcttctttccaaagatgcaaaaccaaacagtttcccaactccataaatttaaatcccwtwttttttttttccaacttacaggatttaaaatataaacaaagaattttgaaacccattgtctcagtcatcatgtatttgtggttattacacttcttgaagcaggaaatatcatctcttgaatgcaaaactgcaatggccagcact

SEQ ID NO: 50113 - DNA, 600 bp, Chicken  19866894296793_2
cttgccttaaggagcaagacccccaaaagaccctccccacaaagaaaccatgtggcaaaatctgtataccttctaaaaaaaaaatagaagccaccgcaaggctggagagggcaaaaaactacaatcagccatatcaagtagataaycttcagaatgctatccatgtggtgaacagtgctaaggacaggacgaacgtactgtggataaggcacttttggatagtttctaaaaatcaaaaaggatcttctttccaaagatgcaaaaccaaacagtttcccaactccataaatttaaatcccwtwttttttttttccaacttacaggatttaaaatataaacaaagaattttgaaacccattgtctcagtcatcatgtatttgtggttattacacttcttgaagcaggaaatatcatctcttgaatgcaaaactgcaatggccagcacttcaacaactgtttaacagaaaggcttcctaccatgctgaaaaatgctgaccaaataaactcctctatttcaagtaaacacttgcagcctttgaattcattcatcaggcatacccaattcagaacagaacatcactattctgtgtgcagctgcca

SEQ ID NO: 50114 - DNA, 600 bp, Chicken  19866894296793_3
tgccttaaggagcaagacccccaaaagaccctccccacaaagaaaccatgtggcaaaatctgtataccttctaaaaaaaaaatagaagccaccgcaaggctggagagggcaaaaaactacaatcagccatatcaagtagataaycttcagaatgctatccatgtggtgaacagtgctaaggacaggacgaacgtactgtggataaggcacttttggatagtttctaaaaatcaaaaaggatcttctttccaaagatgcaaaaccaaacagtttcccaactccataaatttaaatcccwtwttttttttttccaacttacaggatttaaaatataaacaaagaattttgaaacccattgtctcagtcatcatgtatttgtggttattacacttcttgaagcaggaaatatcatctcttgaatgcaaaactgcaatggccagcacttcaacaactgtttaacagaaaggcttcctaccatgctgaaaaatgctgaccaaataaactcctctatttcaagtaaacacttgcagcctttgaattcattcatcaggcatacccaattcagaacagaacatcactattctgtgtgcagctgccaat

SEQ ID NO: 50115 - DNA, 600 bp, Chicken  19866894296798_1
acagactcctatttaacttgccttgactcattattcagtagcagcactttgttctgttggccataacagtcccaaaagccacaattagtctgcaagtaattacaggacattggtatcacagggaatactagtaagttcctagaatactggattcttcaagctgaagtccctacgtgttttgccagtgcatccaaaaagtcttccctatcctctgcaaggctttgggagatgcaggggtgaatgcagtagttttatcaggaggcaatcttgggaaccttctatactccccagtagaaaagygggagaaggtggttacatgcaycccattctagactaagtttgaaacttttaaagaaaacaccctagtaaaagtgaccaacagactgaagtaagtaaatagaagcactgttttacctggataaacagacatggttctcacactttgctttcggcaaatcactgttgctccaaatcaaacaccattggtttcacagcataacgagaaataggttggttgaaatttgtcagcaagcagacatacctgatcacatgtatttgtgcagtagaaatctctcaagtgtatccacatcacttgttaca

SEQ ID NO: 50116 - DNA, 600 bp, Chicken  19866894296798_2
ttgactcattattcagtagcagcactttgttctgttggccataacagtcccaaaagccacaattagtctgcaagtaattacaggacattggtatcacagggaatactagtaagttcctagaatactggattcttcaagctgaagtccctacgtgttttgccagtgcatccaaaaagtcttccctatcctctgcaaggctttgggagatgcaggggtgaatgcagtagttttatcaggaggcaatcttgggaaccttctatactccccagtagaaaagygggagaaggtggttacatgcaycccattctagactaagtttgaaacttttaaagaaaacaccctagtaaaagtgaccaacagactgaagtaagtaaatagaagcactgttttacctggataaacagacatggttctcacactttgctttcggcaaatcactgttgctccaaatcaaacaccattggtttcacagcataacgagaaataggttggttgaaatttgtcagcaagcagacatacctgatcacatgtatttgtgcagtagaaatctctcaagtgtatccacatcacttgttacagtggcctaaatgctgtaaactc

SEQ ID NO: 50117 - DNA, 600 bp, Chicken  19866894296803_1
tgcagttacattggtcctcaggggcttctctgaagtgctgtccccgtcgtgtgagaagcaaacctttctgaagatgggctggtttttttgcaggtgtggtgggccatgaccactgggctacgtgctgccagcactgtccttgcgtgcctctttctgactgtcatcattcttctgtcttctacttgtgcttgacgttattttcctccagtgtatttcattttccgtttgcatcaacacggcagttgccatgaaaaatggactgcctcatctcagctacaactttgaacaaggtgagaatgrattcactttttcagggaggaaaaatgcgacctaaaaaaaaacmccaaaaaacagtaacaacaacaacaagaactcctttttttatatagcaaaacctccctgaacatttgaagtttcaacagcttgactaaaagcagtacagcgagagactcggaatgatttataaaaccagccctatgctttggccgggccagattttaccgtggtttctggtgttcattagcatctcattgcacatgtcgtcccattgatcccagtggaacaagcccacacaatagagttctattcaggagtggtgaa

SEQ ID NO: 50118 - DNA, 600 bp, Chicken  19866894296803_2
ccgtcgtgtgagaagcaaacctttctgaagatgggctggtttttttgcaggtgtggtgggccatgaccactgggctacgtgctgccagcactgtccttgcgtgcctctttctgactgtcatcattcttctgtcttctacttgtgcttgacgttattttcctccagtgtatttcattttccgtttgcatcaacacggcagttgccatgaaaaatggactgcctcatctcagctacaactttgaacaaggtgagaatgrattcactttttcagggaggaaaaatgcgacctaaaaaaaaacmccaaaaaacagtaacaacaacaacaagaactcctttttttatatagcaaaacctccctgaacatttgaagtttcaacagcttgactaaaagcagtacagcgagagactcggaatgatttataaaaccagccctatgctttggccgggccagattttaccgtggtttctggtgttcattagcatctcattgcacatgtcgtcccattgatcccagtggaacaagcccacacaatagagttctattcaggagtggtgaaggcagcccctacgcccatccccaaacactgagacgtggcaaag

SEQ ID NO: 50119 - DNA, 600 bp, Chicken  19866894296804_1
gtgtggataacaaatgagccatgtcagcagcagagtcatttccaaatctgtgagagccgccatgtagcagaggaagtgactggctggatgtgaagttgaagtatgctggtacggcctccatggttggaagaaagtctgctctatgtattaaagatgtaactttactttttgtttttaattattgtcttgaggaatacttaaggaaaagctagtagctcttggcctacttttctgtaaatttatgtttattctgtaatttcttagtgttagacaattttcttgttgagtggcttttttctrgaattatttcggaagaactgtttgtgaatttcttttgcgtttcattgctgaagcagaagtagtgcattggattaggcatgccaagtgagtttttacttcttctgtgatgaagtgacctgaccacaggttgtattccctggagagagtatgttgtattgcatggataggatgagacatgcgggttgctacttcgagctgtcagattctgagagcactgtgcaagaaagttctctttgctttatgccatcagtcaaactcaagtcaaactggtgcaggagaccttaaagatgttttgaaggg

SEQ ID NO: 50120 - DNA, 600 bp, Chicken  19866894296806_1
ggggaagagggagagagaggggtgctgctatttgcattactttgcccgtggtatgggaacaactgcaggcacagactttgggctgcttgttctgattcatgctggtgggcagggctccagcacttcagagcctgaaagttcacttttccttctgactctgagtttcaatggaacatttttagagttgacaatgtttctggtttctgttttttgtgcatctcgtatgcttgtagtcatttgttacctcaatagaaggctactgtctgaaacatcctgctctgcatttgtgtggaggaaatkgaatgtgctggggaggatagcctgtttgaggcactgaaaacactcctgtaagaccactgtggaagggatccatttttaccttcattgcggggataagaaaaccagcccacctttccttttctctgcatctgttgtatcagtaataaatgtcttcccatggactggatgaagggtcagatctgcacagctattcataatgcacgttctttctcctttcactcctgcttttatcttgctttttcacactattgatacattcacctggaaataacccagagaattaacatcttccctttacca

SEQ ID NO: 50121 - DNA, 600 bp, Chicken  19866894296806_2
ctcctgtaagaccactgtggaagggatccatttttaccttcattgcggggataagaaaaccagcccacctttccttttctctgcatctgttgtatcagtaataaatgtcttcccatggactggatgaagggtcagatctgcacagctattcataatgcacgttctttctcctttcactcctgcttttatcttgctttttcacactattgatacattcacctggaaataacccagagaattaacatcttccctttaccacttgatgatgtcagatatatctatacaagtatggagatgctrcatgaaggtaatcaaatctagtctggatttatatgcatgtaaacattttacttctcaatagtatttgcagccctttgctgcagcaattgtgttaatctctgatgccattggagaatagcagcaatgttaatgaataactcagcatgtatagatcaaaaaatgttgggaatatgctttgcaggctattttattcttacatctctttcatgaagccacattcctggtgtaacatgggatttaaaatacaaaccttcactctgatcctgcagagacttattaatggcctttattttatgtgct

SEQ ID NO: 50122 - DNA, 600 bp, Chicken  19866894296808_1
cctggcctgtaatgggagccaggagatgtaggggatgattaacctaggcaacgggagaagggagggcgcagacctcctccaccgatccatttggtggttgttttcaggagaggaaatgaccagaacagctaaaggcacctctaccaaagaagtcagagtgccaatgcctttccaaggcagcacgtgacttttctcctataaaaacacatcccagtaaagtcattcttgaagatttttttctttccttctctctcgctctgccctcttctgcacatgcgtgcacccactcccaaccacccrtttacactggaggctgttacctgtctgaaccctgctctaccagggatgctccttctgtgctcctcattctctgagcacatatgagcatctttggtcccacaggtgaacacacaacgacctgcactttcctctccctagtttcttttttttattatgatcccctttgataattcactctccatctttccctcactcttcacccacatatttcctttcagaacttaggaatggtccccacaggtgccatacagcagcacactgctggtatgcccagctggagaacactgggttccaatgctg

SEQ ID NO: 50123 - DNA, 600 bp, Chicken  19866894296809_1
aaactcaagtaagtcagatgaaaacattggtaacttatctgctgagcctgtgccccaagccttcccatcaccccagatttctcaaaaagactctaagatgtgctgatgcttaaatatcaaacaatcagtaattagaaaacaaaagtcccacagtgcttctgtgtctcaagagacatgtgacttgaggtctaaaagcaacagacaagctttaacacctcttttcccatcagatagacttgtaaaactctctctcagatgtaatctgaagtattccacttgacttaagtcagttattggcaygtctacatgcctggtggatctcctgaacacttcagagatcatttctttctaggcaaagtggctccctcatgcatgggcaatgaagaaacagctgctttccagcaaaactttctctccccacaacaatgtgaataggtctctgttctcaacagaaatatgtaccttcttacacaacaccaaacaacaagcagctttggtccatttctgttttgttggtctatgagcataaactatgaatcataaacaagtgcctgtttaaagatgtggtgctactgctaggagagctaggtaataggcatt

SEQ ID NO: 50124 - DNA, 600 bp, Chicken  19866894296810_1
tggtacctcagttggctagcttctgtatctgcaattgaatgttagaatagtacatagatatccaaaagagcataatagtttcctgtgacaatgtcgagcagtacctttttgatgttccttctcaagttgttattgtatcaaccacatataggtataaatctgtgcatttaattgtgattactaccttccttatgtattgtaatcactgttttaactgagaagctagactctttaaaactacactacagttatatatgacgggcaaggcacatgaagagagcatattttgaaattattttkgggtagttttttaatgtcttcctaaaatttaaggccagcatctttcaagctggaagtcaaaatcttcaaaacatatatctgtatgtttcacttgaagtgaaacaactcgaaatgtactttgctcttgttgtaataatttaacagttcttactatgagtagaagtcagagaatgctttaagagtttacaggaaagtttgagaccacactaaagaaccgtgcttgttttccttttttaaaaaaaatcaaataaaaaacaagacattaaaattcagcacaaattgaatgctaaagttatgtct

SEQ ID NO: 50125 - DNA, 600 bp, Chicken  19866894296812_1
tctaagaaatcctctcaggaaagcagtcattagagaaagcaaccaggaggccaatgctgtgctccctgctctgtggctgagctttctgggtgaccttgccaagtcttggaatgcctgtgtttccctatctgcaaaacatcctgataaacaccttccttttgaaaacgcagcagcatcatttattatgcaaatggtgcctcaaatggtaacctggcttctgagttgtaacatcaggcaaaacccacaactgctagatgacagaactgccaatctgtattttctaacagacagaggcatctyrgtgtgactaacaggtcacccttgtccccagaggttccatttcagatgaggcagcagttattcatgctattttcaccatattcacatcagccaaaccagcaacataagagcaaaccatagaaagaaaaaataaatataaaacatattccacataaacaacaaaataatacacgtttacttcttgtgtcccatttaatgaagctgaagggtgactagttagccaagcctgttcttagtcaatcaccacagtgctggcagcaggcagtgctcagacctgggattaatgctattagcacagca

SEQ ID NO: 50126 - DNA, 600 bp, Chicken  19866894296812_2
ctaagaaatcctctcaggaaagcagtcattagagaaagcaaccaggaggccaatgctgtgctccctgctctgtggctgagctttctgggtgaccttgccaagtcttggaatgcctgtgtttccctatctgcaaaacatcctgataaacaccttccttttgaaaacgcagcagcatcatttattatgcaaatggtgcctcaaatggtaacctggcttctgagttgtaacatcaggcaaaacccacaactgctagatgacagaactgccaatctgtattttctaacagacagaggcatctyrgtgtgactaacaggtcacccttgtccccagaggttccatttcagatgaggcagcagttattcatgctattttcaccatattcacatcagccaaaccagcaacataagagcaaaccatagaaagaaaaaataaatataaaacatattccacataaacaacaaaataatacacgtttacttcttgtgtcccatttaatgaagctgaagggtgactagttagccaagcctgttcttagtcaatcaccacagtgctggcagcaggcagtgctcagacctgggattaatgctattagcacagcac

SEQ ID NO: 50127 - DNA, 600 bp, Chicken  19866894296815_1
cctaaacacccccctcccaccccacaaagcttttgtgaaatcagattgtgctgaatgcaggaagcacagatggttaaaaacatcgcttggaggtacttttatcttacagctaaagaaatcacttactgacaagcactgagaatgcagtgtgagttctggtgttaatcagccaaggaacatggcaggtccagctgcaacaaagcctgttttttaactggagaaaacatgttagcaatcaacattgccatgcaaataaccattacaacgaaatcccaccttcttcagcactaccaaattagraaaaaaattctacgaaggcattgaaaggggcatggtggtgatgggttgggaggttggacatgattatctctaagaggtattctccaaccataatcattttatgattctaagcattagtaaaatatttcagcatttggggatcttaaactgtgtctcaccagataaggtcacgtcctgctctagcagttgtcctctctccttggaagagatgatttaagtttacaatacttcctcctcttgaaatgtccttatggaacatgacttagattattctttactgtctgccttctctgcatcagt

SEQ ID NO: 50128 - DNA, 599 bp, Chicken  19866894296816_1
  misc_feature (1)..(195): n is any nucleotide
nnnnnnnnnnnnnnnnnnnnnnnnnnnnnnnnnnnnnnnnnnnnnnnnnnnnnnnnnnnnnnnnnnnnnnnnnnnnnnnnnnnnnnnnnnnnnnnnnnnnnnnnnnnnnnnnnnnnnnnnnnnnnnnnnnnnnnnnnnnnnnnnnnnnnnnnnnnnnnnnnnnnnnnnnnnnnnnnnnnnnnnnnnnnnnnnnnnacttgaacggcagctgggattcgcagtcactttcagcagctcacacggggagggctgtccctgcggcaggacagcaggtagcacttctgtgaggctttgacaccrctgtttgggacttctgtgagcacggcaagggggrcagaggggctgctctgtctcacagcgccgccacagcacgtggcagcagcccccmgctcgctgggctccttgtgccgtgtgtgacgtgtgcgcagctcagcaggcaaggctggaaggccctcctgcactttgtggcaggctgctctctgagatgctgtgactgtttcaacaagcatgttccctgttgcttgggcacggctgtgaaagcttcccagcaaggcctgcagccaggcccctgtcccctgtgccagggcaggcaggagcag

SEQ ID NO: 50129 - DNA, 599 bp, Chicken  19866894296816_2
  misc_feature (1)..(161): n is any nucleotide
nnnnnnnnnnnnnnnnnnnnnnnnnnnnnnnnnnnnnnnnnnnnnnnnnnnnnnnnnnnnnnnnnnnnnnnnnnnnnnnnnnnnnnnnnnnnnnnnnnnnnnnnnnnnnnnnnnnnnnnnnnnnnnnnnnnnnnnnnnnnnnnnnnnnnnnnnnnnnnnnnacttgaacggcagctgggattcgcagtcactttcagcagctcacacggggagggctgtccctgcggcaggacagcaggtagcacttctgtgaggctttgacaccrctgtttgggacttctgtgagcacggcaagggggrcagaggggctgctctgtctcacagcgccgccacagcacgtggcagcagcccccmgctcgctgggctccttgtgccgtgtgtgacgtgtgcgcagctcagcaggcaaggctggaaggccctcctgcactttgtggcaggctgctctctgagatgctgtgactgtttcaacaagcatgttccctgttgcttgggcacggctgtgaaagcttcccagcaaggcctgcagccaggcccctgtcccctgtgccagggcaggcaggagcagcagttgctgccgcagcacggctggcctttccctt

SEQ ID NO: 50130 - DNA, 599 bp, Chicken  19866894296816_3
  misc_feature (1)..(107): n is any nucleotide
nnnnnnnnnnnnnnnnnnnnnnnnnnnnnnnnnnnnnnnnnnnnnnnnnnnnnnnnnnnnnnnnnnnnnnnnnnnnnnnnnnnnnnnnnnnnnnnnnnnnnnnnnnnacttgaacggcagctgggattcgcagtcactttcagcagctcacacggggagggctgtccctgcggcaggacagcaggtagcacttctgtgaggctttgacaccrctgtttgggacttctgtgagcacggcaagggggrcagaggggctgctctgtctcacagcgccgccacagcacgtggcagcagcccccmgctcgctgggctccttgtgccgtgtgtgacgtgtgcgcagctcagcaggcaaggctggaaggccctcctgcactttgtggcaggctgctctctgagatgctgtgactgtttcaacaagcatgttccctgttgcttgggcacggctgtgaaagcttcccagcaaggcctgcagccaggcccctgtcccctgtgccagggcaggcaggagcagcagttgctgccgcagcacggctggcctttcccttcccctcccttccccccgcacagccgcccccaccctccaggagctatcgcaaatc

SEQ ID NO: 50131 - DNA, 600 bp, Chicken  19866894296817_1
cattctctccctctactgctgtcttccttcccttccttcttcaccctggtagtgttttctctcatctccctcattttcccatttcacatctcatttcacctcataaagcgtttgtcaaaaaacaatggctgcagagatagctaccaaataaaactcctgaaaaacacccaagctctgtaagggaaagcaaactcactacttagtatttattcttgaaatagtaaataaataagacatcacaaataaaataaaatacagttaaataaaaataaaataagaataaaaagagagacatcaccmtctaatttgctctttgggagagtgggacattggatgtatgtacgggtggatcctgcacyrgatggatgatgcgcacactcagttattcagattttcttctctcaccttaatcttattaatctaggtgtaaaaagccttggagaggaaagaggatgctgaggcaatcagacatggacacggaattacagctcctgcaatgttttcctgctgcatgatgccagaagcagcagtgagcaccagtggctgccaaaggatgtgcccacgtgggtactttgctgtgtctgcatgtttctgatgaga

SEQ ID NO: 50132 - DNA, 600 bp, Chicken  19866894296817_2
tctcatctccctcattttcccatttcacatctcatttcacctcataaagcgtttgtcaaaaaacaatggctgcagagatagctaccaaataaaactcctgaaaaacacccaagctctgtaagggaaagcaaactcactacttagtatttattcttgaaatagtaaataaataagacatcacaaataaaataaaatacagttaaataaaaataaaataagaataaaaagagagacatcaccmtctaatttgctctttgggagagtgggacattggatgtatgtacgggtggatcctgcacyrgatggatgatgcgcacactcagttattcagattttcttctctcaccttaatcttattaatctaggtgtaaaaagccttggagaggaaagaggatgctgaggcaatcagacatggacacggaattacagctcctgcaatgttttcctgctgcatgatgccagaagcagcagtgagcaccagtggctgccaaaggatgtgcccacgtgggtactttgctgtgtctgcatgtttctgatgagatccttggactcttgtttgctttttccttggcatggcatctcatattctcccagtctgtg

SEQ ID NO: 50133 - DNA, 600 bp, Chicken  19866894296817_3
ctcatctccctcattttcccatttcacatctcatttcacctcataaagcgtttgtcaaaaaacaatggctgcagagatagctaccaaataaaactcctgaaaaacacccaagctctgtaagggaaagcaaactcactacttagtatttattcttgaaatagtaaataaataagacatcacaaataaaataaaatacagttaaataaaaataaaataagaataaaaagagagacatcaccmtctaatttgctctttgggagagtgggacattggatgtatgtacgggtggatcctgcacyrgatggatgatgcgcacactcagttattcagattttcttctctcaccttaatcttattaatctaggtgtaaaaagccttggagaggaaagaggatgctgaggcaatcagacatggacacggaattacagctcctgcaatgttttcctgctgcatgatgccagaagcagcagtgagcaccagtggctgccaaaggatgtgcccacgtgggtactttgctgtgtctgcatgtttctgatgagatccttggactcttgtttgctttttccttggcatggcatctcatattctcccagtctgtga

SEQ ID NO: 50134 - DNA, 599 bp, Chicken  19866894296818_1
  misc_feature (1)..(39): n is any nucleotide
nnnnnnnnnnnnnnnnnnnnnnnnnnnnnnnnnnnnnnnacagctgcagagctcagacatgtttatttttacatgcagtgagggaggacagcagtggttaccaaagtatgggatgactaattaagccgtctactgctgtgctgggttcaggctgggcagcaagaatatatttgtattctttaaccacagcagctgccacctcttttctgcgccgttgtagttcagaaaaaaaacaacttactgttctcatggagcaaagcaaagaagcgggagccaagcaaagcaatctgagctatcagstactatcttcagccatgagaaacacgagaggctttcccagcccagggcacttccacttcctcttcagcactttggtgtagcactgacggagccaggatcccaatgcaccaggattatgcaaagtgctacgaggcatctgggcaacctgctgctgtaactgctgcttggccctgcagggctcaggctgtyggatgaggtggacttggagrgttagttccagtsgaagcattctatgaacrgcaaagcttttctttagaacagtctttccctactcaaattcagtcattttgggtgcacag

SEQ ID NO: 50135 - DNA, 600 bp, Chicken  19866894296818_2
cagctgccacctcttttctgcgccgttgtagttcagaaaaaaaacaacttactgttctcatggagcaaagcaaagaagcgggagccaagcaaagcaatctgagctatcagstactatcttcagccatgagaaacacgagaggctttcccagcccagggcacttccacttcctcttcagcactttggtgtagcactgacggagccaggatcccaatgcaccaggattatgcaaagtgctacgaggcatctgggcaacctgctgctgtaactgctgcttggccctgcagggctcaggctgtyggatgaggtggacttggagrgttagttccagtsgaagcattctatgaacrgcaaagcttttctttagaacagtctttccctactcaaattcagtcattttgggtgcacaggttaggaagggaaggtggaccagagccaaagggtttattattattatcattgttttaagattccaactataaagccacaaaaccagaagggatgttagaattccccttgggttctcatttccttccccaaaggactgcacagaaagctgcctcacctttgctgacgcagacacacagacacacctgtgtc

SEQ ID NO: 50136 - DNA, 600 bp, Chicken  19866894296818_3
cgccgttgtagttcagaaaaaaaacaacttactgttctcatggagcaaagcaaagaagcgggagccaagcaaagcaatctgagctatcagstactatcttcagccatgagaaacacgagaggctttcccagcccagggcacttccacttcctcttcagcactttggtgtagcactgacggagccaggatcccaatgcaccaggattatgcaaagtgctacgaggcatctgggcaacctgctgctgtaactgctgcttggccctgcagggctcaggctgtyggatgaggtggacttggagrgttagttccagtsgaagcattctatgaacrgcaaagcttttctttagaacagtctttccctactcaaattcagtcattttgggtgcacaggttaggaagggaaggtggaccagagccaaagggtttattattattatcattgttttaagattccaactataaagccacaaaaccagaagggatgttagaattccccttgggttctcatttccttccccaaaggactgcacagaaagctgcctcacctttgctgacgcagacacacagacacacctgtgtctggctgtgcagatacagcca

SEQ ID NO: 50137 - DNA, 600 bp, Chicken  19866894296818_4
cagaaaaaaaacaacttactgttctcatggagcaaagcaaagaagcgggagccaagcaaagcaatctgagctatcagstactatcttcagccatgagaaacacgagaggctttcccagcccagggcacttccacttcctcttcagcactttggtgtagcactgacggagccaggatcccaatgcaccaggattatgcaaagtgctacgaggcatctgggcaacctgctgctgtaactgctgcttggccctgcagggctcaggctgtyggatgaggtggacttggagrgttagttccagtsgaagcattctatgaacrgcaaagcttttctttagaacagtctttccctactcaaattcagtcattttgggtgcacaggttaggaagggaaggtggaccagagccaaagggtttattattattatcattgttttaagattccaactataaagccacaaaaccagaagggatgttagaattccccttgggttctcatttccttccccaaaggactgcacagaaagctgcctcacctttgctgacgcagacacacagacacacctgtgtctggctgtgcagatacagccaagggttaatgaag

SEQ ID NO: 50138 - DNA, 600 bp, Chicken  19866894296818_5
actgttctcatggagcaaagcaaagaagcgggagccaagcaaagcaatctgagctatcagstactatcttcagccatgagaaacacgagaggctttcccagcccagggcacttccacttcctcttcagcactttggtgtagcactgacggagccaggatcccaatgcaccaggattatgcaaagtgctacgaggcatctgggcaacctgctgctgtaactgctgcttggccctgcagggctcaggctgtyggatgaggtggacttggagrgttagttccagtsgaagcattctatgaacrgcaaagcttttctttagaacagtctttccctactcaaattcagtcattttgggtgcacaggttaggaagggaaggtggaccagagccaaagggtttattattattatcattgttttaagattccaactataaagccacaaaaccagaagggatgttagaattccccttgggttctcatttccttccccaaaggactgcacagaaagctgcctcacctttgctgacgcagacacacagacacacctgtgtctggctgtgcagatacagccaagggttaatgaagctagatggcaaatgcag

SEQ ID NO: 50139 - DNA, 600 bp, Chicken  19866894296818_6
ccccttgggttctcatttccttccccaaaggactgcacagaaagctgcctcacctttgctgacgcagacacacagacacacctgtgtctggctgtgcagatacagccaagggttaatgaagctagatggcaaatgcagagactgcttgttacaagggcagtgcatgataggtgaagcagcttcagccaaacaaacagcacgggcatgtcagcagctgtcagaaaaattacagccaggcaatgtagaaggttcagcaataaacacgactaaagagtgacaaataaaaacataccgagcgcrttacacatccagcggaaaaaaaaatctatgggaactttttatactacaccccggggcaaagaggaaattatgccacaacaatgagggctctcagcaaggtcagctcagactccagctcagcagcagagctgagaaaaagcttagtgagggaaaaggggatggtgctggctcccaaaatccgcagtcgcagctggaaccatggattgctacagcagaaccatggcagcttctgcattcccagcctctcccaaggcatcagaaatagcccaagtctgggactcccaaggaaaatgctgttac

SEQ ID NO: 50140 - DNA, 600 bp, Chicken  19866894296827_1
tctttcctaccctgcagtaaaatgcctcttgatgcaattaaatagctcaagattcagaaatccagacctaccagtctcttcagcttgtgacagccagtcatgtgtgagaaaggtcagtcatgtaaaataaattaaatgagttctgcaaagacttaactggaattgaagcaaagctctccaaacagaaaaggtgatgaaaagttcaatcaaagtcagatgcaaggaaagatgctcattaatatccacatcatcaggtcacaaacaccctgctcatctatatggcaggactgtgtgcttaaygacgggatcaaaagtgatatttgtgagagaacaatatactctatcgctcctcagtactatatgttgcatatcctgctgacactcctaaaaagaatatcttcacatctacatgaggacttaataaaagagaaaacacatttgtagcaagtcaaataaatagttcagtacacatggaattaaatgtagttattatttcagtattcagaaataaacaaaatgtactacaggacatttacaagtcagggccattttgtaaattaaagcaagcccttagcattagaaaggtgttctaatactaag

SEQ ID NO: 50141 - DNA, 600 bp, Chicken  19866894296828_1
gaactgtcacatgcactgctgcttgtagggcatccacatagctgcttttatcccagttggcacgtactggcttggatgagcccgaggtcctggtgaacactgaataactgtagcagagctgtgcatagacaggctttgcaatggccagctcacctgttctgcgtagattccttcctacatggaaccaatccacagagagctgagctcgggtctccatgtgcctgaaggtttgttttggggacagaaataacaggataaattgtttagaggacgagcaggtgtgcttgagagttgctttaytttttttcctaaacatcccaaatcagagacaccatttgtctacacagaaccgctgtcaccactacgctttggctgctcctcccacractttggcaatttctgcctcagtgctgggcctgatgcctggacagagggtgagcctgcagcttggcaatgctgcttgtcctatctcagcatggatctctstctccagcacatgccccagttctttgtacaatcacagcagaagtmtctccccttgcactgacccaacacactggtttccaaagctttggtttctcatctcagccggtctctgct

SEQ ID NO: 50142 - DNA, 600 bp, Chicken  19866894296828_2
gtcctggtgaacactgaataactgtagcagagctgtgcatagacaggctttgcaatggccagctcacctgttctgcgtagattccttcctacatggaaccaatccacagagagctgagctcgggtctccatgtgcctgaaggtttgttttggggacagaaataacaggataaattgtttagaggacgagcaggtgtgcttgagagttgctttattttttttcctaaacatcccaaatcagagacaccatttgtctacacagaaccgctgtcaccactacgctttggctgctcctcccacractttggcaatttctgcctcagtgctgggcctgatgcctggacagagggtgagcctgcagcttggcaatgctgcttgtcctatctcagcatggatctctstctccagcacatgccccagttctttgtacaatcacagcagaagtmtctccccttgcactgacccaacacactggtttccaaagctttggtttctcatctcagccggtctctgctggccctctgctgagggtataaatcccacactgatgctattctggagtttactgctgctgtatacgttaccaggggatgcttatatc

SEQ ID NO: 50143 - DNA, 600 bp, Chicken  19866894296828_3
aatccacagagagctgagctcgggtctccatgtgcctgaaggtttgttttggggacagaaataacaggataaattgtttagaggacgagcaggtgtgcttgagagttgctttattttttttcctaaacatcccaaatcagagacaccatttgtctacacagaaccgctgtcaccactacgctttggctgctcctcccacractttggcaatttctgcctcagtgctgggcctgatgcctggacagagggtgagcctgcagcttggcaatgctgcttgtcctatctcagcatggatctctstctccagcacatgccccagttctttgtacaatcacagcagaagtmtctccccttgcactgacccaacacactggtttccaaagctttggtttctcatctcagccggtctctgctggccctctgctgagggtataaatcccacactgatgctattctggagtttactgctgctgtatacgttaccaggggatgcttatatcattttctgctcagtcctatttaggacacttcttatttttataaagaaagctcaaagtcgaactcctcccctaaactccttgagaagtgtattaaggtgtg

SEQ ID NO: 50144 - DNA, 600 bp, Chicken  19866894296828_4
gttttggggacagaaataacaggataaattgtttagaggacgagcaggtgtgcttgagagttgctttattttttttcctaaacatcccaaatcagagacaccatttgtctacacagaaccgctgtcaccactacgctttggctgctcctcccacractttggcaatttctgcctcagtgctgggcctgatgcctggacagagggtgagcctgcagcttggcaatgctgcttgtcctatctcagcatggatctctstctccagcacatgccccagttctttgtacaatcacagcagaagtmtctccccttgcactgacccaacacactggtttccaaagctttggtttctcatctcagccggtctctgctggccctctgctgagggtataaatcccacactgatgctattctggagtttactgctgctgtatacgttaccaggggatgcttatatcattttctgctcagtcctatttaggacacttcttatttttataaagaaagctcaaagtcgaactcctcccctaaactccttgagaagtgtattaaggtgtgacctaatttcttacaagttcttcaattgggacattttcttctcca

SEQ ID NO: 50145 - DNA, 600 bp, Chicken  19866894296835_1
gcatcaggccaacctaaggtttcatctcctgattacccttcagttacagggttaaaacagctctgctagagatgagtgctgctcagcctgtgattcatgggcctccagcaggctgctagcagtctgcattgaaagacagtctgcaaggcaaccacccgcttctggctgagtctgttaatttgagagatgtaaacaccagaatcacatttttatagagcgaggattttaaactcaaatactggtagtcataataggaaactcgtggttttataaaataacatttagcttttcctaacgctmtgtcctttgctattaccattcttctcctcctcttctgccactgccaaaaaatacagatgtagaagcaagccttattttccctgaaagcctcagctggctctccagcaaaattgacctcatagggttcaccagtcagggataaaagtatattcttgcaagaaacaaaaaaaaaragctggcatttgaaattgatgaaactaattacataaggactagaagaaggggaaatccatgtttacttcaactatggttttttgtaagttacatgtgtcaaacaattctgagctttacaaaaccgaa

SEQ ID NO: 50146 - DNA, 561 bp, Chicken  19866894296835_2
gttaatttgagagatgtaaacaccagaatcacatttttatagagcgaggattttaaactcaaatactggtagtcataataggaaactcgtggttttataaaataacatttagcttttcctaacgctmtgtcctttgctattaccattcttctcctcctcttctgccactgccaaaaaatacagatgtagaagcaagccttattttccctgaaagcctcagctggctctccagcaaaattgacctcatagggttcaccagtcagggataaaagtatattcttgcaagaaacaaaaaaaaaragctggcatttgaaattgatgaaactaattacataaggactagaagaaggggaaatccatgtttacttcaactatggttttttgtaagttacatgtgtcaaacaattctgagctttacaaaaccgaagagtaaccggcaagagtggaagtatctaagaagaatcttagtgaaagaaaactgaagctatttctaacaaatatttgttgctctgctaaattaaaagctaaatggctaactcctaactcaacatttataagctt

SEQ ID NO: 50147 - DNA, 600 bp, Chicken  19866894296838_1
aaatcgttaggctggaagctcttacccaaaaacacagatccctgtccttgggtagaggacaccgttccagtgtaggcctacatgtacagaagagtgaaattccagtcttcaggaagccagtgacaagtgaaatcaagagaaaacatctcagatatacggggtatttaggataaaatctcctttcttctactactaaagcacggacttgcattttcaaagaaccgcacttctgtgtgcacatgcatgccctcagaaaggcagattgattccatgtggggccgcagatttcattctggcagygggccttacagaggtgaatagattctgctgcatgaagaatgttccaccttgtctgaggattatgttctcgcaacttcactgaccgctggtgacagagctggctctttgggaggcactactgccttgcaatcagacatatcaggcttttgatgcagcttggtgtttcagctacaggccttgggcttgaatttaactatgktattctaaaaataactagaaaaatagttctggaggagtgaagtgaaagacttctggttgtctcggtttggattacacgttcatggaaaaggtacattagat

SEQ ID NO: 50148 - DNA, 600 bp, Chicken  19866894296838_2
acggacttgcattttcaaagaaccgcacttctgtgtgcacatgcatgccctcagaaaggcagattgattccatgtggggccgcagatttcattctggcagygggccttacagaggtgaatagattctgctgcatgaagaatgttccaccttgtctgaggattatgttctcgcaacttcactgaccgctggtgacagagctggctctttgggaggcactactgccttgcaatcagacatatcaggcttttgatgcagcttggtgtttcagctacaggccttgggcttgaatttaactatgktattctaaaaataactagaaaaatagttctggaggagtgaagtgaaagacttctggttgtctcggtttggattacacgttcatggaaaaggtacattagatattaagaaatctagactgaagcagaaaaaagaaatgtgtttcttcttcttaagggaatctacctgctgagatgtggggaaggggataagcagagggataaggataacagaaaattcagaggacaataaaagcttaaatccttaaatggtgaagtcagcttttcctctccaacttaagcagataatgattttgacagcag

SEQ ID NO: 50149 - DNA, 600 bp, Chicken  19866894296840_1
aaaacaaaacaaaacaaaaaacactttcatgggagaaaacagaatcgattattattcagcttttagggcttacaaatttttcatttttttcacaacctcctgtccaaacaacataaaagaccgagtaaaggataccccagattttcaggtaggatattaggaagaatttcttctcagaaagagtggtgaggcattggcacaggctgcccagggaggtgggggagtcaccatccctggaggtgtttaaggaaagggtagatgcagctcttagggatatggtttagagagctacactggtgrtgagtggatggctggactaggtgatctcagaggtctaaatcctatgattctatagattctacaattctatatttaggggaactgttttgcagaagatgagtgatgagcactgattggttttattcactgataaaataagtggaaaatagacatcctgacagcattgattccagtcactggtcttccatacaggtcattctattaaatttatgtggaatttacctgaaaactcttttagrtccagctggcaggatgcagaataaagcatactcagagcaagcttgyrcaggacagcagcta

SEQ ID NO: 50150 - DNA, 600 bp, Chicken  19866894296840_2
gtgtttaaggaaagggtagatgcagctcttagggatatggtttagagagctacactggtgrtgagtggatggctggactaggtgatctcagaggtctaaatcctatgattctatagattctacaattctatatttaggggaactgttttgcagaagatgagtgatgagcactgattggttttattcactgataaaataagtggaaaatagacatcctgacagcattgattccagtcactggtcttccatacaggtcattctattaaatttatgtggaatttacctgaaaactcttttagrtccagctggcaggatgcagaataaagcatactcagagcaagcttgyrcaggacagcagctaaaagcagatgtagttctgacacagacatgccaaaaagcctgaaacaggctgacagcagccatcaccaaaggcatgaggaaaaacatgtttttctctacatcttaattattctcaggaaaaaaaaaatcctaagcctggaccaattttaaaaggaaaatgagtacttgtagcaggcattcctgtggtgagtcaggtatcacagacaccttgatgctccttaacagctccttggacttgca

SEQ ID NO: 50151 - DNA, 600 bp, Chicken  19866894296840_3
gagctacactggtgrtgagtggatggctggactaggtgatctcagaggtctaaatcctatgattctatagattctacaattctatatttaggggaactgttttgcagaagatgagtgatgagcactgattggttttattcactgataaaataagtggaaaatagacatcctgacagcattgattccagtcactggtcttccatacaggtcattctattaaatttatgtggaatttacctgaaaactcttttagrtccagctggcaggatgcagaataaagcatactcagagcaagcttgyrcaggacagcagctaaaagcagatgtagttctgacacagacatgccaaaaagcctgaaacaggctgacagcagccatcaccaaaggcatgaggaaaaacatgtttttctctacatcttaattattctcaggaaaaaaaaaatcctaagcctggaccaattttaaaaggaaaatgagtacttgtagcaggcattcctgtggtgagtcaggtatcacagacaccttgatgctccttaacagctccttggacttgcacggagatacagcgctggttgtggagtccctcatcctcagccctgct

SEQ ID NO: 50152 - DNA, 600 bp, Chicken  19866894296840_4
agctacactggtgrtgagtggatggctggactaggtgatctcagaggtctaaatcctatgattctatagattctacaattctatatttaggggaactgttttgcagaagatgagtgatgagcactgattggttttattcactgataaaataagtggaaaatagacatcctgacagcattgattccagtcactggtcttccatacaggtcattctattaaatttatgtggaatttacctgaaaactcttttagrtccagctggcaggatgcagaataaagcatactcagagcaagcttgyrcaggacagcagctaaaagcagatgtagttctgacacagacatgccaaaaagcctgaaacaggctgacagcagccatcaccaaaggcatgaggaaaaacatgtttttctctacatcttaattattctcaggaaaaaaaaaatcctaagcctggaccaattttaaaaggaaaatgagtacttgtagcaggcattcctgtggtgagtcaggtatcacagacaccttgatgctccttaacagctccttggacttgcacggagatacagcgctggttgtggagtccctcatcctcagccctgctc

SEQ ID NO: 50153 - DNA, 600 bp, Chicken  19866894296840_5
aggcattcctgtggtgagtcaggtatcacagacaccttgatgctccttaacagctccttggacttgcacggagatacagcgctggttgtggagtccctcatcctcagccctgctcctctgagcctgctatatttctaatttgtgctgttctggaacaaagcatggacacagttatagcctacaagaaagctggggagtgactttttatcagggagtgtagtgatatgataagggggaacgactttaaactgaaagaggggagattcagattaggcattaggacaatattttttactcagmgcatggtgaggctttggcacagctgcccagagggctgcgggtacgccatccctgagtgttcaaggccactggatggggccctgggcagcctcagggggtggggggcagccctgcccatggcagggggttgaaactgggtaggctttaaggttccctccaacccaaaccattccatggttctacatgatcctatggcatagccagagagtggaaacagagggccagaagataaaaagaaattggtatttaaaagaaaacagcactggtaggagttgtgttgatactatcatcgaaagcttt

SEQ ID NO: 50154 - DNA, 600 bp, Chicken  19866894296843_1
cttaagatatttttaataagtgctcagcaaagaattgtgtgaggacacagggaggactgaagatggacagggcgagttacacgaagcacagagggagcttcctctgcagccctgtgtgtcttggggcaatgcctgcctgccccgcggcccttcatcagcaagccagagctacaagagctcaaagaggagctcctatctgcctagtgctcagcaggtgctgggaggacagccggacaaccagaggggtggtaggagagaggatggtcagggatacagcaggaaaggtggtggttgtgcatyggtaccaccgacagcatggggccaagagagagaatgtcagaaggacccaaccaacccaacgcaactcaatgtaacccaacacaacgcaacgcaactcaacgtaacccaactcaactcaacccaaccaacccaatgctgggcccgtgcttctttctgagcttctacccagaaggcagacggggctggggtaaggggccacacacatgtatttatttctaggctcgacgccccagggagcgaaacaggtcttggttttgtgttttttaatggaacccagcccttaaggcgacaagtgactac

SEQ ID NO: 50155 - DNA, 600 bp, Chicken  19866894296844_1
gaaagaggacggctggtagcagataagagaggagatagcactgcgtttttgggtaccaaatgaaatgctgattactcccctgcaatgaacagggacacctgcaggtagatcaggttgctcagagccccattcagcctgaccttggatgtctccagggatggagcatccatctcttatggatggggaactacaagggaagagcagagcagaagagccaagccccagcatgcaaatagcacagcagacatcccctctgggttggaaccatggtagacctcatcacgtctgagaatctttaaytggattggaaaaatgatcagtcgctttgatttttttggggtggttccatggagtgggctgagctttgcttggaatctcccccatgttcccgggtcactgagccgtggtgggagctcatatgggcaaaccacgcagcactgagctcactctccacacgtgctgtgaatcagggtgaggccctggggtgggcagggcgcttcccacccattgctgcagagcagagcacagagagcttcacctgacctgggctgagccccacctccacaccagcagagagcaccgaggaagtattcatccatt

SEQ ID NO: 50156 - DNA, 600 bp, Chicken  19866894296847_1
ttcagtttcagatacagatttggataagcattaaaattagaacttgaacttgcccagagtaatacagtgttgggattttgggttccaattcagatcaaggcaaaaccttcaatggcaaatccatattaagattacagtgtgaattccccatattttgtgagcagcaactgctgccagagctgtgagtaaggcttactgtaagtcaggattagaccagaaacaaaccaaaacatagaaggagaaagaaagagaagctaataactacagcactggaaaatcttactgatttagctaacttakgtgcttgtcgtaaaaggagtaatcaatactctgttgtttgcagttgttctgtagagactatcggtcaataattctacacatggttctctcrgctgctaactttgatgtagagttttccttgagtacctccctcatttctgtgtgtaccgaacagttcatatacttggctcacaatagaaatattaaaagacagaagaaaataaggagcaaagttcccttgctaaaggcacgtgctgtggctgtgaggctgggctgtggctgagacctgggagggaaggaaattccagctccactgaatta

SEQ ID NO: 50157 - DNA, 600 bp, Chicken  19866894296847_2
agatcaaggcaaaaccttcaatggcaaatccatattaagattacagtgtgaattccccatattttgtgagcagcaactgctgccagagctgtgagtaaggcttactgtaagtcaggattagaccagaaacaaaccaaaacatagaaggagaaagaaagagaagctaataactacagcactggaaaatcttactgatttagctaacttakgtgcttgtcgtaaaaggagtaatcaatactctgttgtttgcagttgttctgtagagactatcggtcaataattctacacatggttctctcrgctgctaactttgatgtagagttttccttgagtacctccctcatttctgtgtgtaccgaacagttcatatacttggctcacaatagaaatattaaaagacagaagaaaataaggagcaaagttcccttgctaaaggcacgtgctgtggctgtgaggctgggctgtggctgagacctgggagggaaggaaattccagctccactgaattatcaagtaagcaaactgtcttggcaaggagaaacgcctgtgttctgccagtcatgaggctgagttgatttgagaatctaaaactgctgaaga

SEQ ID NO: 50158 - DNA, 600 bp, Chicken  19866894296849_1
attcctgtctgcactgaagacatgtttatactgttgggttccattacgaatctgtttaatatcctgtgaatgctcagagtcctctgcacactccaggcaggaagtctttaatgcacacactgagaagccatttccaaccgttccaaggctagacaaggaagcatggaaaaagttattctactgcaagaagcaaaaccttcctgctctcgtgcttctgcaaggtttgctggaaaaagctgcccagtcctggtagaatgttcgttaagtcagagacagccatgatggaaacaaagagcacartgtgttctgatgatacccattgtgtttggtgttgtgggtttggtgtcaccacgaggcttcagctgagcwccaggtctgcgtggaacactgcaaggctccaacttaaatagataacttcaagaacagagcagtccccaggtgccctcctccractatgagwtgctggaagagcactgggaatggaaccaggacttctggagccccagcgtggtggatcagcagcagcatccttcttaacgtggtggygatataaggagcaactctacttgtgtttgagatcagcctaacccacagyatctc

SEQ ID NO: 50159 - DNA, 600 bp, Chicken  19866894296849_2
atgctcagagtcctctgcacactccaggcaggaagtctttaatgcacacactgagaagccatttccaaccgttccaaggctagacaaggaagcatggaaaaagttattctactgcaagaagcaaaaccttcctgctctcgtgcttctgcaaggtttgctggaaaaagctgcccagtcctggtagaatgttcgttaagtcagagacagccatgatggaaacaaagagcacartgtgttctgatgatacccattgtgtttggtgttgtgggtttggtgtcaccacgaggcttcagctgagcwccaggtctgcgtggaacactgcaaggctccaacttaaatagataacttcaagaacagagcagtccccaggtgccctcctccractatgagwtgctggaagagcactgggaatggaaccaggacttctggagccccagcgtggtggatcagcagcagcatccttcttaacgtggtggygatataaggagcaactctacttgtgtttgagatcagcctaacccacagyatctcactactgatggtacacaaccattccttgttattactaattattattagttgttattactaattattatt

SEQ ID NO: 50160 - DNA, 600 bp, Chicken  19866894296849_3
gacaaggaagcatggaaaaagttattctactgcaagaagcaaaaccttcctgctctcgtgcttctgcaaggtttgctggaaaaagctgcccagtcctggtagaatgttcgttaagtcagagacagccatgatggaaacaaagagcacartgtgttctgatgatacccattgtgtttggtgttgtgggtttggtgtcaccacgaggcttcagctgagcwccaggtctgcgtggaacactgcaaggctccaacttaaatagataacttcaagaacagagcagtccccaggtgccctcctccractatgagwtgctggaagagcactgggaatggaaccaggacttctggagccccagcgtggtggatcagcagcagcatccttcttaacgtggtggygatataaggagcaactctacttgtgtttgagatcagcctaacccacagyatctcactactgatggtacacaaccattccttgttattactaattattattagttgttattactaattattattagtagagcttctccacggcacaaacaawaagcagagagagcagcagggcagaaaactgcacctgaagctgaggatgaagctg

SEQ ID NO: 50161 - DNA, 600 bp, Chicken  19866894296849_4
gcatggaaaaagttattctactgcaagaagcaaaaccttcctgctctcgtgcttctgcaaggtttgctggaaaaagctgcccagtcctggtagaatgttcgttaagtcagagacagccatgatggaaacaaagagcacartgtgttctgatgatacccattgtgtttggtgttgtgggtttggtgtcaccacgaggcttcagctgagcwccaggtctgcgtggaacactgcaaggctccaacttaaatagataacttcaagaacagagcagtccccaggtgccctcctccractatgagwtgctggaagagcactgggaatggaaccaggacttctggagccccagcgtggtggatcagcagcagcatccttcttaacgtggtggygatataaggagcaactctacttgtgtttgagatcagcctaacccacagyatctcactactgatggtacacaaccattccttgttattactaattattattagttgttattactaattattattagtagagcttctccacggcacaaacaawaagcagagagagcagcagggcagaaaactgcacctgaagctgaggatgaagctgcaggtattg

SEQ ID NO: 50162 - DNA, 600 bp, Chicken  19866894296849_5
ctggtagaatgttcgttaagtcagagacagccatgatggaaacaaagagcacartgtgttctgatgatacccattgtgtttggtgttgtgggtttggtgtcaccacgaggcttcagctgagcwccaggtctgcgtggaacactgcaaggctccaacttaaatagataacttcaagaacagagcagtccccaggtgccctcctccractatgagwtgctggaagagcactgggaatggaaccaggacttctggagccccagcgtggtggatcagcagcagcatccttcttaacgtggtggygatataaggagcaactctacttgtgtttgagatcagcctaacccacagyatctcactactgatggtacacaaccattccttgttattactaattattattagttgttattactaattattattagtagagcttctccacggcacaaacaawaagcagagagagcagcagggcagaaaactgcacctgaagctgaggatgaagctgcaggtattggggcacggattgtaaggcacaaattcaycctttggagatcagcatctgggcactgccttcagccacccttccttcactgcttttta

SEQ ID NO: 50163 - DNA, 600 bp, Chicken  19866894296849_6
cacartgtgttctgatgatacccattgtgtttggtgttgtgggtttggtgtcaccacgaggcttcagctgagcwccaggtctgcgtggaacactgcaaggctccaacttaaatagataacttcaagaacagagcagtccccaggtgccctcctccractatgagwtgctggaagagcactgggaatggaaccaggacttctggagccccagcgtggtggatcagcagcagcatccttcttaacgtggtggygatataaggagcaactctacttgtgtttgagatcagcctaacccacagyatctcactactgatggtacacaaccattccttgttattactaattattattagttgttattactaattattattagtagagcttctccacggcacaaacaawaagcagagagagcagcagggcagaaaactgcacctgaagctgaggatgaagctgcaggtattggggcacggattgtaaggcacaaattcaycctttggagatcagcatctgggcactgccttcagccacccttccttcactgctttttacatgtctgaagaatataactcaccatttggaaaacacaggggtaataat

SEQ ID NO: 50164 - DNA, 600 bp, Chicken  19866894296849_7
ccaacttaaatagataacttcaagaacagagcagtccccaggtgccctcctccractatgagwtgctggaagagcactgggaatggaaccaggacttctggagccccagcgtggtggatcagcagcagcatccttcttaacgtggtggygatataaggagcaactctacttgtgtttgagatcagcctaacccacagyatctcactactgatggtacacaaccattccttgttattactaattattattagttgttattactaattattattagtagagcttctccacggcacaaacaawaagcagagagagcagcagggcagaaaactgcacctgaagctgaggatgaagctgcaggtattggggcacggattgtaaggcacaaattcaycctttggagatcagcatctgggcactgccttcagccacccttccttcactgctttttacatgtctgaagaatataactcaccatttggaaaacacaggggtaataatgttgcatttggaatctgtacacagcttcaaatgtgaaacttggccagaattttcactttccttcagttttttagggcgagctttgactagcattatttttag

SEQ ID NO: 50165 - DNA, 600 bp, Chicken  19866894296849_8
ggacttctggagccccagcgtggtggatcagcagcagcatccttcttaacgtggtggygatataaggagcaactctacttgtgtttgagatcagcctaacccacagyatctcactactgatggtacacaaccattccttgttattactaattattattagttgttattactaattattattagtagagcttctccacggcacaaacaawaagcagagagagcagcagggcagaaaactgcacctgaagctgaggatgaagctgcaggtattggggcacggattgtaaggcacaaattcaycctttggagatcagcatctgggcactgccttcagccacccttccttcactgctttttacatgtctgaagaatataactcaccatttggaaaacacaggggtaataatgttgcatttggaatctgtacacagcttcaaatgtgaaacttggccagaattttcactttccttcagttttttagggcgagctttgactagcattatttttaggagaaaaatgacctctcttattactgtcttctgtgctgaaatttcattctgtctgtgccagaatcaggatgaggcgatgccaagaaatagg

SEQ ID NO: 50166 - DNA, 599 bp, Chicken  19866894296853_1
  misc_feature (1)..(96): n is any nucleotide
nnnnnnnnnnnnnnnnnnnnnnnnnnnnnnnnnnnnnnnnnnnnnnnnnnnnnnnnnnnnnnnnnnnnnnnnnnnnnnnnnnnnnnnnnnnnnnnncagctgattctgcaccatgcagaggagactcgggtggggggtgggggtggacaaagcaggactgacaggtgtcattgagaagcacttgtgccaggtgagaagattcttggtaagagtgagcagcaaacaagatggcaaaggaacgtggacaccctgcccctgtctgtgaccatacagctcagaagggacgaggccaaaagagayggaaagggagaaaaaatgtttgtacttcttttttgctacgttggaatatatcagcccccatgagggggaatgttatttgacccacctgtggtgcacattcttcaaagagccagggatgtggggccttggcaggcagagcaggtgccaggcagggacagagtgacctcctccctcctcacaaaaaaagaattaaaaaaaagacgactttggtaagtcttatactgcttttagaccagatttttatcctgtttcactttggaagccacttgaacaagctcagtgtttcaaagctgaggctg

SEQ ID NO: 50167 - DNA, 599 bp, Chicken  19866894296858_1
  misc_feature (1)..(18): n is any nucleotide
nnnnnnnnnnnnnnnnnntttgaaagagaggacgtggatcaggaaaggctaaatcaaagagtcggtcactgaggggcggctcagatccccctccctcattttctacattactagagaaaacacagagctgatatcagacaaatgagccctctggacccaatttttcaagttaatgagctcccctcgcagctcttccccacaacggagacttccagcaccgaccctttgccacaggctctaatgagcaaagccaccaccatccatctcaatatccacagaggggacggcctctgctgcacygctcaggctctgcccccatcagtagggtgtgcccacatcattggggtctgcccactgccatccccaacccaggaccccctcctgctctccaggtctcagcgccttcattcagctgagccatgcaccagctcggaaccasctcctgttccgggaggaaatagcttttcatgccctcagaaacctcactgcagtctttgctgggagatttcaaatagacctcagcgtattgctaagattctgccttgtaattgccctctgcagggctgagcagacggaagagcagaggttgaggatggctg

SEQ ID NO: 50168 - DNA, 600 bp, Chicken  19866894296858_2
aaatgagccctctggacccaatttttcaagttaatgagctcccctcgcagctcttccccacaacggagacttccagcaccgaccctttgccacaggctctaatgagcaaagccaccaccatccatctcaatatccacagaggggacggcctctgctgcacygctcaggctctgcccccatcagtagggtgtgcccacatcattggggtctgcccactgccatccccaacccaggaccccctcctgctctccaggtctcagcgccttcattcagctgagccatgcaccagctcggaaccasctcctgttccgggaggaaatagcttttcatgccctcagaaacctcactgcagtctttgctgggagatttcaaatagacctcagcgtattgctaagattctgccttgtaattgccctctgcagggctgagcagacggaagagcagaggttgaggatggctgcagcgctcacactgctctcccaccattatcaccattatgcttaaattaacaggcactttttttttttttttttttttttgtaaattgacgactaattttcttttgggaatagatcattaaattacagattaccaatgaaa

SEQ ID NO: 50169 - DNA, 600 bp, Chicken  19866894296859_1
gtctagggccctgtccagcctgggcttgaacacctctaggaatggggcatccacaacttctctgggtccttcggtcagttcctcaccacccttaaagtggaaaaattttcctctaacatgtttatttttatgatgtgtgtgtgcaaggttgtttctcggtactgaagtgcctacaacaggcacttggtggataagtgtgtttttctaacttagcaatttctcaaaaggttctctggagtgctattactgacattgtcgggagttcagcagattaccaaatcattcagaagggaggcatgkcttgagctacggtgatgcaattgactgcatctgacagcaagaacagaaataattaacctgcatattggtgtaatttgggaagttgtgttagttttattagtaaggaaaataacaggacatgaaagaacaaaactgaaagaacaatgaatataagaaatgacttttgcttcagaaaataaagaacaagaggggtaggaaatcctaacaaactgatttgatatgcagccattaatgcacaaaatctgttgtctttaggttagaagcaaggaaagaataaaatgcttttggtctcaacccagg

SEQ ID NO: 50170 - DNA, 600 bp, Chicken  19866894296864_1
ctgtgatattcacatccttctaaggaagcagagccaacatatcatgaagacattttacctattttaatattcaagttattgctgtgaaagggtgtgtgaaacaagctgtagggggtacacaatggtggagaatggcacgatatggaagaatcataagaattaactatgggatgatccagagacagccagctaccctccactgcatgaaagctgaatgggtgttggatgctctgtcccaagagcctagccaaatgtgggcaaatcattgcatctctttgtgtccatctgtggcctgggatmattaagtttctgcctcacaaagggtaaggataaatgaacatttgagaactgtttcagtattacacaaacagcagctatagaaactccatggaatcagagaacattatagtcatggaaaagaaaaagaaaaatgaaaagagaatatacagcctcaatgacttctatagggaatatgctattttggattttttcctgtgacagtaatttccaactggaaatatttttgctgaagcacaaaggccctggaatgtcagcagcttccacttgtcatttacacctgttgcaaatttaaactgttgc

SEQ ID NO: 50171 - DNA, 600 bp, Chicken  19866894296867_1
ctttagaattgcagtattgaaagatacagtgataactgtcagaatgctgaagctaactgtccttctgtcccctcattcttaaaaattattctcaggtacctctcaacagaactgagggcttaaaacaaagagaacaaatttcagatgacatcattatttatgatgttactgaggatgtggctgatgaggaaaataccatggttgatgaagaaaatgctcccattacaccagagacaaatgaagataccacctcagattcttctaagtaagaagtctttagaagtctacagtggcttccartactgaatagtatgcagtaattcagatgtctggagtactcttgcacatacaggagcatgatctccaaatatgcgttaggttttctctggatttgttccatatagttgataggctgtaggaggttttaatatgttgatagaaactagtgaagagtaatccgtattattgcactcctgttaaatgtgctatttgttcaaagacaatcaattatgtctacttattttttttggttacaaatacagttattcaatttcaagaactttgggttttttcttgctgttttttttgtagtcccaagtg

SEQ ID NO: 50172 - DNA, 600 bp, Chicken  19866894296868_1
cggccacccactgtaccaagggaaggcacggcctcggtgccccagccccgtccccatacccccgtgccaccgccccggccctgcagaggccctccctgcactcactcctcatcttgatgtgctgggagatctcgatgagctccatctcggtgggcatatatcccagcgtgcgcatgcaggcacccaagtccttgtagctgatgaagccatcctggtcggtgtcaaactccttgaaggcatccagcagctctgctccgtgcatgggtgggcacggggacccatcaggaatgggactgtggygcctcaccccacggcactttgtcccacgggaccccttcccatagcagattgttctgtggccatatggcaccgcctctcgtggcaccacatcccgtgacaggtccctccatggtgcattccaacacaacccgtggcactacagcccacgataccctgtcctatagcaccatgcccagtgctaagtgcctccatggcatatgtacccatggtgcaacgttccatggcacagacctccatggcaccacgtcccatagcagacccctccacggcacacgtccccatgacaccacatctcatggc

SEQ ID NO: 50173 - DNA, 600 bp, Chicken  19866894296883_1
gcccttttttctttccttgataaaaagactcaaagaaaggggggtgagaaggccccttaaagtaacctttctggttctggtttccatggtatttctcagaatatgatattccagacagaagttcttgagagttctgtgcaggaatgtcatcaaatgagaacagatgcccttgttccctgagccgcagacgcttctgcctgctaaatatttgtttgctattgtttaatacattttaaactaattgtgtggaagactgaagaaaacttgtctttgcagactttgctgttttgttatccataygtttgtatagattctccttctgccttttaacagttttatcaaaaaaggtccatttatgtgtcttagcatttgatgtcatgcctttttttttccacttgtaacttttttttttttaccatgaatgctctaccagaaggggatgtactccttgtcttaaagctgtttgaaagaggtgtatttaaacttctgtcttactttatgaaaattgtttctgtatgtctttcttagtaggaagcagcccagcctagcagcttcaattttatggtcgtggcagttcagagtgttggtagtctggtatct

SEQ ID NO: 50174 - DNA, 600 bp, Chicken  19866894296884_1
aaatagcctgcatctaatcccaaaactactaatgcaattatattgggaaagaaaagaagttttatgtttagtttgcccttctacctttcccacggttgaagctgatgcgagagaaacaaaccgaaagaagcttaaagaaaggggaagttttcagttgatgccaacattgccccagcagcaggatttggggctaagttggaaagtggtgtgggttggtatctgctgacttcaacccgcagcaagcagcacagtaggaatgatccttctagcaggtctcttgccatccctaccatggacttygctgtcttcctgttatgtctgcttaatactgtaaaagttgtagtgacttcgtatgtaaagcaaaaattgaatccccaattactgtggatctgctggcagaaaatgaagcttgggtgcagctgtgctagaagaagttgttttccaagtatttgttacttagaagggctcacaccacattcaagaactgtattgctgcaaacccttttgagttcagataaagccattgctgcaagtcttggatcttaagagtgttgataattgattttggaagggatcactggaggtcatctgggccaagcc

SEQ ID NO: 50175 - DNA, 600 bp, Chicken  19866894296905_1
gaacacttttgacgaacagcaaacctcctcgaggctcgaaatagggttggaaaagcagccactaatctccttcagcagtgctagatggtggccaccgctccccgtaaatcacggacaagctgtttatgtatggcacgttgagacgttagcacagcaaaaaaaaaagtcggcccattaatccaccggcatcaactctggcttgctggcattgcggagggcttgcgggggaaatgctgtgaactcagcgtgtcttacagcacctgggaattttgtggctctccagtggggcagagaagtgtrtcttttatcgccagtattaatcgctctcagtgagagagggatgggacaggggagcttccaagggaagtggagccgtgtgtgtcagcatcccaacagctgagcgagtgcacctggaggggttgggtgtgctgtaggcagcgatgggttcagaaatagactcagagaagaggagrtgctgctggtgagcagaagcaaagctggtggggagagagaaacccgcagcacgggctctgcagtgaactcacagggctgcagggccgggggagagaacaagcactgcgtgcccggggttatgtggtt

SEQ ID NO: 50176 - DNA, 600 bp, Chicken  19866894296905_2
attaatccaccggcatcaactctggcttgctggcattgcggagggcttgcgggggaaatgctgtgaactcagcgtgtcttacagcacctgggaattttgtggctctccagtggggcagagaagtgtrtcttttatcgccagtattaatcgctctcagtgagagagggatgggacaggggagcttccaagggaagtggagccgtgtgtgtcagcatcccaacagctgagcgagtgcacctggaggggttgggtgtgctgtaggcagcgatgggttcagaaatagactcagagaagaggagrtgctgctggtgagcagaagcaaagctggtggggagagagaaacccgcagcacgggctctgcagtgaactcacagggctgcagggccgggggagagaacaagcactgcgtgcccggggttatgtggttattgcttttcttggtctgggttcctctcggtggtggctcttgtgtttgttgttgagatgtgtgcaggcggtggttgaactgttcgaggctctgggtgacgcggtgatggaactcggtgcaggataatagctgccttgttccactccagggacctggcaaggaacccctgaaag

SEQ ID NO: 50177 - DNA, 600 bp, Chicken  19866894296920_1
aataaggagtctgtgacctcatggtgtggaataaggccattcctcctctcagctgatgctatgggcaattccagtaagggaacttcaccaaaactgggattcagttctgtgtggttaaggcagctacataatgtagcagcagtaaaatacatcctttttctgactgtgccagtaccagcaaccttccagttatcatcccactgcagaaatggcttgcttgcattctaagactctggggaaaattgcccagaatgtgtttcaggaggagagtgtgtcatcctctgataactacctgcagtrcaaagtgctacagctgatgcagtgagtctatgaacctgcccttagcatacgatcaagcagatttcccaggtttaagagcaataatgcaaaagctgttccatgcatttagttatccttctgcatacataaccttcatgcatgccaacagacatggaaatgtgttgcatttttttacaacccattctttgttgctgggcctgcttactggcaatgtacagcaattcagactgcatatatgtcatttcagcttgctgcctgttggcaagagcaagcaggcaaatgcatgctaaaaaccacttc

SEQ ID NO: 50178 - DNA, 600 bp, Chicken  19866894296930_1
acaccctgcagcatctcaggtggtcttggatgcctgagagcaggcaaccgagcagcacccagcatgtctagagcagcatctttgagtctcaggacagcctgaacagcaaagacaaggcaacacacatctcttgggaacagccagcaacttacacagattcttcaggatttcacttttccagaactggatttcagtttttccctcctgtaggtgcctcggtattttttgatcccactctaaactattactgcgagtgaaaaaaggtacggtcctacagctcactaagctctaggaaatgcraaccaatgacctgtgctaatgacaagaaaaaggaaagytgcttggtgccatgctaaatcctatgctagcacattttcaaatgactcataaaattcgtctttaattaagcatctyaactacaggaagccaggaaataagtctgggcccctctatggaaagttaacaacttaagagaatgtgtaggatggagagggctaagaagaacactgaygacacctggtaagccagtgrcatgtcatgctattgccaagcacaggtagctaccaacagcctgggcaggasggcagtcacaggtttctc

SEQ ID NO: 50179 - DNA, 600 bp, Chicken  19866894296930_2
agcaggcaaccgagcagcacccagcatgtctagagcagcatctttgagtctcaggacagcctgaacagcaaagacaaggcaacacacatctcttgggaacagccagcaacttacacagattcttcaggatttcacttttccagaactggatttcagtttttccctcctgtaggtgcctcggtattttttgatcccactctaaactattactgcgagtgaaaaaaggtacggtcctacagctcactaagctctaggaaatgcraaccaatgacctgtgctaatgacaagaaaaaggaaagytgcttggtgccatgctaaatcctatgctagcacattttcaaatgactcataaaattcgtctttaattaagcatctyaactacaggaagccaggaaataagtctgggcccctctatggaaagttaacaacttaagagaatgtgtaggatggagagggctaagaagaacactgaygacacctggtaagccagtgrcatgtcatgctattgccaagcacaggtagctaccaacagcctgggcaggasggcagtcacaggtttctctctgcctttggtttcagacactcagctcagcagggawt

SEQ ID NO: 50180 - DNA, 600 bp, Chicken  19866894296930_3
aggcaacacacatctcttgggaacagccagcaacttacacagattcttcaggatttcacttttccagaactggatttcagtttttccctcctgtaggtgcctcggtattttttgatcccactctaaactattactgcgagtgaaaaaaggtacggtcctacagctcactaagctctaggaaatgcraaccaatgacctgtgctaatgacaagaaaaaggaaagytgcttggtgccatgctaaatcctatgctagcacattttcaaatgactcataaaattcgtctttaattaagcatctyaactacaggaagccaggaaataagtctgggcccctctatggaaagttaacaacttaagagaatgtgtaggatggagagggctaagaagaacactgaygacacctggtaagccagtgrcatgtcatgctattgccaagcacaggtagctaccaacagcctgggcaggasggcagtcacaggtttctctctgcctttggtttcagacactcagctcagcagggawtgtgctgggcatggcttttctactccacctgtttctgtggtccaatgctttccatgtatttagactcagacaaaccc

SEQ ID NO: 50181 - DNA, 600 bp, Chicken  19866894296930_4
tgcctcggtattttttgatcccactctaaactattactgcgagtgaaaaaaggtacggtcctacagctcactaagctctaggaaatgcraaccaatgacctgtgctaatgacaagaaaaaggaaagytgcttggtgccatgctaaatcctatgctagcacattttcaaatgactcataaaattcgtctttaattaagcatctyaactacaggaagccaggaaataagtctgggcccctctatggaaagttaacaacttaagagaatgtgtaggatggagagggctaagaagaacactgaygacacctggtaagccagtgrcatgtcatgctattgccaagcacaggtagctaccaacagcctgggcaggasggcagtcacaggtttctctctgcctttggtttcagacactcagctcagcagggawtgtgctgggcatggcttttctactccacctgtttctgtggtccaatgctttccatgtatttagactcagacaaacccagtctgacactctcatgtgctcatgcccaacgtttaaggcaaccatttcacaatgaaagagactgaaatgaatgaggaggataagaaagggcacaaa

SEQ ID NO: 50182 - DNA, 600 bp, Chicken  19866894296930_5
ccactctaaactattactgcgagtgaaaaaaggtacggtcctacagctcactaagctctaggaaatgcraaccaatgacctgtgctaatgacaagaaaaaggaaagytgcttggtgccatgctaaatcctatgctagcacattttcaaatgactcataaaattcgtctttaattaagcatctyaactacaggaagccaggaaataagtctgggcccctctatggaaagttaacaacttaagagaatgtgtaggatggagagggctaagaagaacactgaygacacctggtaagccagtgrcatgtcatgctattgccaagcacaggtagctaccaacagcctgggcaggasggcagtcacaggtttctctctgcctttggtttcagacactcagctcagcagggawtgtgctgggcatggcttttctactccacctgtttctgtggtccaatgctttccatgtatttagactcagacaaacccagtctgacactctcatgtgctcatgcccaacgtttaaggcaaccatttcacaatgaaagagactgaaatgaatgaggaggataagaaagggcacaaaagttatgtacaccacccaac

SEQ ID NO: 50183 - DNA, 600 bp, Chicken  19866894296930_6
taagctctaggaaatgcraaccaatgacctgtgctaatgacaagaaaaaggaaagytgcttggtgccatgctaaatcctatgctagcacattttcaaatgactcataaaattcgtctttaattaagcatctyaactacaggaagccaggaaataagtctgggcccctctatggaaagttaacaacttaagagaatgtgtaggatggagagggctaagaagaacactgaygacacctggtaagccagtgrcatgtcatgctattgccaagcacaggtagctaccaacagcctgggcaggasggcagtcacaggtttctctctgcctttggtttcagacactcagctcagcagggawtgtgctgggcatggcttttctactccacctgtttctgtggtccaatgctttccatgtatttagactcagacaaacccagtctgacactctcatgtgctcatgcccaacgtttaaggcaaccatttcacaatgaaagagactgaaatgaatgaggaggataagaaagggcacaaaagttatgtacaccacccaacactctcctcctgcatccttgccctacacattgctcccataccaggtaggcc

SEQ ID NO: 50184 - DNA, 600 bp, Chicken  19866894296930_7
ytgcttggtgccatgctaaatcctatgctagcacattttcaaatgactcataaaattcgtctttaattaagcatctyaactacaggaagccaggaaataagtctgggcccctctatggaaagttaacaacttaagagaatgtgtaggatggagagggctaagaagaacactgaygacacctggtaagccagtgrcatgtcatgctattgccaagcacaggtagctaccaacagcctgggcaggasggcagtcacaggtttctctctgcctttggtttcagacactcagctcagcagggawtgtgctgggcatggcttttctactccacctgtttctgtggtccaatgctttccatgtatttagactcagacaaacccagtctgacactctcatgtgctcatgcccaacgtttaaggcaaccatttcacaatgaaagagactgaaatgaatgaggaggataagaaagggcacaaaagttatgtacaccacccaacactctcctcctgcatccttgccctacacattgctcccataccaggtaggccacaaggccgagggcaaggaaacctttcttacagatcacgctgtgaccagaaagtc

SEQ ID NO: 50185 - DNA, 600 bp, Chicken  19866894296932_1
gtggtgagtaacagactaaatgatgatcattacaaaaataagtgaaaaaaagccacagcaatgtttcaagttgacagcagtggaactgatttctgtctgcttactagtaaaagcataacaaccagacaatattcctttaaacttttgttacctgtgttaggcttggcttttttctctgctctaagaaaattagctctttgtctactgaaatcaatgataccattttcatttactccaatgttcagatctcaaacacaggatctaacagcacactaattactgttcagtaccacatctgtrtgacaaagcttatgtttttcaaaaaacatgaagactacaaactgaactgtttgagattattatttaaggcaagacttggtttttacacttactgagagtaatttgaatacttcacagcactgtattttgaatagtgactaaactacaatagaggaaatacaattccttttaaaaaaaaaaagtctttcaagactgagtagaagagaaagtattatcacrttgacaatgaaaagtttgcataasggcacatctagcatagctctgaataggaaaagttcctaggacgacaaatatactatt

SEQ ID NO: 50186 - DNA, 600 bp, Chicken  19866894296932_2
ccattttcatttactccaatgttcagatctcaaacacaggatctaacagcacactaattactgttcagtaccacatctgtrtgacaaagcttatgtttttcaaaaaacatgaagactacaaactgaactgtttgagattattatttaaggcaagacttggtttttacacttactgagagtaatttgaatacttcacagcactgtattttgaatagtgactaaactacaatagaggaaatacaattccttttaaaaaaaaaaagtctttcaagactgagtagaagagaaagtattatcacrttgacaatgaaaagtttgcataasggcacatctagcatagctctgaataggaaaagttcctaggacgacaaatatactattcttaacctttctcactgaaggcactcagctgttatagagcaggagtgactcccttgagagctacatactagctgaaggtaaatgggaggaatgtaaagcaaaaggaagaagaattcacatttttcaccaatctctgaagcaaaaagtagatgtttcaattattttggaatgcaaatgaaaagagtagaattttttgtattgattttcagtaatattaaa

SEQ ID NO: 50187 - DNA, 600 bp, Chicken  19866894296932_3
agatctcaaacacaggatctaacagcacactaattactgttcagtaccacatctgtrtgacaaagcttatgtttttcaaaaaacatgaagactacaaactgaactgtttgagattattatttaaggcaagacttggtttttacacttactgagagtaatttgaatacttcacagcactgtattttgaatagtgactaaactacaatagaggaaatacaattccttttaaaaaaaaaaagtctttcaagactgagtagaagagaaagtattatcacrttgacaatgaaaagtttgcataasggcacatctagcatagctctgaataggaaaagttcctaggacgacaaatatactattcttaacctttctcactgaaggcactcagctgttatagagcaggagtgactcccttgagagctacatactagctgaaggtaaatgggaggaatgtaaagcaaaaggaagaagaattcacatttttcaccaatctctgaagcaaaaagtagatgtttcaattattttggaatgcaaatgaaaagagtagaattttttgtattgattttcagtaatattaaattatacatttgaattaaactagca

SEQ ID NO: 50188 - DNA, 599 bp, Chicken  19866894296944_1
  misc_feature (1)..(245): n is any nucleotide
nnnnnnnnnnnnnnnnnnnnnnnnnnnnnnnnnnnnnnnnnnnnnnnnnnnnnnnnnnnnnnnnnnnnnnnnnnnnnnnnnnnnnnnnnnnnnnnnnnnnnnnnnnnnnnnnnnnnnnnnnnnnnnnnnnnnnnnnnnnnnnnnnnnnnnnnnnnnnnnnnnnnnnnnnnnnnnnnnnnnnnnnnnnnnnnnnnnnnnnnnnnnnnnnnnnnnnnnnnnnnnnnnnnnnnnnnnnnnnnnnnnnntgtggatgtccttggctgccagccgcgtgctctgatgagcctcttagggcctggrgcagaagagacggttttctgggggatgcacacggaaactactcaccactgacttgataagaagctgccaagaaaatgttattgccattgtttgaaataagaatgtgtgagaagcgaaggctcatcttagaaaaagtcccttttatggttgattaatcctctagcaatgcacggtgtcatttcccccatgtgactgtaggacgtggacatctttcctcacttctcctggccatgattttaactttcaagttggatgtgcagcgtttgagtttgttgttattcatcttacctcctgcaaga

SEQ ID NO: 50189 - DNA, 600 bp, Chicken  19866894296944_2
tgacttgataagaagctgccaagaaaatgttattgccattgtttgaaataagaatgtgtgagaagcgaaggctcatcttagaaaaagtcccttttatggttgattaatcctctagcaatgcacggtgtcatttcccccatgtgactgtaggacgtggacatctttcctcacttctcctggccatgattttaactttcaagttggatgtgcagcgtttgagtttgttgttattcatcttacctcctgcaagaaaactgctgacgtgttcagcaccacaggccctgcatatagcatatgttrgggcagtgggatggtcagggctctgggtgatgcatggrggaawtaacatctccttcaccacaggattgctctgcagcttacctttgagagctgaggtactgcttgggttggcagggaggagtgttcctcctttctggcctgttaaagatttttagagcatcaagccaggggctgggaaactgatagaaacagaatcattccctttcatcagggcctcaggtattagtttcatgctagtttgatgtgtatgtcaaatgggaagtattttgtaatgttagattttttacaaatatatattta

SEQ ID NO: 50190 - DNA, 600 bp, Chicken  19866894296944_3
ttgtttgaaataagaatgtgtgagaagcgaaggctcatcttagaaaaagtcccttttatggttgattaatcctctagcaatgcacggtgtcatttcccccatgtgactgtaggacgtggacatctttcctcacttctcctggccatgattttaactttcaagttggatgtgcagcgtttgagtttgttgttattcatcttacctcctgcaagaaaactgctgacgtgttcagcaccacaggccctgcatatagcatatgttrgggcagtgggatggtcagggctctgggtgatgcatggrggaawtaacatctccttcaccacaggattgctctgcagcttacctttgagagctgaggtactgcttgggttggcagggaggagtgttcctcctttctggcctgttaaagatttttagagcatcaagccaggggctgggaaactgatagaaacagaatcattccctttcatcagggcctcaggtattagtttcatgctagtttgatgtgtatgtcaaatgggaagtattttgtaatgttagattttttacaaatatatatttagttttgttatttatttattttttccagatttcctccag

SEQ ID NO: 50191 - DNA, 600 bp, Chicken  19866894296944_4
tgaaataagaatgtgtgagaagcgaaggctcatcttagaaaaagtcccttttatggttgattaatcctctagcaatgcacggtgtcatttcccccatgtgactgtaggacgtggacatctttcctcacttctcctggccatgattttaactttcaagttggatgtgcagcgtttgagtttgttgttattcatcttacctcctgcaagaaaactgctgacgtgttcagcaccacaggccctgcatatagcatatgttrgggcagtgggatggtcagggctctgggtgatgcatggrggaawtaacatctccttcaccacaggattgctctgcagcttacctttgagagctgaggtactgcttgggttggcagggaggagtgttcctcctttctggcctgttaaagatttttagagcatcaagccaggggctgggaaactgatagaaacagaatcattccctttcatcagggcctcaggtattagtttcatgctagtttgatgtgtatgtcaaatgggaagtattttgtaatgttagattttttacaaatatatatttagttttgttatttatttattttttccagatttcctccagtgtag

SEQ ID NO: 50192 - DNA, 600 bp, Chicken  19866894296946_1
ggctggacgcagccatagggttgtgatcaatgtatctgcgtcaggttggaggccggtcacaagcgatgtccctcaggggtcggtcttgggaccgttgcagttcaacatcttcatcagtgacatagacaatggcatcgagtgcaccctcagcaagtttgcagatgacaccaagctgagcagtgcagttgatacactggaaggaagggaagccacccagagggacctggacaggctggagaagtgggcccgtgaaaacctaatgtggttcaataagaccaagtgcagggtgctgcacttggrtcggggcaatcccaggtacttayacaaactgggggaagatctccttgagagcagccctgtggagaaggacttgagggtcctggtagacgagaagctgagcatgagccagcagtgtgcgcttgcagcccagaaggccaaatgtgttctgggctgcatgaaaaaaggagatggccagcagggagagggaggtgattgtccccctctactcggttcttgtgaggtcccatctggaatactgcgtccaggcctggggcccctggtccgggaaggacgtggagctcttggagtgggtccagagga

SEQ ID NO: 50193 - DNA, 600 bp, Chicken  19866894296946_2
tgatcaatgtatctgcgtcaggttggaggccggtcacaagcgatgtccctcaggggtcggtcttgggaccgttgcagttcaacatcttcatcagtgacatagacaatggcatcgagtgcaccctcagcaagtttgcagatgacaccaagctgagcagtgcagttgatacactggaaggaagggaagccacccagagggacctggacaggctggagaagtgggcccgtgaaaacctaatgtggttcaataagaccaagtgcagggtgctgcacttggrtcggggcaatcccaggtacttayacaaactgggggaagatctccttgagagcagccctgtggagaaggacttgagggtcctggtagacgagaagctgagcatgagccagcagtgtgcgcttgcagcccagaaggccaaatgtgttctgggctgcatgaaaaaaggagatggccagcagggagagggaggtgattgtccccctctactcggttcttgtgaggtcccatctggaatactgcgtccaggcctggggcccctggtccgggaaggacgtggagctcttggagtgggtccagaggagggccactaagatgatgagaggg

SEQ ID NO: 50194 - DNA, 488 bp, Chicken  19866894296947_1
tccttgagtcttaaatggatttccaagatcactcaggttcagaacaaggaaaaatttaggcatataacacagtggaagcacttgcacttgaaatagcaagaggtcatctgtctttttaattattaaccagaaatatatatggaacacactgggcatttttagttttaattatatttcctccagaataattcctctgttggcttggaggtttctataaagactccaactatttccaattccccatgtcatttccttagatcacttcttgcattaaaaataagagttgtattgaagtgcatrtagggagaaagtattctaatttttctawttcaagtttttcttctaggtttgtaagtaacaaaatctgctagcttatttatgttaatgggcagtgcttgtgttgaatccttgattacagcagtaggacaaacacaagaatatggaactgtttttctcttttttggtaactgaaatctcgttctgcaagt

SEQ ID NO: 50195 - DNA, 460 bp, Chicken  19866894296947_2
tcactcaggttcagaacaaggaaaaatttaggcatataacacagtggaagcacttgcacttgaaatagcaagaggtcatctgtctttttaattattaaccagaaatatatatggaacacactgggcatttttagttttaattatatttcctccagaataattcctctgttggcttggaggtttctataaagactccaactatttccaattccccatgtcatttccttagatcacttcttgcattaaaaataagagttgtattgaagtgcatrtagggagaaagtattctaatttttctawttcaagtttttcttctaggtttgtaagtaacaaaatctgctagcttatttatgttaatgggcagtgcttgtgttgaatccttgattacagcagtaggacaaacacaagaatatggaactgtttttctcttttttggtaactgaaatctcgttctgcaagt

SEQ ID NO: 50196 - DNA, 600 bp, Chicken  19866894296953_1
cactgtaaagtgaaattagaaattaaacagaacaaagtgttctggcccatactgaggcttgaggtccttgaggttttctgtagaaaatgctgttcaggtgctctgagtcatacaccagtcatgtgtttgagtcacggagtagaaatgcgtttgtgtatttatcataaacctgtgcttgccttggagtacatcagacaagctatctgaagcactgtcagatagcacggggaagtggttgcttgtccactacctcttttattctcaagtcccaagacttttccttcctttattatcaaaccrtcttgaagtcatgtgtcctaaaggtccaaatcagaaataagtctgctgaaatactgttgttaaaaacaaaatctcaatagtaatcttttactgtcttcacagtatggagaagactgcagaagtaaaatgtaccctccttcaggaccaacgtaagtaatctgattggacttgtctaataaatgtaagtaatctgattggacttgtctaataaatgtttgatttacaagcatcagtagctcaagttttgttgtgacttgtccacgttacagacagctctggttacagtcacaagtgaaaagc

SEQ ID NO: 50197 - DNA, 600 bp, Chicken  19866894296955_1
ctagtgaagctggctgaaatgacagtttgtctggtctttggtagctaaagtctacagcctgatatgtttaaaggttctgccatcgttttccacttattggagtatgtctgagtgctgtgtctgcagtgattattgagataggtagcctctcccagttatgctacaaaatcaaatagtatcacaaattaaagtctcaggcatagccaaagctcctcctggatctacagcccagtctgcagtttcttacaggcggtaagaaaaaaaaaatcattcattaagaaaactgtatacaaagaaacrttgtcacagtctgcttgggtcccagtaccaggaataaagtagatccgtcaagtgtttccagctcatgcttcctctgttctcacctatttgcgtagtgtaaatatgtcctttacagccaagggcaatggtgtggcctcagtgggggtagtgtgaacattgttcccgacttgtgtctttatgttgttcagtcacgtatctttaaattctttcttccgtccctttgctttaaatatcattcataggaatttaggagcatggaagggaggtgatttctgaggtgttgcacaacttggtatttat

SEQ ID NO: 50198 - DNA, 600 bp, Chicken  19866894296956_1
taatagaagagctggtgtgctgaattctcagccagctgcttatgaccgttactgatctgttctcttcctgtggctcagttttattttatcttccatgcagatagcagatctggcaaatgaggacacgccccagctgtatgtggcctgcggtcgggggccacggtcatctctgagggttctaagacatggacttgaggtaaactttgcagcacattagaaaaacatcttgaggagcaaggaatgtgggagacaatccaagtaataagggtgctctaatgaagggattcttcttttgctatrgtctggagggggcgtaactttctaggtttgtgccttggaaacacaaggactgtgctatttatttttacatgctcaaaggctttttgttttattaacactaaaccacctgtgttttgtctctaatgcttgagtgtattgaattggaactctcccagagtctttgccagctgctgctgctatctgtttgctggggcagatgaccttttaaagctactcctctggagtgctgatgttgcaatatcactgctgaatatattctgcccccttgcacatctggcatctgggggagagcatcagaat

SEQ ID NO: 50199 - DNA, 599 bp, Chicken  19866894296957_1
  misc_feature (1)..(232): n is any nucleotide
nnnnnnnnnnnnnnnnnnnnnnnnnnnnnnnnnnnnnnnnnnnnnnnnnnnnnnnnnnnnnnnnnnnnnnnnnnnnnnnnnnnnnnnnnnnnnnnnnnnnnnnnnnnnnnnnnnnnnnnnnnnnnnnnnnnnnnnnnnnnnnnnnnnnnnnnnnnnnnnnnnnnnnnnnnnnnnnnnnnnnnnnnnnnnnnnnnnnnnnnnnnnnnnnnnnnnnnnnnnnnnnnnnnnnnnntattgatatacatgtgatctcaatgaatttggagttctgagagtactcttacacgaggactatacatsttaagtgtttgggtatgtatgctttggaggttagcttagcagcgcatagcttatatctaaattgttgctcaaggctaatgttctgttttatggaagtcttgagaggtggtaacagagcctttggtacacagttgctcagtgtactctgygtgtgtctgcacagcaaaactattcatactgataggaagcttatatataatctgtgatttcttgttgaagtttgtagagaaacgttccatattcrtctctgtctttttatttgacttgtagccagtcctggtcaaatgaaaaagcacttg

SEQ ID NO: 50200 - DNA, 599 bp, Chicken  19866894296957_2
  misc_feature (1)..(83): n is any nucleotide
nnnnnnnnnnnnnnnnnnnnnnnnnnnnnnnnnnnnnnnnnnnnnnnnnnnnnnnnnnnnnnnnnnnnnnnnnnnnnnnnnnntattgatatacatgtgatctcaatgaatttggagttctgagagtactcttacacgaggactatacatsttaagtgtttgggtatgtatgctttggaggttagcttagcagcgcatagcttatatctaaattgttgctcaaggctaatgttctgttttatggaagtcttgagaggtggtaacagagcctttggtacacagttgctcagtgtactctgygtgtgtctgcacagcaaaactattcatactgataggaagcttatatataatctgtgatttcttgttgaagtttgtagagaaacgttccatattcrtctctgtctttttatttgacttgtagccagtcctggtcaaatgaaaaagcacttgacaaagatttctgttgatatttctagctctactttttggtcattgtttgaaaatatctgagtaccaactgaatgttaattttttttctgaaaaactccccytaaaaacagctttgttaggagtatgtcaggagagggctgctcatttat

SEQ ID NO: 50201 - DNA, 600 bp, Chicken  19866894296957_3
tgtgatctcaatgaatttggagttctgagagtactcttacacgaggactatacatsttaagtgtttgggtatgtatgctttggaggttagcttagcagcgcatagcttatatctaaattgttgctcaaggctaatgttctgttttatggaagtcttgagaggtggtaacagagcctttggtacacagttgctcagtgtactctgygtgtgtctgcacagcaaaactattcatactgataggaagcttatatataatctgtgatttcttgttgaagtttgtagagaaacgttccatattcrtctctgtctttttatttgacttgtagccagtcctggtcaaatgaaaaagcacttgacaaagatttctgttgatatttctagctctactttttggtcattgtttgaaaatatctgagtaccaactgaatgttaattttttttctgaaaaactccccytaaaaacagctttgttaggagtatgtcaggagagggctgctcatttattttatttcttttctaactctcaagttgttttaacacactatgactcagcaactgggcagtgactgaagttgaataatccagtacatagctgaaatg

SEQ ID NO: 50202 - DNA, 566 bp, Chicken  19866894296957_4
gagaggtggtaacagagcctttggtacacagttgctcagtgtactctgygtgtgtctgcacagcaaaactattcatactgataggaagcttatatataatctgtgatttcttgttgaagtttgtagagaaacgttccatattcrtctctgtctttttatttgacttgtagccagtcctggtcaaatgaaaaagcacttgacaaagatttctgttgatatttctagctctactttttggtcattgtttgaaaatatctgagtaccaactgaatgttaattttttttctgaaaaactccccytaaaaacagctttgttaggagtatgtcaggagagggctgctcatttattttatttcttttctaactctcaagttgttttaacacactatgactcagcaactgggcagtgactgaagttgaataatccagtacatagctgaaatgtgctggctgagaggactcaagtaattatttgaaatattcgatcctaaaggaaacttgggatcagttcctaaatgatgcagatactccaaatttaccataaaataatgtcatgatgacaatct

SEQ ID NO: 50203 - DNA, 600 bp, Chicken  19866894296961_1
ctgatgaataacaggaagaaaagaagggtttactgcagataataaaagcaaataggtataaactagtgtggaatggaattagagcacttcctgttactcaaagagtaaaattcaggaataagtttccgggaagaagtacaaaagccccaaataaactaattctaagacacaatttaatccatttatgaaagtaattatccatatgactgcatttgacagcagggacgtagacaggacataacttgtaagtacttgtaactacatagagttaacttgtaagtactccaaaggctacttcargataaaaagaggtgtggcctaagagtccagaagagtatggatctgaaaaagcataaaagcatttttgcactgtgctttgcatgtgttacagtcccattcaattgtatcacagttgcatgtcttggtttatgctgtaacaaacatcactgtatttaacaaaagatgctctttcttcaattgagtgaataacaattttcgtatctgcttcttaaggcatgttattaagaaaggtgatgctttacatcgccatggttacttcacaaaaaaactagcagtttactttggcttttgatattgtaa

SEQ ID NO: 50204 - DNA, 600 bp, Chicken  19866894296964_1
atccacagccagggagcagagcaggacaggggcagcaagggcagacacagcccagggaaaggtcacttccatagagacaggccagggctaggggtcaggatcaggcctagtgaggggctggccatacacagccccctgggagcccatgcccaccactggaagaggaaagatccactgctgtagaggagacttgagaagttagcaggccagactccttccttgcaaagatatgtgagaagttcagtcttatactgaagtgccattggagaggttagagcaagacgacaaattgagctctamcaaatcacttcactggtgtgtcccatcaagagctctaaaggaacatgaatatgaaatagctgaactaacaacagctgacaaatgtttgcttcagattgccttgatatcaacagaaggtggtggatatagaatccatattttattttatagaataaaaaaaactctagagtagatccagtgaactacagaccagtacccctaaagttcacaccacagaacttggtagatgctacaacaaagaatatgtgcacatcaatatatataggaaacagcctgcaactctctaggcagaataatgtc

SEQ ID NO: 50205 - DNA, 600 bp, Chicken  19866894296967_1
aaaaaacctagattaaacaatattgtatcgatattggtaaaattaaattcattctgagcactagaaacagatatcctcactttcaaaacatattcaacttttgcttctctccttggaggctcctaattctcaggtatccttgaaagcactgtttctaattcataaggtgagttaacatatgagatgtaacacagcttttcctcttatgggcagacaaaaccttcgcagtccacagtagtctaaactctggtattaagtagccacgttcatgctctaaaggacactttttgcctgcatcawactcttttaatcctctcaaaaaacagaaatagcaaaataattaaattgcatttatatgcatagcagttttgaaaataacactccaaatctgcatgccaggcagtaaagaagaaagtaagctattttaggtatcctccaggcaatattattattttgccataacatattcacatccacttgagcctccctaaagttaccagtatgtaccagatagtgcaacaaataaagcacctgtgcattccacggaggagactaagctaggaggagtacactgcctcatccaaaaccttttcagcttta

SEQ ID NO: 50206 - DNA, 599 bp, Chicken  19866894296972_1
  misc_feature (1)..(189): n is any nucleotide
nnnnnnnnnnnnnnnnnnnnnnnnnnnnnnnnnnnnnnnnnnnnnnnnnnnnnnnnnnnnnnnnnnnnnnnnnnnnnnnnnnnnnnnnnnnnnnnnnnnnnnnnnnnnnnnnnnnnnnnnnnnnnnnnnnnnnnnnnnnnnnnnnnnnnnnnnnnnnnnnnnnnnnnnnnnnnnnnnnnnnnnnnnnnntcccctagaaatagaagtccccgctgaaagtgtgggggtgatccggcagcacttctgcatggcgatgcagcttgcaggagggagcagggctgccctttggcacatctgtayggagtcccatgygagagccaggcaaaacacagctgctgtcaggctaggagaagagagaggaaagagagtggtgaggtgttttgtagggttttactgacactgatgggctgggtgcccaaaggaagctgctgagaggggaaggcctgctcctgsattgcttcccctggaggtgcaggggctcagcagcaatcccagtacatgttgcacacattcccccagctcatctttcattgtcccttcacttcattgacaagaggttgaaagcagtgcaagtacatccagactccccagaggacacc

SEQ ID NO: 50207 - DNA, 599 bp, Chicken  19866894296972_2
  misc_feature (1)..(177): n is any nucleotide
nnnnnnnnnnnnnnnnnnnnnnnnnnnnnnnnnnnnnnnnnnnnnnnnnnnnnnnnnnnnnnnnnnnnnnnnnnnnnnnnnnnnnnnnnnnnnnnnnnnnnnnnnnnnnnnnnnnnnnnnnnnnnnnnnnnnnnnnnnnnnnnnnnnnnnnnnnnnnnnnnnnnnnnnnnnnnnnnntcccctagaaatagaagtccccgctgaaagtgtgggggtgatccggcagcacttctgcatggcgatgcagcttgcaggagggagcagggctgccctttggcacatctgtayggagtcccatgygagagccaggcaaaacacagctgctgtcaggctaggagaagagagaggaaagagagtggtgaggtgttttgtagggttttactgacactgatgggctgggtgcccaaaggaagctgctgagaggggaaggcctgctcctgsattgcttcccctggaggtgcaggggctcagcagcaatcccagtacatgttgcacacattcccccagctcatctttcattgtcccttcacttcattgacaagaggttgaaagcagtgcaagtacatccagactccccagaggacaccaattttcaccca

SEQ ID NO: 50208 - DNA, 599 bp, Chicken  19866894296972_3
  misc_feature (1)..(36): n is any nucleotide
nnnnnnnnnnnnnnnnnnnnnnnnnnnnnnnnnnnntcccctagaaatagaagtccccgctgaaagtgtgggggtgatccggcagcacttctgcatggcgatgcagcttgcaggagggagcagggctgccctttggcacatctgtayggagtcccatgygagagccaggcaaaacacagctgctgtcaggctaggagaagagagaggaaagagagtggtgaggtgttttgtagggttttactgacactgatgggctgggtgcccaaaggaagctgctgagaggggaaggcctgctcctgsattgcttcccctggaggtgcaggggctcagcagcaatcccagtacatgttgcacacattcccccagctcatctttcattgtcccttcacttcattgacaagaggttgaaagcagtgcaagtacatccagactccccagaggacaccaattttcacccactgacttcataatcaacatttgcagagctgaccatgtattgcagccctacagttcactcattaatcatacctgtaaattacaggctcctgctctgcataactgtaaattacaggctcctgttctgcatgagggcagtggtc

SEQ ID NO: 50209 - DNA, 471 bp, Chicken  19866894296972_4
agtacatgttgcacacattcccccagctcatctttcattgtcccttcacttcattgacaagaggttgaaagcagtgcaagtacatccagactccccagaggacaccaattttcacccactgacttcataatcaacatttgcagagctgaccatgtattgcagccctacagttcactcattaatcatacctgtaaattacaggctcctgctctgcataactgtaaattacaggctcctgttctgcatgagggcagtggtcatggcaccaaacctgacagagtttgagaagcatttagacarctctccctgtaattgtaaaacaggacagcagatcttcatctcatagggaccacccatcaaagcataacaccgcatggttggaatatgcctatagaaagggcaactaaacaaagcatgtggaaaccatacccacagacagccaaggtctaaagagaaaaatccacattctga

SEQ ID NO: 50210 - DNA, 600 bp, Chicken  19866894296978_1
atcccatttctttcccccttccttatgagctttacttacttgctgtttttttagtgatacttgtcaagcctcttaggcttcttaaaaatcagtagattagatggggcattttatttggaattctgagatggtagtgttttttttccacttccaaattctattttgaatttattaatagcaacttgggttccagagttagcttctgtgccaatgcacagatttatgaaaactgcatatgtgtaccaaagaaatctatatgttgcatatctaaatatatcatatatattttgattcagataygmaaatctgtaagcagagtgttttaaacctagagctcactgcacgtgaatatgtaaacagctttaaaagrgaaactttattgctgtacgtttaaaacaagcaaagaggtgtatcttcagcatcattttagaaacactaagaaagttgtctgtatttttcagttttgcttccagagaacttcttttatgctttttttattgttttactttaatcttgtttctcatccatttgcagcaccaggtattttaagtagtgtctaatttggaatatctttttaaattaaatgtacagtggagattg

SEQ ID NO: 50211 - DNA, 600 bp, Chicken  19866894296978_2
cccatttctttcccccttccttatgagctttacttacttgctgtttttttagtgatacttgtcaagcctcttaggcttcttaaaaatcagtagattagatggggcattttatttggaattctgagatggtagtgttttttttccacttccaaattctattttgaatttattaatagcaacttgggttccagagttagcttctgtgccaatgcacagatttatgaaaactgcatatgtgtaccaaagaaatctatatgttgcatatctaaatatatcatatatattttgattcagataygmaaatctgtaagcagagtgttttaaacctagagctcactgcacgtgaatatgtaaacagctttaaaagrgaaactttattgctgtacgtttaaaacaagcaaagaggtgtatcttcagcatcattttagaaacactaagaaagttgtctgtatttttcagttttgcttccagagaacttcttttatgctttttttattgttttactttaatcttgtttctcatccatttgcagcaccaggtattttaagtagtgtctaatttggaatatctttttaaattaaatgtacagtggagattgaa

SEQ ID NO: 50212 - DNA, 592 bp, Chicken  19866894296978_3
tcttaggcttcttaaaaatcagtagattagatggggcattttatttggaattctgagatggtagtgttttttttccacttccaaattctattttgaatttattaatagcaacttgggttccagagttagcttctgtgccaatgcacagatttatgaaaactgcatatgtgtaccaaagaaatctatatgttgcatatctaaatatatcatatatattttgattcagataygmaaatctgtaagcagagtgttttaaacctagagctcactgcacgtgaatatgtaaacagctttaaaagrgaaactttattgctgtacgtttaaaacaagcaaagaggtgtatcttcagcatcattttagaaacactaagaaagttgtctgtatttttcagttttgcttccagagaacttcttttatgctttttttattgttttactttaatcttgtttctcatccatttgcagcaccaggtattttaagtagtgtctaatttggaatatctttttaaattaaatgtacagtggagattgaactgagaacttgatttagttacacctaagtaagtttgcaaacttatgcccagcataaccca

SEQ ID NO: 50213 - DNA, 599 bp, Chicken  19866894297005_1
  misc_feature (1)..(112): n is any nucleotide
nnnnnnnnnnnnnnnnnnnnnnnnnnnnnnnnnnnnnnnnnnnnnnnnnnnnnnnnnnnnnnnnnnnnnnnnnnnnnnnnnnnnnnnnnnnnnnnnnnnnnnnnnnnnnnnngagagctgctgcagtccacagctgtcaagcacttccctggaaatcattaaatggttataaaattaacccaatcacaagacccatttaaaagcctctatttgctaccattttcccctctgaactttgataggcttattctgcaaaaaagtacaaaatggagctgtgtggaggtgagagaggagtagaarggagcctggtggtgacccagcatgagggctgaaggatgagaagtgtggggttgatggtgctgcacacaccagagctgtgctgggggcagycgggaccatccccacccttctgcagctttctttttggtgtgatttgctgtcagtccatgtgggtttcatcatttgagcaaagccctccatacagcagggtttttgttttttttttttgaccctattcagttttacccctcggcatttgatctcgcagtgaacattacttattagattcatgctgcatttcattgcaatgtttgccagaa

SEQ ID NO: 50214 - DNA, 599 bp, Chicken  19866894297005_2
  misc_feature (1)..(22): n is any nucleotide
nnnnnnnnnnnnnnnnnnnnnngagagctgctgcagtccacagctgtcaagcacttccctggaaatcattaaatggttataaaattaacccaatcacaagacccatttaaaagcctctatttgctaccattttcccctctgaactttgataggcttattctgcaaaaaagtacaaaatggagctgtgtggaggtgagagaggagtagaarggagcctggtggtgacccagcatgagggctgaaggatgagaagtgtggggttgatggtgctgcacacaccagagctgtgctgggggcagycgggaccatccccacccttctgcagctttctttttggtgtgatttgctgtcagtccatgtgggtttcatcatttgagcaaagccctccatacagcagggtttttgttttttttttttgaccctattcagttttacccctcggcatttgatctcgcagtgaacattacttattagattcatgctgcatttcattgcaatgtttgccagaatgctttgcgtacatctttgtgcagcagaaaagaactcttccttagttcatcattaactttctaagtcagacttcatctctttaatgaagc

SEQ ID NO: 50215 - DNA, 600 bp, Chicken  19866894297009_1
cttcaactgaatcaacccacaagccaaactatctgtgtgtctgtaacgtcatatggcaacacgcagaatgcaaggcgtgcagtacagtgcaataccaaccaaacatcaaaaaccaacgtgatgttgtattttatgtcaccaaaagatgatttagaatgaaacaactgccagtgctgtgccaggagacatgaggaaggaagagcagggaacatatgaagaggtaagccaccagcatgggaaatcctgacctggcacatggtgaattattcctgcaagcatggaaaagggagtcaagtcagrgcagagagcaaagatgttctgccagaagasattctgagctgtctctccttgggcctgggagggagcacatctgttgtgtgtgagtgctcctggacaagggggaagagagacatctctgctccttttcagtgccacttgtcagatgatgatggcccaaatataaggctgccagaggaagaccgaagcaaaaacatgaggatctctgacaaaatacaaagttctgggctgggaaaggaaagggatggaagctttgcttggagcagacactgcagggagaagattcctgcagtaaggcattgg

SEQ ID NO: 50216 - DNA, 600 bp, Chicken  19866894297009_2
atctgtgtgtctgtaacgtcatatggcaacacgcagaatgcaaggcgtgcagtacagtgcaataccaaccaaacatcaaaaaccaacgtgatgttgtattttatgtcaccaaaagatgatttagaatgaaacaactgccagtgctgtgccaggagacatgaggaaggaagagcagggaacatatgaagaggtaagccaccagcatgggaaatcctgacctggcacatggtgaattattcctgcaagcatggaaaagggagtcaagtcagrgcagagagcaaagatgttctgccagaagasattctgagctgtctctccttgggcctgggagggagcacatctgttgtgtgtgagtgctcctggacaagggggaagagagacatctctgctccttttcagtgccacttgtcagatgatgatggcccaaatataaggctgccagaggaagaccgaagcaaaaacatgaggatctctgacaaaatacaaagttctgggctgggaaaggaaagggatggaagctttgcttggagcagacactgcagggagaagattcctgcagtaaggcattggtgggcatgggaagcaacgcctcctgatgcc

SEQ ID NO: 50217 - DNA, 600 bp, Chicken  19866894297009_3
ggagcacatctgttgtgtgtgagtgctcctggacaagggggaagagagacatctctgctccttttcagtgccacttgtcagatgatgatggcccaaatataaggctgccagaggaagaccgaagcaaaaacatgaggatctctgacaaaatacaaagttctgggctgggaaaggaaagggatggaagctttgcttggagcagacactgcagggagaagattcctgcagtaaggcattggtgggcatgggaagcaacgcctcctgatgccctgcatacctgaaggcaagtgaagagtgtgygtagrcacctaagagcagcttggagatccccagctaaccagggagagacattttgctatcttcaagtgctgggcagccttttcagagcgacacaaagctccattctcagtacagacgtgggtttgccatacaaaccaggcgctccgtggctgttggagtccctccggctgcagtgggagcttccatccccacgtgctgagcactgctgtgggtcaggccttggggacagctggcttccacggaagctctgggtctctcagtgttgctgcttctctgcatggcacctagcgggaaataaat

SEQ ID NO: 50218 - DNA, 600 bp, Chicken  19866894297009_4
acatctgttgtgtgtgagtgctcctggacaagggggaagagagacatctctgctccttttcagtgccacttgtcagatgatgatggcccaaatataaggctgccagaggaagaccgaagcaaaaacatgaggatctctgacaaaatacaaagttctgggctgggaaaggaaagggatggaagctttgcttggagcagacactgcagggagaagattcctgcagtaaggcattggtgggcatgggaagcaacgcctcctgatgccctgcatacctgaaggcaagtgaagagtgtgygtagrcacctaagagcagcttggagatccccagctaaccagggagagacattttgctatcttcaagtgctgggcagccttttcagagcgacacaaagctccattctcagtacagacgtgggtttgccatacaaaccaggcgctccgtggctgttggagtccctccggctgcagtgggagcttccatccccacgtgctgagcactgctgtgggtcaggccttggggacagctggcttccacggaagctctgggtctctcagtgttgctgcttctctgcatggcacctagcgggaaataaatcacag

SEQ ID NO: 50219 - DNA, 600 bp, Chicken  19866894297010_1
cacttttgcctcagactgccagcacacacaactgatctcaacacaacttggttgactcatgacaacttcttagagctgcagtaacttaaccatatgtctaagcccttaggcaaatcaagattattagtaataacaagttgaactctggtgttgtttactgaaaaagaagtaggttaaaaaaaaaaaaaaaaggttttcaggaaagaagaaaaataccatttttgactgcattaatcaacagctggtaacacaaaggaaggattttaaattgcagaaagacaactcagaagaaaagctttwaaatatataatatatgagttggtatacaaaaaggaacagagagacaaagattaggtcagccacaaaattgcaagcgctcttaattagagaggaaaaaatggaaaaggcatctgagatgacaacacggaaacagaaagtcaactagcaaaggaaagactttacagaaaagcatggcaaccatcatctcaatttgtctcagctcacttaaaagtgccaatttagattctctgttccagatctttggtatatttttatctgggattttggttcaagtcattaagattttctgcatacttaaaa

SEQ ID NO: 50220 - DNA, 599 bp, Chicken  19866894297012_1
  misc_feature (1)..(23): n is any nucleotide
nnnnnnnnnnnnnnnnnnnnnnnatgtagaagatgcacgttttctttatagttattggcaataaaatctcccaaaaatgtttatttagctgtacatttgttacaatgaaaattctgtcagagagaaggtatgaaagaagaatgccagacttgcagagtatggctgttatatgttgtatttatgcctcttcccttaacgtgagaaagccttgggactttcttgtacagagtgttgcacgagcctggagtaagagaaattcctggtctagaagggcatacagcagtgagagagacaaccaaractttgggggaagaataaaggtcagaaagtacttaagagatgggaataaaaagtgtacaatgctatttcttatctatttgattataagctatataacaggactctgtaactgaggagagattgagtttgttttttttaatttggtttaaggtgttgtgattatttttttttataacagttattggaagaaatggtgatttttatgacactttttaattgccgccttgataacaaacaacttttccagctaaaccaatactggaaatagaatatcaggatgcccttataaatcatctttg

SEQ ID NO: 50221 - DNA, 600 bp, Chicken  19866894297016_1
tttaacagacaaactgcatgaagctgtgacagggaatgttcagatcagacattaggagaaggttccttaccatacggtggccagacttgaaacaggctccctagagaagtggtcatggcacctggcttgcctgaattcaagaagcatttggacagcactcccagtcatatggtctggtttttgggtagtcttgtgtggagccaggagttggactcaattattctaatggatcccttccaactcaggatattctatgattctatgattatttggtgtcccttagaggctgaattactaagstggaaacaggagacatttactcaatctcttctgcagtggcagagtttttaaatttccaacttccattctccatataagcattctcatgagaagacttgagccactttcactatttactttgaattaactagaaagaatctttctctcttgggaaatttcatcccaaaaaamcatgatttaaaaatattaataaattataattccattttgtaatataaaactatttccgagctattctactggtgaatttattagctgaatcctttatgacttttaatgaattttatcctcacacgatct

SEQ ID NO: 50222 - DNA, 600 bp, Chicken  19866894297016_2
gtctggtttttgggtagtcttgtgtggagccaggagttggactcaattattctaatggatcccttccaactcaggatattctatgattctatgattatttggtgtcccttagaggctgaattactaagstggaaacaggagacatttactcaatctcttctgcagtggcagagtttttaaatttccaacttccattctccatataagcattctcatgagaagacttgagccactttcactatttactttgaattaactagaaagaatctttctctcttgggaaatttcatcccaaaaaamcatgatttaaaaatattaataaattataattccattttgtaatataaaactatttccgagctattctactggtgaatttattagctgaatcctttatgacttttaatgaattttatcctcacacgatctttgtgatgtgaaatattcacaactagtttttctgttgaaccattacatgagagaggcaaaatgttttacttaacgtcacacagaatgtgaaatagaaatgatccagttcttatgaatccctgaatgtcactgttcacatgaagattcttcccttttgtatattcttgaaac

SEQ ID NO: 50223 - DNA, 599 bp, Chicken  19866894297017_1
  misc_feature (1)..(54): n is any nucleotide
nnnnnnnnnnnnnnnnnnnnnnnnnnnnnnnnnnnnnnnnnnnnnnnnnnnnnnctctgcaaagtcccctcatccttcagctataaatagtcagctgcacttagctcacactgcagcgagctgggtaactgtgagtaaaactccccaattcaagctacaagataaaaacattttttgcatttaatgcttaaatacttcatgctccgctttaatattttatacttggcaattatagttaggctttttatatgtaatatttagacaaccccaatcaaaaagctgggtgattgcctccccccscatgagacaactcctgggcaggtctgtgagctctgcccaccgacgtgccgggatggggctgggcaagcaccgcgctgcagcacttggagctgagtgggactttggatgctttgggaccttcccatgttcagagggtgcggtgggagcgaggggaggaaataccttcctgaggtgaagtttcagcaagacgcgatctgttaaggctagttaattcgggatgaaagatggaggcctgtgctgctatacatctagagtgtgtaagtcctgggtattaaatttagaattcccgtatctaaccc

SEQ ID NO: 50224 - DNA, 600 bp, Chicken  19866894297017_2
ggcaagcaccgcgctgcagcacttggagctgagtgggactttggatgctttgggaccttcccatgttcagagggtgcggtgggagcgaggggaggaaataccttcctgaggtgaagtttcagcaagacgcgatctgttaaggctagttaattcgggatgaaagatggaggcctgtgctgctatacatctagagtgtgtaagtcctgggtattaaatttagaattcccgtatctaacccaacctattcgagaggaacgttaacgccaaattcctcaaatgctgctcccaagtgaggttctwgaaaccgaagtgaatgatacaggttgccaactgtgagcgaaagctatgtaaaaacagagaggctgcccaaactgggagatctacaaatttgtttaagactattttcgcatcgccagatgggtgagataagactgcccagcagcctttaaagctacagatgtttatattttgcaccctccctttcagcaccgtgctcagcttcctacagcccgcgccatcccacgcagcagcagcagcagcggtgccctgcagaacgcacccattcccaacagcgcttcagcagccatcccagtaatggat

SEQ ID NO: 50225 - DNA, 600 bp, Chicken  19866894297017_3
ggggccatccccaggccatgtggaggttccacgctcactcacagctaaccccttacagacaagggcttggagagtacagctgatggtctgtctttaggcaagcagctaatggaagttttccaggccacacaacagcaaaaaatgagtaaatagttccagcagtgttgcaacatactgtgtttcttgcctgtgagctttaagtgaagacttaataaccggaacattcatacaatccctcccaagcgattactctgggctctaacatcaacaacagatcattcctattccagcctttcccaycacgtggggccacatgaactctcttcccccttttctgtctttggcagatgttgcaggaactaaatggcctcagagctgtttgtacctctcagagctgatgggctcacacaggaaaagaagrgagataagagagaggcagagcccacagctcaccgctggccagagatggccctgcttccgcatttcccctcctgggtgcttcacagcacatacactgcccacccctgtgctcacgctgcctttccacaaggacactcagcctactgaagcgatgcacacacccattcrgcttgctttgcc

SEQ ID NO: 50226 - DNA, 600 bp, Chicken  19866894297017_4
aggccacacaacagcaaaaaatgagtaaatagttccagcagtgttgcaacatactgtgtttcttgcctgtgagctttaagtgaagacttaataaccggaacattcatacaatccctcccaagcgattactctgggctctaacatcaacaacagatcattcctattccagcctttcccaycacgtggggccacatgaactctcttcccccttttctgtctttggcagatgttgcaggaactaaatggcctcagagctgtttgtacctctcagagctgatgggctcacacaggaaaagaagrgagataagagagaggcagagcccacagctcaccgctggccagagatggccctgcttccgcatttcccctcctgggtgcttcacagcacatacactgcccacccctgtgctcacgctgcctttccacaaggacactcagcctactgaagcgatgcacacacccattcrgcttgctttgccaggctgcccttctccaggtgcagcaggatcctgcaggcctccaagtggccwaacaagtgggatgccgagcacagcattcactcagaccatcctttcaacacaaataaccccgatgatcatt

SEQ ID NO: 50227 - DNA, 600 bp, Chicken  19866894297017_5
agcctttcccaycacgtggggccacatgaactctcttcccccttttctgtctttggcagatgttgcaggaactaaatggcctcagagctgtttgtacctctcagagctgatgggctcacacaggaaaagaagrgagataagagagaggcagagcccacagctcaccgctggccagagatggccctgcttccgcatttcccctcctgggtgcttcacagcacatacactgcccacccctgtgctcacgctgcctttccacaaggacactcagcctactgaagcgatgcacacacccattcrgcttgctttgccaggctgcccttctccaggtgcagcaggatcctgcaggcctccaagtggccwaacaagtgggatgccgagcacagcattcactcagaccatcctttcaacacaaataaccccgatgatcattgtctcaagttgattgttaacaagggactcattatcaagaatgaggagcatcctgcccacctctgagtcactttaacccaccaagccagcaggaagtcaatcgcatgaaaaacttaaaagaagctttttctcttaatgaattggttacttacggggcattaaaagcac

SEQ ID NO: 50228 - DNA, 600 bp, Chicken  19866894297017_6
tgcaggaactaaatggcctcagagctgtttgtacctctcagagctgatgggctcacacaggaaaagaagrgagataagagagaggcagagcccacagctcaccgctggccagagatggccctgcttccgcatttcccctcctgggtgcttcacagcacatacactgcccacccctgtgctcacgctgcctttccacaaggacactcagcctactgaagcgatgcacacacccattcrgcttgctttgccaggctgcccttctccaggtgcagcaggatcctgcaggcctccaagtggccwaacaagtgggatgccgagcacagcattcactcagaccatcctttcaacacaaataaccccgatgatcattgtctcaagttgattgttaacaagggactcattatcaagaatgaggagcatcctgcccacctctgagtcactttaacccaccaagccagcaggaagtcaatcgcatgaaaaacttaaaagaagctttttctcttaatgaattggttacttacggggcattaaaagcaccaaagacagacaagcatcagagcaggtggcacagagaggcaggaacaggacctgcagcacaca

SEQ ID NO: 50229 - DNA, 599 bp, Chicken  19866894297020_1
  misc_feature (1)..(74): n is any nucleotide
nnnnnnnnnnnnnnnnnnnnnnnnnnnnnnnnnnnnnnnnnnnnnnnnnnnnnnnnnnnnnnnnnnnnnnnnnntttaattaaaggtgtttgtttaacattcctcgctgcagctcttggaaaaacccgcacggccctcgcgagcagggctgctgtctttcgccaaattagaaaccgaagctctcgcagggcagagccggggccgcatgggcgcggagagcggacggggccccgtgcggccgcgcggtgagctgtggccgtggcacacgtggggccggagcggcaccgtcgcctcggttgygtgctgccggtgactcgttcggtgtccgtagggatggggctgcagcaggggttggggagcggggctgtgggttggtgctgtgcgggaagccccgcagagcgctggaaagccccttttcccgggagcggggaggtttgggccgtgtggggtaggaccgtgagctgagcagatggttcagctctgccggcacgcatcytcggttctgtcacgggcacaggagttggcagcaattaggatgagagcatgcatcgcgtactcatagcgcmtgcatagcatggcgtgctctccagagcttactc

SEQ ID NO: 50230 - DNA, 600 bp, Chicken  19866894297020_2
cggggccgcatgggcgcggagagcggacggggccccgtgcggccgcgcggtgagctgtggccgtggcacacgtggggccggagcggcaccgtcgcctcggttgygtgctgccggtgactcgttcggtgtccgtagggatggggctgcagcaggggttggggagcggggctgtgggttggtgctgtgcgggaagccccgcagagcgctggaaagccccttttcccgggagcggggaggtttgggccgtgtggggtaggaccgtgagctgagcagatggttcagctctgccggcacgcatcytcggttctgtcacgggcacaggagttggcagcaattaggatgagagcatgcatcgcgtactcatagcgcmtgcatagcatggcgtgctctccagagcttactctgggcttttaggtgctttcttacttgagtgcgtgaggttaagtgctttattcacatatgtccgtcggtagcggaaacactgaaagtccagggtcctttttgggcacttatctgctgcgtgggaaaatagctgctcggatctgagatgatgaaaagtttcctggtagtgcccattcctgcaggtggccctttctgcgc

SEQ ID NO: 50231 - DNA, 600 bp, Chicken  19866894297020_3
cgtggggccggagcggcaccgtcgcctcggttgygtgctgccggtgactcgttcggtgtccgtagggatggggctgcagcaggggttggggagcggggctgtgggttggtgctgtgcgggaagccccgcagagcgctggaaagccccttttcccgggagcggggaggtttgggccgtgtggggtaggaccgtgagctgagcagatggttcagctctgccggcacgcatcytcggttctgtcacgggcacaggagttggcagcaattaggatgagagcatgcatcgcgtactcatagcgcmtgcatagcatggcgtgctctccagagcttactctgggcttttaggtgctttcttacttgagtgcgtgaggttaagtgctttattcacatatgtccgtcggtagcggaaacactgaaagtccagggtcctttttgggcacttatctgctgcgtgggaaaatagctgctcggatctgagatgatgaaaagtttcctggtagtgcccattcctgcaggtggccctttctgcgcctctcccagacctccgctgcagaacccgctgtgtgtctgtcaaggagctttgccccgtggttgccccacg

SEQ ID NO: 50232 - DNA, 600 bp, Chicken  19866894297022_1
ttcctaagagagatagagggctgtgcctcagagccccaggatcagggctaattcccttcttcatgagctgcacgtcttcccaccagaggctgtgctcaaagccaccccagtgctgcgtggaaagggaggcagcagccagcctccaggacagtgggatagggctgccccagccgatggctctgccatagggtcagaacccagagacaaggatccattcagcccctcttctccaaaaaacacgagggtcggaggatgaggctacacatcttcagacaagatgctgcagattgagccctgagycctgtctcaatcctgtacccctctgccctcacacagccccaggggtgcacccgaatgttcctgtttgtttgttttttttccacttggtcgtggcttattttctttttaaacaaagcaggcctgtgtgggtggctgacagaagttgggaatgccacaaggataaaaaaaggtgaggtatatggaaaaaaacaataaaggcccttaattataggtgtggccgggagctgctcctattattaagggtgccgacacttccccttttaagaccctgttttcactagcttataactttgtcaaagt

SEQ ID NO: 50233 - DNA, 600 bp, Chicken  19866894297024_1
ttgtggaactgccttgatccatggagcacggcttcccaggacagcctttctccattgagaaatattcattccaaagcagatcataaagaatggaaaatgaaaggctgatgtatcatgaaaacccttgtgaaggcttagcagtttccaagcccgtggctggtgttgtgagttacacacatgccttcagacctctttcaaagttcatttctgtgtgctctaatggtgactgtttcctgtttttcaggggacgacttttcgttgatccagcaggaaatatatatggtaaaagaatgcaaacaytgcaacatagtcgcctattttgggagctatctcaggtaaacagcactgcattacctgcattgctgctgggtttttcctaccacagtctccctctggtttgttacttgtatcctctctgtgttcttctctagctcgaattccattcagatctcttctggctttaaaaaaacacacaaaaaataaaaaagtgactaatactttgttttctctgctggccaaaaggctggaatatttttatcactaggaacagaaagaaacttttctcttrgakactcttgcaacatatccaatcctactcac

SEQ ID NO: 50234 - DNA, 596 bp, Chicken  19866894297024_2
aggaaatatatatggtaaaagaatgcaaacaytgcaacatagtcgcctattttgggagctatctcaggtaaacagcactgcattacctgcattgctgctgggtttttcctaccacagtctccctctggtttgttacttgtatcctctctgtgttcttctctagctcgaattccattcagatctcttctggctttaaaaaaacacacaaaaaataaaaaagtgactaatactttgttttctctgctggccaaaaggctggaatatttttatcactaggaacagaaagaaacttttctcttrgakactcttgcaacatatccaatcctactcactttgctgggcagattttaaacgtctatcgctcataatataaaacaagctcactgcttatctggagcagaattgctttggggtgttgtatttaatggcaacgttgtgagctgggatagtataggcagtgagctgcaagagagctctgactctgggctgctggtaatcccatttctcctgcttgtggtgctgcagatgcagcacactgagagcaaggcaatgccagctggctccatctgcaagcacacgcgttaaacgttatacag

SEQ ID NO: 50235 - DNA, 593 bp, Chicken  19866894297024_3
aaatatatatggtaaaagaatgcaaacaytgcaacatagtcgcctattttgggagctatctcaggtaaacagcactgcattacctgcattgctgctgggtttttcctaccacagtctccctctggtttgttacttgtatcctctctgtgttcttctctagctcgaattccattcagatctcttctggctttaaaaaaacacacaaaaaataaaaaagtgactaatactttgttttctctgctggccaaaaggctggaatatttttatcactaggaacagaaagaaacttttctcttrgakactcttgcaacatatccaatcctactcactttgctgggcagattttaaacgtctatcgctcataatataaaacaagctcactgcttatctggagcagaattgctttggggtgttgtatttaatggcaacgttgtgagctgggatagtataggcagtgagctgcaagagagctctgactctgggctgctggtaatcccatttctcctgcttgtggtgctgcagatgcagcacactgagagcaaggcaatgccagctggctccatctgcaagcacacgcgttaaacgttatacag

SEQ ID NO: 50236 - DNA, 600 bp, Chicken  19866894297031_1
aagtcccatttcttttgctgatatcagtcctctgctcgtggggtcaatcggatggatagatcagaggagcaaggaaacgcggagcgtggttacatggcaaccagaagggtatgttacaagattatccactcttttggctgtgccccagtgttgcaagcctcaaacaaaggcacaaaaaactcctgagggtatccatcttctgagccatccacagcatttctaacagcccaatgtcggaccacctccagccccaccaccacacctggcatcagaccatcagcagaccatcacccacagtgrgctgctcagcccattgggactctttggaygtcactctgcttataggactgagtgctatagctgcaggcagcggtgcaggacaactagtcctcctcttctcaagggccaggggtccccccagagcctctctgaccacagcrtccatcccacatgggctccagaacccaccttcctctcctcgcagggaaacagggcaatgcatctctgcgtaacccaatccgttaacacgcagctcctctgatgtgggcagcttgtgctttacagcattagaggagcaacatttcatggaaaattcaataa

SEQ ID NO: 50237 - DNA, 600 bp, Chicken  19866894297031_2
ctctgctcgtggggtcaatcggatggatagatcagaggagcaaggaaacgcggagcgtggttacatggcaaccagaagggtatgttacaagattatccactcttttggctgtgccccagtgttgcaagcctcaaacaaaggcacaaaaaactcctgagggtatccatcttctgagccatccacagcatttctaacagcccaatgtcggaccacctccagccccaccaccacacctggcatcagaccatcagcagaccatcacccacagtgrgctgctcagcccattgggactctttggaygtcactctgcttataggactgagtgctatagctgcaggcagcggtgcaggacaactagtcctcctcttctcaagggccaggggtccccccagagcctctctgaccacagcrtccatcccacatgggctccagaacccaccttcctctcctcgcagggaaacagggcaatgcatctctgcgtaacccaatccgttaacacgcagctcctctgatgtgggcagcttgtgctttacagcattagaggagcaacatttcatggaaaattcaataaatacccctgtacagccagacatctgtaaa

SEQ ID NO: 50238 - DNA, 600 bp, Chicken  19866894297031_3
tgccccagtgttgcaagcctcaaacaaaggcacaaaaaactcctgagggtatccatcttctgagccatccacagcatttctaacagcccaatgtcggaccacctccagccccaccaccacacctggcatcagaccatcagcagaccatcacccacagtgrgctgctcagcccattgggactctttggaygtcactctgcttataggactgagtgctatagctgcaggcagcggtgcaggacaactagtcctcctcttctcaagggccaggggtccccccagagcctctctgaccacagcrtccatcccacatgggctccagaacccaccttcctctcctcgcagggaaacagggcaatgcatctctgcgtaacccaatccgttaacacgcagctcctctgatgtgggcagcttgtgctttacagcattagaggagcaacatttcatggaaaattcaataaatacccctgtacagccagacatctgtaaacaaaggcttccaaattcaatcaggctgtgggctcagagcagcatttataggctacagcatggaatattatataggaaagcaaaacgtagggggagggagcagattcctgga

SEQ ID NO: 50239 - DNA, 600 bp, Chicken  19866894297035_1
tgagctcctttgggttggccctgcctcccctacggtgctcagtcactgcttcaggccatgactgaaggtagtacaaatctggatagagattgtaattgcatttccactacatcccattacttccaccccttcacagcatgaaacagtgattgagcaggttgaaggtaagccctttccattatggtaatccagtacaccacggcaattgtacagtttgcctatcgcgatgtagactgacaaagtgtaagacgattgatgattggttcttggttgaagtttatgttcctttgtgggccagtrctcaatggttctccaggagacaaactgttgcgtggaccagggaaggttccgctcgcattccattgacgtgcggaatcaaactctataaccacaaagtagttataaaatcaggtatgttttaatcatgatgcaggtaggaccgaagtggtgtggcctacttgcaccctggggagattattggatgtgggagcctactacaacagtagtgcctccggtaatcggtacatggcctggtgatattgtggtcaacactcttgtcttcattgtgaaagggattgtcatcatgtccctatggcagat

SEQ ID NO: 50240 - DNA, 599 bp, Chicken  19866894297045_1
  misc_feature (1)..(189): n is any nucleotide
nnnnnnnnnnnnnnnnnnnnnnnnnnnnnnnnnnnnnnnnnnnnnnnnnnnnnnnnnnnnnnnnnnnnnnnnnnnnnnnnnnnnnnnnnnnnnnnnnnnnnnnnnnnnnnnnnnnnnnnnnnnnnnnnnnnnnnnnnnnnnnnnnnnnnnnnnnnnnnnnnnnnnnnnnnnnnnnnnnnnnnnnnnnnnaaacaattgctggcttccctctctcccaccaccacttccttctttctgactatttcatttcggaccaacacttattttcagtttaatattaaatgtcttggaagatattcygcattacagccagatttgcaacttctgaatgccatttcaaaggcaatctcaccatgtcttttaaaagatttcaaaaactttaacagtaattaaaacttcatcctatattctatactggctgtctacatttaacaattgcctgcagttaacaaactgcaaagactccttgttaaccaagttatatactgcttagcacccatattgtcagcatttcattcactcaagcaaataagatgactacacaacccatcacaaagatgggcacacatagtgtaagaaaaaagccttagtttcaatag

SEQ ID NO: 50241 - DNA, 600 bp, Chicken  19866894297048_1
ttctcttgtttaatataaaacaagacatacacctctttgctgctttgaacaacctggctttctggtttctgaaatactccatgttttcaccagagatatacatttttgggcaattatttagtttatttaattcaaattttatctgttttattttatttaacatttttacctaatgtttcctaccatcatagctaaagtaaatctaagcatgcatgtctattattttcattcacattctcttacatctctgcttatattgatttcttacataattttaatggtaggttaatatacagtctycctaaattagttaagattaacagaaacatctacaaccttctctgagaaatttggcagagagttaaagatataatctaattctaagatctctaagaccaaaaatcagtgtttatttttatcatcaaatagagatgatcccattcttcctgtgatggagctctctcctgagttcagcattcagaatagttattgggtgggaaactggaggcaaattatagctctgagcactcattagtctgaacagtccaggagatactgtaatctacatgaaaaaaaaagcctatattggacagggtttgg

SEQ ID NO: 50242 - DNA, 600 bp, Chicken  19866894297048_2
gtacaagaaggcaaatgagcctacatttatttttgtaaaagtctgatgaattttaagtcgataatatacttgggatgggaggtagaaggcagagagagggctgactcatgttttttaaatgctcggggttagcaccagtgtgtttggcaaattcttatgtgtacttaatatgtgtgaaggaaattataattggtccatagatgatttgttaactaaaaatagggctaaagctgtaaaaatatttgtaacataaaatttaaccaactcttcatcattctttagtgcttttctcaaaacacrtcgctaactatagggtctctaaacacctctccatggtaatttatttgagggttgatggcaaagctgaagatgcatttcagcaagttgggagagatctgcagaggcagttaaaccatatgaggacctaccaagcgaacagtgcaactccttctcgatcacaacactgaatttcctcactgatttcaatgtctttctcctccctgtggggttagaagcttgctgggattctgcattcataagttaaggagcagtgtctcagaggtttggacatttgagcattctgtccttggtggctgaacg

SEQ ID NO: 50243 - DNA, 600 bp, Chicken  19866894297050_1
aggatcagaatgaaaggtttttaaatctcagtaacatgctggtgagacagatcattatagaatcatagaatcatagaatggcctgagctgaaaaaaaccataatgattatctagtttcaacccccctactatgtacagcatcgccaaccactagaccaggctgcccagagccacatccagcctggccttgaatgcctccagggactgggcatccacaacctccttgggcaacctgttccagggtgtcaccaccccctgtgagaaaaacttcctcctaatatctaacctaaacctcccctscctcagttkaaatccattcccccttgtcctatagctatccaccctcataaacagccattccccctcctgtttatatgctcccttcaagtacaggaaggccacaatgaggtctccccagagccttctcttctccaagctaaacaagcccagttccctcaacctttcctcayaggagaggtgctccagccctctgatcatcttagtggccctcctctggaccagctccaagagctccacatctttcttgtcctgggggtcccaggcctggacacagtactccagatggggccccaaaagagc

SEQ ID NO: 50244 - DNA, 600 bp, Chicken  19866894297050_2
atgaaaggtttttaaatctcagtaacatgctggtgagacagatcattatagaatcatagaatcatagaatggcctgagctgaaaaaaaccataatgattatctagtttcaacccccctactatgtacagcatcgccaaccactagaccaggctgcccagagccacatccagcctggccttgaatgcctccagggactgggcatccacaacctccttgggcaacctgttccagggtgtcaccaccccctgtgagaaaaacttcctcctaatatctaacctaaacctcccctscctcagttkaaatccattcccccttgtcctatagctatccaccctcataaacagccattccccctcctgtttatatgctcccttcaagtacaggaaggccacaatgaggtctccccagagccttctcttctccaagctaaacaagcccagttccctcaacctttcctcayaggagaggtgctccagccctctgatcatcttagtggccctcctctggaccagctccaagagctccacatctttcttgtcctgggggtcccaggcctggacacagtactccagatggggccccaaaagagccgagtagag

SEQ ID NO: 50245 - DNA, 579 bp, Chicken  19866894297050_3
ccacatccagcctggccttgaatgcctccagggactgggcatccacaacctccttgggcaacctgttccagggtgtcaccaccccctgtgagaaaaacttcctcctaatatctaacctaaacctcccctscctcagttkaaatccattcccccttgtcctatagctatccaccctcataaacagccattccccctcctgtttatatgctcccttcaagtacaggaaggccacaatgaggtctccccagagccttctcttctccaagctaaacaagcccagttccctcaacctttcctcayaggagaggtgctccagccctctgatcatcttagtggccctcctctggaccagctccaagagctccacatctttcttgtcctgggggtcccaggcctggacacagtactccagatggggccccaaaagagccgagtagagggggacaatcacctccctctccctgctggccacccctttcttaatgcagcccagaacacagttggccttctgggctgcaagcgcacactactggctcatgtgcagctaatcatctaccaggacccccccaagtccttctc

SEQ ID NO: 50246 - DNA, 600 bp, Chicken  19866894297051_1
aggttctttcaggtcgtgttcccaacgggaatttattttgtccatttatctccagctgcagtattctttgtaaaatcttcatagcaggatgtggttagaacatcatacatgatattgcagctcttaacaacaaggcttttccaggaagtgatggcagagacttatctgatgcagtgcttgcagccataccccagcaaaacacagacatcttgtcagacaggatgctcgtagctaccttaccagctacaagagtggagcaatgaagttgcatgaattggctgtcttcacagctcttcccastggtcttgagcaaaatttgttgagcctttattggaaagtaaggcaaaaagttgcttctatttcatttaaaaacaatcaaacattcggtcaggccatcactaattgacttgacatcaaacaagagaattttagttctctgttcaaggatacaggccatggtcttgttgctgctgcacaaagcaaatgtcacctacttgcaaagaaattatttctatgtgttgatggctggctttgctgctcactttttaaaaatgtgttccatttttaaattcaattatttccctaatttcctgattatag

SEQ ID NO: 50247 - DNA, 600 bp, Chicken  19866894297053_1
tgatgccaaatgcccaaggggctgttcccccaaatcagcctcccaggcaagatctatcccaactcaatagccatattttctccccagtgctgaagtggatgacgacgagctacgccccaacaagcagcttgatatcctaccatgaggggaagctgaaggtggagaaagcagggctctactacatctactcacaagtcagcttctgcaccaaggcggcggcttcggcgccattcaccctctatatttatttgtacctcccccatggaagaggaccggctcctgatgaagggacttgacacrcacagcacctccacggctctctgtgagctccagtccatccgggagggcggtgtcttcgagctgcggcagggcgacatggtctttgtcaatgtgacggactcaacagcagtgaaygtcaaccctggcaacacctactttggcatgttcaagctgtagagaggaggggcccagcccatcactgttgagccaaggggctttccctgtttcccgtatttatgttcctctgcctgtttgttgttcttgtttcttattttgtatattttgttatttattgatgagggccaaggggccctgagaaca

SEQ ID NO: 50248 - DNA, 600 bp, Chicken  19866894297053_2
ccccaacaagcagcttgatatcctaccatgaggggaagctgaaggtggagaaagcagggctctactacatctactcacaagtcagcttctgcaccaaggcggcggcttcggcgccattcaccctctatatttatttgtacctcccccatggaagaggaccggctcctgatgaagggacttgacacrcacagcacctccacggctctctgtgagctccagtccatccgggagggcggtgtcttcgagctgcggcagggcgacatggtctttgtcaatgtgacggactcaacagcagtgaaygtcaaccctggcaacacctactttggcatgttcaagctgtagagaggaggggcccagcccatcactgttgagccaaggggctttccctgtttcccgtatttatgttcctctgcctgtttgttgttcttgtttcttattttgtatattttgttatttattgatgagggccaaggggccctgagaacaggaaaggaaaaaagtttgaagctgtcgttgtctgcacttttctttttttctttcattggtagggttgcgtgtctggtccaccatgccttgctctgttggccccattatgcccca

SEQ ID NO: 50249 - DNA, 600 bp, Chicken  19866894297055_1
tattttgcaaattctgcttccttcttcctgggatgggattgtgcagctgttgctttatatattgcttttgaagatgtgaagaactggaacttgatttcatcagctgtgctgagacacaggggcttggcccaggggtagatgagggtctgttgttaaatctcctcaacaagagcctcaacaaaggcccccaagcttatgagactccaccatttaaaccaagtggaaactaacatctatatagatacatgatttgataaagatacccagtgttactttgatgtcaagagtgtaatcctgcayggctgtcctagcaggagtaagtgaagacgtgttgtcttcctgcctcctcacagattaattagaacttgcaattcaggaatcttatttaatcctttaataagatacataattttagtcctaatacaggaaacttggaactcatacgttccttggccacttgcagctgtagatggtagatcctttaatcatcgttttcacatctcttctaataayttgaatgctacragggattgcggtgtggatgccactgtatcaggaagtggtttggacttgatttgctcccttgtcttttgccctcat

SEQ ID NO: 50250 - DNA, 600 bp, Chicken  19866894297055_2
aaccaagtggaaactaacatctatatagatacatgatttgataaagatacccagtgttactttgatgtcaagagtgtaatcctgcayggctgtcctagcaggagtaagtgaagacgtgttgtcttcctgcctcctcacagattaattagaacttgcaattcaggaatcttatttaatcctttaataagatacataattttagtcctaatacaggaaacttggaactcatacgttccttggccacttgcagctgtagatggtagatcctttaatcatcgttttcacatctcttctaataayttgaatgctacragggattgcggtgtggatgccactgtatcaggaagtggtttggacttgatttgctcccttgtcttttgccctcatttatcagctgcctgtgcagtttttaacttagtgctgcagtaacagatgcaccctgagtgtcttctctgcagactgtctacaaaacaaagaaccactcaaaagggatattacataggcaagggtgtgggggtccccaaagcagaagtgaaggaactatttcagagtgcattcgagaataaaaattgctgttagcacccattcaggctttttgag

SEQ ID NO: 50251 - DNA, 600 bp, Chicken  19866894297055_3
actaacatctatatagatacatgatttgataaagatacccagtgttactttgatgtcaagagtgtaatcctgcayggctgtcctagcaggagtaagtgaagacgtgttgtcttcctgcctcctcacagattaattagaacttgcaattcaggaatcttatttaatcctttaataagatacataattttagtcctaatacaggaaacttggaactcatacgttccttggccacttgcagctgtagatggtagatcctttaatcatcgttttcacatctcttctaataayttgaatgctacragggattgcggtgtggatgccactgtatcaggaagtggtttggacttgatttgctcccttgtcttttgccctcatttatcagctgcctgtgcagtttttaacttagtgctgcagtaacagatgcaccctgagtgtcttctctgcagactgtctacaaaacaaagaaccactcaaaagggatattacataggcaagggtgtgggggtccccaaagcagaagtgaaggaactatttcagagtgcattcgagaataaaaattgctgttagcacccattcaggctttttgagacccaggacctt

SEQ ID NO: 50252 - DNA, 600 bp, Chicken  19866894297059_1
atttttctccaagccatgtaaagttaagtatcatgccaaacttaagcctcaaggagtaagcatattctgttatctgattaatatatttttcttgtcttcagtacaataggaggttggttctggttactgtcactagtcagtcacccagatggcacaccagtcaatgttctgtgcaagcctgcaaagttgccacttaacacagtccaagtcttccaggtttcatgttgctaggtttcatctgtacggagttttattctgctccaactacaatttgcaccaaacacttattctatatatagrtatgtatgtttgcatctatctacagaaatctgcaaaaaggcacctgtaataaatggcaaccccatgaaagacttctgtattcactacaaactaacagcagtgacttactagatttggatttctaaaattaaaaattaaaaatccacctgagtagggattgccaagctttccagaagtcctgacagacttgattcagaactactaagaaaagagacaaataccaaaaaaaacttgggccacaaaagctacttgggaagaagatatgaaccttttctacaggagacagtgaacttacgacat

SEQ ID NO: 50253 - DNA, 600 bp, Chicken  19866894297059_2
ctgtaataaatggcaaccccatgaaagacttctgtattcactacaaactaacagcagtgacttactagatttggatttctaaaattaaaaattaaaaatccacctgagtagggattgccaagctttccagaagtcctgacagacttgattcagaactactaagaaaagagacaaataccaaaaaaaacttgggccacaaaagctacttgggaagaagatatgaaccttttctacaggagacagtgaacttacgacatacagattttgatatgatcacgtacataacccttgaaatgcagraaacagaaatgcaaaacacaatcattgagaaaaaatgctgttccttctatagtgctgtcttattaaatacgaggggtcagcatgaagctacacaattcattctagtgacaaggcagactaagatttatcaaaagaataagcagttagtaattacaggaaagtaaaacagggaagcacatctgcacctttacgacagaaaccaattctggctccaagcatatctaaacacaatttcttacaatagcaggaagagccctgatgacccaaagactgattcataagtgcagttaaatgtgcaaa

SEQ ID NO: 50254 - DNA, 600 bp, Chicken  19866894297067_1
tttagaagggcggtagcttctattaaagggaatcggcacggccgttggccccgtgcgtgccgtgggcttcctgggtgttggctgtccacgctccagctctccaaattcctgcaggaacggtgcaaagctcaaagtgaaacattccttccacgcatctgctggcattcgcagcacaggtatttcggtagttaacccgtggagcttgggagcgcagagcggaggtgctgggagcgaggggtgaggcagagcctatttttactctgtcacaaacagggctcggcatgtttagtttatactccrgagccgctcaggccggggtgttttttaatatctcctcctgctgttgctatcgggttgaaaactctggatatcgcaggaaaaacccattgctcctgtgaggtgtggaggccgctgcggcctgcctgcggcctgcctgcgcccacccgctgctgctggggggtctgtgaaggctgcggcctgctgctgggccctgtgcccgtggtcctgtgccgtcccgcggaggagtgggggatggctgggcttaaaactcgtcagtgacgtgcaggatgtgaaggtctggggagcagaggctgggagcag

SEQ ID NO: 50255 - DNA, 600 bp, Chicken  19866894297070_1
acagttcacctaacagagcacgctgctgagctgcagtcacccactaagaacacccccaactccttttcaggatgggatttcagattctctaatcctggaagtttgcccccaagcctatgcaggggtgccaagatggtttgaacgtgcagccatctgtgccatttctgggctcgacatgctgtgttttatctgggcccaaaatgccacccctgtatcatcaccaagaggggctgcagggtgtcccacagatttcctcctgaccaatcaagctttaacaaggaaattccccatcatttgcaygagaatccacgtccctgtcacctacctgaaaccagatggcattgacgaccttactgagcacaaacagggggaggacccagagggcactgaagatggaggtgagaataaactccagccaagaccagacatcgccatgtaaggaagggtcacctttggaagatgggcagaaagcagcacctcaggaacctcctcctttcacatcacaaatcccacagctctgtgttaaactttcctggtaccaccatctctgtcacagtgaaattctcattgtagcacttgagtaaaatgctctgaccttaa

SEQ ID NO: 50256 - DNA, 600 bp, Chicken  19866894297082_1
aagatgtaaagggagaagagatgagtgtttgagtcacagcttaaagctctgaagaattagagcactattatcttgtcacaccattcatctgctttataacaacacagccagcacccttttatatctgttagtgtcacatcacactgtcctggggtcttctgccctttcccatggaggtatctcaggtacatcctgctgtcccagatacctactcctgtttggacagggactcaattgagttttgagctagttcaaaagatgctatttaggcatagctaaaacatcaggagctgctgctcygtgaatgcacagtggggcagtgacagatctttggcagraagaaataatataaatattgctctgctaacaaagtaaggctctttctgcaggcaccctctgcakcttgccccatgggttggagggctgtgggaggtggtatctctgaaatggagaaggttctatgtcttgggggagagcatgcagagatggaaaagaggtaaggaaagggaagaaatgggactgggatgacatttttaggctgtgagaggygatgagcagacagaakgaaacattttaggctctcattggtaatactatgtc

SEQ ID NO: 50257 - DNA, 600 bp, Chicken  19866894297082_2
gcttaaagctctgaagaattagagcactattatcttgtcacaccattcatctgctttataacaacacagccagcacccttttatatctgttagtgtcacatcacactgtcctggggtcttctgccctttcccatggaggtatctcaggtacatcctgctgtcccagatacctactcctgtttggacagggactcaattgagttttgagctagttcaaaagatgctatttaggcatagctaaaacatcaggagctgctgctcygtgaatgcacagtggggcagtgacagatctttggcagraagaaataatataaatattgctctgctaacaaagtaaggctctttctgcaggcaccctctgcakcttgccccatgggttggagggctgtgggaggtggtatctctgaaatggagaaggttctatgtcttgggggagagcatgcagagatggaaaagaggtaaggaaagggaagaaatgggactgggatgacatttttaggctgtgagaggygatgagcagacagaakgaaacattttaggctctcattggtaatactatgtcttccctaagacatcatctaaaaagagaatacaaagtaa

SEQ ID NO: 50258 - DNA, 600 bp, Chicken  19866894297082_3
cacagccagcacccttttatatctgttagtgtcacatcacactgtcctggggtcttctgccctttcccatggaggtatctcaggtacatcctgctgtcccagatacctactcctgtttggacagggactcaattgagttttgagctagttcaaaagatgctatttaggcatagctaaaacatcaggagctgctgctcygtgaatgcacagtggggcagtgacagatctttggcagraagaaataatataaatattgctctgctaacaaagtaaggctctttctgcaggcaccctctgcakcttgccccatgggttggagggctgtgggaggtggtatctctgaaatggagaaggttctatgtcttgggggagagcatgcagagatggaaaagaggtaaggaaagggaagaaatgggactgggatgacatttttaggctgtgagaggygatgagcagacagaakgaaacattttaggctctcattggtaatactatgtcttccctaagacatcatctaaaaagagaatacaaagtaaatggatccaaggggtagctgatgagccaagcctttacaaagtgtgctggtgggaatttgctaat

SEQ ID NO: 50259 - DNA, 499 bp, Chicken  19866894297082_4
gttcaaaagatgctatttaggcatagctaaaacatcaggagctgctgctcygtgaatgcacagtggggcagtgacagatctttggcagraagaaataatataaatattgctctgctaacaaagtaaggctctttctgcaggcaccctctgcakcttgccccatgggttggagggctgtgggaggtggtatctctgaaatggagaaggttctatgtcttgggggagagcatgcagagatggaaaagaggtaaggaaagggaagaaatgggactgggatgacatttttaggctgtgagaggygatgagcagacagaakgaaacattttaggctctcattggtaatactatgtcttccctaagacatcatctaaaaagagaatacaaagtaaatggatccaaggggtagctgatgagccaagcctttacaaagtgtgctggtgggaatttgctaatgctaagtagagaaataccttgagtctctggggctggtgcaagccct

SEQ ID NO: 50260 - DNA, 483 bp, Chicken  19866894297082_5
ttaggcatagctaaaacatcaggagctgctgctcygtgaatgcacagtggggcagtgacagatctttggcagraagaaataatataaatattgctctgctaacaaagtaaggctctttctgcaggcaccctctgcakcttgccccatgggttggagggctgtgggaggtggtatctctgaaatggagaaggttctatgtcttgggggagagcatgcagagatggaaaagaggtaaggaaagggaagaaatgggactgggatgacatttttaggctgtgagaggygatgagcagacagaakgaaacattttaggctctcattggtaatactatgtcttccctaagacatcatctaaaaagagaatacaaagtaaatggatccaaggggtagctgatgagccaagcctttacaaagtgtgctggtgggaatttgctaatgctaagtagagaaataccttgagtctctggggctggtgcaagccct

SEQ ID NO: 50261 - DNA, 600 bp, Chicken  19866894297083_1
ataacacaaactccagtcccttgccagctcccacttcatgttctatgtgcatttacactgcattctccttaatgttctttcttgaccatatactgcacctgccatacccaaggcctctaccgtctcaccatatattgaaccttgctgcaaaaaaatgtcctttgtcctggagaaaattccaaaatttcaaaatatactgttgctcttcaaggaagagagatcaaaaatgttgaatttgtgggaaggatttctagaaaacggaattaatccatattttaatgcattatatgcatcaaaacmaactttattaacactaaagatcttgacatttttgtcaacacaagttctgttgcatatattttgtatgtagttattgtataattttttataaaggtagaaaacaagatccagctggtggtatgaaaattaggtaagaaatacagctttttggtctgtttggaagaaaggtgttaaattaaaaatgccctagcaattaagcaaaaatttatttagttagaaagatttctgtgcagggcctgccagtgcttcacacatacatctcatgtttctgtaatggttgtccattgcatgtgatagaac

SEQ ID NO: 50262 - DNA, 600 bp, Chicken  19866894297084_1
taagtgtatgtgcaaactcatatgccacttgtagcttacaaacacaagaactatatatgcagcacatatctgcttctatctacaatgctttattacaacgtttgtaaaaaatgaaaacaccgtgctcacaggagtttctcacacagactgctagcataagaagatatgtttatgtttcagctactgccatagatgcgaatataaaccagaaaagcagacaaacaagagactttgattcccattattctctttctaatgcttgccttttaaaaaagatgcagctttaatacaccctctgtrttaagggcctgaatctcttggttttcagccacaacagaagaaagcagaaagtacctgatgtcagtgttcaggagaatatatccctcttctaagatgccaacacagaagttgttcattcttatgactcagctccagactaataattttatctatcataggcacagctttttggcagagaattttatcaaacaaatagccaattaattccccatgactccaccctgcaaacatcccctttgctgtactgcttccttttttcttccttaattgctggttaatttcccagagaagagctaaatc

SEQ ID NO: 50263 - DNA, 600 bp, Chicken  19866894297084_2
catgtcagtgaattggaacgagcccaacgatagggatggggatgaaaactgaatagtcaggcttctgtctaatctaaatccccgctgctgcaatttaagcctattacttccggccctatcaaccacagatacagttagcagatttgttccttcctctcgataacagttttcaagtctattaaaagctgttgtaatgctcctcctcagtcttctttcttgaggccagacaaaaccagctctttcagtctctcttgaggtcatgtcctctggacctctcattccccttctaattgacatccwggctatccctggtcaaagtgcatcttttctggagttcaaaagtgtgaacagtgttccagacaagaccttactagaagtaagtgcagagattacctcatgcatcttccatagcaaattcctggttatgaatcccatgaaaatgatgacttcttttattttttaagtaaacaaaaaaagtgtgactcatgttcacccgtgatcttccataatacctactttcctttccaaagagatgcacccacctgcctgattcccattctgcattatctgacttgctcctataagttcattttatccgtt

SEQ ID NO: 50264 - DNA, 599 bp, Chicken  19866894297087_1
  misc_feature (1)..(64): n is any nucleotide
nnnnnnnnnnnnnnnnnnnnnnnnnnnnnnnnnnnnnnnnnnnnnnnnnnnnnnnnnnnnnnnntgaagtgccagcttgtgttaggctcagccctgggtttttcttccccaaatcccatgtgctttgcaaagtgcttgtgcctcccacacacaacaagtgcttagggtggtaatggggaaacgtctgctcaagtggatgtttggatgcacggactgctgtttgcccctcagccacttgtgtcatgtggtgttcaatgcgtacctgtgtggttcctggtctctgtgccacctgtgcacacmaagcaggctcacagagagatgccttagctgaccaaatcgactgcttgttaaagcttaaccttggaagtggttgtgactccatttcctcagatctgatgtgtaacagaatggcacgtagtcctgactgtgtcttgacagaaatgtgacagattacttaggaattttcttcagatgctgctgcgctattgagatagctcctcaaaacccatcctgtcatgctaactcgaaaattgttgcagtggaaattattcctatggatctatawgatagattgttgttcaattgtgctgacagctggt

SEQ ID NO: 50265 - DNA, 589 bp, Chicken  19866894297087_2
tgtggttcctggtctctgtgccacctgtgcacacmaagcaggctcacagagagatgccttagctgaccaaatcgactgcttgttaaagcttaaccttggaagtggttgtgactccatttcctcagatctgatgtgtaacagaatggcacgtagtcctgactgtgtcttgacagaaatgtgacagattacttaggaattttcttcagatgctgctgcgctattgagatagctcctcaaaacccatcctgtcatgctaactcgaaaattgttgcagtggaaattattcctatggatctatawgatagattgttgttcaattgtgctgacagctggtgcctggtaatctgtttatgtggctgtgctgtcttccttggctgtgcggcagcggcattaccatggagcagatatctcctcaagatatctcactctgcatatttattcactgctgcctgtttgtggcaaaaaaaaaaagtcatttccttctaagcacctccctgccaaggtgagtgttctgtgttctgccagaaaatccttggtggagtcagagtgtggtttacaaaagaaagaagcagggaaaaacagacaaaaa

SEQ ID NO: 50266 - DNA, 600 bp, Chicken  19866894297098_1
gtgggaaagcagcctggccatgggcaaaccctacagggcctttgctgagtgccagacccaggtcagacaagttgaaacaagttacggcacacacaaatgcttttcttcctcaaatctcaaaggaagtgtgtccacgtgctgagctgcaggtgtcacaggttgttaagaatgaaagacctctatgggattctgcctctgtgcgcttattggcttggcacagcgggcatgaactgactcccagttcttggctgggacagcaccgctgccgggcagcctgcctacagcagacccatgccagcrgggttctgcatcaccttggtgtatatggctttttttgcacygacccaactrcatcccagctcttgtggccgtgacagctgttaacacaagagcagtggctctggccacaacagctccctccctgccctgggcagcagcaatgaagggaaggaaacgctatgaaagacgacagcatgggctcttccccttttgcaaccttaatgggagagtttgtgttggcagggaaaagttatctcaggggagtgatctattgcagactgagtaatatgttgcaaaagctactaaaattagaacagcaaa

SEQ ID NO: 50267 - DNA, 600 bp, Chicken  19866894297098_2
ttgctgagtgccagacccaggtcagacaagttgaaacaagttacggcacacacaaatgcttttcttcctcaaatctcaaaggaagtgtgtccacgtgctgagctgcaggtgtcacaggttgttaagaatgaaagacctctatgggattctgcctctgtgcgcttattggcttggcacagcgggcatgaactgactcccagttcttggctgggacagcaccgctgccgggcagcctgcctacagcagacccatgccagcrgggttctgcatcaccttggtgtatatggctttttttgcacygacccaactrcatcccagctcttgtggccgtgacagctgttaacacaagagcagtggctctggccacaacagctccctccctgccctgggcagcagcaatgaagggaaggaaacgctatgaaagacgacagcatgggctcttccccttttgcaaccttaatgggagagtttgtgttggcagggaaaagttatctcaggggagtgatctattgcagactgagtaatatgttgcaaaagctactaaaattagaacagcaaaagaatgtctaaaaatattacatgtgcttaaaaaagcacaga

SEQ ID NO: 50268 - DNA, 600 bp, Chicken  19866894297098_3
ccagacccaggtcagacaagttgaaacaagttacggcacacacaaatgcttttcttcctcaaatctcaaaggaagtgtgtccacgtgctgagctgcaggtgtcacaggttgttaagaatgaaagacctctatgggattctgcctctgtgcgcttattggcttggcacagcgggcatgaactgactcccagttcttggctgggacagcaccgctgccgggcagcctgcctacagcagacccatgccagcrgggttctgcatcaccttggtgtatatggctttttttgcacygacccaactrcatcccagctcttgtggccgtgacagctgttaacacaagagcagtggctctggccacaacagctccctccctgccctgggcagcagcaatgaagggaaggaaacgctatgaaagacgacagcatgggctcttccccttttgcaaccttaatgggagagtttgtgttggcagggaaaagttatctcaggggagtgatctattgcagactgagtaatatgttgcaaaagctactaaaattagaacagcaaaagaatgtctaaaaatattacatgtgcttaaaaaagcacagaatccctgaac

SEQ ID NO: 50269 - DNA, 600 bp, Chicken  19866894297105_1
catcctgctgagctctgcctcctcctccagctcggcctgcggggatggcacagctccgggcaccgcctggggctgcaggggtgcactcacccccgggagctcaccttgtagctcagcttcccctccagcagccggggcatgcacgctgcgcagccatacatgtcggccagcaggtcctccagcagcttcaggaagctgttctcatccgtcacatccaacgagggccggaagcccaccgcgccgtcacacagctccatgcacacctcgaacagtggggccacgtgtgcctggaagagagcrgcatctgagcgtccccatggaccccacggtggggacggaacagccrcaccactgaacagaacacccagaggggggaacagtgcrtgggggtgaatgkgggcacrgagcrgcagagcaaacctggacatacattgggggccatgttggtgagcagcagcttcaaggatttgtgaacaagtgagaagagcccatccaacactactttgtcaacgtattttacgtagtccagccatatctgtgacgatgtatcagccttgaacagctctgcattctcctgcaagtcaaaggaaaccaacccag

SEQ ID NO: 50270 - DNA, 600 bp, Chicken  19866894297105_2
ggcacagctccgggcaccgcctggggctgcaggggtgcactcacccccgggagctcaccttgtagctcagcttcccctccagcagccggggcatgcacgctgcgcagccatacatgtcggccagcaggtcctccagcagcttcaggaagctgttctcatccgtcacatccaacgagggccggaagcccaccgcgccgtcacacagctccatgcacacctcgaacagtggggccacgtgtgcctggaagagagcrgcatctgagcgtccccatggaccccacggtggggacggaacagccrcaccactgaacagaacacccagaggggggaacagtgcrtgggggtgaatgkgggcacrgagcrgcagagcaaacctggacatacattgggggccatgttggtgagcagcagcttcaaggatttgtgaacaagtgagaagagcccatccaacactactttgtcaacgtattttacgtagtccagccatatctgtgacgatgtatcagccttgaacagctctgcattctcctgcaagtcaaaggaaaccaacccagtgtttgtcaatcaatgcacagcaggaacgccggctcccagcgcttt

SEQ ID NO: 50271 - DNA, 600 bp, Chicken  19866894297105_3
actcacccccgggagctcaccttgtagctcagcttcccctccagcagccggggcatgcacgctgcgcagccatacatgtcggccagcaggtcctccagcagcttcaggaagctgttctcatccgtcacatccaacgagggccggaagcccaccgcgccgtcacacagctccatgcacacctcgaacagtggggccacgtgtgcctggaagagagcrgcatctgagcgtccccatggaccccacggtggggacggaacagccrcaccactgaacagaacacccagaggggggaacagtgcrtgggggtgaatgkgggcacrgagcrgcagagcaaacctggacatacattgggggccatgttggtgagcagcagcttcaaggatttgtgaacaagtgagaagagcccatccaacactactttgtcaacgtattttacgtagtccagccatatctgtgacgatgtatcagccttgaacagctctgcattctcctgcaagtcaaaggaaaccaacccagtgtttgtcaatcaatgcacagcaggaacgccggctcccagcgctttgcaaggtaggtgcccttctgctggaagcaccccgggct

SEQ ID NO: 50272 - DNA, 600 bp, Chicken  19866894297105_4
agctcaccttgtagctcagcttcccctccagcagccggggcatgcacgctgcgcagccatacatgtcggccagcaggtcctccagcagcttcaggaagctgttctcatccgtcacatccaacgagggccggaagcccaccgcgccgtcacacagctccatgcacacctcgaacagtggggccacgtgtgcctggaagagagcrgcatctgagcgtccccatggaccccacggtggggacggaacagccrcaccactgaacagaacacccagaggggggaacagtgcrtgggggtgaatgkgggcacrgagcrgcagagcaaacctggacatacattgggggccatgttggtgagcagcagcttcaaggatttgtgaacaagtgagaagagcccatccaacactactttgtcaacgtattttacgtagtccagccatatctgtgacgatgtatcagccttgaacagctctgcattctcctgcaagtcaaaggaaaccaacccagtgtttgtcaatcaatgcacagcaggaacgccggctcccagcgctttgcaaggtaggtgcccttctgctggaagcaccccgggctgtgcacacctgca

SEQ ID NO: 50273 - DNA, 600 bp, Chicken  19866894297105_5
cttgtagctcagcttcccctccagcagccggggcatgcacgctgcgcagccatacatgtcggccagcaggtcctccagcagcttcaggaagctgttctcatccgtcacatccaacgagggccggaagcccaccgcgccgtcacacagctccatgcacacctcgaacagtggggccacgtgtgcctggaagagagcrgcatctgagcgtccccatggaccccacggtggggacggaacagccrcaccactgaacagaacacccagaggggggaacagtgcrtgggggtgaatgkgggcacrgagcrgcagagcaaacctggacatacattgggggccatgttggtgagcagcagcttcaaggatttgtgaacaagtgagaagagcccatccaacactactttgtcaacgtattttacgtagtccagccatatctgtgacgatgtatcagccttgaacagctctgcattctcctgcaagtcaaaggaaaccaacccagtgtttgtcaatcaatgcacagcaggaacgccggctcccagcgctttgcaaggtaggtgcccttctgctggaagcaccccgggctgtgcacacctgcaccatggc

SEQ ID NO: 50274 - DNA, 600 bp, Chicken  19866894297105_6
agctcagcttcccctccagcagccggggcatgcacgctgcgcagccatacatgtcggccagcaggtcctccagcagcttcaggaagctgttctcatccgtcacatccaacgagggccggaagcccaccgcgccgtcacacagctccatgcacacctcgaacagtggggccacgtgtgcctggaagagagcrgcatctgagcgtccccatggaccccacggtggggacggaacagccrcaccactgaacagaacacccagaggggggaacagtgcrtgggggtgaatgkgggcacrgagcrgcagagcaaacctggacatacattgggggccatgttggtgagcagcagcttcaaggatttgtgaacaagtgagaagagcccatccaacactactttgtcaacgtattttacgtagtccagccatatctgtgacgatgtatcagccttgaacagctctgcattctcctgcaagtcaaaggaaaccaacccagtgtttgtcaatcaatgcacagcaggaacgccggctcccagcgctttgcaaggtaggtgcccttctgctggaagcaccccgggctgtgcacacctgcaccatggcctcaa

SEQ ID NO: 50275 - DNA, 600 bp, Chicken  19866894297119_1
taattacagaaaaataactttgttaggagtgattggcttctgatagtgaaaagagctatctccttggcataccagtttgtgcagagcgtgaggcttggtcctttgcctatgtccttggtccttttgcctatgtgaagatgtattactgctttggtagtcaaactgatttattttaattgtttaattttataaattgtctgattctaaggtctgacgtgccaattatgatgctctaatctgactacatagcacagggtgaatatttgaattgaagctctgtggttttatgtggacattccmccaatggacacttttgccttgaagtcttcatagacatacttcacagtctccagagactattgtccataatttcataaaacagcaagatgttagaagttttgccatgttcattttagaaaatccaaaattaagttgtgttgaggtacataaacaactcctctggtattttggttaagagcttttattattaatagatcacaaagactaaaataaaattattcttctgactcagcacacaattttttgtaaattctaatatgcaattttatctagccgctagaacaataaggcttcatttcc

SEQ ID NO: 50276 - DNA, 599 bp, Chicken  19866894297123_1
  misc_feature (1)..(34): n is any nucleotide
nnnnnnnnnnnnnnnnnnnnnnnnnnnnnnnnnnatgatcttagtggtatttccaaccttaatgattctatgattgatactgaaacagaacaaggaacagcagagcatggttaggtagcctccgcaactgtgtgaccgcatcgatggtattacatgcacgtctcaccccaaaagctcctgtaacatggggttagggaagaggatggggaagttaaaactctcccaggcagcccagcaccagctctggtctttggaggtaacacagaatttttacttggcaccagagacccccagccttarggaccctcattcagcccttcctcatttcccaktgtctcctctttttggtgctgggacaaggaatgcctyccatggggtgtttctgtgacacctcaacacacaatgtgggcaccatcccaccagcactcccagctggtaaatgcacattgtgaccacaatagggtttgaaatgtctgtggttgaaacagcagtttcacttctcagggcccagtttggagcgatgcatgaaagaaaacgcttcccagccaacgttagctggcagagctggtttgtaatcagccaggacagatgggaacaca

SEQ ID NO: 50277 - DNA, 599 bp, Chicken  19866894297123_2
  misc_feature (1)..(2): n is any nucleotide
nnatgatcttagtggtatttccaaccttaatgattctatgattgatactgaaacagaacaaggaacagcagagcatggttaggtagcctccgcaactgtgtgaccgcatcgatggtattacatgcacgtctcaccccaaaagctcctgtaacatggggttagggaagaggatggggaagttaaaactctcccaggcagcccagcaccagctctggtctttggaggtaacacagaatttttacttggcaccagagacccccagccttarggaccctcattcagcccttcctcatttcccaktgtctcctctttttggtgctgggacaaggaatgcctyccatggggtgtttctgtgacacctcaacacacaatgtgggcaccatcccaccagcactcccagctggtaaatgcacattgtgaccacaatagggtttgaaatgtctgtggttgaaacagcagtttcacttctcagggcccagtttggagcgatgcatgaaagaaaacgcttcccagccaacgttagctggcagagctggtttgtaatcagccaggacagatgggaacacacaataccttgaacccaatcaagaaaacatccc

SEQ ID NO: 50278 - DNA, 600 bp, Chicken  19866894297123_3
atgattgatactgaaacagaacaaggaacagcagagcatggttaggtagcctccgcaactgtgtgaccgcatcgatggtattacatgcacgtctcaccccaaaagctcctgtaacatggggttagggaagaggatggggaagttaaaactctcccaggcagcccagcaccagctctggtctttggaggtaacacagaatttttacttggcaccagagacccccagccttarggaccctcattcagcccttcctcatttcccaktgtctcctctttttggtgctgggacaaggaatgcctyccatggggtgtttctgtgacacctcaacacacaatgtgggcaccatcccaccagcactcccagctggtaaatgcacattgtgaccacaatagggtttgaaatgtctgtggttgaaacagcagtttcacttctcagggcccagtttggagcgatgcatgaaagaaaacgcttcccagccaacgttagctggcagagctggtttgtaatcagccaggacagatgggaacacacaataccttgaacccaatcaagaaaacatcccaggaatgcttgttaatgtgaaccttcagaggggtaaaa

SEQ ID NO: 50279 - DNA, 600 bp, Chicken  19866894297146_1
gtctattccaattacacaataaacaaataggttccttccatgtaaaaatttacgtgattattgcctttccagtcatggctgctctgagttttccaaaaacgaaagataaagacagcataaggaaaactaaaactccagaattttggtaaaattgtcttttgttgaatcttattgtggaatatgttcattttttcataactctacttaacagaaacaggaaacatttgtacttgaaatcagactaacctataaaagtagaagatattttagtaagaatttttgggagatgtcagtttgaawactctacccctttcwtaatggtacagtggagaaggtgctagaaggttttgactggagtgaagagggtttgggttgagcagtttattgtctttggtagatactccagttgtaaaactcatgcaaggtatttgaaattgttttcattattgaagaagtatgaaaaatgctgttttaacgccataacaaattggagaagaaaggatttgtaaagatgatcaaagtgaactgatatagttaatcagcaagcagcaagttcatctcaaaacaggtcaggtgtgctcaaatactcaaatgtatcag

SEQ ID NO: 50280 - DNA, 600 bp, Chicken  19866894297146_2
acaataaacaaataggttccttccatgtaaaaatttacgtgattattgcctttccagtcatggctgctctgagttttccaaaaacgaaagataaagacagcataaggaaaactaaaactccagaattttggtaaaattgtcttttgttgaatcttattgtggaatatgttcattttttcataactctacttaacagaaacaggaaacatttgtacttgaaatcagactaacctataaaagtagaagatattttagtaagaatttttgggagatgtcagtttgaawactctacccctttcwtaatggtacagtggagaaggtgctagaaggttttgactggagtgaagagggtttgggttgagcagtttattgtctttggtagatactccagttgtaaaactcatgcaaggtatttgaaattgttttcattattgaagaagtatgaaaaatgctgttttaacgccataacaaattggagaagaaaggatttgtaaagatgatcaaagtgaactgatatagttaatcagcaagcagcaagttcatctcaaaacaggtcaggtgtgctcaaatactcaaatgtatcagaattacattagaaca

SEQ ID NO: 50281 - DNA, 600 bp, Chicken  19866894297147_1
tgctctgagtgggatacagcaacagaatgatccacagcaaagatctcagatttctactgaaaaattgtgggttcttatagctgtatagtcctatattattccaaactatgtataggatatttaagtaatgtagagtgactgaatttgcatgtctgtgagacccatgttcaaatgcttccgagggaagcaaggtagtgtttctgtttttattgcaatctgaaatgatatatcggttctgctacattgggtgaagatcactgtatcactcatatcaaactttcactttagacaaatgcttcwggtccttttctgtggttggaaacgtaagatgttggatgtccagcaggccatgtggccacaaaaccctcagagatagaaagtaagtctagccctttcactgcaatagttatgatttgataaaagaattatacagcttttcrcatgaactgggacataattatttttaaaaaggagcttcaacgatattatagtggccttcaaactctctatagaccactagcgttccacacagagtcagccgttattctcatttccagctaagagaaacaaaatagatgggaggagatgaaaaacaaaagc

SEQ ID NO: 50282 - DNA, 600 bp, Chicken  19866894297147_2
gaatttgcatgtctgtgagacccatgttcaaatgcttccgagggaagcaaggtagtgtttctgtttttattgcaatctgaaatgatatatcggttctgctacattgggtgaagatcactgtatcactcatatcaaactttcactttagacaaatgcttcwggtccttttctgtggttggaaacgtaagatgttggatgtccagcaggccatgtggccacaaaaccctcagagatagaaagtaagtctagccctttcactgcaatagttatgatttgataaaagaattatacagcttttcrcatgaactgggacataattatttttaaaaaggagcttcaacgatattatagtggccttcaaactctctatagaccactagcgttccacacagagtcagccgttattctcatttccagctaagagaaacaaaatagatgggaggagatgaaaaacaaaagcagacaatgcaagtgttttgtttttcagaaaaggaaaaacatttatcacactcaatacagtacaaatgcataaatactttcctagtattatttttctgtgtaagcaaccactgtaattgccgcaggggtattatgtgagtg

SEQ ID NO: 50283 - DNA, 600 bp, Chicken  19866894297149_1
cgaagaccatcaagcgccaaccccctgccacaggcaggcaccgccaacctccaaatctagtaacctagaccaggctgcccagggccccatccagcctggccttgaacacttccatctacagatccatagaaagggttggcaagacttgtgctgttccacacttccttcatctgacagtactgctctatacctgccctgttctaacactacaaatctgacctgcccatggtcaaataaagccccatagggcagatatgcctccagtccttctggtcagggttttcattcaggtaacatcaygttagagagcaatgcacaactctggtatgagatcagcctgcttacagcatggtttttcttaaaagtctgtctacaaggggaaccaagaataaaaccaaagaaacagctactgtccaaaatgccttgcaagcccatccatcacaccctgtgtacctggagacaaacaggttctgctgcagtactgcagctgtatgggcatcacagtggtgctgttaaatacaaacaaggtttaacgctgctgtctttttcaaactcattcttccatatgttctgacagcagctcgactgaagccaaagctt

SEQ ID NO: 50284 - DNA, 599 bp, Chicken  19866894297152_1
  misc_feature (1)..(138): n is any nucleotide
nnnnnnnnnnnnnnnnnnnnnnnnnnnnnnnnnnnnnnnnnnnnnnnnnnnnnnnnnnnnnnnnnnnnnnnnnnnnnnnnnnnnnnnnnnnnnnnnnnnnnnnnnnnnnnnnnnnnnnnnnnnnnnnnnnnnnnnnnntgtcagttttttgtttctgacaggttttagagcaaaacagtatgctttgcatactagaggtatgtaaacataggtaaaatatataataagctgatttaaattaaccaaccacatattttggtatttaaatctttatccttcacagcagataacgaacttttraaagatggactgacttcaactactggaaagggraagaakacaggtgtgaattttgtctttggcagcttctcacaggagcagacccttcccagcagggagtgagtcacagcactactacatacatttattcctgctatcttaattgcttttagcagaaacaaatttctgtgcagatcaatcccacagatctcaggraaaaaaaaataaggtaccaaagattgtttcatgcccgagttcttaaaatccaaaataaaaccaggaaactaaacaaaagtagtaacatggcctcacagatgaat

SEQ ID NO: 50285 - DNA, 599 bp, Chicken  19866894297152_2
  misc_feature (1)..(105): n is any nucleotide
nnnnnnnnnnnnnnnnnnnnnnnnnnnnnnnnnnnnnnnnnnnnnnnnnnnnnnnnnnnnnnnnnnnnnnnnnnnnnnnnnnnnnnnnnnnnnnnnnnnnnnnnntgtcagttttttgtttctgacaggttttagagcaaaacagtatgctttgcatactagaggtatgtaaacataggtaaaatatataataagctgatttaaattaaccaaccacatattttggtatttaaatctttatccttcacagcagataacgaacttttraaagatggactgacttcaactactggaaagggraagaakacaggtgtgaattttgtctttggcagcttctcacaggagcagacccttcccagcagggagtgagtcacagcactactacatacatttattcctgctatcttaattgcttttagcagaaacaaatttctgtgcagatcaatcccacagatctcaggraaaaaaaaataaggtaccaaagattgtttcatgcccgagttcttaaaatccaaaataaaaccaggaaactaaacaaaagtagtaacatggcctcacagatgaatagctttcaaaagccttccaagaatcactggctt

SEQ ID NO: 50286 - DNA, 599 bp, Chicken  19866894297152_3
  misc_feature (1)..(99): n is any nucleotide
nnnnnnnnnnnnnnnnnnnnnnnnnnnnnnnnnnnnnnnnnnnnnnnnnnnnnnnnnnnnnnnnnnnnnnnnnnnnnnnnnnnnnnnnnnnnnnnnnnntgtcagttttttgtttctgacaggttttagagcaaaacagtatgctttgcatactagaggtatgtaaacataggtaaaatatataataagctgatttaaattaaccaaccacatattttggtatttaaatctttatccttcacagcagataacgaacttttraaagatggactgacttcaactactggaaagggraagaakacaggtgtgaattttgtctttggcagcttctcacaggagcagacccttcccagcagggagtgagtcacagcactactacatacatttattcctgctatcttaattgcttttagcagaaacaaatttctgtgcagatcaatcccacagatctcaggraaaaaaaaataaggtaccaaagattgtttcatgcccgagttcttaaaatccaaaataaaaccaggaaactaaacaaaagtagtaacatggcctcacagatgaatagctttcaaaagccttccaagaatcactggctttctatt

SEQ ID NO: 50287 - DNA, 600 bp, Chicken  19866894297152_4
aggtatgtaaacataggtaaaatatataataagctgatttaaattaaccaaccacatattttggtatttaaatctttatccttcacagcagataacgaacttttraaagatggactgacttcaactactggaaagggraagaakacaggtgtgaattttgtctttggcagcttctcacaggagcagacccttcccagcagggagtgagtcacagcactactacatacatttattcctgctatcttaattgcttttagcagaaacaaatttctgtgcagatcaatcccacagatctcaggraaaaaaaaataaggtaccaaagattgtttcatgcccgagttcttaaaatccaaaataaaaccaggaaactaaacaaaagtagtaacatggcctcacagatgaatagctttcaaaagccttccaagaatcactggctttctatttatttatttttattttaaaaagaaaggattagtctgactattctttactctctcttcagasagacatctaagctgcccaactatcctactcatttccttgtaagaaatgcagaaaattcccagctgttctcaggaagatcrgtaaccaaaacagaac

SEQ ID NO: 50288 - DNA, 600 bp, Chicken  19866894297152_5
tgagtcacagcactactacatacatttattcctgctatcttaattgcttttagcagaaacaaatttctgtgcagatcaatcccacagatctcaggraaaaaaaaataaggtaccaaagattgtttcatgcccgagttcttaaaatccaaaataaaaccaggaaactaaacaaaagtagtaacatggcctcacagatgaatagctttcaaaagccttccaagaatcactggctttctatttatttatttttattttaaaaagaaaggattagtctgactattctttactctctcttcagasagacatctaagctgcccaactatcctactcatttccttgtaagaaatgcagaaaattcccagctgttctcaggaagatcrgtaaccaaaacagaactgagcatttgacttcaagggtaaatactggacagtaagagattagaaggatacaggtagagattatgtgtaactatgagaatatatttactggtgcgccgtttctgcagaaaacggagtgtccacaccggaattgtatgcattcctgataacaaacaggaactgcattttggttcatacctaaattcacactgacctctctaaa

SEQ ID NO: 50289 - DNA, 562 bp, Chicken  19866894297152_6
cccacagatctcaggraaaaaaaaataaggtaccaaagattgtttcatgcccgagttcttaaaatccaaaataaaaccaggaaactaaacaaaagtagtaacatggcctcacagatgaatagctttcaaaagccttccaagaatcactggctttctatttatttatttttattttaaaaagaaaggattagtctgactattctttactctctcttcagasagacatctaagctgcccaactatcctactcatttccttgtaagaaatgcagaaaattcccagctgttctcaggaagatcrgtaaccaaaacagaactgagcatttgacttcaagggtaaatactggacagtaagagattagaaggatacaggtagagattatgtgtaactatgagaatatatttactggtgcgccgtttctgcagaaaacggagtgtccacaccggaattgtatgcattcctgataacaaacaggaactgcattttggttcatacctaaattcacactgacctctctaaaattacattccccaaatatctccattcacaaaccctgggcaaa

SEQ ID NO: 50290 - DNA, 600 bp, Chicken  19866894297153_1
cacagagggcacaaaaaccaccattcaccttctataaaagaaatgctgaggacaaaccaatcactcaccttccattcaaaaaaaatgctgaggacaagtagaaagcacacaggagacaaataactgagtgccatgtgatcactatggtggttttgcaaagtcaatctttatcttattatactgtgtggcagatcctgcttttgatcagcatggtcttacatgtgacatttgagtcatgccaacaaagcccagtctgcttgctgttggcataaccagctccttagtgacacctgtcctatraagacatacactttggtagattcaaatctccattagttgaaaggagaattaaaaagatggctcaagcatgtaccattatgttctcatcccaaaactagatgcaataatgtgttcttgagcccaaaagtcatattaaagagagacagaytgttatcctatcttatttcctcaaagagatgtatttctcagtccttcccatgtaatatccaatattaccaataaaaatttcttccacgacaaactctgtaccacatctgaagcaaacgttctaagtactactaccctacaagagatgctgac

SEQ ID NO: 50291 - DNA, 600 bp, Chicken  19866894297153_2
ggttttgcaaagtcaatctttatcttattatactgtgtggcagatcctgcttttgatcagcatggtcttacatgtgacatttgagtcatgccaacaaagcccagtctgcttgctgttggcataaccagctccttagtgacacctgtcctatraagacatacactttggtagattcaaatctccattagttgaaaggagaattaaaaagatggctcaagcatgtaccattatgttctcatcccaaaactagatgcaataatgtgttcttgagcccaaaagtcatattaaagagagacagaytgttatcctatcttatttcctcaaagagatgtatttctcagtccttcccatgtaatatccaatattaccaataaaaatttcttccacgacaaactctgtaccacatctgaagcaaacgttctaagtactactaccctacaagagatgctgaccacctcagaagatctgagtggttttaacattaatttgaaggttcatgttttagaaagcaaacaattagtagaaattctattccagacttagatgaactgtaaactgatgacgaaaatcccatagagacataaaagccaatcagatatg

SEQ ID NO: 50292 - DNA, 600 bp, Chicken  19866894297153_3
agatgaactgtaaactgatgacgaaaatcccatagagacataaaagccaatcagatatgttgtgtggagtatttctcccaatataaagagcattccacactctctcctatttttcacaacagtagctgcctgcatgcagtcagaataaaaagaattgctttgtaaattatctattttattttaaattccctgtagtgttattaaaagtaagaatacaataaaatccttttgaaatgttaacatatagcaagacagaatttctactaacagacaaaaactaacatcaattcattactgtcrtacatagacatagactaaaactgaaatctgagtagaggtgaagcatacagaaaactcaacacgtaactcttgcaataaatccaatgagcagctggtcagagagttgcaattaaaaaaaaaaaaaaaaaagaaaaaccttgtactggaaacacaacagaaggtcaaaactcagtttccaagcccatttgtttaaaccaatcaattcacaatgaaacttaagagaacagccccgtcactagcttatggcattacattctgctttgttttatggtactgaggctaacaagtcagctttcccta

SEQ ID NO: 50293 - DNA, 599 bp, Chicken  19866894297162_1
  misc_feature (1)..(150): n is any nucleotide
nnnnnnnnnnnnnnnnnnnnnnnnnnnnnnnnnnnnnnnnnnnnnnnnnnnnnnnnnnnnnnnnnnnnnnnnnnnnnnnnnnnnnnnnnnnnnnnnnnnnnnnnnnnnnnnnnnnnnnnnnnnnnnnnnnnnnnnnnnnnnnnnnnnnnntttgagagctttgttcctttttcctcttttttctatcagaagtgtgcactcacttggtgaaactgtgcttgttaaataacgatgtgatggtgagaagttcttgacatcaacctgctctagctgtaggtgtccatcttcgttgcaggggarttgcacttgatgaccttaagggttcctgatatctcagatgattctatgattctataatgtgctcattatggctgtagttattagtgatcagaagtttattccctgtcatttttgccacttcagtaacctcttcattaattyaggcacagaggaaaattgcgttgttcttagatatgtcttagaaatkgattctggaataccctattccttggcttattttaactgtgtcatagatcttttttttacctgtaggaagtggtttaaaaatagagcaattcttgaagggatgtgagtgaagt

SEQ ID NO: 50294 - DNA, 599 bp, Chicken  19866894297162_2
  misc_feature (1)..(9): n is any nucleotide
nnnnnnnnntttgagagctttgttcctttttcctcttttttctatcagaagtgtgcactcacttggtgaaactgtgcttgttaaataacgatgtgatggtgagaagttcttgacatcaacctgctctagctgtaggtgtccatcttcgttgcaggggarttgcacttgatgaccttaagggttcctgatatctcagatgattctatgattctataatgtgctcattatggctgtagttattagtgatcagaagtttattccctgtcatttttgccacttcagtaacctcttcattaattyaggcacagaggaaaattgcgttgttcttagatatgtcttagaaatkgattctggaataccctattccttggcttattttaactgtgtcatagatcttttttttacctgtaggaagtggtttaaaaatagagcaattcttgaagggatgtgagtgaagttgcttagctgactgttagctgaagtgtgaacttccagagcctggcasatatggtgaaaraagttagattagtaactcatccctgaccagtatcccaaacactaggctctcttctcaggtgtttgtgagaggccagcacttt

SEQ ID NO: 50295 - DNA, 600 bp, Chicken  19866894297162_3
agaagtgtgcactcacttggtgaaactgtgcttgttaaataacgatgtgatggtgagaagttcttgacatcaacctgctctagctgtaggtgtccatcttcgttgcaggggarttgcacttgatgaccttaagggttcctgatatctcagatgattctatgattctataatgtgctcattatggctgtagttattagtgatcagaagtttattccctgtcatttttgccacttcagtaacctcttcattaattyaggcacagaggaaaattgcgttgttcttagatatgtcttagaaatkgattctggaataccctattccttggcttattttaactgtgtcatagatcttttttttacctgtaggaagtggtttaaaaatagagcaattcttgaagggatgtgagtgaagttgcttagctgactgttagctgaagtgtgaacttccagagcctggcasatatggtgaaaraagttagattagtaactcatccctgaccagtatcccaaacactaggctctcttctcaggtgtttgtgagaggccagcacttttgtatttcccaggataaaaaacatcatcacttctttctccactactt

SEQ ID NO: 50296 - DNA, 600 bp, Chicken  19866894297162_4
tgattctataatgtgctcattatggctgtagttattagtgatcagaagtttattccctgtcatttttgccacttcagtaacctcttcattaattyaggcacagaggaaaattgcgttgttcttagatatgtcttagaaatkgattctggaataccctattccttggcttattttaactgtgtcatagatcttttttttacctgtaggaagtggtttaaaaatagagcaattcttgaagggatgtgagtgaagttgcttagctgactgttagctgaagtgtgaacttccagagcctggcasatatggtgaaaraagttagattagtaactcatccctgaccagtatcccaaacactaggctctcttctcaggtgtttgtgagaggccagcacttttgtatttcccaggataaaaaacatcatcacttctttctccactactttatttgaacagaattgtttgttttgtgtgctgaaacgtccagcttgctttgagctcaatgataaataacactgttgattactttatgagaagatctgcattgtttggttgtaggttattgagcttgacttcgatcaattacctgagggtgatgaagtta

SEQ ID NO: 50297 - DNA, 595 bp, Chicken  19866894297162_5
gtgctcattatggctgtagttattagtgatcagaagtttattccctgtcatttttgccacttcagtaacctcttcattaattyaggcacagaggaaaattgcgttgttcttagatatgtcttagaaatkgattctggaataccctattccttggcttattttaactgtgtcatagatcttttttttacctgtaggaagtggtttaaaaatagagcaattcttgaagggatgtgagtgaagttgcttagctgactgttagctgaagtgtgaacttccagagcctggcasatatggtgaaaraagttagattagtaactcatccctgaccagtatcccaaacactaggctctcttctcaggtgtttgtgagaggccagcacttttgtatttcccaggataaaaaacatcatcacttctttctccactactttatttgaacagaattgtttgttttgtgtgctgaaacgtccagcttgctttgagctcaatgataaataacactgttgattactttatgagaagatctgcattgtttggttgtaggttattgagcttgacttcgatcaattacctgagggtgatgaagttataagtat

SEQ ID NO: 50298 - DNA, 599 bp, Chicken  19866894297164_1
  misc_feature (1)..(40): n is any nucleotide
nnnnnnnnnnnnnnnnnnnnnnnnnnnnnnnnnnnnnnnnattttgggattctgctgagttcttgctgttgctgagagcaagaaacctagcagcaagtgtcacagattcatttcctagggtgggaactgttgttcctatttgtttggtttgtgggttaatttcattgtctggaaaaagaagatacaggatcttggcatggtgttggatttgatgggaagaaagggagtgtcagatgatctgacactccccttggatgaaattgctgggaaagtaaaggacactgtatttggtaggacacrcaaggagtaagagtttcagtgtgcagcagaatgagggagtgaatgcagaagtcattgtcgtgggagcaggttgtgctgagtggttgctggggagctaagggctgattgaaggttgcaggaggacaaggggaagatgctactgtatctggctggatgggatgctctcccatctgaggcttctctcttctttttctccaggttctgaatgtagactttgagggtctttttggaaacatccaagtggtaattagcttctctaagcagctgctgtcraccttggaggcttcagattccattgg

SEQ ID NO: 50299 - DNA, 600 bp, Chicken  19866894297164_2
aaaggacactgtatttggtaggacacrcaaggagtaagagtttcagtgtgcagcagaatgagggagtgaatgcagaagtcattgtcgtgggagcaggttgtgctgagtggttgctggggagctaagggctgattgaaggttgcaggaggacaaggggaagatgctactgtatctggctggatgggatgctctcccatctgaggcttctctcttctttttctccaggttctgaatgtagactttgagggtctttttggaaacatccaagtggtaattagcttctctaagcagctgctgtcraccttggaggcttcagattccattggtatgaactcttctgttgcctttyctcagcagtctgggatgagatttgctagtggggtggcagaacagggcagtttaaatgatggatgagagagtttcctccccgttggtccttgtcagtgctcatcagccctgcagcaaagctgtgtcactgtgctgagaaacacatgttgtctatagacttccctgacttcttccttaaagcgagcccccctcctcacacctgcactgccagctttcactgctcagctccagcgcagcctgtgcctctgctgc

SEQ ID NO: 50300 - DNA, 600 bp, Chicken  19866894297164_3
gcagcagaatgagggagtgaatgcagaagtcattgtcgtgggagcaggttgtgctgagtggttgctggggagctaagggctgattgaaggttgcaggaggacaaggggaagatgctactgtatctggctggatgggatgctctcccatctgaggcttctctcttctttttctccaggttctgaatgtagactttgagggtctttttggaaacatccaagtggtaattagcttctctaagcagctgctgtcraccttggaggcttcagattccattggtatgaactcttctgttgcctttyctcagcagtctgggatgagatttgctagtggggtggcagaacagggcagtttaaatgatggatgagagagtttcctccccgttggtccttgtcagtgctcatcagccctgcagcaaagctgtgtcactgtgctgagaaacacatgttgtctatagacttccctgacttcttccttaaagcgagcccccctcctcacacctgcactgccagctttcactgctcagctccagcgcagcctgtgcctctgctgcccccatggctctcactgccagtgaccagtcatctcctggaaaactggaa

SEQ ID NO: 50301 - DNA, 600 bp, Chicken  19866894297164_4
ttgtcagtgctcatcagccctgcagcaaagctgtgtcactgtgctgagaaacacatgttgtctatagacttccctgacttcttccttaaagcgagcccccctcctcacacctgcactgccagctttcactgctcagctccagcgcagcctgtgcctctgctgcccccatggctctcactgccagtgaccagtcatctcctggaaaactggaacagttgaggtgtctctgctggtcgcttttggagctcctatggggctcttcagctagttaaagtatcccctcaaagtttgagcagacaygttctggtgagttatcatagcaggcttcagcctcagcagacctttcatgcaccgttcccatttctgttccctcctgcccccactacttggcctgcagtgacaggaaagcatgaaggatgtgtgggcatgcagagtgtggcagggaggcacccaccctgagtgctctgttagcactgtcctctcaagctgtgggtgtggtagggagtcatggggcagcttgccatgaatgcacgatggctgttggagacaacagtactggaaacactgaagtcctactttgctgctgtatgcagggccggt

SEQ ID NO: 50302 - DNA, 600 bp, Chicken  19866894297183_1
ttggcttaattataagaagaaaaacatttctgtgaccagccacaatcccaaagaagtgctgtgtatcctactacagctactgcatgtttcttatgggcctctaagtcacagttaatcacacttcagcctcacaagggtttccactaaactgatggacagcaagcacaaagccttagaaaactaatgccattgctgactaggatctcattcacacaggtaaaaagggtgacaataaacaaatgtatattctatatttttatataatctatattctgaatgtgctttatctgccatctccckttaccacccctaaaagaagacagcacagtaattgaagccacggccacagccttcaaatgccaaaggagggagatagaagagtagaaaacatgactttttaagcaacctcctgttactaatctaaaatgttagagctggttcctactgcttttaaaccctccagtaacttacagacacagtgccttgtacttgccgtttgcagtcccattaagagaaagcaaattggtacatacgaaccttctgatattcagttgtccttgatattcagtaccattaaacccagtgctctctgaaaagccg

SEQ ID NO: 50303 - DNA, 599 bp, Chicken  19866894297193_1
  misc_feature (1)..(260): n is any nucleotide
nnnnnnnnnnnnnnnnnnnnnnnnnnnnnnnnnnnnnnnnnnnnnnnnnnnnnnnnnnnnnnnnnnnnnnnnnnnnnnnnnnnnnnnnnnnnnnnnnnnnnnnnnnnnnnnnnnnnnnnnnnnnnnnnnnnnnnnnnnnnnnnnnnnnnnnnnnnnnnnnnnnnnnnnnnnnnnnnnnnnnnnnnnnnnnnnnnnnnnnnnnnnnnnnnnnnnnnnnnnnnnnnnnnnnnnnnnnnnnnnnnnnnnnnnnnnnnnnnnnntaaggtaggaaagctcccgtttaatgcaacgttgattcarttcttcagttcttgcttctagctggcttacacttctttctaaaacatctcaaagactacagtgcatcatttggccaataggaatcccatggcagcctgaaattgttactaatgcagtcccattacctggagtaggagtgctcgtgatttttctctccatgaaattcttccttgctagtggaatatggctagaaaaaaaaattgtggacttgaattgtaatttaactgacaaaatagaaaattgtgcaagtatattaggaagatgaaggtcattgctggataggtattagtacctgggta

SEQ ID NO: 50304 - DNA, 600 bp, Chicken  19866894297196_1
tgtgaaaataccacacaaagatgtacaatagtctttaaaaaaccaagaatgtaatcactgtgcttttacatacaaaagctttgctttgtaaaaagtttctttacgttgacagagttgaagtagacatttaataactactgaaataaacctcaacttcctaagaataaagtcaactctctttccatttcaaaactgagaatttcacgccaagcttgagcagcttgagccaaaccaggaaaatagatttatcctcaatcttgaggacaggtcaaaaagttatactgcaataaagatactgtrtcaatcaatacatagaataatcaagtattctgaaggtgtttgatgtttgaaacaagagcaccacatcccaaagactttaaaagtacacataatgttaatactgtgcagttcagccaatgataacaaagccaggtatgaattattgctaaaccctacatgtacttggttaaaaaaacagtaagtcaagatacagcaagtctgtcacttccacactcattggaactgtactcccccacttcacctttggtacaagttttatctgaacattctctagatcaccacttcattttttctctaaga

SEQ ID NO: 50305 - DNA, 600 bp, Chicken  19866894297197_1
gcagtctgagaaaggcttctgcagtttcagtggaatcattcatttgtttctttctaaatctctgggtaatatcctaggcatttgtgggcttggttttgtaccaagtagaactcgcccttttcattcaggcattttaaagaaaacggaattatttttcccttagtaacacagaagggtgatatcacttccctgcacagtctctaattcagctaagtgaaaggaagatccctcaccagtggtgaagaatcagaggatacactcaaatttccacagcctccgcagctttacactataatctgycctaytgaaatcacttttctaaggatgcaacatcagccacctgtctgatttggcagyccaagcctttgtcacatacacagtccgcaccacttttctcagaacccagccttctgagcttcagacatacgcagacattgagtaagttatttgttctcaaatccgcaagagtcaacatcattaaaatgaaggttttccctttcttctgcttagtaattacagttctgcacttggttctgcaccrtggtacaaattcatactatacacatcttgagagttgctgctgaaagtggattcttatct

SEQ ID NO: 50306 - DNA, 600 bp, Chicken  19866894297197_2
ctgagaaaggcttctgcagtttcagtggaatcattcatttgtttctttctaaatctctgggtaatatcctaggcatttgtgggcttggttttgtaccaagtagaactcgcccttttcattcaggcattttaaagaaaacggaattatttttcccttagtaacacagaagggtgatatcacttccctgcacagtctctaattcagctaagtgaaaggaagatccctcaccagtggtgaagaatcagaggatacactcaaatttccacagcctccgcagctttacactataatctgycctaytgaaatcacttttctaaggatgcaacatcagccacctgtctgatttggcagyccaagcctttgtcacatacacagtccgcaccacttttctcagaacccagccttctgagcttcagacatacgcagacattgagtaagttatttgttctcaaatccgcaagagtcaacatcattaaaatgaaggttttccctttcttctgcttagtaattacagttctgcacttggttctgcaccrtggtacaaattcatactatacacatcttgagagttgctgctgaaagtggattcttatctctgat

SEQ ID NO: 50307 - DNA, 600 bp, Chicken  19866894297197_3
atctctgggtaatatcctaggcatttgtgggcttggttttgtaccaagtagaactcgcccttttcattcaggcattttaaagaaaacggaattatttttcccttagtaacacagaagggtgatatcacttccctgcacagtctctaattcagctaagtgaaaggaagatccctcaccagtggtgaagaatcagaggatacactcaaatttccacagcctccgcagctttacactataatctgycctaytgaaatcacttttctaaggatgcaacatcagccacctgtctgatttggcagyccaagcctttgtcacatacacagtccgcaccacttttctcagaacccagccttctgagcttcagacatacgcagacattgagtaagttatttgttctcaaatccgcaagagtcaacatcattaaaatgaaggttttccctttcttctgcttagtaattacagttctgcacttggttctgcaccrtggtacaaattcatactatacacatcttgagagttgctgctgaaagtggattcttatctctgatctataagtggagacagctctgtaaaagtaaaaaagtaatttagatacaaaga

SEQ ID NO: 50308 - DNA, 600 bp, Chicken  19866894297197_4
aagaatcagaggatacactcaaatttccacagcctccgcagctttacactataatctgycctaytgaaatcacttttctaaggatgcaacatcagccacctgtctgatttggcagyccaagcctttgtcacatacacagtccgcaccacttttctcagaacccagccttctgagcttcagacatacgcagacattgagtaagttatttgttctcaaatccgcaagagtcaacatcattaaaatgaaggttttccctttcttctgcttagtaattacagttctgcacttggttctgcaccrtggtacaaattcatactatacacatcttgagagttgctgctgaaagtggattcttatctctgatctataagtggagacagctctgtaaaagtaaaaaagtaatttagatacaaagaggactagatattcttcatcaggaatctcttcctccccattgatgacactgactacgtacctgactaaggcgcttcagatacgggaggttgatgcaagttgcctatttacatacttaaaagttccatttcttcacattaattaaaaaatacgctagactaaaatgcctgtatttaatatttttca

SEQ ID NO: 50309 - DNA, 600 bp, Chicken  19866894297198_1
gccttttgctgagtcatatgtggaatcaacagttgaattagtttcttggcctgtactgtacgcgtgactaaacgcttaatctttgaagcagtgttttagatggaagagtaaaatgaagccttccttacaggaaaggagcatggaggaggggaaaaaacaagggagaggtgtgctttgcaataagcaaagcctgtttgaattgtagaatcacaggatgatttgtgttggaatggaccttaaagctcatctagttcgaaacccttgctgtgagcaggaacatcttacagcagaccaggttayccaaagcttcgcccagcctggccttgagtacttccacaacatttctggcagcccgttccagtgtctcaccacccttgtaatgaagaatttcttcctaatasctaatctgaatctcttcacttatggttaaaaaccattcccacttgtcctatmactatamacttgacaaacagtcttgtcccagctttcctgtatcccccttagatactggaaggcctccatcaggtctctctgtatccttttattcaggctaaacaagcccagttgcctcaacttgttctcatagagaggtgttccagc

SEQ ID NO: 50310 - DNA, 600 bp, Chicken  19866894297198_2
ggaagagtaaaatgaagccttccttacaggaaaggagcatggaggaggggaaaaaacaagggagaggtgtgctttgcaataagcaaagcctgtttgaattgtagaatcacaggatgatttgtgttggaatggaccttaaagctcatctagttcgaaacccttgctgtgagcaggaacatcttacagcagaccaggttayccaaagcttcgcccagcctggccttgagtacttccacaacatttctggcagcccgttccagtgtctcaccacccttgtaatgaagaatttcttcctaatasctaatctgaatctcttcacttatggttaaaaaccattcccacttgtcctatmactatamacttgacaaacagtcttgtcccagctttcctgtatcccccttagatactggaaggcctccatcaggtctctctgtatccttttattcaggctaaacaagcccagttgcctcaacttgttctcatagagaggtgttccagccctctgaacattctcatggcctcttttggacccattccagcagctccttgtctttcttgtgctggggacyccagagctgaatgcagatggtggcttcaagg

SEQ ID NO: 50311 - DNA, 600 bp, Chicken  19866894297198_3
aaaacaagggagaggtgtgctttgcaataagcaaagcctgtttgaattgtagaatcacaggatgatttgtgttggaatggaccttaaagctcatctagttcgaaacccttgctgtgagcaggaacatcttacagcagaccaggttayccaaagcttcgcccagcctggccttgagtacttccacaacatttctggcagcccgttccagtgtctcaccacccttgtaatgaagaatttcttcctaatasctaatctgaatctcttcacttatggttaaaaaccattcccacttgtcctatmactatamacttgacaaacagtcttgtcccagctttcctgtatcccccttagatactggaaggcctccatcaggtctctctgtatccttttattcaggctaaacaagcccagttgcctcaacttgttctcatagagaggtgttccagccctctgaacattctcatggcctcttttggacccattccagcagctccttgtctttcttgtgctggggacyccagagctgaatgcagatggtggcttcaaggtggcagagcagagggacaatcaactcccagacctgcaggctattcttctgat

SEQ ID NO: 50312 - DNA, 600 bp, Chicken  19866894297198_4
gggagaggtgtgctttgcaataagcaaagcctgtttgaattgtagaatcacaggatgatttgtgttggaatggaccttaaagctcatctagttcgaaacccttgctgtgagcaggaacatcttacagcagaccaggttayccaaagcttcgcccagcctggccttgagtacttccacaacatttctggcagcccgttccagtgtctcaccacccttgtaatgaagaatttcttcctaatasctaatctgaatctcttcacttatggttaaaaaccattcccacttgtcctatmactatamacttgacaaacagtcttgtcccagctttcctgtatcccccttagatactggaaggcctccatcaggtctctctgtatccttttattcaggctaaacaagcccagttgcctcaacttgttctcatagagaggtgttccagccctctgaacattctcatggcctcttttggacccattccagcagctccttgtctttcttgtgctggggacyccagagctgaatgcagatggtggcttcaaggtggcagagcagagggacaatcaactcccagacctgcaggctattcttctgatgaagtcc

SEQ ID NO: 50313 - DNA, 600 bp, Chicken  19866894297198_5
acccttgtaatgaagaatttcttcctaatasctaatctgaatctcttcacttatggttaaaaaccattcccacttgtcctatmactatamacttgacaaacagtcttgtcccagctttcctgtatcccccttagatactggaaggcctccatcaggtctctctgtatccttttattcaggctaaacaagcccagttgcctcaacttgttctcatagagaggtgttccagccctctgaacattctcatggcctcttttggacccattccagcagctccttgtctttcttgtgctggggacyccagagctgaatgcagatggtggcttcaaggtggcagagcagagggacaatcaactcccagacctgcaggctattcttctgatgaagtccaggatacagttagccttctgggctgcaagcatacattgccagcttgtgttgagcttctcactgagcaacattctcaaatctttctccttgtggctgctctctgttcactcattgtccagcctgtatttgtgcttgagattgccctgatccaggtgcgtctccttgcacttggccttgttgaactgaacgaggtttgcacaaacmcacctc

SEQ ID NO: 50314 - DNA, 600 bp, Chicken  19866894297198_6
gggacyccagagctgaatgcagatggtggcttcaaggtggcagagcagagggacaatcaactcccagacctgcaggctattcttctgatgaagtccaggatacagttagccttctgggctgcaagcatacattgccagcttgtgttgagcttctcactgagcaacattctcaaatctttctccttgtggctgctctctgttcactcattgtccagcctgtatttgtgcttgagattgccctgatccaggtgcgtctccttgcacttggccttgttgaactgaacgaggtttgcacaaacmcacctctccttcatgttgaccacactcctcaagtgagagagcaggagctgtgcagcctggagaagtgagaaggctctggtgagacctgwgagcagcctttcagtatcggaaggggagctacaagaaagaaggggacagaatctttggcacagtctgttgtgataggactagggaaaatggtttcaaaccagaaaggggaacgtttagattgaatatgaggaaaaagttttttatggtagttgtagtgaggcactggaatgtgttacccaaagaaatggtggatgccttgtccctggaaat

SEQ ID NO: 50315 - DNA, 600 bp, Chicken  19866894297198_7
gaagtccaggatacagttagccttctgggctgcaagcatacattgccagcttgtgttgagcttctcactgagcaacattctcaaatctttctccttgtggctgctctctgttcactcattgtccagcctgtatttgtgcttgagattgccctgatccaggtgcgtctccttgcacttggccttgttgaactgaacgaggtttgcacaaacmcacctctccttcatgttgaccacactcctcaagtgagagagcaggagctgtgcagcctggagaagtgagaaggctctggtgagacctgwgagcagcctttcagtatcggaaggggagctacaagaaagaaggggacagaatctttggcacagtctgttgtgataggactagggaaaatggtttcaaaccagaaaggggaacgtttagattgaatatgaggaaaaagttttttatggtagttgtagtgaggcactggaatgtgttacccaaagaaatggtggatgccttgtccctggaaatgttcaaggtcatgctggatagggctcagagcaacctcatgtagctgtaggtgtccctgttcattgcagatgacctttaaaagtccgttc

SEQ ID NO: 50316 - DNA, 599 bp, Chicken  19866894297212_1
  misc_feature (1)..(33): n is any nucleotide
nnnnnnnnnnnnnnnnnnnnnnnnnnnnnnnnnaatttgatctagctaatcaaatctagattgtagattttagaaatcaaactactaaagctttcagcacaggatggaatttgcaaaatggtatctcaaaacattactgttatgttttcttgttgcccttttaagtatcctcaagagacacttgggtaacctatgaagagctatcaaaagactgttttattccccacaattttgtacttacaactttgacttcaaacacatgtgggttcaagcctttaaagctgaaataattaagagaartcaaagatcagaatcaaaggactgttatctaagacagtgtcttcagttagctggcatgcagtaaacaatgtacaatgccccaatacttacaataggaaaacatttgttatgagtactctctctggcatttaactggtaattaacaacattattattagtccattttatctgtttgatcatttcttcagaatcatcacataacctctactgggacttgctaggctgattgcaagaccgtaaccagagagtagtggtaagtcactgtctgaattgagatcagtgctattcctcagacatca

SEQ ID NO: 50317 - DNA, 600 bp, Chicken  19866894297221_1
ttcttctccaggtgccgctgcagaatgtgttatcagtaaggaaaggtttttggaggctatacaaagacacacaatgcagatacaaattttttttaaaaaaatatcaggcagatcgcatgagccagcatccacctccatttggaaggcctgctgggagctgcccctccctaccacaagtccaatgcagttggagggggcgtactaaaaagttaacttgaaagatctcagcagaactttgtgtctcagaaatgggcagcagaaaaacacacctgaagttcaactgagcaggaagttcaaacyragcakgaaatttggtcgatgtgcattacacacaaacagtgcaaaacacacttccccaggtaggagttttccatagcagcgctccaaaaccttgcattaaacctcagatgttgtgcctggctttacagaattgcccagagaggcagacaccaacagcactactaagtatcaagaaagtgctgggcttgttacaggagctttatgagagccaaggatcaaatattttttcacagttttatgtggatagtttcatgaaaattgatcaggtctaaaaagtcacagtccaaatgaagctaaggt

SEQ ID NO: 50318 - DNA, 600 bp, Chicken  19866894297221_2
tcttctccaggtgccgctgcagaatgtgttatcagtaaggaaaggtttttggaggctatacaaagacacacaatgcagatacaaattttttttaaaaaaatatcaggcagatcgcatgagccagcatccacctccatttggaaggcctgctgggagctgcccctccctaccacaagtccaatgcagttggagggggcgtactaaaaagttaacttgaaagatctcagcagaactttgtgtctcagaaatgggcagcagaaaaacacacctgaagttcaactgagcaggaagttcaaacyragcakgaaatttggtcgatgtgcattacacacaaacagtgcaaaacacacttccccaggtaggagttttccatagcagcgctccaaaaccttgcattaaacctcagatgttgtgcctggctttacagaattgcccagagaggcagacaccaacagcactactaagtatcaagaaagtgctgggcttgttacaggagctttatgagagccaaggatcaaatattttttcacagttttatgtggatagtttcatgaaaattgatcaggtctaaaaagtcacagtccaaatgaagctaaggtt

SEQ ID NO: 50319 - DNA, 600 bp, Chicken  19866894297221_3
tccaggtgccgctgcagaatgtgttatcagtaaggaaaggtttttggaggctatacaaagacacacaatgcagatacaaattttttttaaaaaaatatcaggcagatcgcatgagccagcatccacctccatttggaaggcctgctgggagctgcccctccctaccacaagtccaatgcagttggagggggcgtactaaaaagttaacttgaaagatctcagcagaactttgtgtctcagaaatgggcagcagaaaaacacacctgaagttcaactgagcaggaagttcaaacyragcakgaaatttggtcgatgtgcattacacacaaacagtgcaaaacacacttccccaggtaggagttttccatagcagcgctccaaaaccttgcattaaacctcagatgttgtgcctggctttacagaattgcccagagaggcagacaccaacagcactactaagtatcaagaaagtgctgggcttgttacaggagctttatgagagccaaggatcaaatattttttcacagttttatgtggatagtttcatgaaaattgatcaggtctaaaaagtcacagtccaaatgaagctaaggttaaaga

SEQ ID NO: 50320 - DNA, 405 bp, Chicken  19866894297222_1
ttctgtcttgacaaaagaatatgctttttagtgttttctttaaactaaactaaactgtctccaacattttttcactattttgttggtttgcatcgtttcacatgatgtctcaaatatctgctttgtaacacaatactttcatggtaccgtaaaaatcttagcgggaaaaaataacactacaattatctgcaaaattccagaatatcaagctcattatgggtacatctacattactggtttaacttgcatggatgtgcctttggagcagattactcaatcttccccactcatcgagcattsgtgaatgtggactgccctgtaagtgctcgaactggtttattcctggttataaccagaagggaaagtgtgtttgggagaggtctttacacagtgccaggtgctggg

SEQ ID NO: 50321 - DNA, 600 bp, Chicken  19866894297225_1
tcccctttgttgcagatacaccgttgttaatgaaatcaacaaggcaaacctgggagaagcctctgtttttgtctactttattatgaagctttcacgggtggaaggaggaacatcatacgtgggcttccatggaggtgggtttggccatctgtctttccttgcgctccagctggcttcagagcaacgcttctccaattttcctttcattctaatgctgaagacctggaatcagcacgtcctgcagctcgtctgaactgctccctttatccctttatgggactggctttccccaggatgtgmcattaccgtcactgtttgtgtctgtaggtctgtggcagtcggtgcacatagacgacctccgcagatccaaggatatgatctctgatatgtctgtgctgcagaacctcaccatcagccagatgctctgtgacgattcaggtaaagycagaggtgagctgtgtgtgagctgtgccagacagtggtatcagatgctagaggggggaaaatgaggagatgcctccccagacttggtgctgggagatcctatgctgagtgcaatgtacttatttccactgctaagcacctcatgtagggagcacc

SEQ ID NO: 50322 - DNA, 600 bp, Chicken  19866894297225_2
catctgtctttccttgcgctccagctggcttcagagcaacgcttctccaattttcctttcattctaatgctgaagacctggaatcagcacgtcctgcagctcgtctgaactgctccctttatccctttatgggactggctttccccaggatgtgmcattaccgtcactgtttgtgtctgtaggtctgtggcagtcggtgcacatagacgacctccgcagatccaaggatatgatctctgatatgtctgtgctgcagaacctcaccatcagccagatgctctgtgacgattcaggtaaagycagaggtgagctgtgtgtgagctgtgccagacagtggtatcagatgctagaggggggaaaatgaggagatgcctccccagacttggtgctgggagatcctatgctgagtgcaatgtacttatttccactgctaagcacctcatgtagggagcaccacatgactgtcaactttgcctttctgtttagtttgtttctgcgatgttttggtcatcaataagttaactttgtcattttccccaacaaaaatgcagtatttgcactgcttgatgagctctacctcagcacaggaggaagcgggtg

SEQ ID NO: 50323 - DNA, 600 bp, Chicken  19866894297239_1
gcacatactgctaagctcagaagcactgtattgcaggtgcagagcaatattcctactgacttctcactgttgatttggatccacgtattctggagccatagctgacgtgttcagactgatataaattctccacacagaaattctgtctttcttccacattccacagtgtcaggctttggaaacaatgccacatttcttctctcacaaagtgcttaatgcttgattttacaactattataaggtcaatcaaagacgaatattacaaagcacctctgatcttacaattcaagcaacagtacrtacctgccctctataaagcatcttgttactggtatcaccataggaaaataaaaacatattgataaaatgtattaaaaggcttggggcttcctttgatgtgtgagcatcataggctgtccatttgtagaaaatgagaataacaaggtatccaaacagtgaggacatgaaaatcatctctggaataaacccaaggtatatgttcagtggcttcttaaaatatctacaggaaaataaaaagaggaaagtttaaaattacatttagtttgcattagtcttatgtagggcaaaaactttaaaaga

SEQ ID NO: 50324 - DNA, 600 bp, Chicken  19866894297239_2
aaaggagtacagagggctgttatcttgacagaaaaattgtttatacatttcaatgagaaattacacataagttctgactttctgccacctcatctttgatgtggaacacatgcaaatttttctatcaaatcctaaaagcatgggggtagcattattgaaagaggtagatacaaaatgactgttacccagaagttatatttccaagactgaatggaaagagagaactggctttctccaaactaggagaaaaagtaacttcatgaagtgatttctaagtctcatagcagatatgattaaaaygcaggttggaaagggtgaggaagaaatctttcatggtcccaagaataggtctttctatcctgcacctactgcctctgtggaactagattcattttcatcattcacaactatttcaaacacgttttgctaggatgtggaaaactttcacagtgaactggacagatccttttgtgtttacacacaggatgtccttaaaggacagcagaggaaggaagagttcttaccgggtcaatgccaaagggatagggtccaccaaacactcctgcttcagcagggtccagctgaagcagaggagtagtc

SEQ ID NO: 50325 - DNA, 599 bp, Chicken  19866894297245_1
  misc_feature (1)..(23): n is any nucleotide
nnnnnnnnnnnnnnnnnnnnnnnagctgatccatgtgaactgagcagtgctgcattttacgttataacaactcattcctgcaatttttgccagatgattgcaagcattctttaagtctctcttcaaacgttaactgctctttccaaattttgtatagcactcagaagctaaggctgctgtatggctagtgttggcaagaaagagaagtaagcagcctgttttcttttgttctttctcctgatagttacagggatgaaaccacctgagtgatgatgaagtccacagagctacggagacacrtgataagaaccagattttcaggtctcctgtgtaaatgatatacctcagcctcaataatgtaatctgtacttctatttaatcatgtatttgagaagaatgatacttaattgctagcgtatgtcataattgtgcaaagaaagagcacctacctattcagataatattaactaatatgcagattaagtagctgagataaaagtcttaattggttgacactgttccctaatatattttgctttgcagacatcagaatggagtgtattgaccacttcatcctgctttgcaacagctgttggagg

SEQ ID NO: 50326 - DNA, 599 bp, Chicken  19866894297247_1
  misc_feature (1)..(57): n is any nucleotide
nnnnnnnnnnnnnnnnnnnnnnnnnnnnnnnnnnnnnnnnnnnnnnnnnnnnnnnnncataaaagcagcagacaatggcagaaacgtcaccatctggctacagatgctaaggttgcacagagtagggagtgtgctttctacccttgtctaggaggcatcttaacactgttgtcctttgtctcctgagttataggtaaggtagatagagatctatactttactgatccaaaggcaacatagtaacagcaaggtcaaagctgaaagacacagtaaggtgcaaaatctataggaggggattgygcttcttcctaaacgttccaaggttaagaataggcaagcctgtagggacgccacccagcttatatgtccaaagtagaagaatcatatttcaaagacaccatggaacaaagagtgtttatagagtggtcatttctgagcaaaaaagttttatgaagtgttctgtaaagattctactactacacactcttcattattttcctctgttcctcgtactgtgtagtcttcacatctccagaacctgtcgctgtttcttccttgcaatagcagcttttgctatgtgcctttctttcccctctcat

SEQ ID NO: 50327 - DNA, 600 bp, Chicken  19866894297248_1
taggcaaaaacacatcatgagctcaacctgaccacttcagtgaaagacaataacatttttattaatatattaacaggaagaggaaggctaaggcaaatcgtcatcctttcctgtatgcaatgggaaacattgtcactgaggataagggaaagactgaggttctcaatgccttcttcaaatgtctttagtaatcagaccagtcatcattggggaactctatgccttgacctggaagtctgggatggagagcataataaagttcccatgattcaggtgctgggtaaagaactgtttagagargtaggcccagagggtggcagtgaatagagttaaatccagctagcaactgggtatgagtggtgctccccagyggctgatactgggacccrtcctgtttaatatctttattgatgactggaggagggcaytgagtgcacccacaggaagtctgcaaatgacaccaagttggagggtagtgcctgagagaaggaaggccctacagagggatctcgacatggattgatgggctgaggccaatgggatgaaattcaacaagaccaagtgctgggttctgtgttttggcctcaacaaccccaggca

SEQ ID NO: 50328 - DNA, 600 bp, Chicken  19866894297248_2
aacaggaagaggaaggctaaggcaaatcgtcatcctttcctgtatgcaatgggaaacattgtcactgaggataagggaaagactgaggttctcaatgccttcttcaaatgtctttagtaatcagaccagtcatcattggggaactctatgccttgacctggaagtctgggatggagagcataataaagttcccatgattcaggtgctgggtaaagaactgtttagagargtaggcccagagggtggcagtgaatagagttaaatccagctagcaactgggtatgagtggtgctccccagyggctgatactgggacccrtcctgtttaatatctttattgatgactggaggagggcaytgagtgcacccacaggaagtctgcaaatgacaccaagttggagggtagtgcctgagagaaggaaggccctacagagggatctcgacatggattgatgggctgaggccaatgggatgaaattcaacaagaccaagtgctgggttctgtgttttggcctcaacaaccccaggcaatgctataggcttggaacagagtggctggaagactgtgtggaagaaatggatctgcagctgtgctttgctg

SEQ ID NO: 50329 - DNA, 600 bp, Chicken  19866894297248_3
aaggcaaatcgtcatcctttcctgtatgcaatgggaaacattgtcactgaggataagggaaagactgaggttctcaatgccttcttcaaatgtctttagtaatcagaccagtcatcattggggaactctatgccttgacctggaagtctgggatggagagcataataaagttcccatgattcaggtgctgggtaaagaactgtttagagargtaggcccagagggtggcagtgaatagagttaaatccagctagcaactgggtatgagtggtgctccccagyggctgatactgggacccrtcctgtttaatatctttattgatgactggaggagggcaytgagtgcacccacaggaagtctgcaaatgacaccaagttggagggtagtgcctgagagaaggaaggccctacagagggatctcgacatggattgatgggctgaggccaatgggatgaaattcaacaagaccaagtgctgggttctgtgttttggcctcaacaaccccaggcaatgctataggcttggaacagagtggctggaagactgtgtggaagaaatggatctgcagctgtgctttgctgcagctttgattgatgctt

SEQ ID NO: 50330 - DNA, 600 bp, Chicken  19866894297248_4
attgtcactgaggataagggaaagactgaggttctcaatgccttcttcaaatgtctttagtaatcagaccagtcatcattggggaactctatgccttgacctggaagtctgggatggagagcataataaagttcccatgattcaggtgctgggtaaagaactgtttagagargtaggcccagagggtggcagtgaatagagttaaatccagctagcaactgggtatgagtggtgctccccagyggctgatactgggacccrtcctgtttaatatctttattgatgactggaggagggcaytgagtgcacccacaggaagtctgcaaatgacaccaagttggagggtagtgcctgagagaaggaaggccctacagagggatctcgacatggattgatgggctgaggccaatgggatgaaattcaacaagaccaagtgctgggttctgtgttttggcctcaacaaccccaggcaatgctataggcttggaacagagtggctggaagactgtgtggaagaaatggatctgcagctgtgctttgctgcagctttgattgatgcttagctgrctgtgagccagcagtgtgcccagatggccaaga

SEQ ID NO: 50331 - DNA, 568 bp, Chicken  19866894297248_5
ttaatatctttattgatgactggaggagggcaytgagtgcacccacaggaagtctgcaaatgacaccaagttggagggtagtgcctgagagaaggaaggccctacagagggatctcgacatggattgatgggctgaggccaatgggatgaaattcaacaagaccaagtgctgggttctgtgttttggcctcaacaaccccaggcaatgctataggcttggaacagagtggctggaagactgtgtggaagaaatggatctgcagctgtgctttgctgcagctttgattgatgcttagctgrctgtgagccagcagtgtgcccagatggccaagaaggccaatggcatcctgacttgtatgagaaatatagtgtagctagaagattcagtgaggtgatcatccccctgtactcagccctggtgaggcgggacctctagtaatgtgtacagatttgggcccctcactacaagaaagccctggagcatgttcagaaaaggaaaacaaagctaatgaaggatctggaacatgagtcttatgaggagcaactgaggggactggaattgttcagt

SEQ ID NO: 50332 - DNA, 599 bp, Chicken  19866894297255_1
  misc_feature (1)..(73): n is any nucleotide
nnnnnnnnnnnnnnnnnnnnnnnnnnnnnnnnnnnnnnnnnnnnnnnnnnnnnnnnnnnnnnnnnnnnnnnnntacagatggaaactcaccgctttatatcaaataactctattaaatgcacatgcaaatacaacctatatcaaggctatttccaggattcctgcgagtctgacacttggtaccccactagccttcattctagcagacttgagagaatcactaagtaaagcttttaacctgctttagacaaaagccagcacagaacaatagtcactgcatctcagcactaagtggaaatrtaagtatgctggaaggtttgaatctggtggttactaagtgctttggtaggaagccagcatttacccaccttacaccactgcaaggtattaaattacttgaagtagcaactccacatatttcactaattacattttcatctgtaccatacrcaatagctcaactctttgcaaccagcagagaaaactgaytgggctttaggaaactacacattcactggcatcagagagagacctttctgacacaatttttttttcatacagctcaggggtctcaaatgctcaccccctgccccctacac

SEQ ID NO: 50333 - DNA, 600 bp, Chicken  19866894297255_2
ttccaggattcctgcgagtctgacacttggtaccccactagccttcattctagcagacttgagagaatcactaagtaaagcttttaacctgctttagacaaaagccagcacagaacaatagtcactgcatctcagcactaagtggaaatrtaagtatgctggaaggtttgaatctggtggttactaagtgctttggtaggaagccagcatttacccaccttacaccactgcaaggtattaaattacttgaagtagcaactccacatatttcactaattacattttcatctgtaccatacrcaatagctcaactctttgcaaccagcagagaaaactgaytgggctttaggaaactacacattcactggcatcagagagagacctttctgacacaatttttttttcatacagctcaggggtctcaaatgctcaccccctgccccctacacccagaaaacagacccaaacaaaaaaacagcttgcacattgggctccttgggcttgagagaggcttaactagctttgcttctattgcgcactagtaacactgagtgcaagaaaagctttccacagagaatgagctggaaacctccaatgttg

SEQ ID NO: 50334 - DNA, 600 bp, Chicken  19866894297255_3
agccttcattctagcagacttgagagaatcactaagtaaagcttttaacctgctttagacaaaagccagcacagaacaatagtcactgcatctcagcactaagtggaaatrtaagtatgctggaaggtttgaatctggtggttactaagtgctttggtaggaagccagcatttacccaccttacaccactgcaaggtattaaattacttgaagtagcaactccacatatttcactaattacattttcatctgtaccatacrcaatagctcaactctttgcaaccagcagagaaaactgaytgggctttaggaaactacacattcactggcatcagagagagacctttctgacacaatttttttttcatacagctcaggggtctcaaatgctcaccccctgccccctacacccagaaaacagacccaaacaaaaaaacagcttgcacattgggctccttgggcttgagagaggcttaactagctttgcttctattgcgcactagtaacactgagtgcaagaaaagctttccacagagaatgagctggaaacctccaatgttgactcccctctcccacaacaaacaaaaaaaacaaccaccc

SEQ ID NO: 50335 - DNA, 600 bp, Chicken  19866894297268_1
ctaatagtcaaaataccaaacaaatgagagatctactgccacagcaacacttcccagactagaagcatatggatgaaggaagttttgaaacatgagactacaagattcacaggtctagataataaacaaatgaaatgagtataagcctacccttgataaaaaggacagaccaggtctcctagttctcttccaaaatgtttcttggttttatccattgtgtaagtaatttaaaagacataaactttcttaagtttaagaaaatgcacccaaaaaaagagctaaacatagaaatactctcawagaattagatcataaagaaagaaatacaggttactgttctaaatatgtatccactgagaattcaaaataccttcttctatgaagaagcaaacaatagtgtacatattttgctgggaaagattacttgatgaagtaaaacaaaatcaaaaaacaaaagatgggtaatattaagaccaatattatttttcagaaactttatatataaaaaaaaaaattgaaaatgacagtaataaaaatttgcaaaaaaattttgagaaattctatacagaaaccgctattcagctactataaatactcact

SEQ ID NO: 50336 - DNA, 600 bp, Chicken  19866894297268_2
accttcttctatgaagaagcaaacaatagtgtacatattttgctgggaaagattacttgatgaagtaaaacaaaatcaaaaaacaaaagatgggtaatattaagaccaatattatttttcagaaactttatatataaaaaaaaaaattgaaaatgacagtaataaaaatttgcaaaaaaattttgagaaattctatacagaaaccgctattcagctactataaatactcactgcaatacatcatttcaagttgaaagctgaagaataaaggaatgcaaatatctttcaaattctctgaawttattcctgtatcttcaacttaataaataaattcataaacattttatgcataagttatgctttattggacaaaaagaaaatatacctgcctgaaaatgtaagacacactactagcacagcagtgacagaagggattatctcaaaggggtgcaaagtgaccaacttgaaacagctgtctggggagcagaataggctagtacacattcagatgaaaagtagaaaacatcagagacaggaaatttcaacagcaaaaccgtgccttccaaggtatactagaactctcagctgtgctatatgctc

SEQ ID NO: 50337 - DNA, 600 bp, Chicken  19866894297272_1
gtcccttccaacccaaaccattccatgattccatgattatatatattaaagaaaaatctttgatttagtggaaaaataaagaacagggtttagtatttggtggtggaagtgaggcagtgccatctacagtgcaggtgttctgtccatcacaatcagcaccttggcttggggatgcagtcattggttcttttccctggagtgtgagtcggaccccacaaaacagtgcacagagacgttcctgggtacgatgtgtgtcatctgtggttgcctctgacttgcaaacaagctctgaaaagcaayggtttggtatcctgcctgttccctggaactgttctatgactctggaaagtatccacaggattcataaaccctgatgcactggaccccatcagtggtaagctgttgccattacaaaacagggcctgaagaggactgaatttgcaggctatcgtaagtactggataaagagtccaggtatgtgacagcatattgaattaagactgcgaattcatctaatgctgcagtataaagcagcaatggacttcaatggaagagagacatgtaagagggaacttcatctcaactaacaataaacatttc

SEQ ID NO: 50338 - DNA, 600 bp, Chicken  19866894297275_1
cagccagcctgcctttgatgctgcctgaggaacctgaaaggggagaaagtcctgaagctaccaacacagagaaagaaaatgaaccatggctgatctcatccatcatcccttgcttggtctgggtttggttctgctgttccctttttccttgttgctcttttctgtgatcagtcttgttcaccacaagctctccttctgttttccccacttttccattccttagtcatcctgctcttcctattttttttttaattatttccctctctccaaagtagtctgttctactttgtcaaaatcctsgcagacttaacagcaagctccttaccttgcactttaaatcataaacacctaaattagaagttcagctattttactgtttcgctttcatcatactcgccacaagctaagctaatttaaattgttggtctctgaagaggccctgagggctcttccagagaaggatctcatgctattgccttccaaaggagctactgacgtagaggaacttgaggattggccttacgagacaaggcccagagtttccagatacaccgccccttgtcagtttgccctttagtctaattgtgactgggccttagc

SEQ ID NO: 50339 - DNA, 599 bp, Chicken  19866894297281_1
  misc_feature (1)..(16): n is any nucleotide
nnnnnnnnnnnnnnnnatggcagcagggccgaggaatcccattacctgctccctgctgatgcccacaggctcctcaaacacggtccagatgacggcctcgctgcagtcaggggtggtcagggagccctggtagcggtagtaccgggacagctgtgcaacgtgcggcagcagcgtgccaaggcggaaggtggaggccaggtccactgcctgccctgcacagcaggacgtgggcactcagccccgctgcccctggcacgccccagggtctctcccctcccagccgtgccccattgcagagcrccagggcacctcaccagcatgggagatgttcctcagtcccccaatgatggtgttgtagttggagtttggggcttctgagacctgcaaagagygagygggccctgcagctgtgctcatttaaggccaacgcrtggcagcacccatcccatgcactttgcagccaacctggaagaagcagcccagcacagccagcccgcttgggtgccccttggcctcccccagggtgcggtacttgacgttgatgtggacratgtgcagctggagaaagaaagcacggagggctcagcagaggcacccgg

SEQ ID NO: 50340 - DNA, 600 bp, Chicken  19866894297281_2
cggcctcgctgcagtcaggggtggtcagggagccctggtagcggtagtaccgggacagctgtgcaacgtgcggcagcagcgtgccaaggcggaaggtggaggccaggtccactgcctgccctgcacagcaggacgtgggcactcagccccgctgcccctggcacgccccagggtctctcccctcccagccgtgccccattgcagagcrccagggcacctcaccagcatgggagatgttcctcagtcccccaatgatggtgttgtagttggagtttggggcttctgagacctgcaaagagygagygggccctgcagctgtgctcatttaaggccaacgcrtggcagcacccatcccatgcactttgcagccaacctggaagaagcagcccagcacagccagcccgcttgggtgccccttggcctcccccagggtgcggtacttgacgttgatgtggacratgtgcagctggagaaagaaagcacggagggctcagcagaggcacccggcctcgccagcagccaggcaccaggatgggaaatcaaagggccgtggtgctaaggggcttcttgcctacctccatggggagctgctgcccatcc

SEQ ID NO: 50341 - DNA, 600 bp, Chicken  19866894297281_3
ctcgctgcagtcaggggtggtcagggagccctggtagcggtagtaccgggacagctgtgcaacgtgcggcagcagcgtgccaaggcggaaggtggaggccaggtccactgcctgccctgcacagcaggacgtgggcactcagccccgctgcccctggcacgccccagggtctctcccctcccagccgtgccccattgcagagcrccagggcacctcaccagcatgggagatgttcctcagtcccccaatgatggtgttgtagttggagtttggggcttctgagacctgcaaagagygagygggccctgcagctgtgctcatttaaggccaacgcrtggcagcacccatcccatgcactttgcagccaacctggaagaagcagcccagcacagccagcccgcttgggtgccccttggcctcccccagggtgcggtacttgacgttgatgtggacratgtgcagctggagaaagaaagcacggagggctcagcagaggcacccggcctcgccagcagccaggcaccaggatgggaaatcaaagggccgtggtgctaaggggcttcttgcctacctccatggggagctgctgcccatccacgg

SEQ ID NO: 50342 - DNA, 600 bp, Chicken  19866894297281_4
agcggtagtaccgggacagctgtgcaacgtgcggcagcagcgtgccaaggcggaaggtggaggccaggtccactgcctgccctgcacagcaggacgtgggcactcagccccgctgcccctggcacgccccagggtctctcccctcccagccgtgccccattgcagagcrccagggcacctcaccagcatgggagatgttcctcagtcccccaatgatggtgttgtagttggagtttggggcttctgagacctgcaaagagygagygggccctgcagctgtgctcatttaaggccaacgcrtggcagcacccatcccatgcactttgcagccaacctggaagaagcagcccagcacagccagcccgcttgggtgccccttggcctcccccagggtgcggtacttgacgttgatgtggacratgtgcagctggagaaagaaagcacggagggctcagcagaggcacccggcctcgccagcagccaggcaccaggatgggaaatcaaagggccgtggtgctaaggggcttcttgcctacctccatggggagctgctgcccatccacggtgtgctcagagccatttgtagacaggctgccccag

SEQ ID NO: 50343 - DNA, 487 bp, Chicken  19866894297281_5
tggcacgccccagggtctctcccctcccagccgtgccccattgcagagcrccagggcacctcaccagcatgggagatgttcctcagtcccccaatgatggtgttgtagttggagtttggggcttctgagacctgcaaagagygagygggccctgcagctgtgctcatttaaggccaacgcrtggcagcacccatcccatgcactttgcagccaacctggaagaagcagcccagcacagccagcccgcttgggtgccccttggcctcccccagggtgcggtacttgacgttgatgtggacratgtgcagctggagaaagaaagcacggagggctcagcagaggcacccggcctcgccagcagccaggcaccaggatgggaaatcaaagggccgtggtgctaaggggcttcttgcctacctccatggggagctgctgcccatccacggtgtgctcagagccatttgtagacaggctgccccagtggaag

SEQ ID NO: 50344 - DNA, 599 bp, Chicken  19866894297284_1
  misc_feature (1)..(13): n is any nucleotide
nnnnnnnnnnnnnatatttttgcttattttgtggagccatcaaagcttgtacattctctcacagactccaatttaggctgatttagcaggaaatcatcatttcttatattcctagcattagtaaaatctatggaaaattgaaatttactttggcattattattattattattattattattattattattatttcatgtgactaatctgttaaagctacgttacatacgactattttactgaattaacatacctttgtctttggaaaatttcagatacattctcctttttttttcctacrtttttatttttwttattttttttcccctttcctttgcattgtggtgtagtttgacagcaaataaaaaatttagtctcatgttattttgctgctggctgatacaccagcgtgaggtctggtctcttgttattytttactgccaaatgtgagatagcaaatacatgatctgttctggatggatgaaaaatccagaggcargtatccaggtctattaagaggaactaaaagattagaaaaatacacacattctcatcccctacattacatttctaatcttgaagtwatgcatagattgaatt

SEQ ID NO: 50345 - DNA, 599 bp, Chicken  19866894297284_2
  misc_feature (1)..(1): n is any nucleotide
natatttttgcttattttgtggagccatcaaagcttgtacattctctcacagactccaatttaggctgatttagcaggaaatcatcatttcttatattcctagcattagtaaaatctatggaaaattgaaatttactttggcattattattattattattattattattattattattatttcatgtgactaatctgttaaagctacgttacatacgactattttactgaattaacatacctttgtctttggaaaatttcagatacattctcctttttttttcctacttttttatttttwttattttttttcccctttcctttgcattgtggtgtagtttgacagcaaataaaaaatttagtctcatgttattttgctgctggctgatacaccagcgtgaggtctggtctcttgttattytttactgccaaatgtgagatagcaaatacatgatctgttctggatggatgaaaaatccagaggcargtatccaggtctattaagaggaactaaaagattagaaaaatacacacattctcatcccctacattacatttctaatcttgaagtwatgcatagattgaattgacattgcaaca

SEQ ID NO: 50346 - DNA, 600 bp, Chicken  19866894297284_3
gaaaattgaaatttactttggcattattattattattattattattattattattattatttcatgtgactaatctgttaaagctacgttacatacgactattttactgaattaacatacctttgtctttggaaaatttcagatacattctcctttttttttcctacttttttatttttwttattttttttcccctttcctttgcattgtggtgtagtttgacagcaaataaaaaatttagtctcatgttattttgctgctggctgatacaccagcgtgaggtctggtctcttgttattytttactgccaaatgtgagatagcaaatacatgatctgttctggatggatgaaaaatccagaggcargtatccaggtctattaagaggaactaaaagattagaaaaatacacacattctcatcccctacattacatttctaatcttgaagtwatgcatagattgaattgacattgcaacagaacaatgaagaacttaatcatatttctgtttttaaatggagaagtgaggtcacacgactattaactcaatcatatagacaattgagagcataatattaaatttggaaagttcagacaagc

SEQ ID NO: 50347 - DNA, 600 bp, Chicken  19866894297284_4
tgactaatctgttaaagctacgttacatacgactattttactgaattaacatacctttgtctttggaaaatttcagatacattctcctttttttttcctacttttttatttttwttattttttttcccctttcctttgcattgtggtgtagtttgacagcaaataaaaaatttagtctcatgttattttgctgctggctgatacaccagcgtgaggtctggtctcttgttattytttactgccaaatgtgagatagcaaatacatgatctgttctggatggatgaaaaatccagaggcargtatccaggtctattaagaggaactaaaagattagaaaaatacacacattctcatcccctacattacatttctaatcttgaagtwatgcatagattgaattgacattgcaacagaacaatgaagaacttaatcatatttctgtttttaaatggagaagtgaggtcacacgactattaactcaatcatatagacaattgagagcataatattaaatttggaaagttcagacaagcaaggacatagaaaaacaatgccccttcacttaagcttattcaaaatgtcacatatgctttcaaagt

SEQ ID NO: 50348 - DNA, 600 bp, Chicken  19866894297284_5
cctttttttttcctacttttttatttttwttattttttttcccctttcctttgcattgtggtgtagtttgacagcaaataaaaaatttagtctcatgttattttgctgctggctgatacaccagcgtgaggtctggtctcttgttattytttactgccaaatgtgagatagcaaatacatgatctgttctggatggatgaaaaatccagaggcargtatccaggtctattaagaggaactaaaagattagaaaaatacacacattctcatcccctacattacatttctaatcttgaagtwatgcatagattgaattgacattgcaacagaacaatgaagaacttaatcatatttctgtttttaaatggagaagtgaggtcacacgactattaactcaatcatatagacaattgagagcataatattaaatttggaaagttcagacaagcaaggacatagaaaaacaatgccccttcacttaagcttattcaaaatgtcacatatgctttcaaagtgagaaatgatttttacctcaggtaggagatggaaaactctgaattaataaaaatagatgattattttttaatatcacagaatctg

SEQ ID NO: 50349 - DNA, 600 bp, Chicken  19866894297284_6
aggtcacacgactattaactcaatcatatagacaattgagagcataatattaaatttggaaagttcagacaagcaaggacatagaaaaacaatgccccttcacttaagcttattcaaaatgtcacatatgctttcaaagtgagaaatgatttttacctcaggtaggagatggaaaactctgaattaataaaaatagatgattattttttaatatcacagaatctgcttcctccacttctgcctatgcatgttgtcctgtcaggtagacacctgatctgcgcatgagtcctgagtattttyttttacaagtttttsttattcattcctttaatttaacttttttttttatttcttgatagatattcagagaaagtggttatcatttyaacctggtaagcagcagacttttgggtctgctaatttgtgatacagaataaaaggatgagagtaagacaacgttgtcttacttggattattgttaaagggtttaaatctccactgacattttggtcctttgatttcttctaccctgacctggaatatacgtggtcagtgctgtgaacttactttcttgctcatctatttacccagtctttcttt

SEQ ID NO: 50350 - DNA, 600 bp, Chicken  19866894297284_7
taactcaatcatatagacaattgagagcataatattaaatttggaaagttcagacaagcaaggacatagaaaaacaatgccccttcacttaagcttattcaaaatgtcacatatgctttcaaagtgagaaatgatttttacctcaggtaggagatggaaaactctgaattaataaaaatagatgattattttttaatatcacagaatctgcttcctccacttctgcctatgcatgttgtcctgtcaggtagacacctgatctgcgcatgagtcctgagtattttyttttacaagtttttsttattcattcctttaatttaacttttttttttatttcttgatagatattcagagaaagtggttatcatttyaacctggtaagcagcagacttttgggtctgctaatttgtgatacagaataaaaggatgagagtaagacaacgttgtcttacttggattattgttaaagggtttaaatctccactgacattttggtcctttgatttcttctaccctgacctggaatatacgtggtcagtgctgtgaacttactttcttgctcatctatttacccagtctttctttgaactgctgatgatt

SEQ ID NO: 50351 - DNA, 600 bp, Chicken  19866894297284_8
aaacaatgccccttcacttaagcttattcaaaatgtcacatatgctttcaaagtgagaaatgatttttacctcaggtaggagatggaaaactctgaattaataaaaatagatgattattttttaatatcacagaatctgcttcctccacttctgcctatgcatgttgtcctgtcaggtagacacctgatctgcgcatgagtcctgagtattttyttttacaagtttttsttattcattcctttaatttaacttttttttttatttcttgatagatattcagagaaagtggttatcatttyaacctggtaagcagcagacttttgggtctgctaatttgtgatacagaataaaaggatgagagtaagacaacgttgtcttacttggattattgttaaagggtttaaatctccactgacattttggtcctttgatttcttctaccctgacctggaatatacgtggtcagtgctgtgaacttactttcttgctcatctatttacccagtctttctttgaactgctgatgattatgaatctcttctccagtcctaactgctgcattcggttatcatcaagcacagccatcagctagggctctaa

SEQ ID NO: 50352 - DNA, 599 bp, Chicken  19866894297296_1
  misc_feature (1)..(37): n is any nucleotide
nnnnnnnnnnnnnnnnnnnnnnnnnnnnnnnnnnnnntgagaagattttgttccctcctggcagcatgactgctactcatcaccattcactggaaaaaaaaggacggagagcaaatcacaccacattcacatgatatccaacggtgtctgagaaatatttattttattcctaacgtcagtcacccttttgaaatttgctttcccaccaagcaaagaatagaatcaggttcttctaattaaactcctcctgtcattgatgcctgctgcagatggatggactactagcgattttcttactgrtaagaaatctaagtatctaaaaaaagagcgcaatgctgtatgacaaaatttatctgagatctgggtttctgagatatgttgatgtacgcaacccactctgaaagtaatggctcctatttaattccatagaaacyacaacagatacagagaaaagtgtagataatgcactaagtgacactgtctggagcggtcacaggcgtgggttgatggctggactagatgatcttagtaatctttccaactttaataattcaatgaattttttccatatggaggaattcaattccactccctttgct

SEQ ID NO: 50353 - DNA, 600 bp, Chicken  19866894297296_2
tatccaacggtgtctgagaaatatttattttattcctaacgtcagtcacccttttgaaatttgctttcccaccaagcaaagaatagaatcaggttcttctaattaaactcctcctgtcattgatgcctgctgcagatggatggactactagcgattttcttactgrtaagaaatctaagtatctaaaaaaagagcgcaatgctgtatgacaaaatttatctgagatctgggtttctgagatatgttgatgtacgcaacccactctgaaagtaatggctcctatttaattccatagaaacyacaacagatacagagaaaagtgtagataatgcactaagtgacactgtctggagcggtcacaggcgtgggttgatggctggactagatgatcttagtaatctttccaactttaataattcaatgaattttttccatatggaggaattcaattccactccctttgcttcacgcatccttctatgtcagatgccattttgacagactacccctttgctgacatctgtcacaccacaacaagaatggaatattggtgggaaggttcaacttttagccgccataccacgaccatccaccycgcat

SEQ ID NO: 50354 - DNA, 451 bp, Chicken  19866894297296_3
aaacyacaacagatacagagaaaagtgtagataatgcactaagtgacactgtctggagcggtcacaggcgtgggttgatggctggactagatgatcttagtaatctttccaactttaataattcaatgaattttttccatatggaggaattcaattccactccctttgcttcacgcatccttctatgtcagatgccattttgacagactacccctttgctgacatctgtcacaccacaacaagaatggaatattggtgggaaggttcaacttttagccgccataccacgaccatccaccycgcatgatgtgggtcaacataaaacacatagaacaggaggcattacttttggagtagcactcatacgtaaggagagaaacagaattcattatattctttcaatagacaaaatatcagagaatataaattcagaaaagctgagtagacccat

SEQ ID NO: 50355 - DNA, 599 bp, Chicken  19866894297297_1
  misc_feature (1)..(33): n is any nucleotide
nnnnnnnnnnnnnnnnnnnnnnnnnnnnnnnnncttgaaggtcataaatgctttctgtaagggccaagggtaagacaccatgagaagaaaattacgtaaaatgagattacaacactgatagtcagcaagcaaaacaaaattgcaagggtgcctttcaagatgtacgttgcaagattcttaaattcaagcaatgacatgctgaaacaatcttccaagaggactggagaattaaaaagcatgaaaacatcattaacacatgcacttaactgctttttagatgtttgtgagtttgaaacacargtgacataccaacagtattggcagattacactttgttatcaccaastctcttactaagcttatccctggacgagagtacttcactgtcctcatatatagcttatgaatgccaagttctattctattaggcaaaccaacagagagatgagatgctcacattgctcaggactaggacataaagaggtcacaaatgacactgcaaagaagtaagccaacgctgtctgcagttttaagcattccttgccctgtcccaygatactaccagtaacaatccatatggtgactaagggaaaatarcc

SEQ ID NO: 50356 - DNA, 600 bp, Chicken  19866894297297_2
aatgctttctgtaagggccaagggtaagacaccatgagaagaaaattacgtaaaatgagattacaacactgatagtcagcaagcaaaacaaaattgcaagggtgcctttcaagatgtacgttgcaagattcttaaattcaagcaatgacatgctgaaacaatcttccaagaggactggagaattaaaaagcatgaaaacatcattaacacatgcacttaactgctttttagatgtttgtgagtttgaaacacargtgacataccaacagtattggcagattacactttgttatcaccaastctcttactaagcttatccctggacgagagtacttcactgtcctcatatatagcttatgaatgccaagttctattctattaggcaaaccaacagagagatgagatgctcacattgctcaggactaggacataaagaggtcacaaatgacactgcaaagaagtaagccaacgctgtctgcagttttaagcattccttgccctgtcccaygatactaccagtaacaatccatatggtgactaagggaaaatarcctgtcccaacacattctgcttgggtgggagaaggcagaagataactct

SEQ ID NO: 50357 - DNA, 600 bp, Chicken  19866894297297_3
acatgcacttaactgctttttagatgtttgtgagtttgaaacacargtgacataccaacagtattggcagattacactttgttatcaccaastctcttactaagcttatccctggacgagagtacttcactgtcctcatatatagcttatgaatgccaagttctattctattaggcaaaccaacagagagatgagatgctcacattgctcaggactaggacataaagaggtcacaaatgacactgcaaagaagtaagccaacgctgtctgcagttttaagcattccttgccctgtcccaygatactaccagtaacaatccatatggtgactaagggaaaatarcctgtcccaacacattctgcttgggtgggagaaggcagaagataactctccacaaagcaagttactgcagtataagcagtgacttcaaggctttaaaaataaaaaacccacaaaccatacactactccttaggatagagtacgcgtgtagaggctgtttattcagctcgatccttctcttgctgtgtcactctgtgcccatatgtttcagtttgatatctcccagatgcacgaaggggtggggcagaaatagtgcca

SEQ ID NO: 50358 - DNA, 600 bp, Chicken  19866894297297_4
cargtgacataccaacagtattggcagattacactttgttatcaccaastctcttactaagcttatccctggacgagagtacttcactgtcctcatatatagcttatgaatgccaagttctattctattaggcaaaccaacagagagatgagatgctcacattgctcaggactaggacataaagaggtcacaaatgacactgcaaagaagtaagccaacgctgtctgcagttttaagcattccttgccctgtcccaygatactaccagtaacaatccatatggtgactaagggaaaatarcctgtcccaacacattctgcttgggtgggagaaggcagaagataactctccacaaagcaagttactgcagtataagcagtgacttcaaggctttaaaaataaaaaacccacaaaccatacactactccttaggatagagtacgcgtgtagaggctgtttattcagctcgatccttctcttgctgtgtcactctgtgcccatatgtttcagtttgatatctcccagatgcacgaaggggtggggcagaaatagtgccagaagttgatacattcaggaaaccaaaccaactactcaattttt

SEQ ID NO: 50359 - DNA, 600 bp, Chicken  19866894297298_1
gccctccaaggtcagtgcttctctgtctgagctccttctcaaggtggctgctatgtcccaagctcctttcaccagattcatttcctctctcctcagtgcaaagtcctatcagtctcatcatctccgagtgtatgagattccatacctttagtttaaagtccttcatgtagtttgaccgcacgaagcaattctttctgttcaggaatttagccctctgaaattgcaaaccttaaacaatagccaaatcaaaaaccgcatggaagaataaacagaagtaatggtgaccttgggttgcattaycrtttctcctgtaatgctcctaatgctttacaatgggggaagctgaatgtttgcttcaggaataagagagcatcaagggtgcagagccaaaggaaaacctgatggatggaaaaacctatcagttcccataaagacagcagctctggtgctcttaggcttttctgaatactgttgagtacgctcggatgatttgtgtgtcataaatcagttacattgtaatatcccttttttcccccccaaatgagtttactttccctgcctatgtattagtaattctttaatcctttatgcttcaaatgt

SEQ ID NO: 50360 - DNA, 600 bp, Chicken  19866894297298_2
cctccaaggtcagtgcttctctgtctgagctccttctcaaggtggctgctatgtcccaagctcctttcaccagattcatttcctctctcctcagtgcaaagtcctatcagtctcatcatctccgagtgtatgagattccatacctttagtttaaagtccttcatgtagtttgaccgcacgaagcaattctttctgttcaggaatttagccctctgaaattgcaaaccttaaacaatagccaaatcaaaaaccgcatggaagaataaacagaagtaatggtgaccttgggttgcattaycrtttctcctgtaatgctcctaatgctttacaatgggggaagctgaatgtttgcttcaggaataagagagcatcaagggtgcagagccaaaggaaaacctgatggatggaaaaacctatcagttcccataaagacagcagctctggtgctcttaggcttttctgaatactgttgagtacgctcggatgatttgtgtgtcataaatcagttacattgtaatatcccttttttcccccccaaatgagtttactttccctgcctatgtattagtaattctttaatcctttatgcttcaaatgttt

SEQ ID NO: 50361 - DNA, 599 bp, Chicken  19866894297305_1
  misc_feature (1)..(259): n is any nucleotide
nnnnnnnnnnnnnnnnnnnnnnnnnnnnnnnnnnnnnnnnnnnnnnnnnnnnnnnnnnnnnnnnnnnnnnnnnnnnnnnnnnnnnnnnnnnnnnnnnnnnnnnnnnnnnnnnnnnnnnnnnnnnnnnnnnnnnnnnnnnnnnnnnnnnnnnnnnnnnnnnnnnnnnnnnnnnnnnnnnnnnnnnnnnnnnnnnnnnnnnnnnnnnnnnnnnnnnnnnnnnnnnnnnnnnnnnnnnnnnnnnnnnnnnnnnnnnnnnnnnaaaaaagggacacagaacattaaactcatttctgaagtctsaagtcagaccagataaaaggcamagtaaattcaggctcgcagctcctaaaatcactgttgcacaaaaacagtttactcagaaatattttccacagttctatcagaaaacacaaacatttcattagacctactccagagaatgaattagcatagctgcaatagtgtagaataaactttgatttagtatagagaaatgataaaaggcatttcctacttctttcactgggaagaaattagttttggaactatgagtttacgtattgttttattaactgggactaattccaggtttatcctct

SEQ ID NO: 50362 - DNA, 599 bp, Chicken  19866894297305_2
  misc_feature (1)..(236): n is any nucleotide
nnnnnnnnnnnnnnnnnnnnnnnnnnnnnnnnnnnnnnnnnnnnnnnnnnnnnnnnnnnnnnnnnnnnnnnnnnnnnnnnnnnnnnnnnnnnnnnnnnnnnnnnnnnnnnnnnnnnnnnnnnnnnnnnnnnnnnnnnnnnnnnnnnnnnnnnnnnnnnnnnnnnnnnnnnnnnnnnnnnnnnnnnnnnnnnnnnnnnnnnnnnnnnnnnnnnnnnnnnnnnnnnnnnnnnnnnnnnaaaaaagggacacagaacattaaactcatttctgaagtctsaagtcagaccagataaaaggcamagtaaattcaggctcgcagctcctaaaatcactgttgcacaaaaacagtttactcagaaatattttccacagttctatcagaaaacacaaacatttcattagacctactccagagaatgaattagcatagctgcaatagtgtagaataaactttgatttagtatagagaaatgataaaaggcatttcctacttctttcactgggaagaaattagttttggaactatgagtttacgtattgttttattaactgggactaattccaggtttatcctctccgtccttacatgacctgcactg

SEQ ID NO: 50363 - DNA, 497 bp, Chicken  19866894297305_3
atcagaaaacacaaacatttcattagacctactccagagaatgaattagcatagctgcaatagtgtagaataaactttgatttagtatagagaaatgataaaaggcatttcctacttctttcactgggaagaaattagttttggaactatgagtttacgtattgttttattaactgggactaattccaggtttatcctctccgtccttacatgacctgcactggtcagttgtagacaaggaaccagcagacaaaacttattttacttcctaaacattttgtaacctctgcctgcggcaaytcagcccctttggatgtcagctgctatactgagccaaaacacttaagcgtatgcttagatacagagttgaaacaccagagttacattaatctcaaagacaaatagctggtgcgtacttgaatacaaactcatagttttccttgaagcaggactactattgcacagaagtcagcaaaacttccatgaatcactccagc

SEQ ID NO: 50364 - DNA, 600 bp, Chicken  19866894297310_1
gaggtctgtcctgccattgtttccagctttcacctggtacaacaaatgcacctcacaattcagcactgtatggatcttagaatataaagcaacatcagacaatacaatttactgactgcataagtaaagagaacagagtgggacattaatttctaagaccaaagaagaggacgtctgtgagggacaaagtgaaaattgcaggacagaagccataggaattttggttcactgaaatgttatcttgaaaaagaccagatttcaaaccatgtccagaaggaacaaaattctcagttctaaaaygtcactggaacatctcgaatttctatttatacccagccaagacaatctgtacccagttcagatctatagtgaaccatagcatgttgtttactgtgaaatcaagactctttagcaaagtctgctgtgatagaatcacagaattgtaggggctagaagggtccgctagtgaacattgagcccaaccgcycccaccaaagcaggctccctasatcaggtwgcacaggtaggcatccaggagggtcttgactttctccagagaaggagattccacagcccctctgggcagccattccagtgctc

SEQ ID NO: 50365 - DNA, 600 bp, Chicken  19866894297310_2
agtgaaaattgcaggacagaagccataggaattttggttcactgaaatgttatcttgaaaaagaccagatttcaaaccatgtccagaaggaacaaaattctcagttctaaaaygtcactggaacatctcgaatttctatttatacccagccaagacaatctgtacccagttcagatctatagtgaaccatagcatgttgtttactgtgaaatcaagactctttagcaaagtctgctgtgatagaatcacagaattgtaggggctagaagggtccgctagtgaacattgagcccaaccgcycccaccaaagcaggctccctasatcaggtwgcacaggtaggcatccaggagggtcttgactttctccagagaaggagattccacagcccctctgggcagccattccagtgctctgtcacccttactgtgaagcagttcttaggcacatacgcgtggatcttcccgtgcttcagtttgtggctgtttccccttgtcctgtygctgtgcatcgctgaaaggacaagaggaaatggtttcaaactaaaagagaggagatttagataytggatttacattgaatataaggaagaaacttyttac

SEQ ID NO: 50366 - DNA, 600 bp, Chicken  19866894297310_3
ccataggaattttggttcactgaaatgttatcttgaaaaagaccagatttcaaaccatgtccagaaggaacaaaattctcagttctaaaaygtcactggaacatctcgaatttctatttatacccagccaagacaatctgtacccagttcagatctatagtgaaccatagcatgttgtttactgtgaaatcaagactctttagcaaagtctgctgtgatagaatcacagaattgtaggggctagaagggtccgctagtgaacattgagcccaaccgcycccaccaaagcaggctccctasatcaggtwgcacaggtaggcatccaggagggtcttgactttctccagagaaggagattccacagcccctctgggcagccattccagtgctctgtcacccttactgtgaagcagttcttaggcacatacgcgtggatcttcccgtgcttcagtttgtggctgtttccccttgtcctgtygctgtgcatcgctgaaaggacaagaggaaatggtttcaaactaaaagagaggagatttagataytggatttacattgaatataaggaagaaacttyttacagtaagggtggtgaggcaatag

SEQ ID NO: 50367 - DNA, 600 bp, Chicken  19866894297310_4
attttggttcactgaaatgttatcttgaaaaagaccagatttcaaaccatgtccagaaggaacaaaattctcagttctaaaaygtcactggaacatctcgaatttctatttatacccagccaagacaatctgtacccagttcagatctatagtgaaccatagcatgttgtttactgtgaaatcaagactctttagcaaagtctgctgtgatagaatcacagaattgtaggggctagaagggtccgctagtgaacattgagcccaaccgcycccaccaaagcaggctccctasatcaggtwgcacaggtaggcatccaggagggtcttgactttctccagagaaggagattccacagcccctctgggcagccattccagtgctctgtcacccttactgtgaagcagttcttaggcacatacgcgtggatcttcccgtgcttcagtttgtggctgtttccccttgtcctgtygctgtgcatcgctgaaaggacaagaggaaatggtttcaaactaaaagagaggagatttagataytggatttacattgaatataaggaagaaacttyttacagtaagggtggtgaggcaatagaataggct

SEQ ID NO: 50368 - DNA, 464 bp, Chicken  19866894297310_5
ttactgtgaaatcaagactctttagcaaagtctgctgtgatagaatcacagaattgtaggggctagaagggtccgctagtgaacattgagcccaaccgcycccaccaaagcaggctccctasatcaggtwgcacaggtaggcatccaggagggtcttgactttctccagagaaggagattccacagcccctctgggcagccattccagtgctctgtcacccttactgtgaagcagttcttaggcacatacgcgtggatcttcccgtgcttcagtttgtggctgtttccccttgtcctgtygctgtgcatcgctgaaaggacaagaggaaatggtttcaaactaaaagagaggagatttagataytggatttacattgaatataaggaagaaacttyttacagtaagggtggtgaggcaatagaataggctgcccagagaggtggtggatgccttgtccgtgggg

SEQ ID NO: 50369 - DNA, 400 bp, Chicken  19866894297310_6
agaagggtccgctagtgaacattgagcccaaccgcycccaccaaagcaggctccctasatcaggtwgcacaggtaggcatccaggagggtcttgactttctccagagaaggagattccacagcccctctgggcagccattccagtgctctgtcacccttactgtgaagcagttcttaggcacatacgcgtggatcttcccgtgcttcagtttgtggctgtttccccttgtcctgtygctgtgcatcgctgaaaggacaagaggaaatggtttcaaactaaaagagaggagatttagataytggatttacattgaatataaggaagaaacttyttacagtaagggtggtgaggcaatagaataggctgcccagagaggtggtggatgccttgtccgtgggg

SEQ ID NO: 50370 - DNA, 368 bp, Chicken  19866894297310_7
cgcycccaccaaagcaggctccctasatcaggtwgcacaggtaggcatccaggagggtcttgactttctccagagaaggagattccacagcccctctgggcagccattccagtgctctgtcacccttactgtgaagcagttcttaggcacatacgcgtggatcttcccgtgcttcagtttgtggctgtttccccttgtcctgtygctgtgcatcgctgaaaggacaagaggaaatggtttcaaactaaaagagaggagatttagataytggatttacattgaatataaggaagaaacttyttacagtaagggtggtgaggcaatagaataggctgcccagagaggtggtggatgccttgtccgtgggg

SEQ ID NO: 50371 - DNA, 600 bp, Chicken  19866894297314_1
gtatcattaattactttgtaatttcatctgcaccagtcagtaatttcaaagacagctcatttgttaggatgtttgctgcgctcggacttgctcatctccctgctgcagcacgcagagctgtgtggagaaggatttccaggtccatggctgtgctccgaggggcagagctgtatgagaaatcagctcctgtgtgtcaggctaatggagtaaggggaggtggcagaaaaataattgcattctctttgttaatgaaagagcacttgaagtcactgatggcttcaccagcttaattactttgcrgtggcggcagtcggagcccttggtctgaggcctgtaatagcaggtacgtgtagctattctgcagtgagcraggctgctgtgtgcctgccatggcagttcagaggtatggaggtgcatatggagaagtgcaggaaaaagagatgaggtgcttggtggtgggcagggacacctcctcacccaacgagagctgtgtgcacagatgtatgcttgttctgtgtgagttgctgtgtttggatatatgcatgttctgcaagggatccagcagatgataaaacatatacagtgactcagtagaatcca

SEQ ID NO: 50372 - DNA, 600 bp, Chicken  19866894297314_2
gtttgctgcgctcggacttgctcatctccctgctgcagcacgcagagctgtgtggagaaggatttccaggtccatggctgtgctccgaggggcagagctgtatgagaaatcagctcctgtgtgtcaggctaatggagtaaggggaggtggcagaaaaataattgcattctctttgttaatgaaagagcacttgaagtcactgatggcttcaccagcttaattactttgcrgtggcggcagtcggagcccttggtctgaggcctgtaatagcaggtacgtgtagctattctgcagtgagcraggctgctgtgtgcctgccatggcagttcagaggtatggaggtgcatatggagaagtgcaggaaaaagagatgaggtgcttggtggtgggcagggacacctcctcacccaacgagagctgtgtgcacagatgtatgcttgttctgtgtgagttgctgtgtttggatatatgcatgttctgcaagggatccagcagatgataaaacatatacagtgactcagtagaatccagagggaacgtgatgcaaatattggggccagttaatctataaggatcaataaggcagacaggattgatggg

SEQ ID NO: 50373 - DNA, 600 bp, Chicken  19866894297318_1
gcaaggaaattcagacgctgcttcaagtattcttccataccacctagtagttccctgctgaccctcagatgttctcagagaacaagaacgtacaagagactagattaatattttcactgcagctgcccaagaaaaccagcagctgcagtgggagctttacagctacagactgttgctaacagcagccacccaaaaaaagcacagagcaaggaataatacagcagtaaagaaggctctcccccatactgggaattattaggaaacaaaggagttgctatcgagtccacagcttaagaagtrcatcagtcaaactgaggcacttgaggatggaagaatactcactcttcctctcagggaaaaaaaagtttagagaagacacagtactgagaagatgacaagtattgctggcagttttgttcacagcaaaatagcagagtaaagacaacctatgggcaggtcctccttacacagcactgtcttgaagacaaygcataatacctccaataccctttggggccactcagagaagagttccaagtttcccacatyaaagcaaggaaaataacagaagctaatgcactaatcttcattaaagcaagc

SEQ ID NO: 50374 - DNA, 600 bp, Chicken  19866894297318_2
ccaaaaaaagcacagagcaaggaataatacagcagtaaagaaggctctcccccatactgggaattattaggaaacaaaggagttgctatcgagtccacagcttaagaagtrcatcagtcaaactgaggcacttgaggatggaagaatactcactcttcctctcagggaaaaaaaagtttagagaagacacagtactgagaagatgacaagtattgctggcagttttgttcacagcaaaatagcagagtaaagacaacctatgggcaggtcctccttacacagcactgtcttgaagacaaygcataatacctccaataccctttggggccactcagagaagagttccaagtttcccacatyaaagcaaggaaaataacagaagctaatgcactaatcttcattaaagcaagcatgacctaagaagtcacacctgaacaaatggtagaaacattctgctctcctgtacaaaggatgaattcctctagatctgtgtagaaccaagcagtgggttgtgttaaacacagtttttgagtccaaattctcatcctcaagtgtttacagtttgcactttggttttggaaaggaaaggactaccacttc

SEQ ID NO: 50375 - DNA, 600 bp, Chicken  19866894297318_3
gaattattaggaaacaaaggagttgctatcgagtccacagcttaagaagtrcatcagtcaaactgaggcacttgaggatggaagaatactcactcttcctctcagggaaaaaaaagtttagagaagacacagtactgagaagatgacaagtattgctggcagttttgttcacagcaaaatagcagagtaaagacaacctatgggcaggtcctccttacacagcactgtcttgaagacaaygcataatacctccaataccctttggggccactcagagaagagttccaagtttcccacatyaaagcaaggaaaataacagaagctaatgcactaatcttcattaaagcaagcatgacctaagaagtcacacctgaacaaatggtagaaacattctgctctcctgtacaaaggatgaattcctctagatctgtgtagaaccaagcagtgggttgtgttaaacacagtttttgagtccaaattctcatcctcaagtgtttacagtttgcactttggttttggaaaggaaaggactaccacttcacatctcattgacattatccccctgccaccacacaaggtgaatgggagattccaggaatt

SEQ ID NO: 50376 - DNA, 600 bp, Chicken  19866894297329_1
tatgcatgatataatctcaaatgatgatctgaaaccccattttctccatccataggttacgttcacctgaaagaaagatcactatcagctgccacgcagtcgtcagtgctcataagccaggcaaacacaagccaggagcctgagttccactgctcccttagctggtcatctaatgcgtgtctgcctcttcccctcagtgaagtttgggatgaattactcacttccccattcctccagcccaaggtgagaggcaacctgagaggtcagtgacagtgcttcagacctctcaagttcttgcamccaaagggaaatgttttccttcatgctgccttttacatttgaaagatgtggcttttgtggttattagatgattccgtgatgtgctgasatctaaccatcctttgtaagcygttgagtgtgcattgcagaccatacccttttactgtgacgttattttttaattcttctaatgaattgtgtgttttttggagaaaccaggcagtaaatcacataggcaattggtttaacaaaatggccttcaagcaaagcacagggagaagaccagggagaaaggcagttcaattactaccagcaattcta

SEQ ID NO: 50377 - DNA, 600 bp, Chicken  19866894297329_2
ctgccacgcagtcgtcagtgctcataagccaggcaaacacaagccaggagcctgagttccactgctcccttagctggtcatctaatgcgtgtctgcctcttcccctcagtgaagtttgggatgaattactcacttccccattcctccagcccaaggtgagaggcaacctgagaggtcagtgacagtgcttcagacctctcaagttcttgcamccaaagggaaatgttttccttcatgctgccttttacatttgaaagatgtggcttttgtggttattagatgattccgtgatgtgctgasatctaaccatcctttgtaagcygttgagtgtgcattgcagaccatacccttttactgtgacgttattttttaattcttctaatgaattgtgtgttttttggagaaaccaggcagtaaatcacataggcaattggtttaacaaaatggccttcaagcaaagcacagggagaagaccagggagaaaggcagttcaattactaccagcaattctacactgagctcctacagcctattttcttgtgctgctccaaccttcatgctccacacactagcgctcacacacctggaggccatcccaca

SEQ ID NO: 50378 - DNA, 600 bp, Chicken  19866894297329_3
cataagccaggcaaacacaagccaggagcctgagttccactgctcccttagctggtcatctaatgcgtgtctgcctcttcccctcagtgaagtttgggatgaattactcacttccccattcctccagcccaaggtgagaggcaacctgagaggtcagtgacagtgcttcagacctctcaagttcttgcamccaaagggaaatgttttccttcatgctgccttttacatttgaaagatgtggcttttgtggttattagatgattccgtgatgtgctgasatctaaccatcctttgtaagcygttgagtgtgcattgcagaccatacccttttactgtgacgttattttttaattcttctaatgaattgtgtgttttttggagaaaccaggcagtaaatcacataggcaattggtttaacaaaatggccttcaagcaaagcacagggagaagaccagggagaaaggcagttcaattactaccagcaattctacactgagctcctacagcctattttcttgtgctgctccaaccttcatgctccacacactagcgctcacacacctggaggccatcccacacatgcctgccaagcacccccag

SEQ ID NO: 50379 - DNA, 599 bp, Chicken  19866894297336_1
  misc_feature (1)..(204): n is any nucleotide
nnnnnnnnnnnnnnnnnnnnnnnnnnnnnnnnnnnnnnnnnnnnnnnnnnnnnnnnnnnnnnnnnnnnnnnnnnnnnnnnnnnnnnnnnnnnnnnnnnnnnnnnnnnnnnnnnnnnnnnnnnnnnnnnnnnnnnnnnnnnnnnnnnnnnnnnnnnnnnnnnnnnnnnnnnnnnnnnnnnnnnnnnnnnnnnnnnnnnnnnnnnnatttcttttgctttatatccttttcttttctgttcggcatagtctttaccataaacatttcagggcagaaaatccatccttactataatccaacaytcattctttctttcacttcatgccatgctggctccctaaaaagcttctatttaagcatcttttcagcacacagaggcttcttatagacagatgtgataataattaatagctcctattggagaagcctacaggaaaaagcatctattaggtgtttctgagaatagastgaaggctataagccccctgaagctctaatttgggacgcgtgctcatctcaacatggggtgataaaggtgttttaaaggaactgtaattctccatattgtcagtccctcctacaggtggggtggaatatgtgt

SEQ ID NO: 50380 - DNA, 599 bp, Chicken  19866894297336_2
  misc_feature (1)..(38): n is any nucleotide
nnnnnnnnnnnnnnnnnnnnnnnnnnnnnnnnnnnnnnatttcttttgctttatatccttttcttttctgttcggcatagtctttaccataaacatttcagggcagaaaatccatccttactataatccaacaytcattctttctttcacttcatgccatgctggctccctaaaaagcttctatttaagcatcttttcagcacacagaggcttcttatagacagatgtgataataattaatagctcctattggagaagcctacaggaaaaagcatctattaggtgtttctgagaatagastgaaggctataagccccctgaagctctaatttgggacgcgtgctcatctcaacatggggtgataaaggtgttttaaaggaactgtaattctccatattgtcagtccctcctacaggtggggtggaatatgtgttctagtgacagcaactgatgtaatagaatcctgatacttggggctgttaacttgatcctactttaaataaaccacctttattgtaagtttaagcattagtctatcagttcaattatactcttaggactctaagaccatattgctcaagagtttcacaagtggcatc

SEQ ID NO: 50381 - DNA, 367 bp, Chicken  19866894297340_1
tttggcacataagcagtctaaggcttgaaaagctcctaatttttttattcaaaataaaaatcacaagaactcagaaaaacttaagttgtctgatattatggaatttcaaatgcacttcaagagatactgatcctatggcttccagttgtttacatactaaaatgatgtgacactatgcctttcatttaaactttgggttttaaagttgaaactatgcataatggtgcttagtatgagtacacagattaggcataatttcttagactaagtattcttacagatgttcgctcacaacagatracagtgaacaactgatgtttcagctggaaaccatacagtaaacattgtttagcactcttcatctcca

SEQ ID NO: 50382 - DNA, 600 bp, Chicken  19866894297343_1
catgtccctacggtgtgtgtgcgtgcatcaaaagccagggtgaagaagagttggtagatgccagcagggttgtttccacatcctagagcattcttctctcattccttttcacctgctgtttgttgtacttggctgtgctcatcttagagtgcatattcagttcctatgagtagtgctggcagaaggatccgtggtagtcaggggagagttgtgacctgttaggcaaagaccaccctctgcaagggcagaatgatgtaggtttcgtggctgtgtgagctgcctcccttcctatggtagctrgcttctcactccccttagtcagattccttagttctctcctactgttcttaactttgctccatctcctttttcttcacatctccatttctccagatctctgccctctaaccctccccagccagagacccccacattttataacaacttctgttccctctctcgtgcttcctctgtcctttccaggtcctttcccttcttcgtccaacttctgcattccttgccttgttgatatagctcaaatactgctaacatccctacatttacaagcataacatctgaaattgtatcccatatatcata

SEQ ID NO: 50383 - DNA, 600 bp, Chicken  19866894297343_2
tttgctccatctcctttttcttcacatctccatttctccagatctctgccctctaaccctccccagccagagacccccacattttataacaacttctgttccctctctcgtgcttcctctgtcctttccaggtcctttcccttcttcgtccaacttctgcattccttgccttgttgatatagctcaaatactgctaacatccctacatttacaagcataacatctgaaattgtatcccatatatcatagatttttctctggatgtagagacattaaacagagttatgagctgtttttcarcacccccaaagtacaaccacaaaactcctatcttttttttctgcaatttctcttaatgcctacgttagaaggcatttcttccttcagccaggtgtgtggataaatgatccctggctctgtgaggaaggccgaggtttggatagtggggcttggaggtcgtttccgaaggatgagaaatttgttttgcatatccctgtttcctaaaaaaatatatgtgctccatgcagaaatacctactccccctcatcatgggaggcgaagaagataggaaacaacttcagaggattgagtcaaacattg

SEQ ID NO: 50384 - DNA, 600 bp, Chicken  19866894297349_1
catgtacgttctaatgttattattatcaaaagaaataaagagggacatggtgaggtgagaggcaacaaagcagcccaggcaacaaagggagacagagagagagattacagtagcaacggggaagacagaaaagcaaatggacaaagtgcatgtgaaagaatagagccaaggagagatatgcatacacgtgagcaagcaggatcgtgttggaacacgtgagcgtgtaacgcacacaggagggggcacagaaacccacgcaggcaggtgcagtcctgcacagccctgagcccctcagacccyctgtgggtttgcagcactgccccttgcacacacaggatgccgtgacccacttcactccatgcagcacagaccctcacagccatcccgtggcagtgacaatcctcacagccaaaagctgtaactcaggctccgagagctcatagcagtgcctgaacacccctcccctccccaccccccacccgagctccatggtggaaatggggagaactggcagtacagacacttcccatgcaaacacggctctccccagctttgtcatcctcacacactgcgccttcctgctgtctttatcattacatt

SEQ ID NO: 50385 - DNA, 491 bp, Chicken  19866894297349_2
cagacacttcccatgcaaacacggctctccccagctttgtcatcctcacacactgcgccttcctgctgtctttatcattacattgcagacctttgctccctctccccttattccccaggctgtttcactcccccccctccttctccatagttctctttagcttttttttcccccatgacaatcatgtcagaaatcatgcacaaagccccagagcccctcgtgcatgcctaaacagggatagggacacccagagcccagcatccccatgcaaagcactggaatccccacgtgctccctcarcccctcaccagcagggcagtgcaagaagcggaaagtccttgactcggcataagcaccgatctgcaacgactgaaaacatcagtgttatctccatcattttcatcagaaatccaaagcacggcatcagagaagactctacaaagagaattaactctcttccagccaaaagcacgatatgcccccactccagc

SEQ ID NO: 50386 - DNA, 600 bp, Chicken  19866894297355_1
tgaagtcacacagctcagaaagaaaaatgtggcatggtgatgtgaaatggcagtagggtgaaagctgggctttagcacggccctgctctacctcagcagggacaaagacacaccagagaccacttcttttctcagcactgaccacatctgatattcagagaacttaaagagtgtgagaacagcacctgaagtacggagaagccacaggatggtgttgaatccagcactccttgctctgcctacggcatcacaccacctgggtcctgctcaaggtgactaatgcttcctgaatgagcagtrtgctccatatttgctcttatccacagagttcaatgttgaattgtaccatacaatgctgacccacctctgctgcagtttcccttgagagatattccycaggtcatgccatgtactagaggaggtggagggggaaatgactgtcctcgttatttaaagacagtgacctttggaaatgccattcagtgaggggagaagcacttgtgctgggatgttagctttgctgtgtttgtttgggtttgtactcagcaatgtgctgtgggaaagggaagactcctctctgctatcccaagcagaacatgt

SEQ ID NO: 50387 - DNA, 600 bp, Chicken  19866894297355_2
cagggacaaagacacaccagagaccacttcttttctcagcactgaccacatctgatattcagagaacttaaagagtgtgagaacagcacctgaagtacggagaagccacaggatggtgttgaatccagcactccttgctctgcctacggcatcacaccacctgggtcctgctcaaggtgactaatgcttcctgaatgagcagtrtgctccatatttgctcttatccacagagttcaatgttgaattgtaccatacaatgctgacccacctctgctgcagtttcccttgagagatattccycaggtcatgccatgtactagaggaggtggagggggaaatgactgtcctcgttatttaaagacagtgacctttggaaatgccattcagtgaggggagaagcacttgtgctgggatgttagctttgctgtgtttgtttgggtttgtactcagcaatgtgctgtgggaaagggaagactcctctctgctatcccaagcagaacatgtgcatggagcagagcagaagctccaagaggctttttgcattcacccacctcagtaaatcaaagaaagcaccatcctgtgagtgtgacttaaataagg

SEQ ID NO: 50388 - DNA, 600 bp, Chicken  19866894297362_1
ctgacatctttcagtccatcggtgtaagtcagtttcctcacctccaatctctgattcatttcagtgattcttcttcagtgacttgtttcaaaatgctgagctctacagaaacagagctgagaaacaggttttggcaaatgaactgaaggcaggagcctactcagctgcaccagtgctgccctgtgactcaaacattcacttacaaatatttttgtttgtaacttgtcgtgcctgcttgtactcaacatactgattgatggatccttttgcctgcccagagcctccagcgttggacagcarttgggaagagacagagggattcccctgctctgcaccttgcagggcacragtggtgcctccctggatggggaggctgcctgagattgaggaaacggacccrggagctgttttgaactaacatgcatgactaagtggrttgctcatctcacccttccgatgctggacatggttttgtgtctgtggagtttttgtttggagggttgtttttkmagccacagaggttcaaggtgtcatctcaatgactggtttctggaggattatgtaatcccttctgggtgcctgcagccgtataggaaggag

SEQ ID NO: 50389 - DNA, 600 bp, Chicken  19866894297362_2
ctctgattcatttcagtgattcttcttcagtgacttgtttcaaaatgctgagctctacagaaacagagctgagaaacaggttttggcaaatgaactgaaggcaggagcctactcagctgcaccagtgctgccctgtgactcaaacattcacttacaaatatttttgtttgtaacttgtcgtgcctgcttgtactcaacatactgattgatggatccttttgcctgcccagagcctccagcgttggacagcarttgggaagagacagagggattcccctgctctgcaccttgcagggcacragtggtgcctccctggatggggaggctgcctgagattgaggaaacggacccrggagctgttttgaactaacatgcatgactaagtggrttgctcatctcacccttccgatgctggacatggttttgtgtctgtggagtttttgtttggagggttgtttttkmagccacagaggttcaaggtgtcatctcaatgactggtttctggaggattatgtaatcccttctgggtgcctgcagccgtataggaaggagttcagaccttgctgtgtacaaaaggctcttcgaatagcttacaaagta

SEQ ID NO: 50390 - DNA, 600 bp, Chicken  19866894297362_3
ctctacagaaacagagctgagaaacaggttttggcaaatgaactgaaggcaggagcctactcagctgcaccagtgctgccctgtgactcaaacattcacttacaaatatttttgtttgtaacttgtcgtgcctgcttgtactcaacatactgattgatggatccttttgcctgcccagagcctccagcgttggacagcarttgggaagagacagagggattcccctgctctgcaccttgcagggcacragtggtgcctccctggatggggaggctgcctgagattgaggaaacggacccrggagctgttttgaactaacatgcatgactaagtggrttgctcatctcacccttccgatgctggacatggttttgtgtctgtggagtttttgtttggagggttgtttttkmagccacagaggttcaaggtgtcatctcaatgactggtttctggaggattatgtaatcccttctgggtgcctgcagccgtataggaaggagttcagaccttgctgtgtacaaaaggctcttcgaatagcttacaaagtatattttaggtagatatctaccagaaaagtgtcatcagcagtgttgagggaat

SEQ ID NO: 50391 - DNA, 600 bp, Chicken  19866894297362_4
aatgaactgaaggcaggagcctactcagctgcaccagtgctgccctgtgactcaaacattcacttacaaatatttttgtttgtaacttgtcgtgcctgcttgtactcaacatactgattgatggatccttttgcctgcccagagcctccagcgttggacagcarttgggaagagacagagggattcccctgctctgcaccttgcagggcacragtggtgcctccctggatggggaggctgcctgagattgaggaaacggacccrggagctgttttgaactaacatgcatgactaagtggrttgctcatctcacccttccgatgctggacatggttttgtgtctgtggagtttttgtttggagggttgtttttkmagccacagaggttcaaggtgtcatctcaatgactggtttctggaggattatgtaatcccttctgggtgcctgcagccgtataggaaggagttcagaccttgctgtgtacaaaaggctcttcgaatagcttacaaagtatattttaggtagatatctaccagaaaagtgtcatcagcagtgttgagggaatggagtggactgctttataagcaggacaccattcata

SEQ ID NO: 50392 - DNA, 543 bp, Chicken  19866894297362_5
ttttgtttgtaacttgtcgtgcctgcttgtactcaacatactgattgatggatccttttgcctgcccagagcctccagcgttggacagcarttgggaagagacagagggattcccctgctctgcaccttgcagggcacragtggtgcctccctggatggggaggctgcctgagattgaggaaacggacccrggagctgttttgaactaacatgcatgactaagtggrttgctcatctcacccttccgatgctggacatggttttgtgtctgtggagtttttgtttggagggttgtttttkmagccacagaggttcaaggtgtcatctcaatgactggtttctggaggattatgtaatcccttctgggtgcctgcagccgtataggaaggagttcagaccttgctgtgtacaaaaggctcttcgaatagcttacaaagtatattttaggtagatatctaccagaaaagtgtcatcagcagtgttgagggaatggagtggactgctttataagcaggacaccattcataaactcagccagctctg

SEQ ID NO: 50393 - DNA, 542 bp, Chicken  19866894297362_6
tttgtttgtaacttgtcgtgcctgcttgtactcaacatactgattgatggatccttttgcctgcccagagcctccagcgttggacagcarttgggaagagacagagggattcccctgctctgcaccttgcagggcacragtggtgcctccctggatggggaggctgcctgagattgaggaaacggacccrggagctgttttgaactaacatgcatgactaagtggrttgctcatctcacccttccgatgctggacatggttttgtgtctgtggagtttttgtttggagggttgtttttkmagccacagaggttcaaggtgtcatctcaatgactggtttctggaggattatgtaatcccttctgggtgcctgcagccgtataggaaggagttcagaccttgctgtgtacaaaaggctcttcgaatagcttacaaagtatattttaggtagatatctaccagaaaagtgtcatcagcagtgttgagggaatggagtggactgctttataagcaggacaccattcataaactcagccagctctg

SEQ ID NO: 50394 - DNA, 599 bp, Chicken  19866894297363_1
  misc_feature (1)..(190): n is any nucleotide
nnnnnnnnnnnnnnnnnnnnnnnnnnnnnnnnnnnnnnnnnnnnnnnnnnnnnnnnnnnnnnnnnnnnnnnnnnnnnnnnnnnnnnnnnnnnnnnnnnnnnnnnnnnnnnnnnnnnnnnnnnnnnnnnnnnnnnnnnnnnnnnnnnnnnnnnnnnnnnnnnnnnnnnnnnnnnnnnnnnnnnnnnnnnnntcatgatatatgtgcaaatggtttggtaacaaaaaaaatttccagtcattctatcctgctgcagaaggtatagtaattaaggtgataaattgtacttgaaagaatacctrcacaggataacttatttgtgtatacctcctcctttgtcggaaactgcaattcactagatatgtttgccagagaaatatcacagcttgctcctttaagcatagaatcatggaatagtttaggttggaagggaccttaaagatcagccagttccaacccccctgccagagacaccttccactagaccaggttgcccaaagaaccatccaacctgtcaaatagtcaaaatatcccyctgtgtcatatgaggcaatttgcattcgtgctgggttactctttaagataattgacaatacttgat

SEQ ID NO: 50395 - DNA, 600 bp, Chicken  19866894297363_2
agtcattctatcctgctgcagaaggtatagtaattaaggtgataaattgtacttgaaagaatacctrcacaggataacttatttgtgtatacctcctcctttgtcggaaactgcaattcactagatatgtttgccagagaaatatcacagcttgctcctttaagcatagaatcatggaatagtttaggttggaagggaccttaaagatcagccagttccaacccccctgccagagacaccttccactagaccaggttgcccaaagaaccatccaacctgtcaaatagtcaaaatatcccyctgtgtcatatgaggcaatttgcattcgtgctgggttactctttaagataattgacaatacttgatagttctagagacatccaatccttacaaacaataggaaattttgtatatagtggcctatttgtatttcaactttaagatttttgtggatctaaaaaagaagaggtgttttaaagaagattccattcactgttactagcgtacaaatgagtggcaaatagttatcagaaatttatagtctgtgtagctcttggatttaatgaaagtataaaatacatgatggtcttgtgagataaa

SEQ ID NO: 50396 - DNA, 600 bp, Chicken  19866894297373_1
tgctttttagtgtgcaaggttactgttttgtgatgaatgtctctcacactgctgtcttagaatagtcattaaagcacacacatttcttttgttaaatatcttgttgttgtactctctgcccttgtctaccgttgtagctacttcatctcagtttgtgcctgtgaaacagctaatgaagtattgagatagccttgaggtgcttgtgcttatgtgctatagagatgaagcagatatatatttttttcctaatgttatctctttgttactgtgtagagccttggaatgaatagccctaaataraagatagatgcaaacaaagagctgtgttgcctggactgctggtgagcacctgaggatccctgatgtgctgaaagcatggtctgtccgaggtgagagcacaggcagcagggctgggagagatggtgcaggtacctgccacgtacctgtgagactgatgctgccagatagaagttactcaggaaactgagggcaccgcatattggtgtttccagttaggctgtgaggaatatgatatggccctgagttttcrttgtgtgaatcaagagaggggaaaaggcatctggtctctgcaggacccac

SEQ ID NO: 50397 - DNA, 600 bp, Chicken  19866894297373_2
gttatctctttgttactgtgtagagccttggaatgaatagccctaaataraagatagatgcaaacaaagagctgtgttgcctggactgctggtgagcacctgaggatccctgatgtgctgaaagcatggtctgtccgaggtgagagcacaggcagcagggctgggagagatggtgcaggtacctgccacgtacctgtgagactgatgctgccagatagaagttactcaggaaactgagggcaccgcatattggtgtttccagttaggctgtgaggaatatgatatggccctgagttttcrttgtgtgaatcaagagaggggaaaaggcatctggtctctgcaggacccacactaagcgctccccagaaaacctggggccatctcagtgcgttattgctgcatgacaaggaattctgtagccctggggtgcaggaggagctcggttctgttctggggcaggtaaagggtgcctctgctttccagatcggagactctcatccttggcagtgcccgttccacctgcattgtgttaacgttactagaaatggtgcagtctgtgcactgggggttctctatcataacaattacttttggcagcat

SEQ ID NO: 50398 - DNA, 600 bp, Chicken  19866894297374_1
cagggcaggacttagccagtgggaatgcattgcactgagcaccaacctggtttagacatcttcttggggctgaacacacttgattcctccatcttgctggggcagttatggacatgaggaacacctgtgagaactgctaatgaatgttaaaccaccagttaacagtaatgtggaagtttccatgaatgcaaaacatacaccatgcaatgaaaaaagctaacttttccaattcccaggatcatttctgttgacatcaaagtgtggatgtaccttaacattagacagggaaggaaaaaaaamcaaaacatgtttgttcagttttcagagatcttgcaactgtttttcttcagcctgtaggtggcaatagcactaaaaatggattttctttctttcttgaaaagtgtttagcaatgaaatgaggaaagctgcaaggggatctgtagtaggactgcgtgcatggagttagtcatcctaactgcagatggcatttttgcatgttttataaggcagggatatacaaatgtttttcaccctgaaatataaagcatggagcttccggaagcaggcgggttggtaggaccagaggatgctgagcttacg

SEQ ID NO: 50399 - DNA, 512 bp, Chicken  19866894297379_1
ccaaatcaccaggggctttttgtcctggagtcctccattctttggggaggcattcagagtgtgtttcactcttgcataagcgtggtgctgtcgggtgtaatgaaggtacactattacaaagtagtaagatttccagtctttatggggttgagatcctctgtgagggcactctgagaggcactgcttacaaatggtgctctctgataatagctctacaaaccaggagcagcacagccctcaggcactcaccattttggtgccctctgctggcccttgcttctgctgtcagtgcatgaagtrcattaattgctcctaaaccagtttagaaaaatgtattccttaaataacagagatgggtgagggcacagagcttggatgtgtgtgcactgtgctgcagctcttccagagattacttctggagttgcaggacatggaataacaatcatcttagatggtattgcataaatatgggtttaaacatggaactccccctgtcatcagttgaagggctg

SEQ ID NO: 50400 - DNA, 599 bp, Chicken  19866894297382_1
  misc_feature (1)..(37): n is any nucleotide
nnnnnnnnnnnnnnnnnnnnnnnnnnnnnnnnnnnnnttctgactccacaaagatgctgctgactcgtaccagactgcagaggagtgcagagataataataggatacactttcaaaatcgactgtgtcaatcaccacagaaatactgcagatctttcctgaatattttttgatatatatttcttgcctttgggctgtaggaacaggctttaccaggtcaggctggtcctcctctttccatttcagttgtgtttttgtggagcataagaccagacgaaactctttgccttggttttgaccrctgtcacagtccttycatgacacctgtcgagctcagcctttgcttactttgtcatctattgcttccctttgctgataaacagatgccagctctgttctcttgtatccttcagttatttctggactcaagaaatagagctcttcccatctctacatgagacattctccatcccgtcttagaaaagtgtactccagattgactttgtttttgttgaacttctgggggtgaaaacagactgaggaacaaatggggtcttttcctgtcccactcatgagctccagtgcatcccagcacatggg

SEQ ID NO: 50401 - DNA, 599 bp, Chicken  19866894297382_2
  misc_feature (1)..(22): n is any nucleotide
nnnnnnnnnnnnnnnnnnnnnnttctgactccacaaagatgctgctgactcgtaccagactgcagaggagtgcagagataataataggatacactttcaaaatcgactgtgtcaatcaccacagaaatactgcagatctttcctgaatattttttgatatatatttcttgcctttgggctgtaggaacaggctttaccaggtcaggctggtcctcctctttccatttcagttgtgtttttgtggagcataagaccagacgaaactctttgccttggttttgaccrctgtcacagtccttycatgacacctgtcgagctcagcctttgcttactttgtcatctattgcttccctttgctgataaacagatgccagctctgttctcttgtatccttcagttatttctggactcaagaaatagagctcttcccatctctacatgagacattctccatcccgtcttagaaaagtgtactccagattgactttgtttttgttgaacttctgggggtgaaaacagactgaggaacaaatggggtcttttcctgtcccactcatgagctccagtgcatcccagcacatgggaaccccgagcatcaa

SEQ ID NO: 50402 - DNA, 600 bp, Chicken  19866894297383_1
gattgtgttccccctaatgcaatgcagatgtgtgggtcaccaggctgtgagctgctgccctctgcctggggatgctgacacttgcacattcaagttctgaagcaccgaccaaaaggtgcagctcccagggaaaaccgaaacttaaactgaaaactgattgtgaaggcagttcaaggaacaaactgactgctactgattccagaaatactgaaacatttcaactaaataatagagacattcccgagccctatttggacttttcatcccacaaaagcaacaacaacgaaaacacaacatggyttttgagatcaaaacagatatggactatatcatatcaactcctcatcgggcacctgctctgtttcattcagctctgatttcgtttcaaagtaatctctttagaacacaactaagagaatttaatcagtgtctgttcggtggttacagaacagagggtcacagtgcaacctctgctccccaggctcacagaacatctgattccattaacaccatcagctgctttttcaaacaactgtgaagaaggggaggaaacccgacactgccctgctgctatttgtgcagatgtggctcctcagtgtg

SEQ ID NO: 50403 - DNA, 600 bp, Chicken  19866894297387_1
ttttccacagaaatgtgacagaaatggtatggagtcccaagccctttggtctcagtttataaagccctgacaggtgaattcagcttattcttgtgagaattattgattattattattattatttttaagagaaaaatctctctctcagttacagagagtttacaatctctgcctgagaaaaagctgaaagctgtaaatcaaaccttaagggtttattttctgcttcttgaatattatgattcttaagcatcatctcaatttttggggtggggaaggtcaggctggcattgttatcctgcyttctccgattccaatatctcctatttattgctgctttggagaaaagtgagttttactgcttgtcaagttgatgtgaatccaaggcaatgaaatacaatgcgtaatgccagctctgtgtatagggctgtagttctaatgtggacaaaatcccccactgctgtctcctcctaagaagcacacatctcatccattttcattgtttcctctctttgatgttcttagtgaaattaatcatttgacagcagcaaaggcttgctattggcctcctgtgacttggctatctatcatggattttattta

SEQ ID NO: 50404 - DNA, 600 bp, Chicken  19866894297398_1
atgattacttttctcaaaaatgtttgcagctctcaaaccaaataagcaagtatatatctgtgctaaatatctgacaaattggtttcttagaattttggttccttgagactttagttgaaaacaggactttaaataaaattagcttatgatcagcaagcagaatacagtctccattctataggcatttctgtgtgaagatgagacactaacaaataaagcctagtattgcaactgcttatgcacgaggttgtttcttccattttcaggatgcacatttgtttctctccaatgtgattacaktttgtgatatatagcccaatgrtggaatcactgtttactgtaactttaagacttcccaagatgctgcatagtcctaaaacttcataattgatcatttgttttttccrtttttattaccagtgaaactttttttcttttaagctcaaacttctcaaagaaagaaattagcaaaagaatttcagccccttatttaccaagtgagaggtttcacatgtactttggtgcatttttcaatagctcccagtctgaagagcactgtttcagttgtgctgctttctgatttgctttgcagaatctcac

SEQ ID NO: 50405 - DNA, 600 bp, Chicken  19866894297398_2
tttgcagctctcaaaccaaataagcaagtatatatctgtgctaaatatctgacaaattggtttcttagaattttggttccttgagactttagttgaaaacaggactttaaataaaattagcttatgatcagcaagcagaatacagtctccattctataggcatttctgtgtgaagatgagacactaacaaataaagcctagtattgcaactgcttatgcacgaggttgtttcttccattttcaggatgcacatttgtttctctccaatgtgattacaktttgtgatatatagcccaatgrtggaatcactgtttactgtaactttaagacttcccaagatgctgcatagtcctaaaacttcataattgatcatttgttttttccrtttttattaccagtgaaactttttttcttttaagctcaaacttctcaaagaaagaaattagcaaaagaatttcagccccttatttaccaagtgagaggtttcacatgtactttggtgcatttttcaatagctcccagtctgaagagcactgtttcagttgtgctgctttctgatttgctttgcagaatctcacctctgagaaaaatcattgactt

SEQ ID NO: 50406 - DNA, 600 bp, Chicken  19866894297398_3
actttagttgaaaacaggactttaaataaaattagcttatgatcagcaagcagaatacagtctccattctataggcatttctgtgtgaagatgagacactaacaaataaagcctagtattgcaactgcttatgcacgaggttgtttcttccattttcaggatgcacatttgtttctctccaatgtgattacaktttgtgatatatagcccaatgrtggaatcactgtttactgtaactttaagacttcccaagatgctgcatagtcctaaaacttcataattgatcatttgttttttccrtttttattaccagtgaaactttttttcttttaagctcaaacttctcaaagaaagaaattagcaaaagaatttcagccccttatttaccaagtgagaggtttcacatgtactttggtgcatttttcaatagctcccagtctgaagagcactgtttcagttgtgctgctttctgatttgctttgcagaatctcacctctgagaaaaatcattgacttacggctaacggctccagggtttagaactctgagacaatgtacttcagacagtaacattcccttaaattctctcttctcttatcgc

SEQ ID NO: 50407 - DNA, 600 bp, Chicken  19866894297402_1
tggattgcatatcttattgcacaaataggagaacaaagagcatggtgtagtgactaggcatgttgatatcttgtggtgaaggatgacatgggagtatctaacctaactggatctaaagtcagcttagacttatagaagcacagcctaaggaaaccacctatgagtgtccagaaatacttggtctgagtgacatcttagctgctgtcagaaaggtatgtgtactgtcatgagatatattgtgtctcgcttctttcagatggacaatttcaagtcagtggtagctcagggactgcctcactktgctctattrtgcagtgtatatgggctatttgactagctcagatgaattaaaagcttttctattcwttgattttggtttgcttttttttcaaccttactgaaagtacttttatttacttcactaagtaaaaccaaccacrtcacttctctaaatctcaaatatttgtggctagcttgtagaaatttatgtcaatgcatgtattattttcttatctattatttttatactaaggaaattaaatacgtttgccaatgtaagttttgttgtgcaatgtcaccctccaaattctttgaaggtac

SEQ ID NO: 50408 - DNA, 600 bp, Chicken  19866894297402_2
atcttattgcacaaataggagaacaaagagcatggtgtagtgactaggcatgttgatatcttgtggtgaaggatgacatgggagtatctaacctaactggatctaaagtcagcttagacttatagaagcacagcctaaggaaaccacctatgagtgtccagaaatacttggtctgagtgacatcttagctgctgtcagaaaggtatgtgtactgtcatgagatatattgtgtctcgcttctttcagatggacaatttcaagtcagtggtagctcagggactgcctcactktgctctattrtgcagtgtatatgggctatttgactagctcagatgaattaaaagcttttctattcwttgattttggtttgcttttttttcaaccttactgaaagtacttttatttacttcactaagtaaaaccaaccacrtcacttctctaaatctcaaatatttgtggctagcttgtagaaatttatgtcaatgcatgtattattttcttatctattatttttatactaaggaaattaaatacgtttgccaatgtaagttttgttgtgcaatgtcaccctccaaattctttgaaggtacatattttctg

SEQ ID NO: 50409 - DNA, 600 bp, Chicken  19866894297402_3
tatcttgtggtgaaggatgacatgggagtatctaacctaactggatctaaagtcagcttagacttatagaagcacagcctaaggaaaccacctatgagtgtccagaaatacttggtctgagtgacatcttagctgctgtcagaaaggtatgtgtactgtcatgagatatattgtgtctcgcttctttcagatggacaatttcaagtcagtggtagctcagggactgcctcactktgctctattrtgcagtgtatatgggctatttgactagctcagatgaattaaaagcttttctattcwttgattttggtttgcttttttttcaaccttactgaaagtacttttatttacttcactaagtaaaaccaaccacrtcacttctctaaatctcaaatatttgtggctagcttgtagaaatttatgtcaatgcatgtattattttcttatctattatttttatactaaggaaattaaatacgtttgccaatgtaagttttgttgtgcaatgtcaccctccaaattctttgaaggtacatattttctgccaaataatgtgacagatttttcaatgtatatgaatcaatacattttcctagaatg

SEQ ID NO: 50410 - DNA, 600 bp, Chicken  19866894297402_4
cagcctaaggaaaccacctatgagtgtccagaaatacttggtctgagtgacatcttagctgctgtcagaaaggtatgtgtactgtcatgagatatattgtgtctcgcttctttcagatggacaatttcaagtcagtggtagctcagggactgcctcactktgctctattrtgcagtgtatatgggctatttgactagctcagatgaattaaaagcttttctattcwttgattttggtttgcttttttttcaaccttactgaaagtacttttatttacttcactaagtaaaaccaaccacrtcacttctctaaatctcaaatatttgtggctagcttgtagaaatttatgtcaatgcatgtattattttcttatctattatttttatactaaggaaattaaatacgtttgccaatgtaagttttgttgtgcaatgtcaccctccaaattctttgaaggtacatattttctgccaaataatgtgacagatttttcaatgtatatgaatcaatacattttcctagaatgatgaagaacttatgattcaagatttgtatgtatatatcaagtattattgaagtgagtccataacatttggcaaa

SEQ ID NO: 50411 - DNA, 599 bp, Chicken  19866894297405_1
  misc_feature (1)..(12): n is any nucleotide
nnnnnnnnnnnnaccgtggcatacatttcagatttgcttcctggtaataatgaagtgctgggtgtttgacagcaaccttccacaggatccaagagattctctttgccttcgtttcactgacccggttttgtgacacagctcagaaagccttgtgctccctcaccctgctaggacaggtgtcagttctgcatgagttaggccagcttgagagctttgcaggaggaaagatgcactgtcagttacattggagaaagtgtcagaaggagaactgatcttccatgggagcactcctcccaggarcggaggccattttcctgtgtgcttatccattccagcatggagccagccagacccactgggacacaaactcctcccttttaaaacatcccacagtttccttctgcctcccagcagggtccatccccagctygggtttcttagaggygctccctgctgtctccacrgctttcagacccaaacccatggccatggaaaggcaattggaaggaaaccttgaaggtggagttgtcatcaccccttgccctgttgggaccagtccaggtgatagccccatgggtgccacctgctctcggtgacac

SEQ ID NO: 50412 - DNA, 600 bp, Chicken  19866894297405_2
tgacacagctcagaaagccttgtgctccctcaccctgctaggacaggtgtcagttctgcatgagttaggccagcttgagagctttgcaggaggaaagatgcactgtcagttacattggagaaagtgtcagaaggagaactgatcttccatgggagcactcctcccaggarcggaggccattttcctgtgtgcttatccattccagcatggagccagccagacccactgggacacaaactcctcccttttaaaacatcccacagtttccttctgcctcccagcagggtccatccccagctygggtttcttagaggygctccctgctgtctccacrgctttcagacccaaacccatggccatggaaaggcaattggaaggaaaccttgaaggtggagttgtcatcaccccttgccctgttgggaccagtccaggtgatagccccatgggtgccacctgctctcggtgacacacagccttgcttcaaatcctcgagtttaactggagcatcggcagaataatgtgtgcccatggaaatcaatggagaagagccgaaaacaattgatttggatcaaaacacactgcaatcaaatttggagggat

SEQ ID NO: 50413 - DNA, 600 bp, Chicken  19866894297405_3
agccttgtgctccctcaccctgctaggacaggtgtcagttctgcatgagttaggccagcttgagagctttgcaggaggaaagatgcactgtcagttacattggagaaagtgtcagaaggagaactgatcttccatgggagcactcctcccaggarcggaggccattttcctgtgtgcttatccattccagcatggagccagccagacccactgggacacaaactcctcccttttaaaacatcccacagtttccttctgcctcccagcagggtccatccccagctygggtttcttagaggygctccctgctgtctccacrgctttcagacccaaacccatggccatggaaaggcaattggaaggaaaccttgaaggtggagttgtcatcaccccttgccctgttgggaccagtccaggtgatagccccatgggtgccacctgctctcggtgacacacagccttgcttcaaatcctcgagtttaactggagcatcggcagaataatgtgtgcccatggaaatcaatggagaagagccgaaaacaattgatttggatcaaaacacactgcaatcaaatttggagggattgaactaatggatca

SEQ ID NO: 50414 - DNA, 600 bp, Chicken  19866894297405_4
ctgctaggacaggtgtcagttctgcatgagttaggccagcttgagagctttgcaggaggaaagatgcactgtcagttacattggagaaagtgtcagaaggagaactgatcttccatgggagcactcctcccaggarcggaggccattttcctgtgtgcttatccattccagcatggagccagccagacccactgggacacaaactcctcccttttaaaacatcccacagtttccttctgcctcccagcagggtccatccccagctygggtttcttagaggygctccctgctgtctccacrgctttcagacccaaacccatggccatggaaaggcaattggaaggaaaccttgaaggtggagttgtcatcaccccttgccctgttgggaccagtccaggtgatagccccatgggtgccacctgctctcggtgacacacagccttgcttcaaatcctcgagtttaactggagcatcggcagaataatgtgtgcccatggaaatcaatggagaagagccgaaaacaattgatttggatcaaaacacactgcaatcaaatttggagggattgaactaatggatcataaggtggcttgtgaatgg

SEQ ID NO: 50415 - DNA, 600 bp, Chicken  19866894297406_1
gtgctgcagtgattgtgtagtgtgggtggcctggattttggcagtcttagattgtagtagaagtcgaagtcaagaatatctaagaaaaggtgtatgctaccaaaaccaggtcaaacagggacataggtataacagaaagaagggagaaacagcattaattaatagtagaatgataatgaaaaagactattacaaaaagtcttaggaatcaggtcattttaggattaccatatctatatgttatctttttatcagttcatcctacttgatcagtaggatgactaggtaggagacttcaacrttattgtcctttctatggtctgatgtttatagccttttgtgctgtgggtatttgtctgtttgctgccaaatatcatgtttagtttctgaggtaaggacattttgtgtggctggtagcatgtggattgggaagtttgtgtgtttgtggtctgagcatttattggccatgaatgggacagaatggacacaaatactctagacatgtgtgctcaggcaggagtaaaaaatgagtgcattgctctyctctcagtaaaatctgttttcagttctgcatctgctgcatgcctaattctgagcaatt

SEQ ID NO: 50416 - DNA, 600 bp, Chicken  19866894297406_2
tctttttatcagttcatcctacttgatcagtaggatgactaggtaggagacttcaacrttattgtcctttctatggtctgatgtttatagccttttgtgctgtgggtatttgtctgtttgctgccaaatatcatgtttagtttctgaggtaaggacattttgtgtggctggtagcatgtggattgggaagtttgtgtgtttgtggtctgagcatttattggccatgaatgggacagaatggacacaaatactctagacatgtgtgctcaggcaggagtaaaaaatgagtgcattgctctyctctcagtaaaatctgttttcagttctgcatctgctgcatgcctaattctgagcaattcactttcctgtgtcacaaattcttctataaaatgggcataatattctttgcccacactgggacaaagtattgaggggaacgcaacttcactagagccggtgaagaagcaactactgtgctcttgaagaacagcaccttgtttactcttttcctcctgtttcctcatgacataaatcaaattttatccccactgctggacaaaaatacaaaatgcatttgtactgtaaacatcagccactcca

SEQ ID NO: 50417 - DNA, 600 bp, Chicken  19866894297408_1
tggtccagacatttcgatccagatttcaatccaggacagatccagaatgactgttcactgtcctttcaagtattcctcccaagaaacttattgtatgctatgacctgtacagttaagttgtatttttgcaaatctattataaacaattaccttgaatgttgatgtataagaagacaaatatgctaataccattgaaggttttactgagataagctttctttttttcttctgtctgccacttccactccaaagcaaaattaactgaaacacaaaaatatcaaaatgagagctaaaaagctmtagttggttaagatgttttaaattctttcrtctatgagaatatttatatatatatatacacacatatgcactttgtactatatatatatttatagacatatatccgatctccatttattctacatggagaagaagagaaaaacctcaggaaagcatctaaaaaaaatgtagtggtataagtgccacttttatgctttcgtctcttaaaaaacaaagtcataataaatgacatttggtttatctcctctcagaattaagattgtcacctttctgggagacaaagaaaaaccaaaaaacaac

SEQ ID NO: 50418 - DNA, 600 bp, Chicken  19866894297408_2
ccaggacagatccagaatgactgttcactgtcctttcaagtattcctcccaagaaacttattgtatgctatgacctgtacagttaagttgtatttttgcaaatctattataaacaattaccttgaatgttgatgtataagaagacaaatatgctaataccattgaaggttttactgagataagctttctttttttcttctgtctgccacttccactccaaagcaaaattaactgaaacacaaaaatatcaaaatgagagctaaaaagctmtagttggttaagatgttttaaattctttcrtctatgagaatatttatatatatatatacacacatatgcactttgtactatatatatatttatagacatatatccgatctccatttattctacatggagaagaagagaaaaacctcaggaaagcatctaaaaaaaatgtagtggtataagtgccacttttatgctttcgtctcttaaaaaacaaagtcataataaatgacatttggtttatctcctctcagaattaagattgtcacctttctgggagacaaagaaaaaccaaaaaacaacaattttgtctggctttagaagtgaaatctg

SEQ ID NO: 50419 - DNA, 600 bp, Chicken  19866894297408_3
acacacaagactcaaaatcaccccatatttcaataagtaattgctatttgtgtcatttgaaaagaagcaagatcccagaaatctcagggcagtcactgttctactaatcagaactttggctgaaatgctttgttagccagtattgaattttttctgttctgaaagctgaaaaagacaaatctaaaccctattcccagaagcatattggacagaagaaaattctcattcaaaaagtaaattggccaaaaccaatatatatatatatttttccttaaaatagcatacacatttactagctgygttaagcatagcactgatcagccaacagtacaaaggtaaatgctgcagtatcccaacaaagctacttctaacagatasaggcaaggggcattcacaatgcagatgccaacaaaagaaatttaagaagcttttattagctgcttaaactgcascatcactattctcagacctaaaataggatttcaggggagtgtgaaaatggtttatttcttgagtgaggtcctagtcagctgctctttattcctaccctgagaggcacagcaggaaccatttaaaggcatggtgttaccttgactacag

SEQ ID NO: 50420 - DNA, 600 bp, Chicken  19866894297408_4
aaatctcagggcagtcactgttctactaatcagaactttggctgaaatgctttgttagccagtattgaattttttctgttctgaaagctgaaaaagacaaatctaaaccctattcccagaagcatattggacagaagaaaattctcattcaaaaagtaaattggccaaaaccaatatatatatatatttttccttaaaatagcatacacatttactagctgygttaagcatagcactgatcagccaacagtacaaaggtaaatgctgcagtatcccaacaaagctacttctaacagatasaggcaaggggcattcacaatgcagatgccaacaaaagaaatttaagaagcttttattagctgcttaaactgcascatcactattctcagacctaaaataggatttcaggggagtgtgaaaatggtttatttcttgagtgaggtcctagtcagctgctctttattcctaccctgagaggcacagcaggaaccatttaaaggcatggtgttaccttgactacagtaatctgcattatatccttttgttttaaggccatggcctacagcagggtagcataagacactgctaatatcctgacag

SEQ ID NO: 50421 - DNA, 543 bp, Chicken  19866894297408_5
tctgttctgaaagctgaaaaagacaaatctaaaccctattcccagaagcatattggacagaagaaaattctcattcaaaaagtaaattggccaaaaccaatatatatatatatttttccttaaaatagcatacacatttactagctgygttaagcatagcactgatcagccaacagtacaaaggtaaatgctgcagtatcccaacaaagctacttctaacagatasaggcaaggggcattcacaatgcagatgccaacaaaagaaatttaagaagcttttattagctgcttaaactgcascatcactattctcagacctaaaataggatttcaggggagtgtgaaaatggtttatttcttgagtgaggtcctagtcagctgctctttattcctaccctgagaggcacagcaggaaccatttaaaggcatggtgttaccttgactacagtaatctgcattatatccttttgttttaaggccatggcctacagcagggtagcataagacactgctaatatcctgacagacacttttccacattgt

SEQ ID NO: 50422 - DNA, 599 bp, Chicken  19866894297417_1
  misc_feature (1)..(76): n is any nucleotide
nnnnnnnnnnnnnnnnnnnnnnnnnnnnnnnnnnnnnnnnnnnnnnnnnnnnnnnnnnnnnnnnnnnnnnnnnnnngtggacacccagcatccgctcagcctgctgctcagcggctcccgggccggcagcgagctctgcaagtaggtgccaccgccctggctctccctgtgtgctgctgggtttttgtttcccccgcgctacgactggtgtttgtcgcagcccttcacctgtttcctgaccgttgagatctagagttcgccacgctgtgggttacggtgggtgggtctgggtgcggggcsagcccgtgccggggcctggtctcgctcgcatagggaggcagtggtgtgaggtgatgggtgatgtgagctcaggaagggtgatgctcaccctgcagctctctgagtgatgccttgttatctacatggagcggcaagttctgtctcccttttcctttgcaggattcagtatcattttggagagttcggcaattactccctagtggtaaagaccctaagcacaagtgctgaaaccatttcttgtgacatagtcatcaatgaaggccccatcaacagctacctccgtacgtaatgctcagttt

SEQ ID NO: 50423 - DNA, 599 bp, Chicken  19866894297420_1
  misc_feature (1)..(142): n is any nucleotide
nnnnnnnnnnnnnnnnnnnnnnnnnnnnnnnnnnnnnnnnnnnnnnnnnnnnnnnnnnnnnnnnnnnnnnnnnnnnnnnnnnnnnnnnnnnnnnnnnnnnnnnnnnnnnnnnnnnnnnnnnnnnnnnnnnnnnnnnnnnnnnaaattatcttgtaaataaaaaggtgtgacacagaagcataggaagcaattgggctttattcatcaatgcctgtctcttgaaatcagtcagcaaacagagctcgatactcctctgagaggacaggtagtagcatactgctggtgatttttttttttctrgtgtggaggttgacttcttagatttgacttcagtgggtaagaaatcacacttgtgcttttccaatcgcagtcagcgtggagctcattttatatctatggcacaaagggcatatcttggtccctgctgcagggataccaggagggggaattttcacaggtgcaggctcttgtgtgtaaaaggcagctcaagctgcaggcggattgaaacacaagcctgcaatggatgcaactgcaaacctcagttaaaacttttaactgatctgtgtgtaatttaaaactaattgccacttgagatgtac

SEQ ID NO: 50424 - DNA, 600 bp, Chicken  19866894297420_2
aaacctcagttaaaacttttaactgatctgtgtgtaatttaaaactaattgccacttgagatgtacacggagtgggaacagaaatgtgtgtgcacttgccgccctttctgtcagctgggcttgagccggatttctgcaagctctgccctgagcagcagaaggagcggcgccatcgggcacctctggccaccaccagctgcagagggtggagggccaggaagcagttatttttgaagcagcccagaagtagagaacaaggcctgggtatttcagagggggcaagtgcatgtctcttttcartgtaatttatttgtgtttctatcaatttttgccctcagcggactctcaggaaccttatcccccgcgtaggtgaaagatgatgcaatgctgacatggattctgctgcctcctgtttctgtggggcaccttcaactctgactgaggggttattgcagcaggcagtggtcacttgatttaaccagttaccggagtggttacttttttagcccatagtatggaaatcttatacttcagcagctctcgctgagacgtattaaaagtactttgaatccttggcaaatttgctggtatttaatagat

SEQ ID NO: 50425 - DNA, 599 bp, Chicken  19866894297424_1
  misc_feature (1)..(168): n is any nucleotide
nnnnnnnnnnnnnnnnnnnnnnnnnnnnnnnnnnnnnnnnnnnnnnnnnnnnnnnnnnnnnnnnnnnnnnnnnnnnnnnnnnnnnnnnnnnnnnnnnnnnnnnnnnnnnnnnnnnnnnnnnnnnnnnnnnnnnnnnnnnnnnnnnnnnnnnnnnnnnnnnnnnnnnnngtatctttaatataaaaacaagtaacaaaaaaaaaaaaaacccagagtactttaaaaaacgtttctgaatgcatttgttgcatcgctcttctcatccaccctgcaacctccaagaatgtcagtcctcacccycaagatggcaacagagagcagagactgaagtggttacttaaaaagctttcagctcaacrgtgctgtgatcgagcatctttgtgcataatacacaaaacagttttcattttaattcaagatgaaaaccttaaatcacagactatggcttaaagasgttttctataactttcccygtattttctkggccacgtcrtgatgttttcatttaaaaagcacctacgtggtaagaagagattataaagagacatctataaaaacaccttcacgctggtacagcccacagcaacccagagcagttc

SEQ ID NO: 50426 - DNA, 599 bp, Chicken  19866894297424_2
  misc_feature (1)..(109): n is any nucleotide
nnnnnnnnnnnnnnnnnnnnnnnnnnnnnnnnnnnnnnnnnnnnnnnnnnnnnnnnnnnnnnnnnnnnnnnnnnnnnnnnnnnnnnnnnnnnnnnnnnnnnnnnnnnnngtatctttaatataaaaacaagtaacaaaaaaaaaaaaaacccagagtactttaaaaaacgtttctgaatgcatttgttgcatcgctcttctcatccaccctgcaacctccaagaatgtcagtcctcacccycaagatggcaacagagagcagagactgaagtggttacttaaaaagctttcagctcaacrgtgctgtgatcgagcatctttgtgcataatacacaaaacagttttcattttaattcaagatgaaaaccttaaatcacagactatggcttaaagasgttttctataactttcccygtattttctkggccacgtcrtgatgttttcatttaaaaagcacctacgtggtaagaagagattataaagagacatctataaaaacaccttcacgctggtacagcccacagcaacccagagcagttctcatctgaacaaggacacaaagcaactgttcagaaaagcagcgaggccactgcaggcac

SEQ ID NO: 50427 - DNA, 599 bp, Chicken  19866894297424_3
  misc_feature (1)..(14): n is any nucleotide
nnnnnnnnnnnnnngtatctttaatataaaaacaagtaacaaaaaaaaaaaaaacccagagtactttaaaaaacgtttctgaatgcatttgttgcatcgctcttctcatccaccctgcaacctccaagaatgtcagtcctcacccycaagatggcaacagagagcagagactgaagtggttacttaaaaagctttcagctcaacrgtgctgtgatcgagcatctttgtgcataatacacaaaacagttttcattttaattcaagatgaaaaccttaaatcacagactatggcttaaagasgttttctataactttcccygtattttctkggccacgtcrtgatgttttcatttaaaaagcacctacgtggtaagaagagattataaagagacatctataaaaacaccttcacgctggtacagcccacagcaacccagagcagttctcatctgaacaaggacacaaagcaactgttcagaaaagcagcgaggccactgcaggcacactttcagggtagcgtttagatgtatttaaaaaaataacacagactttgcatgtaacatttctcagcctgtgtaacagtttcctccaatcagttc

SEQ ID NO: 50428 - DNA, 600 bp, Chicken  19866894297424_4
tttaatataaaaacaagtaacaaaaaaaaaaaaaacccagagtactttaaaaaacgtttctgaatgcatttgttgcatcgctcttctcatccaccctgcaacctccaagaatgtcagtcctcacccycaagatggcaacagagagcagagactgaagtggttacttaaaaagctttcagctcaacrgtgctgtgatcgagcatctttgtgcataatacacaaaacagttttcattttaattcaagatgaaaaccttaaatcacagactatggcttaaagasgttttctataactttcccygtattttctkggccacgtcrtgatgttttcatttaaaaagcacctacgtggtaagaagagattataaagagacatctataaaaacaccttcacgctggtacagcccacagcaacccagagcagttctcatctgaacaaggacacaaagcaactgttcagaaaagcagcgaggccactgcaggcacactttcagggtagcgtttagatgtatttaaaaaaataacacagactttgcatgtaacatttctcagcctgtgtaacagtttcctccaatcagttctccttatccccactacagct

SEQ ID NO: 50429 - DNA, 600 bp, Chicken  19866894297424_5
aaacaagtaacaaaaaaaaaaaaaacccagagtactttaaaaaacgtttctgaatgcatttgttgcatcgctcttctcatccaccctgcaacctccaagaatgtcagtcctcacccycaagatggcaacagagagcagagactgaagtggttacttaaaaagctttcagctcaacrgtgctgtgatcgagcatctttgtgcataatacacaaaacagttttcattttaattcaagatgaaaaccttaaatcacagactatggcttaaagasgttttctataactttcccygtattttctkggccacgtcrtgatgttttcatttaaaaagcacctacgtggtaagaagagattataaagagacatctataaaaacaccttcacgctggtacagcccacagcaacccagagcagttctcatctgaacaaggacacaaagcaactgttcagaaaagcagcgaggccactgcaggcacactttcagggtagcgtttagatgtatttaaaaaaataacacagactttgcatgtaacatttctcagcctgtgtaacagtttcctccaatcagttctccttatccccactacagctatgcagccaa

SEQ ID NO: 50430 - DNA, 600 bp, Chicken  19866894297424_6
caaaaaaaaaaaaaacccagagtactttaaaaaacgtttctgaatgcatttgttgcatcgctcttctcatccaccctgcaacctccaagaatgtcagtcctcacccycaagatggcaacagagagcagagactgaagtggttacttaaaaagctttcagctcaacrgtgctgtgatcgagcatctttgtgcataatacacaaaacagttttcattttaattcaagatgaaaaccttaaatcacagactatggcttaaagasgttttctataactttcccygtattttctkggccacgtcrtgatgttttcatttaaaaagcacctacgtggtaagaagagattataaagagacatctataaaaacaccttcacgctggtacagcccacagcaacccagagcagttctcatctgaacaaggacacaaagcaactgttcagaaaagcagcgaggccactgcaggcacactttcagggtagcgtttagatgtatttaaaaaaataacacagactttgcatgtaacatttctcagcctgtgtaacagtttcctccaatcagttctccttatccccactacagctatgcagccaagtggcacagg

SEQ ID NO: 50431 - DNA, 599 bp, Chicken  19866894297430_1
  misc_feature (1)..(26): n is any nucleotide
nnnnnnnnnnnnnnnnnnnnnnnnnntcgtggttaaaaataaggtgcaagttaagtcattatatttctgaacgtttaaattctcattagagatgctgtctgtgatttgattcccagtctgcttgggtgtcagaagttgtttttctaactcagtggctgcaatttttgcacccagtgtaaggaaaataaccagttaaagtgtgaatggaattaaaatctatgagcatgcatattcatgtttagctggatgaattacacacatactgaacatgactgatttttgaaagtggtgcagttgacyccacttttcagacaatgaatgtggttaccataagagtcaaaaatccttttttttttyaggttctcattcaaaaggttttgtttcaagtcagtacttttgtagttttcccttatgttgcgtaagttcmcatttctgcctgaggatcttctacagrgtaatcagggagcaaaacagagtttttatcttggcaaattaaaaattcataagctgcatacatcagtagctgctctgtgatacatgtgagcattcaccacttttctctgctccacaagatggactggatgttaagttgataggaa

SEQ ID NO: 50432 - DNA, 600 bp, Chicken  19866894297430_2
attatatttctgaacgtttaaattctcattagagatgctgtctgtgatttgattcccagtctgcttgggtgtcagaagttgtttttctaactcagtggctgcaatttttgcacccagtgtaaggaaaataaccagttaaagtgtgaatggaattaaaatctatgagcatgcatattcatgtttagctggatgaattacacacatactgaacatgactgatttttgaaagtggtgcagttgacyccacttttcagacaatgaatgtggttaccataagagtcaaaaatccttttttttttyaggttctcattcaaaaggttttgtttcaagtcagtacttttgtagttttcccttatgttgcgtaagttcmcatttctgcctgaggatcttctacagrgtaatcagggagcaaaacagagtttttatcttggcaaattaaaaattcataagctgcatacatcagtagctgctctgtgatacatgtgagcattcaccacttttctctgctccacaagatggactggatgttaagttgataggaaccctttgaacgttaattctgagaagtgtacgggttgaaatctgtttcacgtgagttct

SEQ ID NO: 50433 - DNA, 600 bp, Chicken  19866894297430_3
gtcagaagttgtttttctaactcagtggctgcaatttttgcacccagtgtaaggaaaataaccagttaaagtgtgaatggaattaaaatctatgagcatgcatattcatgtttagctggatgaattacacacatactgaacatgactgatttttgaaagtggtgcagttgacyccacttttcagacaatgaatgtggttaccataagagtcaaaaatccttttttttttyaggttctcattcaaaaggttttgtttcaagtcagtacttttgtagttttcccttatgttgcgtaagttcmcatttctgcctgaggatcttctacagrgtaatcagggagcaaaacagagtttttatcttggcaaattaaaaattcataagctgcatacatcagtagctgctctgtgatacatgtgagcattcaccacttttctctgctccacaagatggactggatgttaagttgataggaaccctttgaacgttaattctgagaagtgtacgggttgaaatctgtttcacgtgagttctcagacatcctaatgataaatctccaggatactactatcatttgtctgagaagtgcatttcttaatagatt

SEQ ID NO: 50434 - DNA, 600 bp, Chicken  19866894297430_4
gctgcaatttttgcacccagtgtaaggaaaataaccagttaaagtgtgaatggaattaaaatctatgagcatgcatattcatgtttagctggatgaattacacacatactgaacatgactgatttttgaaagtggtgcagttgacyccacttttcagacaatgaatgtggttaccataagagtcaaaaatccttttttttttyaggttctcattcaaaaggttttgtttcaagtcagtacttttgtagttttcccttatgttgcgtaagttcmcatttctgcctgaggatcttctacagrgtaatcagggagcaaaacagagtttttatcttggcaaattaaaaattcataagctgcatacatcagtagctgctctgtgatacatgtgagcattcaccacttttctctgctccacaagatggactggatgttaagttgataggaaccctttgaacgttaattctgagaagtgtacgggttgaaatctgtttcacgtgagttctcagacatcctaatgataaatctccaggatactactatcatttgtctgagaagtgcatttcttaatagatttccatgtatttggcactaggcttttgt

SEQ ID NO: 50435 - DNA, 600 bp, Chicken  19866894297431_1
cttcctctggaccttatccaaaagctccacatctttgctgtgctagggaccccagactgggacacagtactctagctggggtctcacaagggcggagtagagagggacaatcacctccctcaccctgttggccacccctctattgatgcatccaaggataccactggccttccaggctgcaagtacacactgctggctcatgttaagtttttcatccaccaggatccctaagtccttctcagcaaggctactcccagtcttcctacatatttgggattaactcaatccaagtgcaaaacmttgcattttgctttgttgaacgtcatgttcacatgggcccatcttttgggtttatcaaggtccctctggattgcatcccttatttctgctgtatcaacagctccactcagcttggtgtcatcagaaaacttgctgaaggtgtacttgatcctggtcattgataaagatgctaaagagtactggtcccaggatagacccctaggggatgcttttcatcaccagcctccaggtggacatagagccatttaccacccataatttactatttataccacccaattccttatccactgaattatc

SEQ ID NO: 50436 - DNA, 600 bp, Chicken  19866894297431_2
gtcattgataaagatgctaaagagtactggtcccaggatagacccctaggggatgcttttcatcaccagcctccaggtggacatagagccatttaccacccataatttactatttataccacccaattccttatccactgaattatccacccttcagatccatgcttcccctatttagagataaggatgtgatgggggaccatgcaaaaggccttgccaaagtccagttagataacatcaattgccttcccgttgtccactaacgctatcacaaccagtcgctaggttgtttaggcatcytggatcacctgcttatctctcatgtgccttaacatgtcttccaggaggatctgttccatgattttcccaggcacaaaagtgaggttcaccagcctgtagttccctgggtcctccttcctccctttctgtctcgctccaatttagaggagggagaggaggttctttgaaatatgtatgcccggagtgagattaagaaacaacagttgaaatgttggtccaaccagtttattacaaatgttaatggagatgaagaaaggggaggrtggacactattatggattggggtgatggggaagggaa

SEQ ID NO: 50437 - DNA, 600 bp, Chicken  19866894297431_3
cgctatcacaaccagtcgctaggttgtttaggcatcytggatcacctgcttatctctcatgtgccttaacatgtcttccaggaggatctgttccatgattttcccaggcacaaaagtgaggttcaccagcctgtagttccctgggtcctccttcctccctttctgtctcgctccaatttagaggagggagaggaggttctttgaaatatgtatgcccggagtgagattaagaaacaacagttgaaatgttggtccaaccagtttattacaaatgttaatggagatgaagaaaggggaggrtggacactattatggattggggtgatggggaagggaaggcgagcaatagaaaagataggaagaagcaagaattgcgtaaagyggggatagccaccaccaggatccggcagtagtcccgttgcatgctgttccgatggtctgaggccaaagggcaggagcagcgatgccgtcttgggcaatgagagggtgcaggtaccgggtgggtccaggaagaagcctcagagtaagcccaggaggaagcagcacgtctcaggtagcaggcccagggaagtccgtcagcatacggtccgtagtaaggga

SEQ ID NO: 50438 - DNA, 600 bp, Chicken  19866894297431_4
aggatctgttccatgattttcccaggcacaaaagtgaggttcaccagcctgtagttccctgggtcctccttcctccctttctgtctcgctccaatttagaggagggagaggaggttctttgaaatatgtatgcccggagtgagattaagaaacaacagttgaaatgttggtccaaccagtttattacaaatgttaatggagatgaagaaaggggaggrtggacactattatggattggggtgatggggaagggaaggcgagcaatagaaaagataggaagaagcaagaattgcgtaaagyggggatagccaccaccaggatccggcagtagtcccgttgcatgctgttccgatggtctgaggccaaagggcaggagcagcgatgccgtcttgggcaatgagagggtgcaggtaccgggtgggtccaggaagaagcctcagagtaagcccaggaggaagcagcacgtctcaggtagcaggcccagggaagtccgtcagcatacggtccgtagtaagggatctgatggcagacaccttgcatctgtcagcatgcaggcctttcgtagtgagggatctgatggcagacaccttgtgtccgtca

SEQ ID NO: 50439 - DNA, 600 bp, Chicken  19866894297432_1
tttgtcatggataaaataattctcctggattttggaatatatatttacatgaacataatggaatacgtatgtttcaaatgcattattatatttggtaagtatttcatgtatttttcttataattaagtatttatattaatgaatcagtgagtattctttaacacaaacatctcaaaacacgcaaggaaagccagactttactatgttgccattatctttgctgtgatggaaaaatttcccaacagttccagctgataaaactgaaagccttggttggatttcagagggggaagacaacaygattttcaaaaacattttattaaaaaaaamcccactcttatgttttaaaatgattaatttttttcagttgccccgaagtgttggggacaaagtctggacattttgatagaatctcgatgacaacttctgtgggaagaaaaagcactcgaagttcctcacgcatataaatatgcacgcataaaatatatataatttaattcagacagtggtggtagaggttattcagagatagcgtggaccattaatcattagaggctttcaagtatcaggtggagctatggccaactcactagcttgagt

SEQ ID NO: 50440 - DNA, 600 bp, Chicken  19866894297432_2
tttggaatatatatttacatgaacataatggaatacgtatgtttcaaatgcattattatatttggtaagtatttcatgtatttttcttataattaagtatttatattaatgaatcagtgagtattctttaacacaaacatctcaaaacacgcaaggaaagccagactttactatgttgccattatctttgctgtgatggaaaaatttcccaacagttccagctgataaaactgaaagccttggttggatttcagagggggaagacaacaygattttcaaaaacattttattaaaaaaaamcccactcttatgttttaaaatgattaatttttttcagttgccccgaagtgttggggacaaagtctggacattttgatagaatctcgatgacaacttctgtgggaagaaaaagcactcgaagttcctcacgcatataaatatgcacgcataaaatatatataatttaattcagacagtggtggtagaggttattcagagatagcgtggaccattaatcattagaggctttcaagtatcaggtggagctatggccaactcactagcttgagtagaatacggatcctactgatttcagcaggg

SEQ ID NO: 50441 - DNA, 599 bp, Chicken  19866894297437_1
  misc_feature (1)..(149): n is any nucleotide
nnnnnnnnnnnnnnnnnnnnnnnnnnnnnnnnnnnnnnnnnnnnnnnnnnnnnnnnnnnnnnnnnnnnnnnnnnnnnnnnnnnnnnnnnnnnnnnnnnnnnnnnnnnnnnnnnnnnnnnnnnnnnnnnnnnnnnnnnnnnnnnnnnnnncacagcttcactacatatctgtaatcatcacaagtagcttgcccactcttccagagaccatgaactttccttttgttcttgaggtccagccaaaggtctctgttcagctagtctggcctccttgcccgtcagcttttcttccatgacttgrggatggtcagctcctgcatctttaaaactacttccttaaagtattcccagccttcctgggctcccacactctccaaaactacctcccaaggcaccctctcaaccatggtcctaaggaggttaaagtctgccctccggaagtccaaggtggcakttctgctgacccccctccatggttcaacaaggatcgagaaatctagcatctcacgatcactatgccccagacagcctccgacctytacatcccctgcaagaccttctctgttaacaaacagcaggtccaggattttgcttcccctc

SEQ ID NO: 50442 - DNA, 600 bp, Chicken  19866894297437_2
gcttcactacatatctgtaatcatcacaagtagcttgcccactcttccagagaccatgaactttccttttgttcttgaggtccagccaaaggtctctgttcagctagtctggcctccttgcccgtcagcttttcttccatgacttgrggatggtcagctcctgcatctttaaaactacttccttaaagtattcccagccttcctgggctcccacactctccaaaactacctcccaaggcaccctctcaaccatggtcctaaggaggttaaagtctgccctccggaagtccaaggtggcakttctgctgacccccctccatggttcaacaaggatcgagaaatctagcatctcacgatcactatgccccagacagcctccgacctytacatcccctgcaagaccttctctgttaacaaacagcaggtccaggattttgcttcccctcattggctccctcaccagttgtgtcaggaagtttttcccacacactctaggaacctccgggactgttccctatctgctgtattataaatccagcaatgtctgggaagttgaagttccccacaagaacaagagggagtgaccttgagaccccaacc

SEQ ID NO: 50443 - DNA, 600 bp, Chicken  19866894297437_3
ccaaaggtctctgttcagctagtctggcctccttgcccgtcagcttttcttccatgacttgrggatggtcagctcctgcatctttaaaactacttccttaaagtattcccagccttcctgggctcccacactctccaaaactacctcccaaggcaccctctcaaccatggtcctaaggaggttaaagtctgccctccggaagtccaaggtggcakttctgctgacccccctccatggttcaacaaggatcgagaaatctagcatctcacgatcactatgccccagacagcctccgacctytacatcccctgcaagaccttctctgttaacaaacagcaggtccaggattttgcttcccctcattggctccctcaccagttgtgtcaggaagtttttcccacacactctaggaacctccgggactgttccctatctgctgtattataaatccagcaatgtctgggaagttgaagttccccacaagaacaagagggagtgaccttgagaccccaaccaactgtctacaaagtgtcttgtccacctcttcatcctggttgggtggcctgtagcagactcccatgataatatcattcttactgg

SEQ ID NO: 50444 - DNA, 599 bp, Chicken  19866894297443_1
  misc_feature (1)..(166): n is any nucleotide
nnnnnnnnnnnnnnnnnnnnnnnnnnnnnnnnnnnnnnnnnnnnnnnnnnnnnnnnnnnnnnnnnnnnnnnnnnnnnnnnnnnnnnnnnnnnnnnnnnnnnnnnnnnnnnnnnnnnnnnnnnnnnnnnnnnnnnnnnnnnnnnnnnnnnnnnnnnnnnnnnnnnnncaggacaaggacaatggttctgctggggcgtctcctgagagctgggctcgtcccttttaaatccatggaaacgaggctggagaggatcagaactgccagctgtggggtgctgacagaccctgatggacacagcsctgagctccatggccatcccagggggtgttcctgagggascattgggggaactctatgtttactgaagctcgggggctgaatgcgcccatttcagcccaaatgcccatttcacaggtgcagagaacaacaagactgagggaaatgggccaggtttctcccccacccagcaccaccacgggatgaaggctttactcccygacttccccacttcttactgtctctcccctgggacctttcttctcactgttgggtagttattattattattctaccaaagagatttctgtaattattgtca

SEQ ID NO: 50445 - DNA, 599 bp, Chicken  19866894297443_2
  misc_feature (1)..(126): n is any nucleotide
nnnnnnnnnnnnnnnnnnnnnnnnnnnnnnnnnnnnnnnnnnnnnnnnnnnnnnnnnnnnnnnnnnnnnnnnnnnnnnnnnnnnnnnnnnnnnnnnnnnnnnnnnnnnnnnnnnnnnnnnnnnnnncaggacaaggacaatggttctgctggggcgtctcctgagagctgggctcgtcccttttaaatccatggaaacgaggctggagaggatcagaactgccagctgtggggtgctgacagaccctgatggacacagcsctgagctccatggccatcccagggggtgttcctgagggascattgggggaactctatgtttactgaagctcgggggctgaatgcgcccatttcagcccaaatgcccatttcacaggtgcagagaacaacaagactgagggaaatgggccaggtttctcccccacccagcaccaccacgggatgaaggctttactcccygacttccccacttcttactgtctctcccctgggacctttcttctcactgttgggtagttattattattattctaccaaagagatttctgtaattattgtcactgtcaaaatacggctggtgttcaggggacactcagcttg

SEQ ID NO: 50446 - DNA, 600 bp, Chicken  19866894297443_3
tcctgagagctgggctcgtcccttttaaatccatggaaacgaggctggagaggatcagaactgccagctgtggggtgctgacagaccctgatggacacagcsctgagctccatggccatcccagggggtgttcctgagggascattgggggaactctatgtttactgaagctcgggggctgaatgcgcccatttcagcccaaatgcccatttcacaggtgcagagaacaacaagactgagggaaatgggccaggtttctcccccacccagcaccaccacgggatgaaggctttactcccygacttccccacttcttactgtctctcccctgggacctttcttctcactgttgggtagttattattattattctaccaaagagatttctgtaattattgtcactgtcaaaatacggctggtgttcaggggacactcagcttgaagagccttttaattagggccaacaatggccttatgaggaagcctgacatcagaggagaaaggtaggagattaattagctcaaccttcagaggagaggtccagatgtcccacccatcacttggatggaatatttattaacgccaccaaattagctctca

SEQ ID NO: 50447 - DNA, 600 bp, Chicken  19866894297445_1
tggaaggagggaaagcgggaaaggaagcggccatcttagctgggcctgatgttaaacctaaagtcgactttgagaagaggacattttgcacgtggacacatatatgagagtgtgcttttttgtgtgtgttgggtctgctcccacagcttgtccctaaatttgaggcaggaaaccttggaagcagatgtgtaaggaaagaatggctgggaggttcctgcacagacatgctgggcttgtgctgcatacaagtgatggatgctcatgcaaattgcttgcagtgatagttcacaagggatttgkatttacctctttctggaggaggaagaaggagctggggacgccccctgtgcctggtggtgccctggcagggagcagcacgatgtgcacggggcatgctgcgtgctgcaaaaccgacaggggagggctgcccgatcacttcctgcttttatcacacatggagtggaagcatgagcaggtcattgctcccgagatcactgtttttttttgtctgcaatgcaaatacaaatgccggctcccttaaggaaatcgctgggccagccttcgtgcctgacacagtcctggagcactgtgactgctgtt

SEQ ID NO: 50448 - DNA, 600 bp, Chicken  19866894297445_2
ggagctggggacgccccctgtgcctggtggtgccctggcagggagcagcacgatgtgcacggggcatgctgcgtgctgcaaaaccgacaggggagggctgcccgatcacttcctgcttttatcacacatggagtggaagcatgagcaggtcattgctcccgagatcactgtttttttttgtctgcaatgcaaatacaaatgccggctcccttaaggaaatcgctgggccagccttcgtgcctgacacagtcctggagcactgtgactgctgttcccgtgcctcagcactgctgggctccratggcagcagcggtggggacggccaggagggccactgtgtctccacttcgtgatgtggggtatcccaagggggaagggaagtgggggatgtgagagcagtgctgcagggagaggagagcctctgctcctctccaggcctgtctcagatgcaacccaggggcttgattgcaccagaaaaatacattttgctcattgatcgatgcataattgtaacgtagcagtcattgtaagcaacgatggctacgtgtgacgtggtggctgacccaaggtgacccagacgtggtggctttcacctcctga

SEQ ID NO: 50449 - DNA, 600 bp, Chicken  19866894297446_1
aggtgtcagcatatatctttcacaaatccgagactttgggcaccttaagattggtaactcagtcaataatagctaaaaatgctttcatgaaaaccttttgattatttccttcagtgctctagttttgattccaagtgtctcttgagcttattttacttcagaaccaatctgtctgtgattactcagactatcagcccatctggtgccctctccattccttcagtatttttaatacactggtcaactgcatacaagcctgctggtaacatcttaaattgtcatgaattttacaaagctggmgtctagggagggaaaaggaatccacattaatgtggtttctgagcaaaagccccacatgtcctcagtttctgcctgagtggacttgttagtcagtcagaaggagcatgtgttgatcttcttctgattgcgcacattatggcggaaaaccytgaagtgttaggccttgagaaaggagttgagatcactgggtaagataaagccttatttgagacacggtctaaaaaataatagtttattcactgtaaaataagagttgtaagaaaacacttgtggcattaagtacatggtttagagatggga

SEQ ID NO: 50450 - DNA, 600 bp, Chicken  19866894297446_2
attttacttcagaaccaatctgtctgtgattactcagactatcagcccatctggtgccctctccattccttcagtatttttaatacactggtcaactgcatacaagcctgctggtaacatcttaaattgtcatgaattttacaaagctggmgtctagggagggaaaaggaatccacattaatgtggtttctgagcaaaagccccacatgtcctcagtttctgcctgagtggacttgttagtcagtcagaaggagcatgtgttgatcttcttctgattgcgcacattatggcggaaaaccytgaagtgttaggccttgagaaaggagttgagatcactgggtaagataaagccttatttgagacacggtctaaaaaataatagtttattcactgtaaaataagagttgtaagaaaacacttgtggcattaagtacatggtttagagatgggacttggtatgttgggctgatggttggacttgatgatcttgaagatctttcccagcctaaatgattctatggttttacgaaaaagactctaaagagttatccataaaagaataagaatacctggttttgattcatgaaaagaattttcaaa

SEQ ID NO: 50451 - DNA, 600 bp, Chicken  19866894297446_3
gtacatggtttagagatgggacttggtatgttgggctgatggttggacttgatgatcttgaagatctttcccagcctaaatgattctatggttttacgaaaaagactctaaagagttatccataaaagaataagaatacctggttttgattcatgaaaagaattttcaaatatcatctcaaggtatgttttcagactgcctggggagctctgttgtctaatttatcaacaggttctgttttcactgctgatattttcaacacaaacaatagaagacatatacatgggacatgtcaaatgygagttggatgtccaaacaactgtgagactctgaagtctttcttggagatctcactttggttgaagacactgccaactggcatatcctcttaaaagacactgatttcagtttcttcttattttgtcaaatatyaactgcttggatgaagtttcttattttaggtatcatcttgatcatttttttccgccccgtctctgtttttgcattgcgcagcagagaaagatgcctctttgtgcttcaacatcagtagctttgaagatgcctgcttttcttcagttcatatgccagctggccagctgg

SEQ ID NO: 50452 - DNA, 600 bp, Chicken  19866894297446_4
agaatacctggttttgattcatgaaaagaattttcaaatatcatctcaaggtatgttttcagactgcctggggagctctgttgtctaatttatcaacaggttctgttttcactgctgatattttcaacacaaacaatagaagacatatacatgggacatgtcaaatgygagttggatgtccaaacaactgtgagactctgaagtctttcttggagatctcactttggttgaagacactgccaactggcatatcctcttaaaagacactgatttcagtttcttcttattttgtcaaatatyaactgcttggatgaagtttcttattttaggtatcatcttgatcatttttttccgccccgtctctgtttttgcattgcgcagcagagaaagatgcctctttgtgcttcaacatcagtagctttgaagatgcctgcttttcttcagttcatatgccagctggccagctggcaaatcaaacagaaagagattgactggaagcacacagactctttcagaaattgaatagaaaagaactccaaaagaactttaggagcccaaaggaatgcgtaaggaggagaaggtgcagaagaaggctggatt

SEQ ID NO: 50453 - DNA, 600 bp, Chicken  19866894297447_1
ctgtttcagtcagaaaatcagccagatttttgattacagaagttaggtggctatgaaagctattttaaactgtgatgttcttcccttcaaagctttccttgtttataacctgagtgcttcatgtatactagttaaaacacctttactgtgttctgcctgtccatgtatttattctttctcatgaagttctccaagagaccatgaagaacttctaatcaacatttaacatataaagtgatatcagtgcatgttttactgcagaacataaacaggcaaggctgtaaagtatgtaatctattytgaattacaaaaagcaggatcaaaattacaaaggggatcaaaagcaagctaaatgctcttttgactgatatattttgcctgatctatgttgtgccccatttcaaagtctgggaattgtgaagttttaaaagaatggattattgaaagttttaaaactgtttttatcacatcttattctgtcaccagatttcatatttcattaggcttctccgcatttcagttccatcattgttcccagagttcaagggaaaaaagccaaagaagactgagaaacataaaaggaaaatatgaacaaaataa

SEQ ID NO: 50454 - DNA, 600 bp, Chicken  19866894297448_1
tctcatgctgcaggtatatatcacacagacctcagtgagcacaggcatgcaggacacagggggaccgagagcatatggagagagatttgtcttttgatacgcctgctgtcctggagactaggaaagcatttttcttcttgtgagctgctccatttctccctccctgtcttcctttggaagtcagtgaagctacagttgggtacagctgggaaaggaacagaagaacatgacttgttgctgctgaataaagggatgcttgtaaaaattcaaaagcaacagattgcttagaggaagagagtmcacgccctttataccactaacctccagctcctttcagtctgtaatagggcttctgacaggaagttgttttttagctatagacactcagtgtagcttcaggraagttgctgtatctgactttagtatctcaatatcatccagttctgcagtcaattgtagtttcttaatctgggtttgagctgttcacaactctctggtgttaaggaatgctgcctgctggggacagatttccagtgcatgccatcacgcgtgccttctacagcctgttgtttctggatgctatgtttgtcagtacagtgg

SEQ ID NO: 50455 - DNA, 600 bp, Chicken  19866894297448_2
cctgctgtcctggagactaggaaagcatttttcttcttgtgagctgctccatttctccctccctgtcttcctttggaagtcagtgaagctacagttgggtacagctgggaaaggaacagaagaacatgacttgttgctgctgaataaagggatgcttgtaaaaattcaaaagcaacagattgcttagaggaagagagtmcacgccctttataccactaacctccagctcctttcagtctgtaatagggcttctgacaggaagttgttttttagctatagacactcagtgtagcttcaggraagttgctgtatctgactttagtatctcaatatcatccagttctgcagtcaattgtagtttcttaatctgggtttgagctgttcacaactctctggtgttaaggaatgctgcctgctggggacagatttccagtgcatgccatcacgcgtgccttctacagcctgttgtttctggatgctatgtttgtcagtacagtgggttgaaaggacctttgcttgccagttctcagatccttacagcatggataatcaggttacatttaaattaaacttcctatggaaattcacaaagttccctca

SEQ ID NO: 50456 - DNA, 595 bp, Chicken  19866894297450_1
tagcaagagaattaatcaaaagacagtgagtaaacagctactgtgcggctgccaagtagaagatggtacaaaactacacagtaccgcagaacatttaatacgaacataaaaagaactaataaatgttctccaaaggataaggctttatttaattgtggccagcaccaaaaagttccaaatagtaggtttcttaaaatctgtttctccaaatgcagaaattataataaacgctgattgccttagataaggctaattcacttctagaaaagacacagaatttgtttttcccctaaagaaaawcactcactacaaaaaacagggatacacagagctgtttcatttgtgcctctgagttcccaaaagcgcttctgatcgtccgttttgatggaaagactttgcactttctaccggagaagccaaaaacctgaagttaacctttgagcaacgactgctttatttacaccatttatcttctcccaagaaaaaaagtcaccacctgatattaacatttttctaccataactcaatactctgcattttttttccccccaatgcaaagctggatcattaaagcctggaagctaaatgggaaagt

SEQ ID NO: 50457 - DNA, 600 bp, Chicken  19866894297452_1
tgaaatggcaatagagtgtggtgaccgatggtgacaggtcaaagctggtaagcaagttctctgcattacttgagcgggtatcttaggttggaaaaaaataatcagaagagactgacttcacgttatttctggtaatgaaagtttttgtgtcagtcatttcaatgttaacaccagcatttttttggaagaagccctaccctgtaacattcattagcaatgtcataagcatcccataacatatggtgtctcaaattcaattacttttctgttcaaaccatgaccttgagtaggtttttaagwaaaaaaaaaaaaatcagcacagaaacaaagcttctttcacttttattatagcttagtggcaaatgactgaaattcaggattgtgttgtcttttgtttgcttttctatccatttttttccaactttaaaaagttaggaagacaaaatcatttaaaaagcagcactggtggcaacatctaccaaatccatttgcacattaaatgtactctacacatactaattagtatttgtgaaatattttaaccagacattggccatgtttggcctaaagttcctctgtttggggggctgatgctgaaaa

SEQ ID NO: 50458 - DNA, 600 bp, Chicken  19866894297456_1
aggagctaaaaatctcatagatcttccttctatttgttctggaatcaatatttttttttgtttattcccttgtgttggccaccacctttccttctctctggcaggtgacagagaactcccaaaatcccgtgctaaggcagaaaattttctagataaaaggcatcctccaaaagctcagccacttcaagaattttgctttgcaggtaggcttattagattgtcattgagggaggtaaataattacagaggaattataagagaaacctgaccacacattctaagaaggcgcaggtagaataygttaccaagttatacagcagcttaacagtccagatgggaaccactacttaaagtccaaatctcaagaggcaagtaaaagcacagccataagatgagctctcttacaatcatggtaccacgtggtccctcagaattgttttttggcaaatgctatttcatcactgagaagctattttgcttgatactgttcactttaattgttgaaactattgctgtagtgctgttatgggagtttttattttaaaaaggtagtgatgagtcacctggtcaatttagcacaaatgggaattcactataggc

SEQ ID NO: 50459 - DNA, 600 bp, Chicken  19866894297460_1
ttgggttcttggacgtgtgaaaatgtagaaaggttattgaccatgctgctttatcatgtccaagcaatacagaaatcattaagagatttaagagccagcagcaaaaagtgaattggattttaaaggattttctttctgcataacaaagggaactccgagcaagtaaggaaagaaaattaaaattaagttatattgctttgaattggttcctctgtttaaaactgtttaaattcatgtgaaaaattgtctatgtcttgcttcagaaattttcagaaaatgtgcaagttaccaggggctaaytaatatgccagctggaaggcaaattctgctgtggccatgtcatttgctgcagttaaggtataggccgagagatctactttgttgcttgcccgtgttactggttgcttcattaggtgtgggatctgtagtctagtggaaatgtagccatctgccctgagacctttttctctgagtgctgcctgtggctcaaggrgtgcgggagatactgtggtgttaaactggtattaaatgtcttgtgaagtcaatctgcaaagtcagcacggctggtctttggtacaatcatttacctatgtgtgatag

SEQ ID NO: 50460 - DNA, 600 bp, Chicken  19866894297460_2
tgctttgaattggttcctctgtttaaaactgtttaaattcatgtgaaaaattgtctatgtcttgcttcagaaattttcagaaaatgtgcaagttaccaggggctaaytaatatgccagctggaaggcaaattctgctgtggccatgtcatttgctgcagttaaggtataggccgagagatctactttgttgcttgcccgtgttactggttgcttcattaggtgtgggatctgtagtctagtggaaatgtagccatctgccctgagacctttttctctgagtgctgcctgtggctcaaggrgtgcgggagatactgtggtgttaaactggtattaaatgtcttgtgaagtcaatctgcaaagtcagcacggctggtctttggtacaatcatttacctatgtgtgataggcagaactcacagtaacggaaggcagatagtgctagagataaatgcattctggacatcctgatagccagtgaaatatgatttggagatgaagttgaaagtttatacatctcctttccttgcctgcttcctcccagagaaagccttgggctgcctccgagtgcattctcagcttggggtcctccaaagctctcc

SEQ ID NO: 50461 - DNA, 600 bp, Chicken  19866894297466_1
gagcacggaaaatacgagggctgcgagacaggcagagcgcggagaggggaagagagctcaccctcggctcagggcagcgctgcggggccgtgctggggatgaggagggtgctcggtgctgcactgatgggcgcacgctgacacagccgtcgcaccgccgcacggacagccgcgcagcacccagcggcatgggtgcacgtgcgggtgccccgggctgcacacactcgtgtgcacaagcatgcatgcgtggagatgtacccgcagccacgcgcacggcaaacgtggtcccgagccgtcggcwgcaggctcgctgtcaaggcrgatcgctctccagtgtaagtacgcgccagtcaggcagcgccgcagctttacccccacgcatcttggagcggctgtgcggttacctgctgtgtgcaggagagggctgcgggaaatccgttcccctccggctgggagaggccgtggcgcacagtgccgggagctgtgcgcgcagggaaccccttcggctcttcacccggtgatctccctgcgctcagccctgcaacggagggcgctgcgccggcagctcggccggaggtgatttagagttagacgtttgcag

SEQ ID NO: 50462 - DNA, 600 bp, Chicken  19866894297466_2
ctgcgagacaggcagagcgcggagaggggaagagagctcaccctcggctcagggcagcgctgcggggccgtgctggggatgaggagggtgctcggtgctgcactgatgggcgcacgctgacacagccgtcgcaccgccgcacggacagccgcgcagcacccagcggcatgggtgcacgtgcgggtgccccgggctgcacacactcgtgtgcacaagcatgcatgcgtggagatgtacccgcagccacgcgcacggcaaacgtggtcccgagccgtcggcwgcaggctcgctgtcaaggcrgatcgctctccagtgtaagtacgcgccagtcaggcagcgccgcagctttacccccacgcatcttggagcggctgtgcggttacctgctgtgtgcaggagagggctgcgggaaatccgttcccctccggctgggagaggccgtggcgcacagtgccgggagctgtgcgcgcagggaaccccttcggctcttcacccggtgatctccctgcgctcagccctgcaacggagggcgctgcgccggcagctcggccggaggtgatttagagttagacgtttgcagaggagacttggattaattcg

SEQ ID NO: 50463 - DNA, 599 bp, Chicken  19866894297467_1
  misc_feature (1)..(7): n is any nucleotide
nnnnnnnaaacttgagagcctgtattaagtctgtattccaactgcgtgatatttatcactgtgtataaagtacagattctcctctacacataaacctttaaagtggtttgagattaaggaagggagttaacagagaaggataaattgtacaagttcttagatctatcagtgaagacaacataaggtgtattcctcatccttcacaaacagaaggaatcagccccccttctgtcttcttcactgaactccactctactgaattttgaaatgaaagtattacaggtatctacatgagaggaygtctcacctgtcctcattcttgtctcatccgagtaaagcaaagggcagtaacagatttcttaaaggtaaacatgtagaacaaggggaaatraacaagaaaagtagaattttatctaaattacactgttaaacaaatcattcaagaaggttgaccaaaatggaccaatagggaaaatgggaagagaggaaggcagacaagttaccaaacttatgaaggttataataggaccagaaaaagagtcaatttacctgacaacagggcggttttagatgtcactgaactgctgcgtttaccattt

SEQ ID NO: 50464 - DNA, 600 bp, Chicken  19866894297467_2
aaacctttaaagtggtttgagattaaggaagggagttaacagagaaggataaattgtacaagttcttagatctatcagtgaagacaacataaggtgtattcctcatccttcacaaacagaaggaatcagccccccttctgtcttcttcactgaactccactctactgaattttgaaatgaaagtattacaggtatctacatgagaggaygtctcacctgtcctcattcttgtctcatccgagtaaagcaaagggcagtaacagatttcttaaaggtaaacatgtagaacaaggggaaatraacaagaaaagtagaattttatctaaattacactgttaaacaaatcattcaagaaggttgaccaaaatggaccaatagggaaaatgggaagagaggaaggcagacaagttaccaaacttatgaaggttataataggaccagaaaaagagtcaatttacctgacaacagggcggttttagatgtcactgaactgctgcgtttaccattttacccacttccattactgcgaagaaaagtttaggaaggaacattctcaaggacttttcataggttctcgttcttgccatcataaaggggaga

SEQ ID NO: 50465 - DNA, 600 bp, Chicken  19866894297477_1
tcatcagattatctaagtatgttcttcttggttatttatttgctgtgttttatctatgccagagaaattctacttcattcttttaattatttatgttcctcaaaaaatgccgaagcattttacacttgcaaccaaacaatgtaatttactgaggttactttatggaaaacctacagacatgaaatctaagcacaaaatatcagtcaggaaaacacagtggaaagtggctgaaagatttcaaaaggaaagagacgcatgagaatgtatgaagtgggagtaaatcttgcgtgcagtgcataygtattaatatacatactcaaatccttccaaagaaaagaagtgtaagacacactyaggctaagaaacttgtacttgaagtaaacaatataatctccatcacytgagactttaacagataagctacaccagatcttttcatcaactacctggaaaaccatgtcagcaaacagaagatgtatgtatgaatctactgtgcaacagtgtgatcaatgcattaaaatacagaaattatttttctaacgactctatccaagtagctgtgacatttaggaaaaatatgttttcctaaaattctatgac

SEQ ID NO: 50466 - DNA, 550 bp, Chicken  19866894297477_2
tatgccagagaaattctacttcattcttttaattatttatgttcctcaaaaaatgccgaagcattttacacttgcaaccaaacaatgtaatttactgaggttactttatggaaaacctacagacatgaaatctaagcacaaaatatcagtcaggaaaacacagtggaaagtggctgaaagatttcaaaaggaaagagacgcatgagaatgtatgaagtgggagtaaatcttgcgtgcagtgcataygtattaatatacatactcaaatccttccaaagaaaagaagtgtaagacacactyaggctaagaaacttgtacttgaagtaaacaatataatctccatcacytgagactttaacagataagctacaccagatcttttcatcaactacctggaaaaccatgtcagcaaacagaagatgtatgtatgaatctactgtgcaacagtgtgatcaatgcattaaaatacagaaattatttttctaacgactctatccaagtagctgtgacatttaggaaaaatatgttttcctaaaattctatgactctg

SEQ ID NO: 50467 - DNA, 503 bp, Chicken  19866894297477_3
aaaaaatgccgaagcattttacacttgcaaccaaacaatgtaatttactgaggttactttatggaaaacctacagacatgaaatctaagcacaaaatatcagtcaggaaaacacagtggaaagtggctgaaagatttcaaaaggaaagagacgcatgagaatgtatgaagtgggagtaaatcttgcgtgcagtgcataygtattaatatacatactcaaatccttccaaagaaaagaagtgtaagacacactyaggctaagaaacttgtacttgaagtaaacaatataatctccatcacytgagactttaacagataagctacaccagatcttttcatcaactacctggaaaaccatgtcagcaaacagaagatgtatgtatgaatctactgtgcaacagtgtgatcaatgcattaaaatacagaaattatttttctaacgactctatccaagtagctgtgacatttaggaaaaatatgttttcctaaaattctatgactctg

SEQ ID NO: 50468 - DNA, 600 bp, Chicken  19866894297489_1
ggctccagtctgcaaagagacagctgcgatggctttagagatgcttaattgagaaagcacttttgggaagctatcatcacttggaaagagcctggtaatagctcttcaactttctagctgcaaatgagccagttgttttgtttttcctttccattggcattaaaagatcagatatactgtacttgggctgttgcttccccccgtgtactattttggatttctcagtagtaccataatgcttttgatggttttgacactgctgttattttactaaagatataggctcctctctgtatcttrtcccatgcataccctttccttctctacttgcactgtgtgtctcttttcttaccaatgacagccagaacactaatcatggtaatgccatggtctcctgatcatctctttaaatatacttcagtcatggtcccctcttggaacacgtatggaagtagacaagctccgctactcacaggggtaggggtaacagttcacatctggtgcatggtgcccaatgggtccagaggttgtsttgagcgggagacaaagtagccagcacccttgaaccactctctcacatgaggtgcaacaagctaacac

SEQ ID NO: 50469 - DNA, 569 bp, Chicken  19866894297489_2
ataatgcttttgatggttttgacactgctgttattttactaaagatataggctcctctctgtatcttrtcccatgcataccctttccttctctacttgcactgtgtgtctcttttcttaccaatgacagccagaacactaatcatggtaatgccatggtctcctgatcatctctttaaatatacttcagtcatggtcccctcttggaacacgtatggaagtagacaagctccgctactcacaggggtaggggtaacagttcacatctggtgcatggtgcccaatgggtccagaggttgtsttgagcgggagacaaagtagccagcacccttgaaccactctctcacatgaggtgcaacaagctaacaccaccttggtgaaaaaacaattgctgtgaattcattcatgtaaattgagttttaaaaaaatcaaatcactcagcaccagagaagggagaaaatgaattcaggttatttaactataaatatagctggaagataagagacgggatttggcagtttaaagaaggcagaagcaacacactacacattattgtactagggaagctca

SEQ ID NO: 50470 - DNA, 600 bp, Chicken  19866894297490_1
aagcctaatcctgaccagcatctcatatcttgtggatgtaatcttgtcagcaccactgtagagcattgtgcttggctctatggatcaccagttgttgtgctgcactgcctgctgttggagcagtaaggcataaccagctagtctgaagatcagagaactgtgcatctctttatcttttttattttttctttttaaatgctactcctgaatgctggggtaatgttgttaatagtaccaatgctagtgaaaattaatgacccatctgcaagtgtgcactttacagacttgtggcaacagtgsgtaaggacagtgaagagccatccgaattgaacatcagtgtttttgtgtttgcgtgcttaaaaacaacagtaatgtattttactgtaaattttttgagattatctgcaagaaagggaacatggttggagactgagcaacacttaaaaatatgtttacaagtaaacagcatatcccagaaagagcagatcacaaacagtacttggttttacctgcacgcaagcatgcagatgccagtggctgtgagtgtaattgaagactgattttgtgccaactacatagtacaaattgagtgaaaataga

SEQ ID NO: 50471 - DNA, 600 bp, Chicken  19866894297501_1
tttaaaataagagtaaggacagaatgccatgggaggaaaaagatactgactcttgagtagagctggtaacagaacagtgtattaacaccatgcagttgcagctaaccaggcgttttgctctactgaactgcatgaaggaagaactgtgcctcaggactcaggggtgggggagagcttattgcctatagatcatggcttaatttctttatgatcaaccccaaactcactttcagtcgtggtgttgctgctgcaggtatccaaggcacaccggagctgtgggtgaagcaggagaaagagctrgtggagcacctctcrgtggacgtgcagcaggactatggcagggattacctgctggggctgaagagctacctgctgcgcatcccttcgtgctgtgatgcygacctcaccccrgtgctgagctccatcctgcatgcactgctctccaagcgaccgcacggcttgtacaccccaggcaaaggggcttacatgatgctctgcatcttctgctacttcccactctggttctatgacttcttagttagtaagtcactgggacttgagtccatcccacaggcactaaggacatcagaagctgagaat

SEQ ID NO: 50472 - DNA, 600 bp, Chicken  19866894297501_2
aggacagaatgccatgggaggaaaaagatactgactcttgagtagagctggtaacagaacagtgtattaacaccatgcagttgcagctaaccaggcgttttgctctactgaactgcatgaaggaagaactgtgcctcaggactcaggggtgggggagagcttattgcctatagatcatggcttaatttctttatgatcaaccccaaactcactttcagtcgtggtgttgctgctgcaggtatccaaggcacaccggagctgtgggtgaagcaggagaaagagctrgtggagcacctctcrgtggacgtgcagcaggactatggcagggattacctgctggggctgaagagctacctgctgcgcatcccttcgtgctgtgatgcygacctcaccccrgtgctgagctccatcctgcatgcactgctctccaagcgaccgcacggcttgtacaccccaggcaaaggggcttacatgatgctctgcatcttctgctacttcccactctggttctatgacttcttagttagtaagtcactgggacttgagtccatcccacaggcactaaggacatcagaagctgagaataaggacctctaaggt

SEQ ID NO: 50473 - DNA, 600 bp, Chicken  19866894297501_3
agctaaccaggcgttttgctctactgaactgcatgaaggaagaactgtgcctcaggactcaggggtgggggagagcttattgcctatagatcatggcttaatttctttatgatcaaccccaaactcactttcagtcgtggtgttgctgctgcaggtatccaaggcacaccggagctgtgggtgaagcaggagaaagagctrgtggagcacctctcrgtggacgtgcagcaggactatggcagggattacctgctggggctgaagagctacctgctgcgcatcccttcgtgctgtgatgcygacctcaccccrgtgctgagctccatcctgcatgcactgctctccaagcgaccgcacggcttgtacaccccaggcaaaggggcttacatgatgctctgcatcttctgctacttcccactctggttctatgacttcttagttagtaagtcactgggacttgagtccatcccacaggcactaaggacatcagaagctgagaataaggacctctaaggtatccactggcatctatcggatttgtgatctctctggaaagaactctgttttaggggactgctaattattgtactgtctttggta

SEQ ID NO: 50474 - DNA, 600 bp, Chicken  19866894297501_4
gttttgctctactgaactgcatgaaggaagaactgtgcctcaggactcaggggtgggggagagcttattgcctatagatcatggcttaatttctttatgatcaaccccaaactcactttcagtcgtggtgttgctgctgcaggtatccaaggcacaccggagctgtgggtgaagcaggagaaagagctrgtggagcacctctcrgtggacgtgcagcaggactatggcagggattacctgctggggctgaagagctacctgctgcgcatcccttcgtgctgtgatgcygacctcaccccrgtgctgagctccatcctgcatgcactgctctccaagcgaccgcacggcttgtacaccccaggcaaaggggcttacatgatgctctgcatcttctgctacttcccactctggttctatgacttcttagttagtaagtcactgggacttgagtccatcccacaggcactaaggacatcagaagctgagaataaggacctctaaggtatccactggcatctatcggatttgtgatctctctggaaagaactctgttttaggggactgctaattattgtactgtctttggtatattgaggttga

SEQ ID NO: 50475 - DNA, 600 bp, Chicken  19866894297503_1
gcggggtttcttgtttgctcatgggttgttggttgtctcacacagaaatctgaaaagaagtgataagttggtgaaagcagctccttcaaccctgctagtatctggcattatgtcatataatgaacataaggagggatgcctgcagcaagtgtttgcaaatgtttgcttaagcaaatagtccagtgaatataattcaaactaatggtagctggagaactaaagagcttgctttcagaagatggatctgttgttttgcatgtgactaaaaagttatgtcattcttccacgtgagtagaaagwacatcatggtttcatgtgattcatcagatactttcattatgatgtgctcttatctctgttgggtggacctggaattgtcctgcactatagcatgcactgaaacaagatactatactgaaacaaaatacagactttcctctggacagctcagagctggaggcacagtgggtggagaaaaatgaaatgagcaagtataattttccattcaggttttgtgggcagactcttccataatttgctgtcgagactgccaaagtccatttaaaaatgctggaagccatgaaaaagcacgtagatgca

SEQ ID NO: 50476 - DNA, 600 bp, Chicken  19866894297506_1
gagtaatctgaaaagtactgcaaatgctacctgcaattttcctaccttttcacaaagcccaggagctcggatggtttcaggaaacatttcgttcttagtctgctagtgagaggagcagggcttgctctttgtttggctgtgctgatttttgtcccagctgtggaggtaaatacgatggggtggctctgaattttctcccagggtctccaaactgaagcgcttccatttccactgtggaatgacacctgtgggcattggttgaacagcaggtttttggtggcagtgctttgccctgttgtratgctctcagagctgcccttggttaagtggagggcagtttccataggcaccttcggctgttttggcacttacagagatggagatgatgccatcaggctgctggaggagatagcaaggtcatggaagggaaaagcacactgttgtacacgtgtgatcctcagaaaggggtgtaaataacccatccttgatgttatgaggcccaacccaccccaaacatctccttgggatcccaattcaggaaggctttctgctttatttccgcctgttgtctgtctatgtggagtaaagctcatcttgcag

SEQ ID NO: 50477 - DNA, 599 bp, Chicken  19866894297514_1
  misc_feature (1)..(73): n is any nucleotide
nnnnnnnnnnnnnnnnnnnnnnnnnnnnnnnnnnnnnnnnnnnnnnnnnnnnnnnnnnnnnnnnnnnnnnnnntgagcacaccccagaaaaaggaaaatctgcccgccaactggctgaaccctaagtgcctcatcccaagaccttgctgggagagggaagagtacaagaaaggcagtgtatcagcctagacgtggtctcacatatagccaggacggaagaggtggggctgagcatcctggcccgctttcctgctccccagcagcactggttaggctgtggctacaaaacatgcagcacargattagacttgatgctgagctgtggtggcccaggtgggcagtaagcaattttggtcactcacctcatgttggaggccaagggagtaccaaagctgtcctctgagcagcaagggctgtgccgagcacccttccttcgcctccccctctcctcctccctctcagtccagggggcatctgtggctgaactggtcccagagtccggctccaagtgagccagaggagcaaagttctcctcgatcagcttcgcactgtctcggatctgtccctgwacttctggggtgagggctgggagatcaaaa

SEQ ID NO: 50478 - DNA, 600 bp, Chicken  19866894297514_2
ttaggctgtggctacaaaacatgcagcacargattagacttgatgctgagctgtggtggcccaggtgggcagtaagcaattttggtcactcacctcatgttggaggccaagggagtaccaaagctgtcctctgagcagcaagggctgtgccgagcacccttccttcgcctccccctctcctcctccctctcagtccagggggcatctgtggctgaactggtcccagagtccggctccaagtgagccagaggagcaaagttctcctcgatcagcttcgcactgtctcggatctgtccctgwacttctggggtgagggctgggagatcaaaagtgaaaaaggtcccatgagtgcgggctggggaggagaggatgtcaatggagtccaggctggtgtaagatgtgcctttggctcgatgggactccatgatgctctcaaaatgcttgctgaaagagtccatgccatccttggagaggctgtgccctagcaggaagggcactggagacttgagcatgccctgtgtgtctcgatccgtgatcctagagggaaagaaagcaagaggaactgatcactgaggagcaagaggtcgaagccccaaacaa

SEQ ID NO: 50479 - DNA, 600 bp, Chicken  19866894297514_3
ctccagccatatgcctctcttttaatgcgccatggacttttgttcccttagtggctcatcctcctaagaagcttacgagatggctactgctcccagccactcggcttgagcttagatccaataaacagctcaggcaccaaaaacaggatgtagttcagctccacttccaaacaaatccacaagtgcctgaattttccatgagccttcagagctcccggcacccacagcactcctggagccaccgaggacagcgtgacactcctctgcatatgtgacaccacagccactgagccaagcccrccctcaaggtcagcataagcagcagctccccacgtttgttttgaaggaggagraaagagcaggatggtctgatggtagtgagagcacctcaaagggaccgggctgccttcagactggctgacctcctccctgccgaagcactgtgctctctgagccctgccaaacctctgggcacggatcaccctgcaggaggctcagcttgtctgcagcatggctctgcgtccagcccagcgcaggagttcctacatctcgaacccctgagcatttcatcctagrgatgagcctgcccatcagtctgag

SEQ ID NO: 50480 - DNA, 600 bp, Chicken  19866894297514_4
gctcatcctcctaagaagcttacgagatggctactgctcccagccactcggcttgagcttagatccaataaacagctcaggcaccaaaaacaggatgtagttcagctccacttccaaacaaatccacaagtgcctgaattttccatgagccttcagagctcccggcacccacagcactcctggagccaccgaggacagcgtgacactcctctgcatatgtgacaccacagccactgagccaagcccrccctcaaggtcagcataagcagcagctccccacgtttgttttgaaggaggagraaagagcaggatggtctgatggtagtgagagcacctcaaagggaccgggctgccttcagactggctgacctcctccctgccgaagcactgtgctctctgagccctgccaaacctctgggcacggatcaccctgcaggaggctcagcttgtctgcagcatggctctgcgtccagcccagcgcaggagttcctacatctcgaacccctgagcatttcatcctagrgatgagcctgcccatcagtctgagcgtgtgacacagggatatttccaacacactgtcagcccttcagtcctataagc

SEQ ID NO: 50481 - DNA, 600 bp, Chicken  19866894297514_5
accacagccactgagccaagcccrccctcaaggtcagcataagcagcagctccccacgtttgttttgaaggaggagraaagagcaggatggtctgatggtagtgagagcacctcaaagggaccgggctgccttcagactggctgacctcctccctgccgaagcactgtgctctctgagccctgccaaacctctgggcacggatcaccctgcaggaggctcagcttgtctgcagcatggctctgcgtccagcccagcgcaggagttcctacatctcgaacccctgagcatttcatcctagrgatgagcctgcccatcagtctgagcgtgtgacacagggatatttccaacacactgtcagcccttcagtcctataagcccaaacacaaccctaaaagcctctttcactcacaagctgctatcactttattagagcaccaaaaaagcacttgttatgccattctctttcctgattaaatgcgaagaactgatccagcttgtcataacatttgttatgaacaaacagcttcttacagaaggctcagaaaatgcagcgctgttacaagcactgagtgatttatcatttattagccttcatatcc

SEQ ID NO: 50482 - DNA, 600 bp, Chicken  19866894297518_1
accccaaactcaaacctcaccatccatctgccccatcttcagacctgggctttaaatttccaagcttatctcatgctacatcaagaatgagaaacaagactgctgtggctccatcctgcacatggtcttggcagttgctgacctccctcattccagtgggactgcttctgtccaccccagggatgtcccatctgtatttggctaaggcagacgggctgaaggattcacttctagtaaactgcagaatagttaacagaacactttcatatagctagttgttctgctgtcagctggtgacaytgtgctagtggtacaacgaattacagctgctgcaggatggggtagcaaggcaatagcccttgtccacaagcaaacctgagcttctaaaaggcgctttttaacccatataattctctacatctcacatgaaacaaaagccagtcttttcattgtttttcaattgaaaagagactgcaactgcagctcacaaaaaacgtggggctgaaccagaatgtgcagcatcatagaaagaaatacccaaactccatgttgctgcatgatttaggaaaagcagaaccatgtcttcttgcttcaatacaa

SEQ ID NO: 50483 - DNA, 600 bp, Chicken  19866894297525_1
cagcagaggggtactctgacagaatggcatctgacatgggagtgtgtatggagcaaagggctggaactgaattccttcatgcagaaaaaatgcacccattgacatttactgacacttgctgaacactgatggagaccaaacaagtggacaagaggatgtgagcacagtgagggctggtgcagatagttatgagcatggcatgcaggctcttgttcatggctggtgcaaatgcagagctagtggtggtgactgttgcagctacaaaacactggttttcgactttgctgtatcatgctcaascagctactgttactgtgctccttctggtcgtttctgtggaaayaaataggaggcattacttttggagcaacttgtgtatgttgtggattattggggtttcaagwgtgtgggttttcagtgttctctgcacatgtcctcaccaagatggggcattggacaaaacatccaaaagtatttaggtttaaaaaaaaaaatagagttgtttgggtttgtcattattgaaaatagtatgtttatactgtggctttcattaaaaaataaacaacttgaaagaaattaggtggttcttcttggtaatag

SEQ ID NO: 50484 - DNA, 600 bp, Chicken  19866894297525_2
gtgtatggagcaaagggctggaactgaattccttcatgcagaaaaaatgcacccattgacatttactgacacttgctgaacactgatggagaccaaacaagtggacaagaggatgtgagcacagtgagggctggtgcagatagttatgagcatggcatgcaggctcttgttcatggctggtgcaaatgcagagctagtggtggtgactgttgcagctacaaaacactggttttcgactttgctgtatcatgctcaascagctactgttactgtgctccttctggtcgtttctgtggaaayaaataggaggcattacttttggagcaacttgtgtatgttgtggattattggggtttcaagwgtgtgggttttcagtgttctctgcacatgtcctcaccaagatggggcattggacaaaacatccaaaagtatttaggtttaaaaaaaaaaatagagttgtttgggtttgtcattattgaaaatagtatgtttatactgtggctttcattaaaaaataaacaacttgaaagaaattaggtggttcttcttggtaataggtgagtttgttttgctgttaagtgttgtttttttgttaaagtt

SEQ ID NO: 50485 - DNA, 600 bp, Chicken  19866894297525_3
tttactgacacttgctgaacactgatggagaccaaacaagtggacaagaggatgtgagcacagtgagggctggtgcagatagttatgagcatggcatgcaggctcttgttcatggctggtgcaaatgcagagctagtggtggtgactgttgcagctacaaaacactggttttcgactttgctgtatcatgctcaascagctactgttactgtgctccttctggtcgtttctgtggaaayaaataggaggcattacttttggagcaacttgtgtatgttgtggattattggggtttcaagwgtgtgggttttcagtgttctctgcacatgtcctcaccaagatggggcattggacaaaacatccaaaagtatttaggtttaaaaaaaaaaatagagttgtttgggtttgtcattattgaaaatagtatgtttatactgtggctttcattaaaaaataaacaacttgaaagaaattaggtggttcttcttggtaataggtgagtttgttttgctgttaagtgttgtttttttgttaaagttagattcaatgctaacgcaacctgttaatcataattttcttaatgatttcttcatggattca

SEQ ID NO: 50486 - DNA, 600 bp, Chicken  19866894297530_1
gcttgggggttgagactggaaccagtgctgaccaatgaagtgcagcactacagaggcatgtggtggaaagactagaacaaataattttacttttccctcaaaaaaatccttgttgttatctgttctgaggctgtttttaattttagcttgaatatttttttaatttttgtcctttcttgccttaaggaaggggagccttctggaaagagaaaagcagaggatgatgacaaagcaagtaagaagcataagaagtatgtcatcagtgatgaagaggaagatgatgatgattaacattgaggsagcactgaagttgctttctatatatacatatttatatataaattgtacagttctcttacagcaaagatgtaagtagccatattggggttattttgataaaggagaattccattgaaatttgtgtttctggtgtgaataaaagttggtttctttctttttactttctcatatttttacatcttatcttactgcagcagctgctgcaatggggatcatcatagcatcagtttttaaatcttgtacagtacatttcagttttgaaatctatagtacaaactggttgtacaactgaatagaact

SEQ ID NO: 50487 - DNA, 600 bp, Chicken  19866894297530_2
ggagatgaaggttaccatttgtacagaagatttggaatatcatatgagtggcacaacaccgtactgttttttcctgcactttcctattacgtactgctggctgtggatggtacattactgtgctgttatattttgatatttttgactgaaggtatttcttatcatgtctactctgagtaaactgtgaagttcctgtagttagaatagtaaaccaaccacaagatgtttattttttcataaattgaacgaaaatccacctctcatctgagcgttagcattaataagaataatcacattagygatggaactgtcaggatagaagcacttgtttatacaaaaccaacgaatttctgcaagttcatgaaaggcttctttaacaactgcagtgagccgccctgtgaatacatatcctgctaatagcattttgtaatctcatacaagccttatgatgcattttcctattgttctgggttggctgaaaagacagcggaggagaatattgtggacagagttattgctgcttttatgctatttttaaacaccttatttgattatgcaaatcgcattgcaaaatgaggagaggctacaagaaatgtctca

SEQ ID NO: 50488 - DNA, 600 bp, Chicken  19866894297537_1
caactttgtgccatttgcttgctggctcatctgcagacagctaactttcagtgttgcaacttgtgaattagaaacagatacccaatcacagctctggaagtgtaggtctagtaccaagggtgctatacctgacgctactcagaaatctgtactgaattggcaggtgtgacacagaatctatgagagaattcggaactttcgctatcatcctggataatttcactcactctactgttacaggaaaggttttgatagcccagtgtacctcagatggtcctaagtgtctgctagtgagctcasaactgagctcagagttccagtcctgattttgctgaggtttgggagcattagaaaaaagttcatcataaaggaacaaacaagttaaattacatactctgaaagaccctgctagtttcatctgactgcctttctgaaatgttattatcaaattacactatagtaacttcagaattttgtgtttaatatggattaagctgtcaccacggttctgaatttcgttgacttgcctttgaaatctcttctgtgacaatgggaagtgtcaggagcctggctgtgttacctaattggctcattttcaga

SEQ ID NO: 50489 - DNA, 600 bp, Chicken  19866894297542_1
ttcttaaatccccaacttccagggtgtctgccttctgaacagaacttctggacaccacctcacaagatttgtgaggataaaggtgatttaactcacagacagaccttccacgctgaagctccacagaaaggcaggcataattcacatcagtttcccaccatctgcatccagtatgctttgtgatctttacagctcaactgtccagcagctctcactaacaatctaaagaagcttagagcctcaaatatctatgaacactcactggagctagccatctctagattttacttctacaaactyttctgtcttagtatacacaaaamaaatgcagtgaatctaaactgttattaacttgcatcctgtacaccacctattttttttttwattttattttacagctcattatttaccacacacacatcaacatgagcaaargtgtaatgttagccgtgaattttaactaaccaccaccaaacacatttgctattggaatgctggtaggcttcaacaaacattttctttgctcacttttaaagaagtattttgaggcattacaaggctggctgctgcctcaggccagagcagtgtgggctcccaagg

SEQ ID NO: 50490 - DNA, 600 bp, Chicken  19866894297542_2
gtgtctgccttctgaacagaacttctggacaccacctcacaagatttgtgaggataaaggtgatttaactcacagacagaccttccacgctgaagctccacagaaaggcaggcataattcacatcagtttcccaccatctgcatccagtatgctttgtgatctttacagctcaactgtccagcagctctcactaacaatctaaagaagcttagagcctcaaatatctatgaacactcactggagctagccatctctagattttacttctacaaactyttctgtcttagtatacacaaaamaaatgcagtgaatctaaactgttattaacttgcatcctgtacaccacctattttttttttwattttattttacagctcattatttaccacacacacatcaacatgagcaaargtgtaatgttagccgtgaattttaactaaccaccaccaaacacatttgctattggaatgctggtaggcttcaacaaacattttctttgctcacttttaaagaagtattttgaggcattacaaggctggctgctgcctcaggccagagcagtgtgggctcccaagggccatccaattatcccagtcagg

SEQ ID NO: 50491 - DNA, 600 bp, Chicken  19866894297542_3
gatttaactcacagacagaccttccacgctgaagctccacagaaaggcaggcataattcacatcagtttcccaccatctgcatccagtatgctttgtgatctttacagctcaactgtccagcagctctcactaacaatctaaagaagcttagagcctcaaatatctatgaacactcactggagctagccatctctagattttacttctacaaactyttctgtcttagtatacacaaaamaaatgcagtgaatctaaactgttattaacttgcatcctgtacaccacctattttttttttwattttattttacagctcattatttaccacacacacatcaacatgagcaaargtgtaatgttagccgtgaattttaactaaccaccaccaaacacatttgctattggaatgctggtaggcttcaacaaacattttctttgctcacttttaaagaagtattttgaggcattacaaggctggctgctgcctcaggccagagcagtgtgggctcccaagggccatccaattatcccagtcaggaagcagggcaggctggagacagcacgagctccaagcaccaggcaccttcataggaacaggc

SEQ ID NO: 50492 - DNA, 600 bp, Chicken  19866894297542_4
cataattcacatcagtttcccaccatctgcatccagtatgctttgtgatctttacagctcaactgtccagcagctctcactaacaatctaaagaagcttagagcctcaaatatctatgaacactcactggagctagccatctctagattttacttctacaaactyttctgtcttagtatacacaaaamaaatgcagtgaatctaaactgttattaacttgcatcctgtacaccacctattttttttttwattttattttacagctcattatttaccacacacacatcaacatgagcaaargtgtaatgttagccgtgaattttaactaaccaccaccaaacacatttgctattggaatgctggtaggcttcaacaaacattttctttgctcacttttaaagaagtattttgaggcattacaaggctggctgctgcctcaggccagagcagtgtgggctcccaagggccatccaattatcccagtcaggaagcagggcaggctggagacagcacgagctccaagcaccaggcaccttcataggaacaggccaaagctacacaaggacagcagttcacaggtcaggatcagtggtgtccaca

SEQ ID NO: 50493 - DNA, 599 bp, Chicken  19866894297543_1
  misc_feature (1)..(41): n is any nucleotide
nnnnnnnnnnnnnnnnnnnnnnnnnnnnnnnnnnnnnnnnngtgctgcaggagttccctttccactcagaaagcacagactttcagtgtgcagcctggaccagtcagtacctttccattatcgcctatttctgcaatggccctacgttatcacagcactgatatttcactagttggacaattcaggggctattaatttcctccacgttgagactgagcctttgggaagcagcatttttcagctgtctgaatgagaggccaggtatagcccacgcattcagcatctgctctcatgcagaaygcatccatcagagcagcgcacaacatctgtcactaagcagccaacttctaaagagattaacaagaacttcgatccaagggggtgggaataacacttcttgcagttaacataaaaactcggttgtttcaatttgcatctcagttgcttctagtgttctaggaaaagagttgcattacctttcattcctcaccttaaacagacttaaatgtgtacttataagaagcaggacagcctacagcatayatttcaacctccttgacaatcattaagtaactctcccatcatactcacatgctcca

SEQ ID NO: 50494 - DNA, 600 bp, Chicken  19866894297543_2
gtctgaatgagaggccaggtatagcccacgcattcagcatctgctctcatgcagaaygcatccatcagagcagcgcacaacatctgtcactaagcagccaacttctaaagagattaacaagaacttcgatccaagggggtgggaataacacttcttgcagttaacataaaaactcggttgtttcaatttgcatctcagttgcttctagtgttctaggaaaagagttgcattacctttcattcctcaccttaaacagacttaaatgtgtacttataagaagcaggacagcctacagcatayatttcaacctccttgacaatcattaagtaactctcccatcatactcacatgctccaacaaagacctgtttcttctgacccaagacacagaccggtccacactacgactcctcagaaggcaccttaaagcagggaagtcactcaggctgaaggtaccattgaattaattctttgtaccccagtatcagtcagctgatacactaacagtgcactgacacactacagttcaagtggagacacagctactgaagcttatttacttctacacgtttgccacgggcatcctcagcccgtgatcaca

SEQ ID NO: 50495 - DNA, 600 bp, Chicken  19866894297543_3
tctcatctagtgcttccttcaagaaggaaagaagtcatccttgtaaggcgggcagaattagtacacaaagtgccctaaaccttcctcagagcggaggaagcacagcccagagacccttctccctccttgagggttctttacatcatctcagatggcctacatccataaactaaggagaggtcttaggaacctaaagtagcaagttgcatccggaaagaagtctggagaatgaaagggttgattaaaaggcagcagatgcaccgaattaacaaacaaacacaccagaaagttacccccatmcccttcrcaccccaacaccggatgccggccgttcctcccgcccacagaaggggcctggcccactcagaacctggacctgggaacactgcatcacctgacaccatttattgctaaacggcagtaaggaacgtccaaagggtaactgttagacgtagctttactaacttcaagctgcgttacatacaggcagtcacttcgagctgggaatctatccgaagaaacagcagctttagttttacctgccttcagtaaaagtacacgaagtcttaaaagcagtgcctgactgctttgcttattgca

SEQ ID NO: 50496 - DNA, 600 bp, Chicken  19866894297543_4
tagtgcttccttcaagaaggaaagaagtcatccttgtaaggcgggcagaattagtacacaaagtgccctaaaccttcctcagagcggaggaagcacagcccagagacccttctccctccttgagggttctttacatcatctcagatggcctacatccataaactaaggagaggtcttaggaacctaaagtagcaagttgcatccggaaagaagtctggagaatgaaagggttgattaaaaggcagcagatgcaccgaattaacaaacaaacacaccagaaagttacccccatmcccttcrcaccccaacaccggatgccggccgttcctcccgcccacagaaggggcctggcccactcagaacctggacctgggaacactgcatcacctgacaccatttattgctaaacggcagtaaggaacgtccaaagggtaactgttagacgtagctttactaacttcaagctgcgttacatacaggcagtcacttcgagctgggaatctatccgaagaaacagcagctttagttttacctgccttcagtaaaagtacacgaagtcttaaaagcagtgcctgactgctttgcttattgcaagacata

SEQ ID NO: 50497 - DNA, 564 bp, Chicken  19866894297543_5
acctgggaacactgcatcacctgacaccatttattgctaaacggcagtaaggaacgtccaaagggtaactgttagacgtagctttactaacttcaagctgcgttacatacaggcagtcacttcgagctgggaatctatccgaagaaacagcagctttagttttacctgccttcagtaaaagtacacgaagtcttaaaagcagtgcctgactgctttgcttattgcaagacatacagatggctttccagtcaacgtgtaaatgacactgagcttctagaaatagcattgcatgcccgtttrtgcatatgcccgctcccccacagcctgcccaggcacgacgtcccaaataatagcgtttatctgtgcgcaaagaagcaaagccgtttctttctccagaccccccaacacgctgccttttctttcgcgggacaacacccgcatcctcccggcgtctaatagaacaagtgagtcctcaccccgcctaagttacagtcacagctacggaggagctgtaggtatctccaggctgctgttcgctcaggactgactttgtacaagttttcg

SEQ ID NO: 50498 - DNA, 600 bp, Chicken  19866894297544_1
actgtttctttctttctttctttttttccccagcaatagaaggctttcaaagaccggattttgttcttctggactaataaaaggatatgcattaactattaacccagaagcagttgatttactcatgaactccttcagtacagaacattacatctttctatcctgcttttggtgttgacaatatgcagtgctccaatgcttcagttatgtaaacaccaatgaaaatatacagcaactagaagtgatcaagagtaagacatctgtcctatcaaatttcattttgtcctccctgttaatcartaaaaatcaaaaacgaaaataaaacaaacagatcttggctgtccagtgtttttctcatcagaactcttattttgagtcttcaggattcagtctagtagcaagcatcagagtaaataaacacttctgatattgatccacgtcattctactgctttctaagtgcctacaacttcaggagtgcccatgatataaatgttgccactcgtgtttctctcaattctcaatgtttgaacttctaggagattggtactggaaatatgaactgaaattcaggccatacattaacagaagcagaggggac

SEQ ID NO: 50499 - DNA, 600 bp, Chicken  19866894297548_1
aactgtaaacaagtattagttaattaattaatagaatttgattaataaatatatttgaaattcttaatcagtgtccagagttattttaaccttttttttggtgagataatgtattgcctttacaattcaccatagacctcactgacagaataccagcacaaaataaatgcactcactgtatcaactcaactaatgcattaataattttccactataaactaatcctaggaaatttatatttgctcttaccttattgcctttcacgctatcacagaagcaggggcttttacctttgcagaygcagttctggaaaaaaaaaaagacaaattctataataaaattattttcctcattgtgtttcttggtgaaggataaatgagaactgttttttgtttgtttgtttgtttcttagtttgtttttaaaataacaacttaaaaaaaggttcatgaagagtggcaattcttaacagagaaaatagctcatcattgctcagtgcagtgttttgagacaggtaagattgctgcttccctttaaaagttagggtgaaggccaagaagccgtgcttgacaccatccaaactattaacaccaatacgaagt

SEQ ID NO: 50500 - DNA, 600 bp, Chicken  19866894297551_1
attcatacatacaaagaggtgactgattatttttgctgcacgtagaagatggagggcgtataattaaaagagtgtgtatttcattacattttcctctgacaaggtgcaatccatgagcaagtatttttccatattgcacaagccaggtaagcattttctttagcaaaggtctctttctagagcgtctcataagagggagaaagcttataaaatgtaaacttgaattgggtgaaaaaatggggtgaagaactgggggaagaatacggctgactcagatctacaacagccttcagtggtggyatttacacctactacgtggrgagcattcactgttttgtcaaaactgcgtgaagactgtttggggaagtgatggaaagacaaattggacagactcatcagtaaaacattcacagatccatatatctcctcatttcctcgttcacaaactttatggagaagtgaaaaaagtgggaaatctactcctaggaggctggacaagatttgaatgtatggcatatgccttctacttactagtttattggacaaactgagacgtgtgtaaagtgttcacttccaaacgctgaggtgccctgctctact

SEQ ID NO: 50501 - DNA, 600 bp, Chicken  19866894297551_2
gactgattatttttgctgcacgtagaagatggagggcgtataattaaaagagtgtgtatttcattacattttcctctgacaaggtgcaatccatgagcaagtatttttccatattgcacaagccaggtaagcattttctttagcaaaggtctctttctagagcgtctcataagagggagaaagcttataaaatgtaaacttgaattgggtgaaaaaatggggtgaagaactgggggaagaatacggctgactcagatctacaacagccttcagtggtggyatttacacctactacgtggrgagcattcactgttttgtcaaaactgcgtgaagactgtttggggaagtgatggaaagacaaattggacagactcatcagtaaaacattcacagatccatatatctcctcatttcctcgttcacaaactttatggagaagtgaaaaaagtgggaaatctactcctaggaggctggacaagatttgaatgtatggcatatgccttctacttactagtttattggacaaactgagacgtgtgtaaagtgttcacttccaaacgctgaggtgccctgctctacttccagtgcaatctcgcttct

SEQ ID NO: 50502 - DNA, 600 bp, Chicken  19866894297553_1
tttgaatcttaaggatttattttccctggaagcaatttctcctgtcattcccaagagtcactgtgagggcacatcagctctctaggatggcaaaggaggagtttacttgaggattaaattactcagcagtttccacaccacctaggggaaaccagggacaaattccctacacatgtatttattttttctctaaggatttttaaagtactcactacagatctttccaatccttttttaaacccttgtaattcaagtagtagatttaccttccgcaaggcagccactcagaacaagttcacrcccaggcacattttggcagatggacatcacatgcactaaaggatttgaaaaactacactgatgctaactgagccaaaaggtatttcagatttccagcagaaaatgcacactgatctatttttgcyccacgggtgagaacttgcagctagtcacttaacattaaaatgaygtgccgcaacattaattactagggtatttgtgtgccayatttctcatgttccctgtcttggaagacaaaactgttctacggagatatcagttttacatttctgatttctgtgggaaaacatacatgaaagg

SEQ ID NO: 50503 - DNA, 600 bp, Chicken  19866894297553_2
gcagtttccacaccacctaggggaaaccagggacaaattccctacacatgtatttattttttctctaaggatttttaaagtactcactacagatctttccaatccttttttaaacccttgtaattcaagtagtagatttaccttccgcaaggcagccactcagaacaagttcacrcccaggcacattttggcagatggacatcacatgcactaaaggatttgaaaaactacactgatgctaactgagccaaaaggtatttcagatttccagcagaaaatgcacactgatctatttttgcyccacgggtgagaacttgcagctagtcacttaacattaaaatgaygtgccgcaacattaattactagggtatttgtgtgccayatttctcatgttccctgtcttggaagacaaaactgttctacggagatatcagttttacatttctgatttctgtgggaaaacatacatgaaaggttttaaaatttgatactggtctgggttcaaataaaaaagcttgctgcctgtcatttttactgtttctcatttactgagtcaatatgatgccaggtaaactctacggtacgtaaaaccaggacagt

SEQ ID NO: 50504 - DNA, 600 bp, Chicken  19866894297553_3
cacatgtatttattttttctctaaggatttttaaagtactcactacagatctttccaatccttttttaaacccttgtaattcaagtagtagatttaccttccgcaaggcagccactcagaacaagttcacrcccaggcacattttggcagatggacatcacatgcactaaaggatttgaaaaactacactgatgctaactgagccaaaaggtatttcagatttccagcagaaaatgcacactgatctatttttgcyccacgggtgagaacttgcagctagtcacttaacattaaaatgaygtgccgcaacattaattactagggtatttgtgtgccayatttctcatgttccctgtcttggaagacaaaactgttctacggagatatcagttttacatttctgatttctgtgggaaaacatacatgaaaggttttaaaatttgatactggtctgggttcaaataaaaaagcttgctgcctgtcatttttactgtttctcatttactgagtcaatatgatgccaggtaaactctacggtacgtaaaaccaggacagtgaaatttctgcatttatctcacatccaaaaccaacataggcagc

SEQ ID NO: 50505 - DNA, 600 bp, Chicken  19866894297553_4
ctcactacagatctttccaatccttttttaaacccttgtaattcaagtagtagatttaccttccgcaaggcagccactcagaacaagttcacrcccaggcacattttggcagatggacatcacatgcactaaaggatttgaaaaactacactgatgctaactgagccaaaaggtatttcagatttccagcagaaaatgcacactgatctatttttgcyccacgggtgagaacttgcagctagtcacttaacattaaaatgaygtgccgcaacattaattactagggtatttgtgtgccayatttctcatgttccctgtcttggaagacaaaactgttctacggagatatcagttttacatttctgatttctgtgggaaaacatacatgaaaggttttaaaatttgatactggtctgggttcaaataaaaaagcttgctgcctgtcatttttactgtttctcatttactgagtcaatatgatgccaggtaaactctacggtacgtaaaaccaggacagtgaaatttctgcatttatctcacatccaaaaccaacataggcagcaacactacaaacttccctgccaaacttaatatccaccg

SEQ ID NO: 50506 - DNA, 599 bp, Chicken  19866894297556_1
  misc_feature (1)..(10): n is any nucleotide
nnnnnnnnnncgaggcgagtggaggtggggcggggctatgcgttgcgaggcgggagaggcggggagaggttggcgaggtggaacgaggcgaggcgaggcggggcctggcggggcgaggctaggcggggtagggcgaggtggggcgaggcagggctgggagaggcgtggcagcgcgaggcggggcgaggtggttcgaggctaggcgaggcggggcgaggcggtgcgaggagaggcaaggcggggcgtagctaggcgaagtggggcggagcagggcggggctaggctaggcaagacggggcraggcatggcggggcggggcgagacggggcgatgttggatgaggygggacagggtggggctaggcggggcaaggctaggtgtagcggggtgaggcggggcgaggctgggcaaaactagtcctggcaggcgaggcgtcacggggcggggtgagggcaagcgaggcggggcgaggcgaggcggggcaaggcgaggcgtggtgaggggaagtgaggcgggttgaggcgtggtgaggcggggtggggcgaggcgggcgaggtggagcgatgtggggcaaggcgaaggaaagcaaggtggggtga

SEQ ID NO: 50507 - DNA, 600 bp, Chicken  19866894297556_2
gcgaggcgggagaggcggggagaggttggcgaggtggaacgaggcgaggcgaggcggggcctggcggggcgaggctaggcggggtagggcgaggtggggcgaggcagggctgggagaggcgtggcagcgcgaggcggggcgaggtggttcgaggctaggcgaggcggggcgaggcggtgcgaggagaggcaaggcggggcgtagctaggcgaagtggggcggagcagggcggggctaggctaggcaagacggggcraggcatggcggggcggggcgagacggggcgatgttggatgaggygggacagggtggggctaggcggggcaaggctaggtgtagcggggtgaggcggggcgaggctgggcaaaactagtcctggcaggcgaggcgtcacggggcggggtgagggcaagcgaggcggggcgaggcgaggcggggcaaggcgaggcgtggtgaggggaagtgaggcgggttgaggcgtggtgaggcggggtggggcgaggcgggcgaggtggagcgatgtggggcaaggcgaaggaaagcaaggtggggtgaggcgagtggaagcgaggtggggagaggcgaggcaaggcggcccga

SEQ ID NO: 50508 - DNA, 514 bp, Chicken  19866894297559_1
ggcctttagcattactgcagaggtaattagaagccatacttcaaccaactgcagaaacaactgcagttagtgtttgtataacacaattagagtcttatattacagtgaaggttattgggttctcttcttgcaatttttaagatcaaagaagaaatgaacacttttcattttgtcaggtaaagaccttccttttgatggctgtacagagtctttacttccagcgtataactcagacattcatgaataaattgaatctctaataacagtcagctggatttaattcctcctcttgatggaagyacagcactgtcaatacacagtgagatttaatattgctgttaatttactgcaggtaaaaggtagatgctagatcttcatgttgtatctaaaaatagcttcagataaacagggaaaaaaaaagatggtaagaactgatgaatgatcattctacttcatttttttttttttttttccagaggaacatccaggtgccagctggtggaaaggcagatgc

SEQ ID NO: 50509 - DNA, 599 bp, Chicken  19866894297566_1
  misc_feature (1)..(17): n is any nucleotide
nnnnnnnnnnnnnnnnnttgcagctatgcctccccagtccctgctaacatccaaaaagcaataatgcatacaacaaagaatagaaatgagtcctagagcagagcatgtgagacagagatggttttcaactacttacttgtttttttgtgcatcctcattccagcctgcccccagcccacctgtgtgatctgcaggagcacacaggtccttctctgggggccccttctctgtgaagctgcattacctttgtgcaaatgcagatattacctgaaaagaagcagctcaggagatgatcagggrcacaccactgagccaggctgtcaatgtctgcacttaggtgatctgttttttccctgaagagactgggcagagtttatgtgctgccacctggacccaagtggaaacagcaccaggtttatgagtcaggggctctcagctgctcccttggctatgccactgctgctctgcaatgatgagcaaacaggatcctgcatctgcaagctggactcagcactgaagctccagtgccagtaccaccagctcttccactcttccctccctcactactctcacaaaatgagttcctcctcctagaggag

SEQ ID NO: 50510 - DNA, 599 bp, Chicken  19866894297567_1
  misc_feature (1)..(124): n is any nucleotide
nnnnnnnnnnnnnnnnnnnnnnnnnnnnnnnnnnnnnnnnnnnnnnnnnnnnnnnnnnnnnnnnnnnnnnnnnnnnnnnnnnnnnnnnnnnnnnnnnnnnnnnnnnnnnnnnnnnnnnnnnnnnggtgatgcacattggagctcacagaatgctgcctcgcagctgaacatcaggaattttgcagcgtgacagtaaagttttacagcgaaagaacagtgcgggatggagagatgcccttaggtaacccgagggctttacaggtgcctctcacttccagctcagcttttccagtccaacayagcttcatcaagaattcaaaaacacttccatgtgcagtgagtcactctgctgccctgctttgctcatgcctgcagtcactgtgggtgacatttccctactactgtgatgaaagcacccaaatstaagtgcyggacacctgcactgtcaaatgcttctcacaaagcaaagattttattatttggggtttgttctgaaattagaagtaaattctttctaatgtgactctttacttccatgtagcagaaatgctaaatcgtggcctgaagcagtgattgagcacctggtgggaaggcagggc

SEQ ID NO: 50511 - DNA, 599 bp, Chicken  19866894297567_2
  misc_feature (1)..(1): n is any nucleotide
nggtgatgcacattggagctcacagaatgctgcctcgcagctgaacatcaggaattttgcagcgtgacagtaaagttttacagcgaaagaacagtgcgggatggagagatgcccttaggtaacccgagggctttacaggtgcctctcacttccagctcagcttttccagtccaacayagcttcatcaagaattcaaaaacacttccatgtgcagtgagtcactctgctgccctgctttgctcatgcctgcagtcactgtgggtgacatttccctactactgtgatgaaagcacccaaatstaagtgcyggacacctgcactgtcaaatgcttctcacaaagcaaagattttattatttggggtttgttctgaaattagaagtaaattctttctaatgtgactctttacttccatgtagcagaaatgctaaatcgtggcctgaagcagtgattgagcacctggtgggaaggcagggccaacycaaggagctcaggtgtatgcaatgtacctgagtgactggaaggggtggagccaggattcatcccttcccagacctcttttaagggttggcagtggaagcaaggggatcttgctgaaga

SEQ ID NO: 50512 - DNA, 600 bp, Chicken  19866894297567_3
cacattggagctcacagaatgctgcctcgcagctgaacatcaggaattttgcagcgtgacagtaaagttttacagcgaaagaacagtgcgggatggagagatgcccttaggtaacccgagggctttacaggtgcctctcacttccagctcagcttttccagtccaacayagcttcatcaagaattcaaaaacacttccatgtgcagtgagtcactctgctgccctgctttgctcatgcctgcagtcactgtgggtgacatttccctactactgtgatgaaagcacccaaatstaagtgcyggacacctgcactgtcaaatgcttctcacaaagcaaagattttattatttggggtttgttctgaaattagaagtaaattctttctaatgtgactctttacttccatgtagcagaaatgctaaatcgtggcctgaagcagtgattgagcacctggtgggaaggcagggccaacycaaggagctcaggtgtatgcaatgtacctgagtgactggaaggggtggagccaggattcatcccttcccagacctcttttaagggttggcagtggaagcaaggggatcttgctgaagattcctgtat

SEQ ID NO: 50513 - DNA, 600 bp, Chicken  19866894297567_4
tcatcaagaattcaaaaacacttccatgtgcagtgagtcactctgctgccctgctttgctcatgcctgcagtcactgtgggtgacatttccctactactgtgatgaaagcacccaaatstaagtgcyggacacctgcactgtcaaatgcttctcacaaagcaaagattttattatttggggtttgttctgaaattagaagtaaattctttctaatgtgactctttacttccatgtagcagaaatgctaaatcgtggcctgaagcagtgattgagcacctggtgggaaggcagggccaacycaaggagctcaggtgtatgcaatgtacctgagtgactggaaggggtggagccaggattcatcccttcccagacctcttttaagggttggcagtggaagcaaggggatcttgctgaagattcctgtattctggaggtcttctaagggtaagcagcttctttcctttatttcygtgcctatagctgcagtaattgggcttatccctacttgctgcagcctagtacttttgcttcttcactgtcattgctatgctttccattgccattccagaatggccccaaatgagtgatttgatgctgct

SEQ ID NO: 50514 - DNA, 458 bp, Chicken  19866894297567_5
ttatttggggtttgttctgaaattagaagtaaattctttctaatgtgactctttacttccatgtagcagaaatgctaaatcgtggcctgaagcagtgattgagcacctggtgggaaggcagggccaacycaaggagctcaggtgtatgcaatgtacctgagtgactggaaggggtggagccaggattcatcccttcccagacctcttttaagggttggcagtggaagcaaggggatcttgctgaagattcctgtattctggaggtcttctaagggtaagcagcttctttcctttatttcygtgcctatagctgcagtaattgggcttatccctacttgctgcagcctagtacttttgcttcttcactgtcattgctatgctttccattgccattccagaatggccccaaatgagtgatttgatgctgctaagggaaatgccttacaaagggaaagaaa

SEQ ID NO: 50515 - DNA, 599 bp, Chicken  19866894297571_1
  misc_feature (1)..(171): n is any nucleotide
nnnnnnnnnnnnnnnnnnnnnnnnnnnnnnnnnnnnnnnnnnnnnnnnnnnnnnnnnnnnnnnnnnnnnnnnnnnnnnnnnnnnnnnnnnnnnnnnnnnnnnnnnnnnnnnnnnnnnnnnnnnnnnnnnnnnnnnnnnnnnnnnnnnnnnnnnnnnnnnnnnnnnnnnnnncagcacatgcttctgaaaggtaggaaataccagatttcagctggcttgataatttaaactattttttgcatacaagtgtctgaaatatgctcatctagaaaagcaggatgtgactataatgtctggacrtaaagctaatgtctctgtacgtttgagctggtccaggaagctgcagcatgttatctgatagcacargctgctgaagccagcagtcatctcagtcccattaagcctctctgctctctgaactccagttttgcagtctgtctttaccttcagcatgttttgtgtccttgataaagaatatgtgaagagcattgtagaaatygctgttgatagctcttttctatgtatccaatagaggctcttgaccacaagagtaaggttygtatgtatttcctcgatagctgatctagactgtaccatct

SEQ ID NO: 50516 - DNA, 599 bp, Chicken  19866894297571_2
  misc_feature (1)..(105): n is any nucleotide
nnnnnnnnnnnnnnnnnnnnnnnnnnnnnnnnnnnnnnnnnnnnnnnnnnnnnnnnnnnnnnnnnnnnnnnnnnnnnnnnnnnnnnnnnnnnnnnnnnnnnnnnncagcacatgcttctgaaaggtaggaaataccagatttcagctggcttgataatttaaactattttttgcatacaagtgtctgaaatatgctcatctagaaaagcaggatgtgactataatgtctggacrtaaagctaatgtctctgtacgtttgagctggtccaggaagctgcagcatgttatctgatagcacargctgctgaagccagcagtcatctcagtcccattaagcctctctgctctctgaactccagttttgcagtctgtctttaccttcagcatgttttgtgtccttgataaagaatatgtgaagagcattgtagaaatygctgttgatagctcttttctatgtatccaatagaggctcttgaccacaagagtaaggttygtatgtatttcctcgatagctgatctagactgtaccatctagtacactgtcttaaatctactgccatttaggtaattatcaagggcaaygtaagagatgtatatga

SEQ ID NO: 50517 - DNA, 600 bp, Chicken  19866894297571_3
accagatttcagctggcttgataatttaaactattttttgcatacaagtgtctgaaatatgctcatctagaaaagcaggatgtgactataatgtctggacrtaaagctaatgtctctgtacgtttgagctggtccaggaagctgcagcatgttatctgatagcacargctgctgaagccagcagtcatctcagtcccattaagcctctctgctctctgaactccagttttgcagtctgtctttaccttcagcatgttttgtgtccttgataaagaatatgtgaagagcattgtagaaatygctgttgatagctcttttctatgtatccaatagaggctcttgaccacaagagtaaggttygtatgtatttcctcgatagctgatctagactgtaccatctagtacactgtcttaaatctactgccatttaggtaattatcaagggcaaygtaagagatgtatatgatgtactctgcatatttaaagcaaggctaggttcttgctgtattgtcttaactcttaaattccttactttcctagctctttttcacttgaaaaaaaaaaagtcacaagtataatcctatggttggctatctgtac

SEQ ID NO: 50518 - DNA, 600 bp, Chicken  19866894297571_4
gctcatctagaaaagcaggatgtgactataatgtctggacrtaaagctaatgtctctgtacgtttgagctggtccaggaagctgcagcatgttatctgatagcacargctgctgaagccagcagtcatctcagtcccattaagcctctctgctctctgaactccagttttgcagtctgtctttaccttcagcatgttttgtgtccttgataaagaatatgtgaagagcattgtagaaatygctgttgatagctcttttctatgtatccaatagaggctcttgaccacaagagtaaggttygtatgtatttcctcgatagctgatctagactgtaccatctagtacactgtcttaaatctactgccatttaggtaattatcaagggcaaygtaagagatgtatatgatgtactctgcatatttaaagcaaggctaggttcttgctgtattgtcttaactcttaaattccttactttcctagctctttttcacttgaaaaaaaaaaagtcacaagtataatcctatggttggctatctgtacctaacaagcttgaagctgtcactggaaaatagggagatactaaaatctctcaacaaaaca

SEQ ID NO: 50519 - DNA, 600 bp, Chicken  19866894297571_5
tgttatctgatagcacargctgctgaagccagcagtcatctcagtcccattaagcctctctgctctctgaactccagttttgcagtctgtctttaccttcagcatgttttgtgtccttgataaagaatatgtgaagagcattgtagaaatygctgttgatagctcttttctatgtatccaatagaggctcttgaccacaagagtaaggttygtatgtatttcctcgatagctgatctagactgtaccatctagtacactgtcttaaatctactgccatttaggtaattatcaagggcaaygtaagagatgtatatgatgtactctgcatatttaaagcaaggctaggttcttgctgtattgtcttaactcttaaattccttactttcctagctctttttcacttgaaaaaaaaaaagtcacaagtataatcctatggttggctatctgtacctaacaagcttgaagctgtcactggaaaatagggagatactaaaatctctcaacaaaacatttaatttttctagcatttgttagaggaaattttctccttacacttcttctctgtagaagcattaaataaatgtaagtatttaggcctg

SEQ ID NO: 50520 - DNA, 600 bp, Chicken  19866894297573_1
agggtttggaaatagaagtgaaatatacctaagaccaacttaaatgagcagactgacagaaaccgacctcagtacaaatgagaatcagacaacaggaagaaattgttcagccatgaaaattcactgctggaatccagcataacatttaaaagcgaatggtcctgttttacataaaaactgaggttatttagatattaccaaatgcattttcccccattctctgcactccttcttttttctttattcctttattttttctccccttcccaccctttccccttcccacacttctggcagaakgaggactgaactgctttcagtttgttttccattcaattcctgctcaatcttactttcagattctcatgctcaacacaaggctgaaaaaccaaagctgaaaatacggtaataacatgtttgcttgttgctcttgtttttaaatatatccccggggatttgtaacaaatcataaaaatgttttctactggtcttaaatattgtaaaagcttatttaatttaatcaaaacttaaatattaagccaagcttcattgcacaatgtgttcctttaatggtaaaagctaatgaaaaacacactaggt

SEQ ID NO: 50521 - DNA, 600 bp, Chicken  19866894297573_2
tttccattcaattcctgctcaatcttactttcagattctcatgctcaacacaaggctgaaaaaccaaagctgaaaatacggtaataacatgtttgcttgttgctcttgtttttaaatatatccccggggatttgtaacaaatcataaaaatgttttctactggtcttaaatattgtaaaagcttatttaatttaatcaaaacttaaatattaagccaagcttcattgcacaatgtgttcctttaatggtaaaagctaatgaaaaacacactaggtcaaattcactctattttcttcaccrgggagatacttgctcctttattaccaaggatcatttgttttgcttcattttgctgggaacagcctgcaaatttgtataatcagacagcgttctgcacatatttttcatggttattctgaaggagttttgtccccgtttctacccctggaacagcttttttgtcgggttttgttttttggaatgcgaatctcggctggatgactcactgggacactaactttatcttcatctgttttacagtaattggaccggggcaacttttgtagctgtatctgaggccgtttcccgcttgaactcacc

SEQ ID NO: 50522 - DNA, 600 bp, Chicken  19866894297574_1
gcgaagcccgaccccgggcacgccgctacgtggggccgaggggctgcgctgcgggtcgcagtcgcggcatcaggatttctttttcccttcggcctctttcttacagcccacaactgtcgctctagaccagtttcctgccttctctgctcctacatccgagaagcacaacaagcccttgctctgcttcacgcgtactttgcacatgtgcttcgctgtcctggtcctcatcactgtgtcctgctttagtttgttgtctgtaaacactcattgctgatttcacaggtgtcagcacccgcctcyattaaagcaccaggttgctggagccctctcctgtttcaaccaaagaattaaaggcaaagagccgtgcattcctcccaaggtggggggaaaggaagaagtacagctgaagcttctgccgagagattttacaaatggactgagtgagacacattaagtcatgtcacggcacactgctggtgctcagtgcacactccatcacgttaacccagtggtgcttgaggagcatggtcagctggcagagcctgtgtctgccgaggataacaatgtaacagttatcttctcttctatagaaaagaagct

SEQ ID NO: 50523 - DNA, 599 bp, Chicken  19866894297581_1
  misc_feature (1)..(28): n is any nucleotide
nnnnnnnnnnnnnnnnnnnnnnnnnnnnatctcgttaaaactacattttaaattaaagggacagtatatgaatttgttgtcgttctgttagtaaagctagtactgtaattactaaaatcatgatgttgactgcacataacaaacaagactgtaggttccacactcactgctttgcaataaagactagattagcttaagaatcagatttcagttttcctgacagccagtgaaaacctacccagacaaatgaagcagagctgaggaaagacaggtaccttttatgtactgttctaactgcartagtccattatataygcagagcactgagagaattgaagacctgcccatctttctacagccagcatacatccagcctggaagcacggcctgaaaacagcttttttctttcagggcccaagtttaggcccacacatctgttttctcttctatttgtacctatttcagacaaaaaagctagaactcatttggagttttctagaaagaaaaaaaaaaaaagactttggagatgaggctggagtttggtcagcgttaaaattggggctatattttgcttggtcttamaacaacaaggaagaaaa

SEQ ID NO: 50524 - DNA, 599 bp, Chicken  19866894297581_2
  misc_feature (1)..(13): n is any nucleotide
nnnnnnnnnnnnnatctcgttaaaactacattttaaattaaagggacagtatatgaatttgttgtcgttctgttagtaaagctagtactgtaattactaaaatcatgatgttgactgcacataacaaacaagactgtaggttccacactcactgctttgcaataaagactagattagcttaagaatcagatttcagttttcctgacagccagtgaaaacctacccagacaaatgaagcagagctgaggaaagacaggtaccttttatgtactgttctaactgcartagtccattatataygcagagcactgagagaattgaagacctgcccatctttctacagccagcatacatccagcctggaagcacggcctgaaaacagcttttttctttcagggcccaagtttaggcccacacatctgttttctcttctatttgtacctatttcagacaaaaaagctagaactcatttggagttttctagaaagaaaaaaaaaaaaagactttggagatgaggctggagtttggtcagcgttaaaattggggctatattttgcttggtcttamaacaacaaggaagaaaaaaagaaagcctcaga

SEQ ID NO: 50525 - DNA, 600 bp, Chicken  19866894297581_3
gtactgttctaactgcartagtccattatataygcagagcactgagagaattgaagacctgcccatctttctacagccagcatacatccagcctggaagcacggcctgaaaacagcttttttctttcagggcccaagtttaggcccacacatctgttttctcttctatttgtacctatttcagacaaaaaagctagaactcatttggagttttctagaaagaaaaaaaaaaaaagactttggagatgaggctggagtttggtcagcgttaaaattggggctatattttgcttggtcttamaacaacaaggaagaaaaaaagaaagcctcagaactataaccaaggcaacagtaaagtccaaacttctgcttattattttactggagaagcctccctgagccatcattcatgactcattacatttgattgtcccaaagtaaccaaatttccaggaggaatttctgtattctggcttgcatgtttggataattcatgcgtggataactggagcttcgcctttacaggcctcattcctagctggaaatacaactgggtagtacagttgtttgcaaggaaaagtaaatatcaaagtaccttttt

SEQ ID NO: 50526 - DNA, 600 bp, Chicken  19866894297586_1
ttcaggaaactcaagcagggctaacacccctctactacgttcaagatatgaacaagctctcctgaagcagccaacttagacaagcagtccatcatctgctgtctccccttcttcctcactaagagactatatacattatcattaagagccccattcttcctgtttctgaatccaaccctaacacaagccacgggaaaattttacagaataaccagcttctgatgttataactgcattatcaacacaggaaacgagaaaggaaaaaaaaattcttaccatcttagaaaagacatttcacayccaacattcamaaatcccagtaaaaacttgaaccaactccctgcttatacacagccacccattcactaagcccttcccttcccttcttgctgctcctggggctcacctgttggcagtcaacaacacctgattcactgtactaatttggcggaagaaccagcagcagaagtagaggaaagggaggcatgccatgttgtttgttacatttactcacctgtgatacctaactgcatgctgaacaagtcacacagcctaattggaaagggccaggaaactgtttctatattaattggtgaacaa

SEQ ID NO: 50527 - DNA, 600 bp, Chicken  19866894297586_2
caagcagggctaacacccctctactacgttcaagatatgaacaagctctcctgaagcagccaacttagacaagcagtccatcatctgctgtctccccttcttcctcactaagagactatatacattatcattaagagccccattcttcctgtttctgaatccaaccctaacacaagccacgggaaaattttacagaataaccagcttctgatgttataactgcattatcaacacaggaaacgagaaaggaaaaaaaaattcttaccatcttagaaaagacatttcacayccaacattcamaaatcccagtaaaaacttgaaccaactccctgcttatacacagccacccattcactaagcccttcccttcccttcttgctgctcctggggctcacctgttggcagtcaacaacacctgattcactgtactaatttggcggaagaaccagcagcagaagtagaggaaagggaggcatgccatgttgtttgttacatttactcacctgtgatacctaactgcatgctgaacaagtcacacagcctaattggaaagggccaggaaactgtttctatattaattggtgaacaatttctacatta

SEQ ID NO: 50528 - DNA, 599 bp, Chicken  19866894297593_1
  misc_feature (1)..(4): n is any nucleotide
nnnnaggaaaatttgttcttctctttgtggtatcctgtgcttctgaaattacctcttgtacttttcttacttccacccagagccctcagtagattagcagagatgaaaacctagtcacacttcactggttcctttgttcacaaagatacttgttttatttacaggttaactattatatgatttttaaagtattttaagatgatagcatttgtgaatacgactgacagttcttttcagattagtgggtgttctcatgttttcctatctatctgttcttgaaaagtccactttatacatttkcccagtaagcatccaagagtgaacagaccagaccagtttttgaacctaaacgtatgtaacgtgttttactggatattttgccatgagtagaattgtaaggcagtcctgctaggcatataatgcctttttgttggctttgtttcaagttgaatagaacccaagggaggcagaaggtatttgtgcttaaatctttctttttgaaagaatgggcccagtacactggtaaatgttctgtaacaaaaygtacgagtaactataakaatggagaagaaccatatactatatatactatatgagaa

SEQ ID NO: 50529 - DNA, 600 bp, Chicken  19866894297593_2
gggtgttctcatgttttcctatctatctgttcttgaaaagtccactttatacatttkcccagtaagcatccaagagtgaacagaccagaccagtttttgaacctaaacgtatgtaacgtgttttactggatattttgccatgagtagaattgtaaggcagtcctgctaggcatataatgcctttttgttggctttgtttcaagttgaatagaacccaagggaggcagaaggtatttgtgcttaaatctttctttttgaaagaatgggcccagtacactggtaaatgttctgtaacaaaaygtacgagtaactataakaatggagaagaaccatatactatatatactatatgagaactataagaatggaggagtgaggaattatcagtacagtgaaataatttttaggaaatgtatttaatccaagattttaaaaaattcattctttcaaaagtgctgatatgatagattcacatgcacatcgtgaacaatattgtggtagagaaacccttgaaaaaacttgtctatctgctctttgtataatgtcattcaaagcgaacatgctttccttttgttaggaatggtgaatcgggaagttctg

SEQ ID NO: 50530 - DNA, 600 bp, Chicken  19866894297593_3
cctatctatctgttcttgaaaagtccactttatacatttkcccagtaagcatccaagagtgaacagaccagaccagtttttgaacctaaacgtatgtaacgtgttttactggatattttgccatgagtagaattgtaaggcagtcctgctaggcatataatgcctttttgttggctttgtttcaagttgaatagaacccaagggaggcagaaggtatttgtgcttaaatctttctttttgaaagaatgggcccagtacactggtaaatgttctgtaacaaaaygtacgagtaactataakaatggagaagaaccatatactatatatactatatgagaactataagaatggaggagtgaggaattatcagtacagtgaaataatttttaggaaatgtatttaatccaagattttaaaaaattcattctttcaaaagtgctgatatgatagattcacatgcacatcgtgaacaatattgtggtagagaaacccttgaaaaaacttgtctatctgctctttgtataatgtcattcaaagcgaacatgctttccttttgttaggaatggtgaatcgggaagttctggaacaagtggaacgtgg

SEQ ID NO: 50531 - DNA, 600 bp, Chicken  19866894297593_4
aagaatggaggagtgaggaattatcagtacagtgaaataatttttaggaaatgtatttaatccaagattttaaaaaattcattctttcaaaagtgctgatatgatagattcacatgcacatcgtgaacaatattgtggtagagaaacccttgaaaaaacttgtctatctgctctttgtataatgtcattcaaagcgaacatgctttccttttgttaggaatggtgaatcgggaagttctggaacaagtggaacgtggatataggatgccttgccctcagggctgcccggaatctctccaygagttaatgaaactatgttggaagaaggaccctgatgagagaccaacatttgaatatatacagtctttcctggaggactactttactgctacagaaccacagtaccagcctggggacaatttataagccaacagtctatataacatgcacaaatctgccaaatgtaaaagacttgcaaagaattccggacgtctgtaaggaatcaaaggaaagaaaatcttcgctactttgcatgctcttaatggcaaactggaatttcataatacagttgcacaaaaccacttttcaggtgttataatc

SEQ ID NO: 50532 - DNA, 599 bp, Chicken  19866894297604_1
  misc_feature (1)..(40): n is any nucleotide
nnnnnnnnnnnnnnnnnnnnnnnnnnnnnnnnnnnnnnnnatttcaaaggaatcttcagtccaagggactgaatttcaattttacatcagtttcacgctgcaaaataagcgcttgtgttaggatttatcaagcacctaaaaactaagcagcatgagactgccagtggggaatacgatcctaacccagcaaattactgccacgttctgtttccagaactacaccacagggagttcacatctcgtcttttgaattaaactgaactaaactctgtcgagttttgtttcttatttagaaaaatytaaatgcatatacaaaaaaaaattwaaaaactacagmtcaaagtttayggaaataagaagggttatgtcacttaagtgaatgtttagcaaaacagaggacttagcagcagtcatatgcattcgtacacaaaatgttccatttacygtgtcagctcttactgcaagattttcctccctcataaatagattttcaacaattttcaagaatgcttcaacaaatcaggctcctttttgtaagaaagaaaatgtttaaaagaaaaaagaaagaaaaacctaaaaacaacctacatttcacggca

SEQ ID NO: 50533 - DNA, 599 bp, Chicken  19866894297604_2
  misc_feature (1)..(15): n is any nucleotide
nnnnnnnnnnnnnnnatttcaaaggaatcttcagtccaagggactgaatttcaattttacatcagtttcacgctgcaaaataagcgcttgtgttaggatttatcaagcacctaaaaactaagcagcatgagactgccagtggggaatacgatcctaacccagcaaattactgccacgttctgtttccagaactacaccacagggagttcacatctcgtcttttgaattaaactgaactaaactctgtcgagttttgtttcttatttagaaaaatytaaatgcatatacaaaaaaaaattwaaaaactacagmtcaaagtttayggaaataagaagggttatgtcacttaagtgaatgtttagcaaaacagaggacttagcagcagtcatatgcattcgtacacaaaatgttccatttacygtgtcagctcttactgcaagattttcctccctcataaatagattttcaacaattttcaagaatgcttcaacaaatcaggctcctttttgtaagaaagaaaatgtttaaaagaaaaaagaaagaaaaacctaaaaacaacctacatttcacggcaggaaagcagctcctgggatgctgaa

SEQ ID NO: 50534 - DNA, 599 bp, Chicken  19866894297604_3
  misc_feature (1)..(3): n is any nucleotide
nnnatttcaaaggaatcttcagtccaagggactgaatttcaattttacatcagtttcacgctgcaaaataagcgcttgtgttaggatttatcaagcacctaaaaactaagcagcatgagactgccagtggggaatacgatcctaacccagcaaattactgccacgttctgtttccagaactacaccacagggagttcacatctcgtcttttgaattaaactgaactaaactctgtcgagttttgtttcttatttagaaaaatytaaatgcatatacaaaaaaaaattwaaaaactacagmtcaaagtttayggaaataagaagggttatgtcacttaagtgaatgtttagcaaaacagaggacttagcagcagtcatatgcattcgtacacaaaatgttccatttacygtgtcagctcttactgcaagattttcctccctcataaatagattttcaacaattttcaagaatgcttcaacaaatcaggctcctttttgtaagaaagaaaatgtttaaaagaaaaaagaaagaaaaacctaaaaacaacctacatttcacggcaggaaagcagctcctgggatgctgaaattatctgttag

SEQ ID NO: 50535 - DNA, 600 bp, Chicken  19866894297604_4
ggaatcttcagtccaagggactgaatttcaattttacatcagtttcacgctgcaaaataagcgcttgtgttaggatttatcaagcacctaaaaactaagcagcatgagactgccagtggggaatacgatcctaacccagcaaattactgccacgttctgtttccagaactacaccacagggagttcacatctcgtcttttgaattaaactgaactaaactctgtcgagttttgtttcttatttagaaaaatytaaatgcatatacaaaaaaaaattwaaaaactacagmtcaaagtttayggaaataagaagggttatgtcacttaagtgaatgtttagcaaaacagaggacttagcagcagtcatatgcattcgtacacaaaatgttccatttacygtgtcagctcttactgcaagattttcctccctcataaatagattttcaacaattttcaagaatgcttcaacaaatcaggctcctttttgtaagaaagaaaatgtttaaaagaaaaaagaaagaaaaacctaaaaacaacctacatttcacggcaggaaagcagctcctgggatgctgaaattatctgttaggaaagtgatggg

SEQ ID NO: 50536 - DNA, 600 bp, Chicken  19866894297604_5
agcagcatgagactgccagtggggaatacgatcctaacccagcaaattactgccacgttctgtttccagaactacaccacagggagttcacatctcgtcttttgaattaaactgaactaaactctgtcgagttttgtttcttatttagaaaaatytaaatgcatatacaaaaaaaaattwaaaaactacagmtcaaagtttayggaaataagaagggttatgtcacttaagtgaatgtttagcaaaacagaggacttagcagcagtcatatgcattcgtacacaaaatgttccatttacygtgtcagctcttactgcaagattttcctccctcataaatagattttcaacaattttcaagaatgcttcaacaaatcaggctcctttttgtaagaaagaaaatgtttaaaagaaaaaagaaagaaaaacctaaaaacaacctacatttcacggcaggaaagcagctcctgggatgctgaaattatctgttaggaaagtgatgggcttaagagatctctctgctccacctccgcaggtttatttaacacgtctgcagaagtccagttcattttgcaccttagggcagcaacaggacckgtct

SEQ ID NO: 50537 - DNA, 600 bp, Chicken  19866894297604_6
tacygtgtcagctcttactgcaagattttcctccctcataaatagattttcaacaattttcaagaatgcttcaacaaatcaggctcctttttgtaagaaagaaaatgtttaaaagaaaaaagaaagaaaaacctaaaaacaacctacatttcacggcaggaaagcagctcctgggatgctgaaattatctgttaggaaagtgatgggcttaagagatctctctgctccacctccgcaggtttatttaacacgtctgcagaagtccagttcattttgcaccttagggcagcaacaggacckgtctgtgtttcaataccaaccacctccactgagartacgtttgaackttaaccaaaaacaaggacatgatttatctctgcttactagcagcatttaattaattaattgaacgactgaaatccaacagcagccacaaagcrgtggcacctccctgaattgcaggtaccctatggagctaacacaagctctgcacagagaacggcaaaccgtacggccggattcggtaacagctcgtgtagtgaccctcactggtgataaaatccagagctctgaaagcaggaaagcgaacacctgcatctg

SEQ ID NO: 50538 - DNA, 600 bp, Chicken  19866894297604_7
tcataaatagattttcaacaattttcaagaatgcttcaacaaatcaggctcctttttgtaagaaagaaaatgtttaaaagaaaaaagaaagaaaaacctaaaaacaacctacatttcacggcaggaaagcagctcctgggatgctgaaattatctgttaggaaagtgatgggcttaagagatctctctgctccacctccgcaggtttatttaacacgtctgcagaagtccagttcattttgcaccttagggcagcaacaggacckgtctgtgtttcaataccaaccacctccactgagartacgtttgaackttaaccaaaaacaaggacatgatttatctctgcttactagcagcatttaattaattaattgaacgactgaaatccaacagcagccacaaagcrgtggcacctccctgaattgcaggtaccctatggagctaacacaagctctgcacagagaacggcaaaccgtacggccggattcggtaacagctcgtgtagtgaccctcactggtgataaaatccagagctctgaaagcaggaaagcgaacacctgcatctgtacgtccaaactttcatcaggcggggattacaaga

SEQ ID NO: 50539 - DNA, 600 bp, Chicken  19866894297604_8
tttcaacaattttcaagaatgcttcaacaaatcaggctcctttttgtaagaaagaaaatgtttaaaagaaaaaagaaagaaaaacctaaaaacaacctacatttcacggcaggaaagcagctcctgggatgctgaaattatctgttaggaaagtgatgggcttaagagatctctctgctccacctccgcaggtttatttaacacgtctgcagaagtccagttcattttgcaccttagggcagcaacaggacckgtctgtgtttcaataccaaccacctccactgagartacgtttgaackttaaccaaaaacaaggacatgatttatctctgcttactagcagcatttaattaattaattgaacgactgaaatccaacagcagccacaaagcrgtggcacctccctgaattgcaggtaccctatggagctaacacaagctctgcacagagaacggcaaaccgtacggccggattcggtaacagctcgtgtagtgaccctcactggtgataaaatccagagctctgaaagcaggaaagcgaacacctgcatctgtacgtccaaactttcatcaggcggggattacaagaacaagggccatt

SEQ ID NO: 50540 - DNA, 600 bp, Chicken  19866894297604_9
aacctacatttcacggcaggaaagcagctcctgggatgctgaaattatctgttaggaaagtgatgggcttaagagatctctctgctccacctccgcaggtttatttaacacgtctgcagaagtccagttcattttgcaccttagggcagcaacaggacckgtctgtgtttcaataccaaccacctccactgagartacgtttgaackttaaccaaaaacaaggacatgatttatctctgcttactagcagcatttaattaattaattgaacgactgaaatccaacagcagccacaaagcrgtggcacctccctgaattgcaggtaccctatggagctaacacaagctctgcacagagaacggcaaaccgtacggccggattcggtaacagctcgtgtagtgaccctcactggtgataaaatccagagctctgaaagcaggaaagcgaacacctgcatctgtacgtccaaactttcatcaggcggggattacaagaacaagggccattacgtacgctcctggaggaaaacttacaagttctgaaacagcatcagaaggaagtgcactaatagcaattaacccaactcctgcaaataataaa

SEQ ID NO: 50541 - DNA, 600 bp, Chicken  19866894297605_1
agctacatgctgcatggatgcgcagggggatgtttaatcattaacattagtgcccattaaattgagcaataaaagcaggatatggcagatctcaatcggtttctctaagaagtggaacctccttccaacctgtattatgagtgacacaaatatttggaattataacactttgcaaacatcttcagaagttggtaaaaggttcccattgatttcagaggctcacaaaaagggctcactccaaaccttcagtgatcatctttgagaactggtgataaaccagattagttacatcttttatcraaacaattttctttgattgtgccatttctacagaagtggactttttatatggaattatccatttcaaaaccatttctgtcaggaaataattacaatcttcgtgttagaacattcttcaaatgggaaatgttgatctttagcttcaggactccttgtcatttagcaatgaagatcatataagaatagtttaaattgaaacaaaatcacagaatcatcatagaatggctcaggttggaagggaccttaaagcycacccggttccctgcggtgcgcaggctgccacccactggatcaggctgc

SEQ ID NO: 50542 - DNA, 600 bp, Chicken  19866894297605_2
atcatctttgagaactggtgataaaccagattagttacatcttttatcraaacaattttctttgattgtgccatttctacagaagtggactttttatatggaattatccatttcaaaaccatttctgtcaggaaataattacaatcttcgtgttagaacattcttcaaatgggaaatgttgatctttagcttcaggactccttgtcatttagcaatgaagatcatataagaatagtttaaattgaaacaaaatcacagaatcatcatagaatggctcaggttggaagggaccttaaagcycacccggttccctgcggtgcgcaggctgccacccactggatcaggctgccaagggccccatccaacttggccttgaaaaacgtttggaatagatraagataagacattgtaactcacctaagactgatwtattttcatatgacaatttaacagagatgattctcatccccattatctccctgctgcttttgtcccactaggaatgcagaaaccttctgtcccattgggaataagaggagcttcctgcaagattttcacagtctaaaaaaaatgtttccaggccagctctcccaaacctac

SEQ ID NO: 50543 - DNA, 543 bp, Chicken  19866894297605_3
atatggaattatccatttcaaaaccatttctgtcaggaaataattacaatcttcgtgttagaacattcttcaaatgggaaatgttgatctttagcttcaggactccttgtcatttagcaatgaagatcatataagaatagtttaaattgaaacaaaatcacagaatcatcatagaatggctcaggttggaagggaccttaaagcycacccggttccctgcggtgcgcaggctgccacccactggatcaggctgccaagggccccatccaacttggccttgaaaaacgtttggaatagatraagataagacattgtaactcacctaagactgatwtattttcatatgacaatttaacagagatgattctcatccccattatctccctgctgcttttgtcccactaggaatgcagaaaccttctgtcccattgggaataagaggagcttcctgcaagattttcacagtctaaaaaaaatgtttccaggccagctctcccaaacctacaatggtgtctcagagctgtaaataccatttgcagatct

SEQ ID NO: 50544 - DNA, 509 bp, Chicken  19866894297605_4
aggaaataattacaatcttcgtgttagaacattcttcaaatgggaaatgttgatctttagcttcaggactccttgtcatttagcaatgaagatcatataagaatagtttaaattgaaacaaaatcacagaatcatcatagaatggctcaggttggaagggaccttaaagcycacccggttccctgcggtgcgcaggctgccacccactggatcaggctgccaagggccccatccaacttggccttgaaaaacgtttggaatagatraagataagacattgtaactcacctaagactgatwtattttcatatgacaatttaacagagatgattctcatccccattatctccctgctgcttttgtcccactaggaatgcagaaaccttctgtcccattgggaataagaggagcttcctgcaagattttcacagtctaaaaaaaatgtttccaggccagctctcccaaacctacaatggtgtctcagagctgtaaataccatttgcagatct

SEQ ID NO: 50545 - DNA, 600 bp, Chicken  19866894297608_1
tgcagtatccacaaacgtttgtagttaaaagatgacttggttagacataaagctgatggaaaactggagaaagctataatggccatggagcatgtcattttggaaactcagtagtttaattgcagtcctttagtgaccagcagccttcagaagtcagagataacaacgagcgtggtgctgctttggaggcttccattgataagcagaaatgaggacaaggcactagcattgggttagcatggtctgcacgatatgaatgaaagatactggaaattattcatgaccacaggtaaacatctracttgggcaagacctgaatttctcctctgtgggccacatgtgctgatgcaaagcacagaggtaatgttcacatcttattgatggatggagctgtttctgctcagaagggatgaccacacaaaaaagataccgggatctgtatcaataaaactgcgcagtggagtgatgataaccctgttttggaacaaccaatttttaattgttatagctgtggcagggaaaaaaaatacaacaagaaaactttattggctaataatattgttccaactctgtatgcatgtttatgtctgtacagaagca

SEQ ID NO: 50546 - DNA, 600 bp, Chicken  19866894297608_2
ttggctaataatattgttccaactctgtatgcatgtttatgtctgtacagaagcacaggcaaaaaaatcttgttagatcagatctcaaaacaataatgtttgtgtcagaaggtaatctccaaagagtgccctcttttcctgacacagaagatgttgcaaaaataagcaccttcacatcattgaatgggtcagtaagtgagtctgctgagatggttgtgccattagtgtgtatgagcactgctgctgattgggaagcttttgcactggggttaataaggcaaggggaatgtaaaaatagayatttcaaagtgataaattgatgtatattcatcaaataaaatagggaaacacmgttacaatgagtatctgttctgtaaataaaacaaatacagtacattatctcagtgaggaaatggcattttttattccaatcattggcaaaacagacatgtatgctgggctagcctatggcttgcatgcccttgcatgataatccttggggatgatctctttcctttccagtgtagagaagcaatggaatcaagtaatgtgaactttctattccagattgatttcaacacaaagacaatttttaacatt

SEQ ID NO: 50547 - DNA, 600 bp, Chicken  19866894297608_3
gcacaggcaaaaaaatcttgttagatcagatctcaaaacaataatgtttgtgtcagaaggtaatctccaaagagtgccctcttttcctgacacagaagatgttgcaaaaataagcaccttcacatcattgaatgggtcagtaagtgagtctgctgagatggttgtgccattagtgtgtatgagcactgctgctgattgggaagcttttgcactggggttaataaggcaaggggaatgtaaaaatagayatttcaaagtgataaattgatgtatattcatcaaataaaatagggaaacacmgttacaatgagtatctgttctgtaaataaaacaaatacagtacattatctcagtgaggaaatggcattttttattccaatcattggcaaaacagacatgtatgctgggctagcctatggcttgcatgcccttgcatgataatccttggggatgatctctttcctttccagtgtagagaagcaatggaatcaagtaatgtgaactttctattccagattgatttcaacacaaagacaatttttaacattgaaaaaggaattattaagaagcagttccctttctcgcaagtcaaatcctgtg

SEQ ID NO: 50548 - DNA, 600 bp, Chicken  19866894297611_1
atgtccagttgcaaccgtctgaagtcagcaggacaaattcatctaaagtatgatcttacatttgaaatgtcatctctggaaatcagtagttatgagatttgagcctaataaggtggaaaagttgcagatggagcatgtgaaacctgtggaacttgacatttctgaacctcctaagctgtattaaggcttcctgaaaactttttgtctttcaacttctggattcttaacatctatactcacttttaaaaagtgactttcctgaacatcttttttttattttttttatttattttttttttwatgagttacacaatactatctggcaaaaaaaataaaaaaaaaataaaaaaattacagcatgtgacaaacagtatcttcttggtttttccttgactggatgctctgtagtgaatagatgcttcccttttacatcattaatgatctgatatatgttttcatgtattttcctgtgttctgatgttttcaaaccaaattatcaaattatttgtactcctctcatatggaagaaaacccgaaggctaaataactccttttacctattctgtgcagttctttgttatagctctcatagattctttt

SEQ ID NO: 50549 - DNA, 599 bp, Chicken  19866894297615_1
  misc_feature (1)..(132): n is any nucleotide
nnnnnnnnnnnnnnnnnnnnnnnnnnnnnnnnnnnnnnnnnnnnnnnnnnnnnnnnnnnnnnnnnnnnnnnnnnnnnnnnnnnnnnnnnnnnnnnnnnnnnnnnnnnnnnnnnnnnnnnnnnnnnnnnnnnntcttgagagtggtggtcagtggctcagtgtctggatggagaccagtgacgagcggtgtccctcaggagttggtcctgagactgatactcttagatcttcattagtgacattgacagtggggttgagtgcatgatcagcaagtctgtggataacacgaagctgtgggaygcaatcagcatgctcaagagatggaatgtcatacagttggacctagacaggcttgagtagtgggcccaggtgaacctcatgaggttcatcaaatccaagttcaaggtcttgcacctgggttgtggcaacccccattaccaatacaaactggaggatgaaaggattgaatacagcgctgccgataaggacctgagggtactggtggatgggaarctggacatgagccagcaatgtcccttgcagctcagaaagataaccatatcctgatcaaaagaagcatggccagcaggtcaagcaag

SEQ ID NO: 50550 - DNA, 600 bp, Chicken  19866894297615_2
tgatactcttagatcttcattagtgacattgacagtggggttgagtgcatgatcagcaagtctgtggataacacgaagctgtgggaygcaatcagcatgctcaagagatggaatgtcatacagttggacctagacaggcttgagtagtgggcccaggtgaacctcatgaggttcatcaaatccaagttcaaggtcttgcacctgggttgtggcaacccccattaccaatacaaactggaggatgaaaggattgaatacagcgctgccgataaggacctgagggtactggtggatgggaarctggacatgagccagcaatgtcccttgcagctcagaaagataaccatatcctgatcaaaagaagcatggccagcaggtcaagcaaggtgatcctgcccctctagtctgtgctggtgagacctcacctggagtattgtgtccagatgtggtgttgtcagtacaggagaaatatagagctgttgcagcgtgtccagaggaaggccacaaaaatggtccaagggatggaccacctctcctatgagtacaaggtgaaagaactggggctgttcagmctggagaagagaaggcttctcttgatag

SEQ ID NO: 50551 - DNA, 600 bp, Chicken  19866894297615_3
ggacctgagggtactggtggatgggaarctggacatgagccagcaatgtcccttgcagctcagaaagataaccatatcctgatcaaaagaagcatggccagcaggtcaagcaaggtgatcctgcccctctagtctgtgctggtgagacctcacctggagtattgtgtccagatgtggtgttgtcagtacaggagaaatatagagctgttgcagcgtgtccagaggaaggccacaaaaatggtccaagggatggaccacctctcctatgagtacaaggtgaaagaactggggctgttcagmctggagaagagaaggcttctcttgatagaaacctttcagaatccaaagtggagttacaggaaagaaggggacagactctttagcagagtctgttgtgatcagacaaagggagattgtttcaagcttgaagagggtagatttaggttagatataaagaaagtcttctgcaggaagggtggtgccccatctctggggactttcaaggtcagattgggcagagctctgagcaaacagatctaactgggggtgtccctgtatgttgcaggrgagttggactagatggacgttaaggtaccttcc

SEQ ID NO: 50552 - DNA, 600 bp, Chicken  19866894297615_4
gagtacaaggtgaaagaactggggctgttcagmctggagaagagaaggcttctcttgatagaaacctttcagaatccaaagtggagttacaggaaagaaggggacagactctttagcagagtctgttgtgatcagacaaagggagattgtttcaagcttgaagagggtagatttaggttagatataaagaaagtcttctgcaggaagggtggtgccccatctctggggactttcaaggtcagattgggcagagctctgagcaaacagatctaactgggggtgtccctgtatgttgcaggrgagttggactagatggacgttaaggtaccttccagctctaaagattctatgtttctatcattctatgattcaatttgtatctggtgctgactacaaatgagtttatgtgaacaataaggtaatagccaaatgaacttgctctgattgacttttgattgcaccaaaaccttggttaatctcactggctactactccatcactagcatcaatgagggaaatgagaggaccataattatcagaggggaccaaaaacaggatctatcaaagacagctgcctcctgtccctttggcagcatctgc

SEQ ID NO: 50553 - DNA, 600 bp, Chicken  19866894297621_1
gcctctatcccattgtcagccttgcattcgctattgctttcacaatgccaccaactccattcagctgttactgacatgtatcagcagctattctcttggggtttaacttggctttctttcagaagtatcttgggatttactggtaattggagtgttttgcaaactctcgaagatttctcagtatcagtccacctgcgcctcctggagctcctttttcacaaagaccctggtaggcagcagcagggtagaattaggataaaaagtttgagatgatttgccatcctctgctgaggaaggcaygagcttcttgcttctcacatctttagaaaaacacttttgggtcattgtaccaggaaagagaatacagctcaaacaattatcctgttttactggcactacgtttatttcctacacagaagcactaacctgctgccaacgctctttcaagaagcccgacagatttgcaattcactactttcacttcttccccattgccccagacaattatcccccccatatatttctcacaccaccattccttaataacagggaaatgaagaatatgacacctgactgatgacatcaccactgtttcctctc

SEQ ID NO: 50554 - DNA, 600 bp, Chicken  19866894297623_1
agcttgtaaaaaggagataaggaataagcagttatgggtcagaatgatgatgagaataaacccttccatactcctggatgcactagttcctattccacaaggggtgaaagctccatgcctggaacaggatctgcatctgacgtctgccagatcagtcctcagagcattactgtgccttgcccaggcttctgttaacagaaattcagcactcttcataattcatctgcttcctgtggagaagctgtgtttgaccacgcacagctcctgctgcagctgtatcccaacgcttgaaatgaagcraccaactccattttttggttgcttttagctgtttttagcttagaaagaaatagcgggaaggaatcacggtttgtggcaaattctcttctgctgggatacagaaaacagcaagttacaccagcttaaaagctttcaaaggaggagctgtgtcagtgctgctgagtagccctgtgaaggcaagccatggcaagtagtttcactgcaggcaggcagcctgaaattctgctatggctctcacaagagctaaaaccagccagacaacaagggaacaaggagcaggagggtggagaaacagggctg

SEQ ID NO: 50555 - DNA, 600 bp, Chicken  19866894297623_2
ttctcttctgctgggatacagaaaacagcaagttacaccagcttaaaagctttcaaaggaggagctgtgtcagtgctgctgagtagccctgtgaaggcaagccatggcaagtagtttcactgcaggcaggcagcctgaaattctgctatggctctcacaagagctaaaaccagccagacaacaagggaacaaggagcaggagggtggagaaacagggctgggattctgtagagcgaaggcacatctctatgagagatgggatggcctcacagaaccctccagcccgttactgctgtaaakaacatggacttctcatggcacccacctgcctgcactggactcgcactggctcactctggcctgtgatggcaagctgagcaaccttctgcatcacatcatcaatctcagggacaatcagcttcctggataaaatagcctgaaaatgcraaagcacagctggagtcacgtcattttgtttgcagtgtgagatgcagcattataaccactggttacatcggtatcaagtggtacagtaacactgacatatcttccaaacaacaaagaaaaatgtgaaaaaagttggcttgcaaatccatatct

SEQ ID NO: 50556 - DNA, 600 bp, Chicken  19866894297623_3
atggctctcacaagagctaaaaccagccagacaacaagggaacaaggagcaggagggtggagaaacagggctgggattctgtagagcgaaggcacatctctatgagagatgggatggcctcacagaaccctccagcccgttactgctgtaaakaacatggacttctcatggcacccacctgcctgcactggactcgcactggctcactctggcctgtgatggcaagctgagcaaccttctgcatcacatcatcaatctcagggacaatcagcttcctggataaaatagcctgaaaatgcraaagcacagctggagtcacgtcattttgtttgcagtgtgagatgcagcattataaccactggttacatcggtatcaagtggtacagtaacactgacatatcttccaaacaacaaagaaaaatgtgaaaaaagttggcttgcaaatccatatcttcttttggaggacacagaatacctggtctaatggttagggatgtgaattctttagcaaaaacatcctgccacccaaatgcatcctcatacacaacatgacaggatgaggtaatggctttaagtggcaccaggggaggctcaggttgg

SEQ ID NO: 50557 - DNA, 600 bp, Chicken  19866894297629_1
gtctgtaataacgctttatattgaaatctctctgagatttacttgaaaatggtactgacacctgaaaaacgatgcagtatttgttcaggctgtaaatcagtgacatacacggctcagaaataaggtggggggatgctcagttttgaaggaaacgtcgtatttttcagcttggttcctgttggagctcacgttgggctcgtgctgctcggggccacatcccacccctctgcactgtgctgctccccagagcagcagagccaggagggaactgggggcactgggatgggcacagactggtgygggataaaaggtgcagagagccaatggggaaagcaatcggctctccaaaygtaaagaggaaaagctgagatgaagcggttggtcccamagcagagggctgtggaggtgaaccaagacagcgagggatttattctgtggaatccatcactctgggatttgctgagtggagcctcatcatctgcaagagaggatttttccagcacctcctctatcattgacttggttcatttttttcccatcagccacgtatgacctccgcgtcaaaacatcattttaccatcattggctgtttccagaakg

SEQ ID NO: 50558 - DNA, 600 bp, Chicken  19866894297629_2
ggtactgacacctgaaaaacgatgcagtatttgttcaggctgtaaatcagtgacatacacggctcagaaataaggtggggggatgctcagttttgaaggaaacgtcgtatttttcagcttggttcctgttggagctcacgttgggctcgtgctgctcggggccacatcccacccctctgcactgtgctgctccccagagcagcagagccaggagggaactgggggcactgggatgggcacagactggtgygggataaaaggtgcagagagccaatggggaaagcaatcggctctccaaaygtaaagaggaaaagctgagatgaagcggttggtcccamagcagagggctgtggaggtgaaccaagacagcgagggatttattctgtggaatccatcactctgggatttgctgagtggagcctcatcatctgcaagagaggatttttccagcacctcctctatcattgacttggttcatttttttcccatcagccacgtatgacctccgcgtcaaaacatcattttaccatcattggctgtttccagaakgtcttttattaccccgatctcaaacacccgagtggggagtgaaggatattc

SEQ ID NO: 50559 - DNA, 600 bp, Chicken  19866894297629_3
gctgtaaatcagtgacatacacggctcagaaataaggtggggggatgctcagttttgaaggaaacgtcgtatttttcagcttggttcctgttggagctcacgttgggctcgtgctgctcggggccacatcccacccctctgcactgtgctgctccccagagcagcagagccaggagggaactgggggcactgggatgggcacagactggtgygggataaaaggtgcagagagccaatggggaaagcaatcggctctccaaaygtaaagaggaaaagctgagatgaagcggttggtcccamagcagagggctgtggaggtgaaccaagacagcgagggatttattctgtggaatccatcactctgggatttgctgagtggagcctcatcatctgcaagagaggatttttccagcacctcctctatcattgacttggttcatttttttcccatcagccacgtatgacctccgcgtcaaaacatcattttaccatcattggctgtttccagaakgtcttttattaccccgatctcaaacacccgagtggggagtgaaggatattcygactcagacatctctcccagacattgcagggaagccc

SEQ ID NO: 50560 - DNA, 555 bp, Chicken  19866894297629_4
ygggataaaaggtgcagagagccaatggggaaagcaatcggctctccaaaygtaaagaggaaaagctgagatgaagcggttggtcccamagcagagggctgtggaggtgaaccaagacagcgagggatttattctgtggaatccatcactctgggatttgctgagtggagcctcatcatctgcaagagaggatttttccagcacctcctctatcattgacttggttcatttttttcccatcagccacgtatgacctccgcgtcaaaacatcattttaccatcattggctgtttccagaakgtcttttattaccccgatctcaaacacccgagtggggagtgaaggatattcygactcagacatctctcccagacattgcagggaagcccactcaacgtgctcctgctttgctgtatgcacacttgttaacgttttaatctatccaagaggtgcagcagttgggctcaggagcactcattctctgccctggaattcacacgtcatcataacgaaaccccaaacatttccacctttgggaaatgagttcagctcctt

SEQ ID NO: 50561 - DNA, 503 bp, Chicken  19866894297629_5
taaagaggaaaagctgagatgaagcggttggtcccamagcagagggctgtggaggtgaaccaagacagcgagggatttattctgtggaatccatcactctgggatttgctgagtggagcctcatcatctgcaagagaggatttttccagcacctcctctatcattgacttggttcatttttttcccatcagccacgtatgacctccgcgtcaaaacatcattttaccatcattggctgtttccagaakgtcttttattaccccgatctcaaacacccgagtggggagtgaaggatattcygactcagacatctctcccagacattgcagggaagcccactcaacgtgctcctgctttgctgtatgcacacttgttaacgttttaatctatccaagaggtgcagcagttgggctcaggagcactcattctctgccctggaattcacacgtcatcataacgaaaccccaaacatttccacctttgggaaatgagttcagctcctt

SEQ ID NO: 50562 - DNA, 599 bp, Chicken  19866894297632_1
  misc_feature (1)..(218): n is any nucleotide
nnnnnnnnnnnnnnnnnnnnnnnnnnnnnnnnnnnnnnnnnnnnnnnnnnnnnnnnnnnnnnnnnnnnnnnnnnnnnnnnnnnnnnnnnnnnnnnnnnnnnnnnnnnnnnnnnnnnnnnnnnnnnnnnnnnnnnnnnnnnnnnnnnnnnnnnnnnnnnnnnnnnnnnnnnnnnnnnnnnnnnnnnnnnnnnnnnnnnnnnnnnnnnnnnnnnnnnnnncacagtaaagaaacactgagtgtctgcagcctgatctgcaatgggatgtcccaaatttagtgatctctccaggaaaagcagmttcattgcctggagcaaaagacttaccttgtcaagaatagtgagcaatgcacctccagtgatctcacagcctgctattgtgccacaccgcctgtatgctctcttccttctctcctccctttctgctgcagatgatgcccccagccctgctgcgtggtgcacaggagctgctcctgggcacaactgtctctctgtagcactgcccacttcgatcagctccctgtgtcccaggagcccagcccagctcagcagcagaggaggtgatttccttctctccctgcagatatgcatggccctcct

SEQ ID NO: 50563 - DNA, 600 bp, Chicken  19866894297632_10
tggggttctgttcctcagaggtccatgggagccagaagtcctcttagttgagttcagatgygcacaatgaggtgactgtgtgtgagcccctcatctgaatgcttggtctttattcaacagggactgcattgctcacacaaagacgctcagtgatgcccaaagttcctggggtgatcctagttgtgtgctggtgcttgtgaagtgtggtggaaaacctctgagatagacacctccttcctgagcatcagctgagggccagaagggaggtattcttggccatcctaaatgccaccacagccytgtgcttagggcacccagtgtgccttttgcacctttccccatggagcatgtagcgttactcctttgatcaaatggatgaactcacaacagaagaccagatcttcctctctgttccatctgtggcatactctggagttcaaggcactacaatgctatggcacatctacattctttcgctgatgacacctcagtttgttctgggctctcagttgaatggcatcagaaaagtccatggtcatgccagttccctgttgacaagtagctggcaaacattgttcgagttataaagaagagcaagaa

SEQ ID NO: 50564 - DNA, 600 bp, Chicken  19866894297632_2
tctcctccctttctgctgcagatgatgcccccagccctgctgcgtggtgcacaggagctgctcctgggcacaactgtctctctgtagcactgcccacttcgatcagctccctgtgtcccaggagcccagcccagctcagcagcagaggaggtgatttccttctctccctgcagatatgcatggccctcctgagctgacagctcctgcaaggaagcagggtcatcactgcagaacgtacttcaaagtcagctcaattcatcaacatgtccactcaatctgagaagcagtgttgttcctacmaaaataagttttactgtgggggaagcaaataccaaatgtggaaacctctgctcatgatctgtaacaaaaatgtcacacagacaaggacagrgtgagattgacataccttcttctgggcagtggtagagctgaggcagtgcaggcataacattacagaatcacagcatggcttaggttggtagggactttaaatagcacctagttccaagcccctagccatcagtagggatgccaaccaccaagatcaggctgaccaggatcccatccatcctgacctkgaatgcctccatsratggggca

SEQ ID NO: 50565 - DNA, 600 bp, Chicken  19866894297632_3
gcccacttcgatcagctccctgtgtcccaggagcccagcccagctcagcagcagaggaggtgatttccttctctccctgcagatatgcatggccctcctgagctgacagctcctgcaaggaagcagggtcatcactgcagaacgtacttcaaagtcagctcaattcatcaacatgtccactcaatctgagaagcagtgttgttcctacmaaaataagttttactgtgggggaagcaaataccaaatgtggaaacctctgctcatgatctgtaacaaaaatgtcacacagacaaggacagrgtgagattgacataccttcttctgggcagtggtagagctgaggcagtgcaggcataacattacagaatcacagcatggcttaggttggtagggactttaaatagcacctagttccaagcccctagccatcagtagggatgccaaccaccaagatcaggctgaccaggatcccatccatcctgacctkgaatgcctccatsratggggcacacagaatatctttgggcaacctgttccacttcctttgagtagaaaatgtcttcctaaaaactcacctaaatctcctctctgtactttaaa

SEQ ID NO: 50566 - DNA, 600 bp, Chicken  19866894297632_4
gagaagcagtgttgttcctacmaaaataagttttactgtgggggaagcaaataccaaatgtggaaacctctgctcatgatctgtaacaaaaatgtcacacagacaaggacagrgtgagattgacataccttcttctgggcagtggtagagctgaggcagtgcaggcataacattacagaatcacagcatggcttaggttggtagggactttaaatagcacctagttccaagcccctagccatcagtagggatgccaaccaccaagatcaggctgaccaggatcccatccatcctgacctkgaatgcctccatsratggggcacacagaatatctttgggcaacctgttccacttcctttgagtagaaaatgtcttcctaaaaactcacctaaatctcctctctgtactttaaagccatttccctttctcctactactatcagaccatctcatcctaacccyakgattagacatctcatctgctgatggaaaccctgggactgaaatggggttctgttcctcagaggtccatgggagccagaagtcctcttagttgagttcagatgygcacaatgaggtgactgtgtgtgagcccctcatc

SEQ ID NO: 50567 - DNA, 600 bp, Chicken  19866894297632_5
gttcctacmaaaataagttttactgtgggggaagcaaataccaaatgtggaaacctctgctcatgatctgtaacaaaaatgtcacacagacaaggacagrgtgagattgacataccttcttctgggcagtggtagagctgaggcagtgcaggcataacattacagaatcacagcatggcttaggttggtagggactttaaatagcacctagttccaagcccctagccatcagtagggatgccaaccaccaagatcaggctgaccaggatcccatccatcctgacctkgaatgcctccatsratggggcacacagaatatctttgggcaacctgttccacttcctttgagtagaaaatgtcttcctaaaaactcacctaaatctcctctctgtactttaaagccatttccctttctcctactactatcagaccatctcatcctaacccyakgattagacatctcatctgctgatggaaaccctgggactgaaatggggttctgttcctcagaggtccatgggagccagaagtcctcttagttgagttcagatgygcacaatgaggtgactgtgtgtgagcccctcatctgaatgcttggtc

SEQ ID NO: 50568 - DNA, 600 bp, Chicken  19866894297632_6
ttcctacmaaaataagttttactgtgggggaagcaaataccaaatgtggaaacctctgctcatgatctgtaacaaaaatgtcacacagacaaggacagrgtgagattgacataccttcttctgggcagtggtagagctgaggcagtgcaggcataacattacagaatcacagcatggcttaggttggtagggactttaaatagcacctagttccaagcccctagccatcagtagggatgccaaccaccaagatcaggctgaccaggatcccatccatcctgacctkgaatgcctccatsratggggcacacagaatatctttgggcaacctgttccacttcctttgagtagaaaatgtcttcctaaaaactcacctaaatctcctctctgtactttaaagccatttccctttctcctactactatcagaccatctcatcctaacccyakgattagacatctcatctgctgatggaaaccctgggactgaaatggggttctgttcctcagaggtccatgggagccagaagtcctcttagttgagttcagatgygcacaatgaggtgactgtgtgtgagcccctcatctgaatgcttggtct

SEQ ID NO: 50569 - DNA, 600 bp, Chicken  19866894297632_7
caggcataacattacagaatcacagcatggcttaggttggtagggactttaaatagcacctagttccaagcccctagccatcagtagggatgccaaccaccaagatcaggctgaccaggatcccatccatcctgacctkgaatgcctccatsratggggcacacagaatatctttgggcaacctgttccacttcctttgagtagaaaatgtcttcctaaaaactcacctaaatctcctctctgtactttaaagccatttccctttctcctactactatcagaccatctcatcctaacccyakgattagacatctcatctgctgatggaaaccctgggactgaaatggggttctgttcctcagaggtccatgggagccagaagtcctcttagttgagttcagatgygcacaatgaggtgactgtgtgtgagcccctcatctgaatgcttggtctttattcaacagggactgcattgctcacacaaagacgctcagtgatgcccaaagttcctggggtgatcctagttgtgtgctggtgcttgtgaagtgtggtggaaaacctctgagatagacacctccttcctgagcatcagctgagggc

SEQ ID NO: 50570 - DNA, 600 bp, Chicken  19866894297632_8
ggcataacattacagaatcacagcatggcttaggttggtagggactttaaatagcacctagttccaagcccctagccatcagtagggatgccaaccaccaagatcaggctgaccaggatcccatccatcctgacctkgaatgcctccatsratggggcacacagaatatctttgggcaacctgttccacttcctttgagtagaaaatgtcttcctaaaaactcacctaaatctcctctctgtactttaaagccatttccctttctcctactactatcagaccatctcatcctaacccyakgattagacatctcatctgctgatggaaaccctgggactgaaatggggttctgttcctcagaggtccatgggagccagaagtcctcttagttgagttcagatgygcacaatgaggtgactgtgtgtgagcccctcatctgaatgcttggtctttattcaacagggactgcattgctcacacaaagacgctcagtgatgcccaaagttcctggggtgatcctagttgtgtgctggtgcttgtgaagtgtggtggaaaacctctgagatagacacctccttcctgagcatcagctgagggcca

SEQ ID NO: 50571 - DNA, 600 bp, Chicken  19866894297632_9
tcaggctgaccaggatcccatccatcctgacctkgaatgcctccatsratggggcacacagaatatctttgggcaacctgttccacttcctttgagtagaaaatgtcttcctaaaaactcacctaaatctcctctctgtactttaaagccatttccctttctcctactactatcagaccatctcatcctaacccyakgattagacatctcatctgctgatggaaaccctgggactgaaatggggttctgttcctcagaggtccatgggagccagaagtcctcttagttgagttcagatgygcacaatgaggtgactgtgtgtgagcccctcatctgaatgcttggtctttattcaacagggactgcattgctcacacaaagacgctcagtgatgcccaaagttcctggggtgatcctagttgtgtgctggtgcttgtgaagtgtggtggaaaacctctgagatagacacctccttcctgagcatcagctgagggccagaagggaggtattcttggccatcctaaatgccaccacagccytgtgcttagggcacccagtgtgccttttgcacctttccccatggagcatgtagcgttactc

SEQ ID NO: 50572 - DNA, 600 bp, Chicken  19866894297639_1
caggcacaccacttaaaattcaaaatgcagttcggaagaaatcaaattatggatgaatctatatttcattttaaaaactgcaaaaggccaaacctcttctaaaactacaagttgaaaaacaaaggtgaggaaatgctttttgggggaaacgttcttttcatatagattttaagcttggcgtacaagttatcaaaagaccaggttatctgcaatatcccaaggctgtttccattgtgtatctttatatgtgattactacagctatatcaacagcttctaagtcctgaattctgaagcatgyctagcctttgtcagtctgtgtataaatgaagatctccacataatctctgcttgcatttgagcaggaaacatctcagaacatagcccagaagtacctaaatgaaaaatggagggaaaagaaaaaaccaaacaacacctcaaaacccaaaacagaagaaagattaagytaatgcaatgttttctgtgaaaggactaatgtcatcttttattcagctggactctttctcacagaaaaggaaaaaaaatagcagcaacacagtgcactggtgagcactgccctctcactgtctccagatgtact

SEQ ID NO: 50573 - DNA, 600 bp, Chicken  19866894297639_2
ttttaagcttggcgtacaagttatcaaaagaccaggttatctgcaatatcccaaggctgtttccattgtgtatctttatatgtgattactacagctatatcaacagcttctaagtcctgaattctgaagcatgyctagcctttgtcagtctgtgtataaatgaagatctccacataatctctgcttgcatttgagcaggaaacatctcagaacatagcccagaagtacctaaatgaaaaatggagggaaaagaaaaaaccaaacaacacctcaaaacccaaaacagaagaaagattaagytaatgcaatgttttctgtgaaaggactaatgtcatcttttattcagctggactctttctcacagaaaaggaaaaaaaatagcagcaacacagtgcactggtgagcactgccctctcactgtctccagatgtactgacatttgatttgttgctgattagtatgggcaaawgaagagagggggaaaaaaagctggcatcaagtcacgtcctccatcttagtcccagctggtaccaagctccagagaaacaaagcgacttcagactgtgctatcatatattcatgaccaagaagaaatataaa

SEQ ID NO: 50574 - DNA, 600 bp, Chicken  19866894297639_3
ccacataatctctgcttgcatttgagcaggaaacatctcagaacatagcccagaagtacctaaatgaaaaatggagggaaaagaaaaaaccaaacaacacctcaaaacccaaaacagaagaaagattaagytaatgcaatgttttctgtgaaaggactaatgtcatcttttattcagctggactctttctcacagaaaaggaaaaaaaatagcagcaacacagtgcactggtgagcactgccctctcactgtctccagatgtactgacatttgatttgttgctgattagtatgggcaaawgaagagagggggaaaaaaagctggcatcaagtcacgtcctccatcttagtcccagctggtaccaagctccagagaaacaaagcgacttcagactgtgctatcatatattcatgaccaagaagaaatataaaaaccagcacgtttgaattcctgacaaccatagaagaatagtgcattggcatgttgaatttttccagccagcctttgctgacctataaacctttgtgactggaacaaatgcaaatagagctgacttgcctcacaaactactgaagggtattcaaactgagttgtgtctaa

SEQ ID NO: 50575 - DNA, 599 bp, Chicken  19866894297640_1
  misc_feature (1)..(31): n is any nucleotide
nnnnnnnnnnnnnnnnnnnnnnnnnnnnnnnaatttccagtctcaaacatcagttccaactgtgggcagtcagaaccactgcaatgactacatgacttttaacaaaacaagacaaggaaggaatatcatttgttcttgtcatgttaatctaaggatttaaatttatttattatgatttaaaaagttcactgacatatctttctctgatccaccgctatgcataactgagacagaagatgtagagcagaacattttcttaacctggttaacagttaacaactcatattaatcctattcttragtcaatgtatgaaatagattgcagtaaagtaacacagtttggaatcttagttctctagttacatctttgcacatctttaaacctatttgatctcraaattctgcaactaaactgatagttgacaaaattcaaccaggccttggacagtgctggtggcaccatttttatttatgtatttatytacataacatttgtttctactctttgctgtgacttctattttcaagaaaaagaagcatgagattcagtttctacaatgttgaaatttttgatctcttagatgaagcactcagtgggg

SEQ ID NO: 50576 - DNA, 600 bp, Chicken  19866894297640_2
ttttaacaaaacaagacaaggaaggaatatcatttgttcttgtcatgttaatctaaggatttaaatttatttattatgatttaaaaagttcactgacatatctttctctgatccaccgctatgcataactgagacagaagatgtagagcagaacattttcttaacctggttaacagttaacaactcatattaatcctattcttragtcaatgtatgaaatagattgcagtaaagtaacacagtttggaatcttagttctctagttacatctttgcacatctttaaacctatttgatctcraaattctgcaactaaactgatagttgacaaaattcaaccaggccttggacagtgctggtggcaccatttttatttatgtatttatytacataacatttgtttctactctttgctgtgacttctattttcaagaaaaagaagcatgagattcagtttctacaatgttgaaatttttgatctcttagatgaagcactcagtggggatatggcatggtgggactaagtctccactctgagttgtcaatttttactttagggcatacagcttattcactgttctatttcctatgaataattcat

SEQ ID NO: 50577 - DNA, 600 bp, Chicken  19866894297640_3
agttcactgacatatctttctctgatccaccgctatgcataactgagacagaagatgtagagcagaacattttcttaacctggttaacagttaacaactcatattaatcctattcttragtcaatgtatgaaatagattgcagtaaagtaacacagtttggaatcttagttctctagttacatctttgcacatctttaaacctatttgatctcraaattctgcaactaaactgatagttgacaaaattcaaccaggccttggacagtgctggtggcaccatttttatttatgtatttatytacataacatttgtttctactctttgctgtgacttctattttcaagaaaaagaagcatgagattcagtttctacaatgttgaaatttttgatctcttagatgaagcactcagtggggatatggcatggtgggactaagtctccactctgagttgtcaatttttactttagggcatacagcttattcactgttctatttcctatgaataattcatttcatgaaagaaatatacttttttttttttttttttaatgcaactaggcagaattcctattataactttggaatacatgaaaccaa

SEQ ID NO: 50578 - DNA, 600 bp, Chicken  19866894297640_4
actttgccttaaaaattagatttctctataaatatatatattttcctaaatagttcagcatttttctccaatactgactttgataatttgcttacaaatttttccttctttttcataaattgccatagattaattaaaataatgacagacagattctttctctttactgtactgtgaataaccaaaattcacatgaagttgggaaatatttactcaagcacatgaattagactacatatcaagaaatgtagaataattgtggactccagtagaccattttaaagctatgtccacctgttmagaatatcttatagtttatgttctaaagcaagattctcatatccataaaaggaaaagagcttgttaggcattaagaggttaacagcctgctgcgaaacaaaaacactgtcttcaataatgatcttaaatatcacaacatatttgaaaagtgctttgccaaataaaagatggttttctaaatcatggcaactaccaagagaggagttcagtatctagaaatccactgaaacataagctttcaataatgcaaactaaacaagtactgataagccatgataaaaggtacccttgggaaaatca

SEQ ID NO: 50579 - DNA, 600 bp, Chicken  19866894297640_5
gagcttgttaggcattaagaggttaacagcctgctgcgaaacaaaaacactgtcttcaataatgatcttaaatatcacaacatatttgaaaagtgctttgccaaataaaagatggttttctaaatcatggcaactaccaagagaggagttcagtatctagaaatccactgaaacataagctttcaataatgcaaactaaacaagtactgataagccatgataaaaggtacccttgggaaaatcagtaggtatggtcctagtgatacatgtctttcatctttcttcatatactaacagacytttttcttgtagctaataaatcaaataaaatgagagagagagtgtccaaaactgaagaccttactctaatgatcaaggtgagacagctagggagcatccaccacagagaccagcagtaaaagaaggggcagtgtcgtgacctgcgagcagttttatctttccctctaaatggaaaatgaaaacaaaacggtgaaagtcttctgggatttgtagttcttctcttctgaaaaccaggcacctgtagatatcaacagtctatggaactggagcattaactctaacttccagtgcactacttga

SEQ ID NO: 50580 - DNA, 600 bp, Chicken  19866894297642_1
gatttacagacccggagctgaacaacacccctttgtgactgcaggatttgcttactggaagctttgagctcaggaacgcacctggggaggacattcccctcactgggctgctcctctccacaacgcatggaaagttttgaacaatgcaaactgtgtttgttctggtgccagaaatcagggctttgaaagaccagcaccaaaagaacaggagaaaaatggataatgattaatgctgacccccaaaatgagatggatgcggcaactgctggccctgcgcactgcccttactgcctgcttgcrgagcccccctcagtgctcccacgacaaaccagcaccacagccaagcattgcatgggtagaagggctgagatcgctmtgcccaaagtgagaacagagcagggagccccgaaaattgggaaaactcagaaatggagatctgtgctgaggtcgccctctgcccctctgtgcgactttcccgacagcgtgggaatgaagagratcccagsgcttagggatgacagcatgcaacccgagcactgcgtgcaatgtcagggcaaacccagcattcccacacctaccccagctgccagcagcgcagag

SEQ ID NO: 50581 - DNA, 600 bp, Chicken  19866894297642_2
cgcacctggggaggacattcccctcactgggctgctcctctccacaacgcatggaaagttttgaacaatgcaaactgtgtttgttctggtgccagaaatcagggctttgaaagaccagcaccaaaagaacaggagaaaaatggataatgattaatgctgacccccaaaatgagatggatgcggcaactgctggccctgcgcactgcccttactgcctgcttgcrgagcccccctcagtgctcccacgacaaaccagcaccacagccaagcattgcatgggtagaagggctgagatcgctmtgcccaaagtgagaacagagcagggagccccgaaaattgggaaaactcagaaatggagatctgtgctgaggtcgccctctgcccctctgtgcgactttcccgacagcgtgggaatgaagagratcccagsgcttagggatgacagcatgcaacccgagcactgcgtgcaatgtcagggcaaacccagcattcccacacctaccccagctgccagcagcgcagagcaccaggatgctgaaagcgacgcggagttcctccatctcctcctccgaaccccggctacaggggtgtgggacggcc

SEQ ID NO: 50582 - DNA, 600 bp, Chicken  19866894297642_3
aaaagaacaggagaaaaatggataatgattaatgctgacccccaaaatgagatggatgcggcaactgctggccctgcgcactgcccttactgcctgcttgcrgagcccccctcagtgctcccacgacaaaccagcaccacagccaagcattgcatgggtagaagggctgagatcgctmtgcccaaagtgagaacagagcagggagccccgaaaattgggaaaactcagaaatggagatctgtgctgaggtcgccctctgcccctctgtgcgactttcccgacagcgtgggaatgaagagratcccagsgcttagggatgacagcatgcaacccgagcactgcgtgcaatgtcagggcaaacccagcattcccacacctaccccagctgccagcagcgcagagcaccaggatgctgaaagcgacgcggagttcctccatctcctcctccgaaccccggctacaggggtgtgggacggccccgccgtgcgacttggagatggttttgagccgtccaagggatgaatcatgcgctgggtgtgtgtgacacacatacacacggagcggggcggccggaggaagctacgctgcgtcactcgggtt

SEQ ID NO: 50583 - DNA, 600 bp, Chicken  19866894297642_4
aggagaaaaatggataatgattaatgctgacccccaaaatgagatggatgcggcaactgctggccctgcgcactgcccttactgcctgcttgcrgagcccccctcagtgctcccacgacaaaccagcaccacagccaagcattgcatgggtagaagggctgagatcgctmtgcccaaagtgagaacagagcagggagccccgaaaattgggaaaactcagaaatggagatctgtgctgaggtcgccctctgcccctctgtgcgactttcccgacagcgtgggaatgaagagratcccagsgcttagggatgacagcatgcaacccgagcactgcgtgcaatgtcagggcaaacccagcattcccacacctaccccagctgccagcagcgcagagcaccaggatgctgaaagcgacgcggagttcctccatctcctcctccgaaccccggctacaggggtgtgggacggccccgccgtgcgacttggagatggttttgagccgtccaagggatgaatcatgcgctgggtgtgtgtgacacacatacacacggagcggggcggccggaggaagctacgctgcgtcactcgggttggagtcgg

SEQ ID NO: 50584 - DNA, 600 bp, Chicken  19866894297653_1
tttaactcctctgccatacccatgctgtgcccccctgtcccctggacctccccacacttcggtgcctttgtcctgagtgacaccaaactgatgcgttacgtggatggggccatccagcaccagcagctcttggaccagtgtcctcaggtgaacctccaccccgtgctggatgccttgaaccagctgggcaactgtgcatggaagattaaccagccagtgttggatataatcatctccatcttcaatgacaaaggcaatgagaagctggacatcccaccacccgtctctgaggcccccaarcctcctgtctctcccagcagttcctctgccttgcacaagtcccagaagcatgagttgttgctgtgcaagaagaaggcagctgagatgcacagtttgcgyatggatgccctctataagctctccattgccaactatgtcagggacaaagtgttttggtttcctcacaacatggatttccgtggcaggacttacccttgtccaccttayttcaatcacttgggtaacgatgtcactcgtgccatcctgctctttgcagagggaaggcctctggggccaaagggcctcgactggctgaagatc

SEQ ID NO: 50585 - DNA, 600 bp, Chicken  19866894297653_2
gtggatggggccatccagcaccagcagctcttggaccagtgtcctcaggtgaacctccaccccgtgctggatgccttgaaccagctgggcaactgtgcatggaagattaaccagccagtgttggatataatcatctccatcttcaatgacaaaggcaatgagaagctggacatcccaccacccgtctctgaggcccccaarcctcctgtctctcccagcagttcctctgccttgcacaagtcccagaagcatgagttgttgctgtgcaagaagaaggcagctgagatgcacagtttgcgyatggatgccctctataagctctccattgccaactatgtcagggacaaagtgttttggtttcctcacaacatggatttccgtggcaggacttacccttgtccaccttayttcaatcacttgggtaacgatgtcactcgtgccatcctgctctttgcagagggaaggcctctggggccaaagggcctcgactggctgaagatccacctcattaacctcacagggctgaagaagaagaatgccttgcaggagcgcttggattatgccaatgaaatcatggaggagatcctggactctgctgac

SEQ ID NO: 50586 - DNA, 561 bp, Chicken  19866894297653_3
aaccagccagtgttggatataatcatctccatcttcaatgacaaaggcaatgagaagctggacatcccaccacccgtctctgaggcccccaarcctcctgtctctcccagcagttcctctgccttgcacaagtcccagaagcatgagttgttgctgtgcaagaagaaggcagctgagatgcacagtttgcgyatggatgccctctataagctctccattgccaactatgtcagggacaaagtgttttggtttcctcacaacatggatttccgtggcaggacttacccttgtccaccttayttcaatcacttgggtaacgatgtcactcgtgccatcctgctctttgcagagggaaggcctctggggccaaagggcctcgactggctgaagatccacctcattaacctcacagggctgaagaagaagaatgccttgcaggagcgcttggattatgccaatgaaatcatggaggagatcctggactctgctgaccaccctctcacggtgcgtgtggagtggtgggactcagagtcactggggagaagcttgggctgcagccaa

SEQ ID NO: 50587 - DNA, 492 bp, Chicken  19866894297661_1
tccagtatctacctttagatatagatgacactgttgggtctgtggcatttctcacaccctctggaaaatctgtcctctctgtgaaaggtttacagaagtgatatccttgctgcctttttcactgaaggtgaatgatattgctgcactgatgaggaagtctctcctgacttgtgaaatacctttgtgttttgcacatgactgagacttgccttcattttaaaaggtttggaaagaggttgtggtagtgtagttgacagttcatccataccagagatggtaatgatgagacatctttcagcrggctttataaatggatatctggcttcaagagtgcctttatggtttgagcatctttatccctgtggttctggagcccagaccactaggtagattatacttctgtacataaattgtgctccaacgtgttttataaatcaggtggcttaatcggataaagacaaatggccatgaaatagcttaaatagaaattta

SEQ ID NO: 50588 - DNA, 600 bp, Chicken  19866894297664_1
caagttaaaaggcatgcccataggaggggagtataaggtacaaactcctaaatatacaagtcaagtaagaagttgaattacgtttttactaagataatgttatgcaggctttaaattgtagggagaaaaaaaaccttacaaaacaaatttgagattattcaatcagaaaaatacttgtcataaattgcttaacctcagacaaagacagagaatcaattacaaggaaaaggaggtgaaacatctttcctctctgcagaatgagatatcccaactcaaacgtttacttttggataatccctragtgtacattaagaggaataatgcatgcaatataacagacgcatactgtaccctccgactcaatctcatgattatgctgtcagcaggctgaattacagccttgcattactgatgatgaataattcacactgatttattatcaaattcttcatgtgcagtgaaataaagagaaaagaaacggaggaactgagagtgaagaaggtaaccaacatttgcaaagcactttgaggccactgggacaacttcccagactttacacctaaaacacatttcatgaagctttttgatatttttcagact

SEQ ID NO: 50589 - DNA, 600 bp, Chicken  19866894297668_1
cacaaacatgactgtgagaaaaatacagcacttgctgatacgatgtattagttagccatttgttttatgttgctgacagctttatggatgtttacagttaaaaggatgatgctgaagtgctgatactaagaattgtgtagcttttgcctgtaataaaacaaccaagattttgtgtaagctcttttgaaattgcagacttcactttttattgtgcatctttttataaactgccaattgcctattttcaataacagaaattaccagtcttcctctgtgttgtatgtaaataattaaaaaaawataattgaaaatgtaaaaagtctacttatataagtttgttagtgccaatggaacttagacattacccttagaagccagactttttttttttcctgataaaggtttccatgttgtctgtgcacttgattgtctttcattgataaagacttatttttatactttgaacagagcaactaaatgttctcctgcctgttggtaggtatattgttaataaagataacgaatgagagtaaaataatcagtgcaaatacgtattcggtttagggttgtaatataaagttggaccagaaaatgtttcag

SEQ ID NO: 50590 - DNA, 600 bp, Chicken  19866894297670_1
aaggtttagtgaaagcctttgtgctatgtattcttaatgtcagtgatgagtctgcttttgtgcgttgtttgtttttaatatcatgaatgagcttttccatttgacattggcatgacagactttaagggaactgcatgagctctgaacttcactttgagttttgcagtgtttgagaaaggtgttagtaaccagggaaggagataaccagaagtctgctgaaggctgagaacagtttgggtcttcggagaacattgaaatagggtaacttttaaaaaattcatcagttgtcagttctgaagrctgaaagtgattgaaagagtgttctaaattacctaaaagtattttccaattacctgcaggctcttttaatgggagttgtcaaacatgcttagaaaaagcgctgtcccaaagaatatattaagatagaactcttgatgtgactccaagggtgcatttctgtctatgcagaaacatacgacagtgctctttttgtcatacctgttagaaacatagttgacatgaagtgttttggataaaatctcagcctatgattaggttatgaacagtaacatttactaagcagtatataaaatggttttg

SEQ ID NO: 50591 - DNA, 599 bp, Chicken  19866894297671_1
  misc_feature (1)..(60): n is any nucleotide
nnnnnnnnnnnnnnnnnnnnnnnnnnnnnnnnnnnnnnnnnnnnnnnnnnnnnnnnnnnnagaagcataggtaagctgagaggaatagctgaacagatctactttcactcataatttttggaagaagaaactgcttagagaaagaaacataagatggagaagaaagacaatatcttttcagtgtacattaacttcaccttctgaaacattctgaacctctgtgtaaataaaaaaaaaatagtctgagtaaacttaatggaattgtgtattatggctcctttcaatattttacttcctctraggctacttctgttgtctaaaaagaaatagagaatatactgcatttctattttcatgaatactgggtgaagtacctcgtgaatcctatcttgttttccagccgtatctgtgtggtacattgtgagtaatgtatcctagagtcactccctggtatgagatcaccagtctcataagctgttcttgatggatatcccttagacacagctgagctcaggtaagccagtgcacactgcggtgtagtgtcctgaggaggtacacaaactgccacttgcgtgagagatggtggcagttcacttgaa

SEQ ID NO: 50592 - DNA, 600 bp, Chicken  19866894297671_2
gtgtcctgaggaggtacacaaactgccacttgcgtgagagatggtggcagttcacttgaacaaagattgatgttaaactacgccagtaatatttttgtcatcaaatgcagaaagacttgtttttgtggggtttcagtatatgaaactcttgctgattcagtttctgtcctgattcatggctgaagcaagcctgagaagaggaggcattcccggagaagatgattcccagtccaagctctacaagcatgcagttcttgaaaacattgcagctaggattttccaaagtgatcatttgtatcrtaggattcttagtatggattacataagcttgatcttcagcagaaaataaatgtgtgcctaaaaaactctcctctttgaatagagttaaaaggatcaggttcagctttggaaaagcctgttcacatcccraagattaaaactgaagtcttgcagcattgacttttctcatgtttattgggttgaaactcaatatcagtatactaaaaaactttgcaaagggaattcgtaaaaaacctaagtactacagtagcaagtatgcaacccgcagataaaatytctttgttttgttcattaaatttt

SEQ ID NO: 50593 - DNA, 600 bp, Chicken  19866894297671_3
gtttcagtatatgaaactcttgctgattcagtttctgtcctgattcatggctgaagcaagcctgagaagaggaggcattcccggagaagatgattcccagtccaagctctacaagcatgcagttcttgaaaacattgcagctaggattttccaaagtgatcatttgtatcrtaggattcttagtatggattacataagcttgatcttcagcagaaaataaatgtgtgcctaaaaaactctcctctttgaatagagttaaaaggatcaggttcagctttggaaaagcctgttcacatcccraagattaaaactgaagtcttgcagcattgacttttctcatgtttattgggttgaaactcaatatcagtatactaaaaaactttgcaaagggaattcgtaaaaaacctaagtactacagtagcaagtatgcaacccgcagataaaatytctttgttttgttcattaaattttcttaaaatctttatgactgaggtttcccaatttctatttaaatgttatcataataatgataagaacacaagtcaataacattacaagaaacatttaaaccagcaatttttttcacatttgagattctgt

SEQ ID NO: 50594 - DNA, 600 bp, Chicken  19866894297671_4
tttccaaagtgatcatttgtatcrtaggattcttagtatggattacataagcttgatcttcagcagaaaataaatgtgtgcctaaaaaactctcctctttgaatagagttaaaaggatcaggttcagctttggaaaagcctgttcacatcccraagattaaaactgaagtcttgcagcattgacttttctcatgtttattgggttgaaactcaatatcagtatactaaaaaactttgcaaagggaattcgtaaaaaacctaagtactacagtagcaagtatgcaacccgcagataaaatytctttgttttgttcattaaattttcttaaaatctttatgactgaggtttcccaatttctatttaaatgttatcataataatgataagaacacaagtcaataacattacaagaaacatttaaaccagcaatttttttcacatttgagattctgttgcattgattaacttagtccagtgttggattctgcaatcttgtcactctgaatgctttcaaatgcaatcttaaacagagattccttcacttcaccagcagtaggactacagtggcagaaggtttcctgggcaatttcaattcttgtt

SEQ ID NO: 50595 - DNA, 579 bp, Chicken  19866894297677_1
gtatgtattttttgattcagaatctctacaactccttcccagggccctgcctctgcttcctacctttaacacaaggtcctctaaccaaacattctcctcatttccctagaatatcagagccttgtcaggcctggagaaggcagagacttggaagtgactttacagtcattaacaaggctcaagaagccttcttcacacccttctgacacccttcaccaccaagtgcaaaagcacacgactcaagatccgttagcaggatggcacctaacaaggtacagaggctgaattcaggtatggagrcacaactgctcaagttttggtttcagttcgtgaagagtcactgttgcaataggtcatagcaccccagttggcacatttctcttcaatctgttctttgtcaagattagggcttgcatgctcaaraaggattctcacatctttaaggtcaaagtaattccctccatcactatgtccaatctccctgttctcttcttcagacatcagcttaaggaacagccaggactttggtggctgttcactgtctcaatgctaaaagcaacattctgagctcagttggtt

SEQ ID NO: 50596 - DNA, 456 bp, Chicken  19866894297677_2
gtcaggcctggagaaggcagagacttggaagtgactttacagtcattaacaaggctcaagaagccttcttcacacccttctgacacccttcaccaccaagtgcaaaagcacacgactcaagatccgttagcaggatggcacctaacaaggtacagaggctgaattcaggtatggagrcacaactgctcaagttttggtttcagttcgtgaagagtcactgttgcaataggtcatagcaccccagttggcacatttctcttcaatctgttctttgtcaagattagggcttgcatgctcaaraaggattctcacatctttaaggtcaaagtaattccctccatcactatgtccaatctccctgttctcttcttcagacatcagcttaaggaacagccaggactttggtggctgttcactgtctcaatgctaaaagcaacattctgagctcagttggtt

SEQ ID NO: 50597 - DNA, 599 bp, Chicken  19866894297678_1
  misc_feature (1)..(101): n is any nucleotide
nnnnnnnnnnnnnnnnnnnnnnnnnnnnnnnnnnnnnnnnnnnnnnnnnnnnnnnnnnnnnnnnnnnnnnnnnnnnnnnnnnnnnnnnnnnnnnnnnnnnntgtgaaattattcagatttgaactaagtaaaattgtcgagtatagaacaaaacattacattgtaattatatgtctaggatgatttttttctttctttctcaacttttttaagaataatctctgtactagaagatctgtttttctaacatgcagtatttatgttactgagttcaaccagcagttctctgtgacttaaccrggcaaataccttatgtgtatgtacagaataatgcactcagtaaaactaggatctttattactgcctcyattttaacagctttatgccagtgtaatttatagaaaaactgttacaccaaataaaaactgctgtatgtgtaatggaaagaatgggctgggcaaaatagcaaaacttttctttaatttgtaagtagttactgtagggagtcatcatgaactgtttgccaattagttctccatctaaaaaagagaaatgtattcygacatgtaaaatgtacactgggattaagttgaatgtat

SEQ ID NO: 50598 - DNA, 599 bp, Chicken  19866894297678_2
  misc_feature (1)..(33): n is any nucleotide
nnnnnnnnnnnnnnnnnnnnnnnnnnnnnnnnntgtgaaattattcagatttgaactaagtaaaattgtcgagtatagaacaaaacattacattgtaattatatgtctaggatgatttttttctttctttctcaacttttttaagaataatctctgtactagaagatctgtttttctaacatgcagtatttatgttactgagttcaaccagcagttctctgtgacttaaccrggcaaataccttatgtgtatgtacagaataatgcactcagtaaaactaggatctttattactgcctcyattttaacagctttatgccagtgtaatttatagaaaaactgttacaccaaataaaaactgctgtatgtgtaatggaaagaatgggctgggcaaaatagcaaaacttttctttaatttgtaagtagttactgtagggagtcatcatgaactgtttgccaattagttctccatctaaaaaagagaaatgtattcygacatgtaaaatgtacactgggattaagttgaatgtatatatggctgcttcatggctacagtttgcctaaatttttatttttgtaaagcttgcatgttatgaatgt

SEQ ID NO: 50599 - DNA, 600 bp, Chicken  19866894297678_3
gttactgagttcaaccagcagttctctgtgacttaaccrggcaaataccttatgtgtatgtacagaataatgcactcagtaaaactaggatctttattactgcctcyattttaacagctttatgccagtgtaatttatagaaaaactgttacaccaaataaaaactgctgtatgtgtaatggaaagaatgggctgggcaaaatagcaaaacttttctttaatttgtaagtagttactgtagggagtcatcatgaactgtttgccaattagttctccatctaaaaaagagaaatgtattcygacatgtaaaatgtacactgggattaagttgaatgtatatatggctgcttcatggctacagtttgcctaaatttttatttttgtaaagcttgcatgttatgaatgtttgcctctttattacttatcaattatttatttattttaaagagcaggaagataaacttatctgaaaactggtactccattccatctcatccacccagactctttaaaaatcctttttctaaagctctgatgggccctacctggggtgcctgtcacagaaattttctcaaacaccaagtttatagagttcctaat

SEQ ID NO: 50600 - DNA, 600 bp, Chicken  19866894297685_1
tccaccacgcagcaagggcacatgaagatggctgcaaagggtcaccatgggctcatcaagggcacatcgctccctggtttctttgagagattacttagcagccaagaggagacaaaggatcatcatttactgtggctttgagctgacctccacaggatctcccggcataatccccgcacccagatgcagctcaatcacaaggcagctggcaaagtggctgggtggccctgttggtgggctgtggtcagaagtccggttgatgttcctcaccccttggtattgctttggatgttgctgaargtctgtgtgacgggcacagagggtgttctatagaatgaaggatacaagaagccctctgggggcaccatgctggtgaggggcaggagccagtggcacagtgaacaatgcgcctgctcttgtcacacagctgggcaccccaatgggatcagagctggagcccagaccaccatgacaaatgaccacaccttgaccactaatagagaggtttgaccttgccctcaacttgaacactgtaccttcagtcaacagaatggagggaaatgaaaatgaaacttcagcttccagtgcagtcatggggtc

SEQ ID NO: 50601 - DNA, 389 bp, Chicken  19866894297685_2
ggtgaggggcaggagccagtggcacagtgaacaatgcgcctgctcttgtcacacagctgggcaccccaatgggatcagagctggagcccagaccaccatgacaaatgaccacaccttgaccactaatagagaggtttgaccttgccctcaacttgaacactgtaccttcagtcaacagaatggagggaaatgaaaatgaaacttcagcttccagtgcagtcatggggtcacgctagatgtgagcatatccctgtgatccagcagtggcccagattgcttgcatagacagaaaaaaaaatwaaaaaaaatccttatttcctgatgatgtgttctggacaagcacagcttgggatcatcaggtttccttatctacatcccatccaatgcca

SEQ ID NO: 50602 - DNA, 599 bp, Chicken  19866894297687_1
  misc_feature (1)..(122): n is any nucleotide
nnnnnnnnnnnnnnnnnnnnnnnnnnnnnnnnnnnnnnnnnnnnnnnnnnnnnnnnnnnnnnnnnnnnnnnnnnnnnnnnnnnnnnnnnnnnnnnnnnnnnnnnnnnnnnnnnnnnnnnnnnttaggtttgaatttaaagcctggttccaacatcacccaaattctcactgtagctgtggtgtgagtagcggcgtagaaactttaaacaatcagaaccaccacagatggggactgcaagtatcaaacccagatttaactgatggacaaaatgtcattgcacaagagtgagaaaggggatrattatgtaagatatgcaaaggcagcgtcgggaagggtttgagtacacaaacagatgtggaagaaagagcaagagaagagaaggcagcttgttgacagcaaagtcagagcaccgtccatttctacaccaygagttactgaacccatctacctcatgcttcgaaataaatcgagctgtactttctctatccaagatctgtcctgataacttcaatctactttttttttttttttcggtgactccttcaacagattagtcattgaaatataattagagcttgtaaatatgtatttctaattt

SEQ ID NO: 50603 - DNA, 600 bp, Chicken  19866894297687_2
tgaatttaaagcctggttccaacatcacccaaattctcactgtagctgtggtgtgagtagcggcgtagaaactttaaacaatcagaaccaccacagatggggactgcaagtatcaaacccagatttaactgatggacaaaatgtcattgcacaagagtgagaaaggggatrattatgtaagatatgcaaaggcagcgtcgggaagggtttgagtacacaaacagatgtggaagaaagagcaagagaagagaaggcagcttgttgacagcaaagtcagagcaccgtccatttctacaccaygagttactgaacccatctacctcatgcttcgaaataaatcgagctgtactttctctatccaagatctgtcctgataacttcaatctactttttttttttttttcggtgactccttcaacagattagtcattgaaatataattagagcttgtaaatatgtatttctaatttgtagtaaaaggaagaaatacagcttgggcggaggctgttgcaggaggcagccaggagctgtgcagaagcactgcaccagaagcgaggctgaccaacgccccgactggggcagaccgtccccaggtgctgt

SEQ ID NO: 50604 - DNA, 599 bp, Chicken  19866894297690_1
  misc_feature (1)..(151): n is any nucleotide
nnnnnnnnnnnnnnnnnnnnnnnnnnnnnnnnnnnnnnnnnnnnnnnnnnnnnnnnnnnnnnnnnnnnnnnnnnnnnnnnnnnnnnnnnnnnnnnnnnnnnnnnnnnnnnnnnnnnnnnnnnnnnnnnnnnnnnnnnnnnnnnnnnnnnnntgggtcaggataaggaaggactttaatggaaattgagaacatttgattgctggtcagcagaagctaagattcttttcacccttgtgtcgtatacataggacttgttttttttttcctaagaaatttcaatacatcgtgcatttgtcagycacttactgattttgatgtaggttccaaatgaggtcttaatcataagccttttggttaatttctgagagacaattggaagatacctgtttttgggggtgggatgtttaaaatgacgcgtagtgctgcaggcagtgaggctgggggwcagaacagtcagaggcagggctgggaggagtctggtgtccatgggtgccttgtggtatcagtgtggtggctgagttctttgtgagtgacttctttctcagcaccctgtaatgtgcgtcttgctgtgatgttggcagatgaattatcctcagag

SEQ ID NO: 50605 - DNA, 599 bp, Chicken  19866894297690_2
  misc_feature (1)..(5): n is any nucleotide
nnnnntgggtcaggataaggaaggactttaatggaaattgagaacatttgattgctggtcagcagaagctaagattcttttcacccttgtgtcgtatacataggacttgttttttttttcctaagaaatttcaatacatcgtgcatttgtcagycacttactgattttgatgtaggttccaaatgaggtcttaatcataagccttttggttaatttctgagagacaattggaagatacctgtttttgggggtgggatgtttaaaatgacgcgtagtgctgcaggcagtgaggctgggggwcagaacagtcagaggcagggctgggaggagtctggtgtccatgggtgccttgtggtatcagtgtggtggctgagttctttgtgagtgacttctttctcagcaccctgtaatgtgcgtcttgctgtgatgttggcagatgaattatcctcagaggagaactcttttttttcccccttggtaatactcttaagatctcaaacttccctgattgtagaccttcctaatgtgatctgttttctcctactaaaatgttgattagggagaaaacacagtgaactaattgttctgagaaacacttg

SEQ ID NO: 50606 - DNA, 600 bp, Chicken  19866894297690_3
agtcagaggcagggctgggaggagtctggtgtccatgggtgccttgtggtatcagtgtggtggctgagttctttgtgagtgacttctttctcagcaccctgtaatgtgcgtcttgctgtgatgttggcagatgaattatcctcagaggagaactcttttttttcccccttggtaatactcttaagatctcaaacttccctgattgtagaccttcctaatgtgatctgttttctcctactaaaatgttgattagggagaaaacacagtgaactaattgttctgagaaacacttgagccacrtaaatatttcaggggattttagtagcctggggatctcacagttgcacacaaacaaccgtacccataactgtggttgaggttctgtcatgtgaggaggctggaaaaggaagaacttctccaaagtaccttagggtttatgttccttgcaattgcacgatgttgtgtaagtcggtttgccttgtggatgaatgctaagtgaatgagacactttaagagaggttacacaagtttcagtgtaaatattttctgccaaaatgatgtaattcctggaacaaactcacatgggatgcgctggcatgg

SEQ ID NO: 50607 - DNA, 599 bp, Chicken  19866894297692_1
  misc_feature (1)..(23): n is any nucleotide
nnnnnnnnnnnnnnnnnnnnnnncaggttccctacagtaggtttcacaggaaagcatccgggcgggttttgagtatctacagagaaggagactccacaacttctctgggcagcctgttccagtcctctgtcaccctcaaagtaagaagttctttctcgtgttcagattgaacgtcttgtgttccagtttgtgcctatacccctcgtcctgtcactgtgcaccaccagaaagagtctggccacatacacttgacacccaccctttaatttaaaagtattgataggactccctctcagtctytaccaggmtgagcagtcccagcctttcttcatatgggagatgcttcagtcccctcattatctttgtggccctccactggactccctctgtaagttacctttcttggactggggagtccagaattggagacaatactccagatgtggcctgaccagggaagagtagagtacacgctgaagaaacagagtcaggttctcactgggatgcttttggcagatccttctgctgacctcggcttcctgccacgtccaacaggggtagttaacagtgtcccttttcttctctttgtttgtatccag

SEQ ID NO: 50608 - DNA, 599 bp, Chicken  19866894297692_2
  misc_feature (1)..(15): n is any nucleotide
nnnnnnnnnnnnnnncaggttccctacagtaggtttcacaggaaagcatccgggcgggttttgagtatctacagagaaggagactccacaacttctctgggcagcctgttccagtcctctgtcaccctcaaagtaagaagttctttctcgtgttcagattgaacgtcttgtgttccagtttgtgcctatacccctcgtcctgtcactgtgcaccaccagaaagagtctggccacatacacttgacacccaccctttaatttaaaagtattgataggactccctctcagtctytaccaggmtgagcagtcccagcctttcttcatatgggagatgcttcagtcccctcattatctttgtggccctccactggactccctctgtaagttacctttcttggactggggagtccagaattggagacaatactccagatgtggcctgaccagggaagagtagagtacacgctgaagaaacagagtcaggttctcactgggatgcttttggcagatccttctgctgacctcggcttcctgccacgtccaacaggggtagttaacagtgtcccttttcttctctttgtttgtatccagattctctg

SEQ ID NO: 50609 - DNA, 600 bp, Chicken  19866894297692_3
tacctttaatgaatccctcatctcagctggttttatgggctctgatccagggaagtacttaagcatgtgcttagctttgagcttattgacattccagactcaggccagcatcacacttttgagagctgtcaaaataataactaattttattattgaaattgccgtgctttgtgctctaaggttgacacaaaaatcggattagtattgacccttctaaataagggatgttagaaagtcattcagcacacaaatgatttctgaaaaactgaagaaaccaactacataaatacatataaaacraattatttgcagctgaatgtcacaacttaataatgtatccagcacaaatctacattcaggagagtgaacttataaagacatatgaaccacatatgatgtacatatactgtactgtatgttaatgtttgtatgtgtgtatctgtatctgtacatacctgtgtatccctatgaattgtataaatctgccctgtcatctttatactgtagatcattatattcaaaatgtagaggaaaaaaatgtgtctttctgacccactgtattttgactctttgactggaattctgagaattgtctgaaca

SEQ ID NO: 50610 - DNA, 600 bp, Chicken  19866894297694_1
caatggccttaagctgcaccaggcaagcttcagagtggatattaggaagaatttcaaagagtggtaatgcactggaacagactgtgcagtgaaatggtggagtcaccgtctctggaggtgttcaagaaacgtgtagatgtagcacagagggatgtggttagtgggcatggtgggggtggcttggtggttgaactagatgatcttagtggtctttccagcctcaatgattctatgattcattaactcggatgggaacagacccagtgatgtcagtggggctttgtgctgtggagcaggatrttcgccagccctcagcctctagtaacagtgccccactgggctgggatggctgggcagagggatgggtgttggtggcagcttggtttgtgcctccttactgcagcctctggtagttcactgccragtaacagtatctgtgtgaggcgttcttgcttggtttgctttatttgctrttgtatatgtaatcactccaatctccttccctccaaatttcttacagctgaggaaaatgagcttgtctgtccataaagcatcttgcggcaggttaatgcggttgtatatctggataaccccgtctac

SEQ ID NO: 50611 - DNA, 600 bp, Chicken  19866894297694_2
aagaaacgtgtagatgtagcacagagggatgtggttagtgggcatggtgggggtggcttggtggttgaactagatgatcttagtggtctttccagcctcaatgattctatgattcattaactcggatgggaacagacccagtgatgtcagtggggctttgtgctgtggagcaggatrttcgccagccctcagcctctagtaacagtgccccactgggctgggatggctgggcagagggatgggtgttggtggcagcttggtttgtgcctccttactgcagcctctggtagttcactgccragtaacagtatctgtgtgaggcgttcttgcttggtttgctttatttgctrttgtatatgtaatcactccaatctccttccctccaaatttcttacagctgaggaaaatgagcttgtctgtccataaagcatcttgcggcaggttaatgcggttgtatatctggataaccccgtctacctttgccagtgcaatcagtgtgggtgtgaattacaggcaggggtgagcacaaccggagtaaggctgggattgatgaatagtgtgcagctgtacgtggagcaggcagggatggaacatctgcag

SEQ ID NO: 50612 - DNA, 600 bp, Chicken  19866894297694_3
gggtggcttggtggttgaactagatgatcttagtggtctttccagcctcaatgattctatgattcattaactcggatgggaacagacccagtgatgtcagtggggctttgtgctgtggagcaggatrttcgccagccctcagcctctagtaacagtgccccactgggctgggatggctgggcagagggatgggtgttggtggcagcttggtttgtgcctccttactgcagcctctggtagttcactgccragtaacagtatctgtgtgaggcgttcttgcttggtttgctttatttgctrttgtatatgtaatcactccaatctccttccctccaaatttcttacagctgaggaaaatgagcttgtctgtccataaagcatcttgcggcaggttaatgcggttgtatatctggataaccccgtctacctttgccagtgcaatcagtgtgggtgtgaattacaggcaggggtgagcacaaccggagtaaggctgggattgatgaatagtgtgcagctgtacgtggagcaggcagggatggaacatctgcagggagccttttgttcttcgttctgtaatgccatcactggaactgctgaatt

SEQ ID NO: 50613 - DNA, 583 bp, Chicken  19866894297695_1
agaggtcgctgaggtcatgctgatctgccctgtcatctggttcatgttgttcataccacttgtgttggttgccatggatacattgatgttcatgttattattgtacatgctggtgcttgcttgctgcccaaaatgtggtggggactgttgtgaaaacatgctatagcaaggaatggaaaaagcaatgtgtcagaatgctgaagccactacgaaactgctctctttttaatatattttaagctagaatttgtacatattgctgtttatcccaccctcaaaaaaaaaaaaaaaaaaaaaaartctagttttcagctgcattagtgtctaaggaatagatcttcaaaacataagttcccatgtctgtgcacaaaaacgcatgcctttgcgtgtggaactatggcagagtacaaatctgttatgtgtatgcaataatggccaaccagctgctgaaatttgtcttcacatatcataaatatattcaggaaagcaatttttggagggaaaggaaaacatctttttttttcccctccatcgttagcaaagcataggactgttgaatcagtattgggtttgatctaataag

SEQ ID NO: 50614 - DNA, 600 bp, Chicken  19866894297699_1
gatactttttctaagctcttgccttaagaaaatttatgtatcttgaaaacaggtattcctttgtctgatggaaacattcttacagtgaagcacgcttcccactgctactacatacactttcattgtatctttgagatactgtgccatagtggaaatggtggtccgaaacttccctttatgatgtaagggttaatggtagtctatatgccagaactgtggtgcaggatttcatcttaaacataacatagtctcctgtgggtttagaagtggtatattatgctggttcttacaacgtttccytgaaactgtcaggaagatgctcaaatgttactgatttgctctgcagcatagcctgcgttcagtcgtcatgactttgtctgcaacatgagccctgttagtgttctgggacaattagcagctattagcatctggcagtgctcacactgcaagcaggttgcaaggaggcagatttctcttgctgccaggcagtgagccagtcatcctgccaaatttcacacttgatttacatcaccataaagccttggcccagactgatacccacagagttgctctaaatttctgcctgtagatattagggtg

SEQ ID NO: 50615 - DNA, 600 bp, Chicken  19866894297699_2
cagtcatcctgccaaatttcacacttgatttacatcaccataaagccttggcccagactgatacccacagagttgctctaaatttctgcctgtagatattagggtgttctttgatcattggtttcaataagattttctgggtgtccttctgatgctaagggttagctcgtgttcaccaaagttaaagcagcatcatgagtttcagtatcatgctgtttttctgcctggtagtaacaatgaaacatgaagattttgtcatgagaaaccttatgtacaaagctcttggtggcattattgaaraataaataagaaacaaaaatgctcacgagtgggagcttctgtttcaaagctgtactactgacatttttctttagctgagaatagctgacatttagaatcagtacttaatcctggagcaccatcctttgtgggtaacattaattaaagggaaatgagggtatattatttaatagytraagttatttattacacgttgagacttctgttactcttcaggaaaaagttccataaaaccagaattgcaaaacctttatctaaagcatcgcttgctaggttaattatttttgctgaatacataat

SEQ ID NO: 50616 - DNA, 600 bp, Chicken  19866894297699_3
accaaagttaaagcagcatcatgagtttcagtatcatgctgtttttctgcctggtagtaacaatgaaacatgaagattttgtcatgagaaaccttatgtacaaagctcttggtggcattattgaaraataaataagaaacaaaaatgctcacgagtgggagcttctgtttcaaagctgtactactgacatttttctttagctgagaatagctgacatttagaatcagtacttaatcctggagcaccatcctttgtgggtaacattaattaaagggaaatgagggtatattatttaatagytraagttatttattacacgttgagacttctgttactcttcaggaaaaagttccataaaaccagaattgcaaaacctttatctaaagcatcgcttgctaggttaattatttttgctgaatacataatattttaaaatacaaatgatatatttactgagtcctgtgagattacttcacttatattaccttgtattttggcttgttgggaacttctttaggaaaggacagctttccttgagagtcagcgatcaacagttctcccatcctgaggtgatcaacattcaagcattttcaacacagg

SEQ ID NO: 50617 - DNA, 600 bp, Chicken  19866894297699_4
caaagttaaagcagcatcatgagtttcagtatcatgctgtttttctgcctggtagtaacaatgaaacatgaagattttgtcatgagaaaccttatgtacaaagctcttggtggcattattgaaraataaataagaaacaaaaatgctcacgagtgggagcttctgtttcaaagctgtactactgacatttttctttagctgagaatagctgacatttagaatcagtacttaatcctggagcaccatcctttgtgggtaacattaattaaagggaaatgagggtatattatttaatagytraagttatttattacacgttgagacttctgttactcttcaggaaaaagttccataaaaccagaattgcaaaacctttatctaaagcatcgcttgctaggttaattatttttgctgaatacataatattttaaaatacaaatgatatatttactgagtcctgtgagattacttcacttatattaccttgtattttggcttgttgggaacttctttaggaaaggacagctttccttgagagtcagcgatcaacagttctcccatcctgaggtgatcaacattcaagcattttcaacacaggta

SEQ ID NO: 50618 - DNA, 556 bp, Chicken  19866894297700_1
tgtctttggttctcttcagcatatcctctgacctgctatcccaagcagccattcatcatttactattgagatgtcatttccccatgaagatctgtctgccaagcttcacccttgtcacagattctcaaggaactgttttcacactttctcatgtggtggccctccatgttaacagccatgtttcctattatgttagttatttatgtagtagttggtgtattatatatatttaagttctaagaacattatgctgcagaccctttttaaaggacgtgccttgcagtatagatttttgttctyaatgcttctttraatagggttcagggtcatgcaagttcctaagggaaaaatctcttttaagaaaagatttcctggtcacattttcatgttgctaattatctcattttatttgcttgtgtaatgtttgcattggttatgtagccccttaaaggtgggatgaaattcctttaaaagtcacaatgtcattacctcatccttctgcaaatactttctcagctgtcaccaccagcccttcactgccacggagcactgcaat

SEQ ID NO: 50619 - DNA, 544 bp, Chicken  19866894297700_2
tcttcagcatatcctctgacctgctatcccaagcagccattcatcatttactattgagatgtcatttccccatgaagatctgtctgccaagcttcacccttgtcacagattctcaaggaactgttttcacactttctcatgtggtggccctccatgttaacagccatgtttcctattatgttagttatttatgtagtagttggtgtattatatatatttaagttctaagaacattatgctgcagaccctttttaaaggacgtgccttgcagtatagatttttgttctyaatgcttctttraatagggttcagggtcatgcaagttcctaagggaaaaatctcttttaagaaaagatttcctggtcacattttcatgttgctaattatctcattttatttgcttgtgtaatgtttgcattggttatgtagccccttaaaggtgggatgaaattcctttaaaagtcacaatgtcattacctcatccttctgcaaatactttctcagctgtcaccaccagcccttcactgccacggagcactgcaat

SEQ ID NO: 50620 - DNA, 600 bp, Chicken  19866894297705_1
ggaagtctttctatcatcttctgaatattgtggagctatactgtaacagaatattcaagagagtagataacactgggaaaaaaaaaagcacatggccatccttgtaaaaaatgcagagagcagcaccaatgaattacaaagagttgtataacgtatatagggtaacatgttatctcagagtcctttttttcttttctctgcagtttctttttgcatgatagaattttggtaatttttttttactttattagtaatatttaaaggctctgtcttttagcatattgagattatagatgagcrtaagtaatatggagaaagtagctaatgaagtggtcaactgatactcctcttcttctagattcmctatgggagaatgccagttctactttgtgcccacataagaatcagattgtattcagtgtaagcctaaagattgttgcctatatagtttttctggagaagggccaaaggcatactatattatttacatagtgaataagctttccttatttgctccactaaatatgggtaattagcagtctctttagtctattctgtataaatgacacagatgtccagacaacatatttataatttcac

SEQ ID NO: 50621 - DNA, 600 bp, Chicken  19866894297705_2
tagataacactgggaaaaaaaaaagcacatggccatccttgtaaaaaatgcagagagcagcaccaatgaattacaaagagttgtataacgtatatagggtaacatgttatctcagagtcctttttttcttttctctgcagtttctttttgcatgatagaattttggtaatttttttttactttattagtaatatttaaaggctctgtcttttagcatattgagattatagatgagcrtaagtaatatggagaaagtagctaatgaagtggtcaactgatactcctcttcttctagattcmctatgggagaatgccagttctactttgtgcccacataagaatcagattgtattcagtgtaagcctaaagattgttgcctatatagtttttctggagaagggccaaaggcatactatattatttacatagtgaataagctttccttatttgctccactaaatatgggtaattagcagtctctttagtctattctgtataaatgacacagatgtccagacaacatatttataatttcaccccatctgtgctaatttttctataaatgtccttttagtgctgtaatcatcctgtttatcaaca

SEQ ID NO: 50622 - DNA, 600 bp, Chicken  19866894297705_3
gacaacatatttataatttcaccccatctgtgctaatttttctataaatgtccttttagtgctgtaatcatcctgtttatcaacagtatcctcagtgttgagcaacatacgaagatgtgtctcatattcagccctcattaaaacaaaacatttccacccccgaacctggtgtcaaggccctgtggaaatactcaggagtatcttggtagtttttgctccagctttttctggggtctgctttccccagcccaagatgtccgaggctgatactggtgctgcagggtgataggcaacaaatcyctccagcttcaaggtgttacgcagctacttgtatctggctatccagaaagaaagaaaaagctctcagaatagatatgtatttcttctgaaattaagagctttgctttagaacacctctgctctacatactgttggatggagcaagatgacctactggagtgttgtttgtgctttgtttgtttgcgtcctcacattgtgacctaactttgcatgataccaatagcaaaagagcatagtgtatggggaacactctgcggtcactcatttgcactgtgctgtaggtggttgggtttcccctca

SEQ ID NO: 50623 - DNA, 600 bp, Chicken  19866894297706_1
ttttgttgtcatacataaaatgttcttgtttataagaatttgccatatttacagtgaaattccaaagagattaagtcttttttttaatctacttttttattgccgtatttctacttgcttaattattttgtgtttgttttaagcattaaaagcaccttgccttttattacattgcaacttttgaatctttagccatctctctagtgtctcaacatcatttcgagtgcttcttctctgaggcacttgtcataacccatgccaagcatatttaattaatatatcatcctactcaccattaawaaaaaaataccycrtgttcaggacaatttctgtaggatccctcatttgaaagcttctccagtatgtaatacgacactagccgcatacacttygaaatggatttaggtgctgctcctgcattcatacaaacagcagtaatcactcttcctttgggaagatacacaaaaagttcataaattatagtcatgtctgctaaacgtgagagagaacaaatggattatatatttctagatgtgtgaaaactctacttttgccttttacacttttaacttttcattggttcagtaaagtagctttaat

SEQ ID NO: 50624 - DNA, 600 bp, Chicken  19866894297706_2
acataaaatgttcttgtttataagaatttgccatatttacagtgaaattccaaagagattaagtcttttttttaatctacttttttattgccgtatttctacttgcttaattattttgtgtttgttttaagcattaaaagcaccttgccttttattacattgcaacttttgaatctttagccatctctctagtgtctcaacatcatttcgagtgcttcttctctgaggcacttgtcataacccatgccaagcatatttaattaatatatcatcctactcaccattaawaaaaaaataccycrtgttcaggacaatttctgtaggatccctcatttgaaagcttctccagtatgtaatacgacactagccgcatacacttygaaatggatttaggtgctgctcctgcattcatacaaacagcagtaatcactcttcctttgggaagatacacaaaaagttcataaattatagtcatgtctgctaaacgtgagagagaacaaatggattatatatttctagatgtgtgaaaactctacttttgccttttacacttttaacttttcattggttcagtaaagtagctttaatatgacatagatg

SEQ ID NO: 50625 - DNA, 600 bp, Chicken  19866894297706_3
ataaaatgttcttgtttataagaatttgccatatttacagtgaaattccaaagagattaagtcttttttttaatctacttttttattgccgtatttctacttgcttaattattttgtgtttgttttaagcattaaaagcaccttgccttttattacattgcaacttttgaatctttagccatctctctagtgtctcaacatcatttcgagtgcttcttctctgaggcacttgtcataacccatgccaagcatatttaattaatatatcatcctactcaccattaawaaaaaaataccycrtgttcaggacaatttctgtaggatccctcatttgaaagcttctccagtatgtaatacgacactagccgcatacacttygaaatggatttaggtgctgctcctgcattcatacaaacagcagtaatcactcttcctttgggaagatacacaaaaagttcataaattatagtcatgtctgctaaacgtgagagagaacaaatggattatatatttctagatgtgtgaaaactctacttttgccttttacacttttaacttttcattggttcagtaaagtagctttaatatgacatagatgta

SEQ ID NO: 50626 - DNA, 600 bp, Chicken  19866894297706_4
ttttttattgccgtatttctacttgcttaattattttgtgtttgttttaagcattaaaagcaccttgccttttattacattgcaacttttgaatctttagccatctctctagtgtctcaacatcatttcgagtgcttcttctctgaggcacttgtcataacccatgccaagcatatttaattaatatatcatcctactcaccattaawaaaaaaataccycrtgttcaggacaatttctgtaggatccctcatttgaaagcttctccagtatgtaatacgacactagccgcatacacttygaaatggatttaggtgctgctcctgcattcatacaaacagcagtaatcactcttcctttgggaagatacacaaaaagttcataaattatagtcatgtctgctaaacgtgagagagaacaaatggattatatatttctagatgtgtgaaaactctacttttgccttttacacttttaacttttcattggttcagtaaagtagctttaatatgacatagatgtaaagacatcaggatattttttactctgatttcattttcagtaattggattgatttttctgtgatgatgcagcattgcat

SEQ ID NO: 50627 - DNA, 600 bp, Chicken  19866894297707_1
aatcctcaagaaacccaacgttctgctctgcccgtggccacggcgtggtttgtgtgcatggtcacaggacacacggtgctctttgaaaggaaagttataatgagcacttcccgaattctccccagtccagccaacgcaccaagaacccccccgtcatttaaatgcctccccagtgccatacattagcaatgagtttcagagacgcatcagaaaagctaaagcttccttttcccaaacacacaaagccaatgctaaagcccgtttgcaacacggtcactacacccttcgatactaacctgycctaataatatccactagcccaacgttacaatacctccacgtcctcagcatctccttctggattagaaatgttttctttgctaagagctgggtggggaaaggtgaacagttgaggaatgtgaagaacgagaggaatactgctctggctgaggacaaagtgcaatcgacctgcgctgcgggtgtcagagccctgcgctggtggaggtgagttggtgccatgcctccaggcgttctgagcagggacttgcacctccctgtgtcgtaacccagatctccacgttattttggcacagcaaactg

SEQ ID NO: 50628 - DNA, 600 bp, Chicken  19866894297712_1
gagggagactggagcccatggtccctttgtagcgtcacctgtggaagcggcagtcagaagcggacgaggtcctgtgggtatgcctgtactgccaccgagtcacggacctgcgacaggccaaactgcccaggtttggttgtgctagcagaagggcaatggggagaggtggccatgggagggggagaagagccctactgcgcataaagccaaggaagggtctttatgttgggtctttggctaggtaggagttttgctgggaagagagatgttgattctcaagggcatttatgaaatggcagrttctttgctagtaataatatgtttccagatgcagtttaccatcccctgagacttcaaagacaaatacaggcttttttttttattacggcagtcatttttgtgcacagtatgttttgtattccaaagggtgtaatctactctcatgtaacaaatttgtgttaattttaggatttcaaaacagctgtgctattgcctcagcgagcccatattttgctatgcagtgagtggacatgcctatgcttcgaacaaatagctccccccacttatatggtttttaagatgagcgcctaacatatgcag

SEQ ID NO: 50629 - DNA, 600 bp, Chicken  19866894297712_2
tgtgggtatgcctgtactgccaccgagtcacggacctgcgacaggccaaactgcccaggtttggttgtgctagcagaagggcaatggggagaggtggccatgggagggggagaagagccctactgcgcataaagccaaggaagggtctttatgttgggtctttggctaggtaggagttttgctgggaagagagatgttgattctcaagggcatttatgaaatggcagrttctttgctagtaataatatgtttccagatgcagtttaccatcccctgagacttcaaagacaaatacaggcrtttttttttattacggcagtcatttttgtgcacagtatgttttgtattccaaagggtgtaatctactctcatgtaacaaatttgtgttaattttaggatttcaaaacagctgtgctattgcctcagcgagcccatattttgctatgcagtgagtggacatgcctatgcttcgaacaaatagctccccccacttatatggtttttaagatgagcgcctaacatatgcagttactgtaagacactgaatctatgtattagtatgaaggaaaaaaaaaaaaaccttaaatacccgttcatgtc

SEQ ID NO: 50630 - DNA, 600 bp, Chicken  19866894297712_3; identical to SEQ ID NO: 50629

SEQ ID NO: 50631 - DNA, 600 bp, Chicken  19866894297712_4; identical to SEQ ID NO: 50629

SEQ ID NO: 50632 - DNA, 600 bp, Chicken  19866894297712_5
tgtgcacagtatgttttgtattccaaagggtgtaatctactctcatgtaacaaatttgtgttaattttaggatttcaaaacagctgtgctattgcctcagcgagcccatattttgctatgcagtgagtggacatgcctatgcttcgaacaaatagctccccccacttatatggtttttaagatgagcgcctaacatatgcagttactgtaagacactgaatctatgtattagtatgaaggaaaaaaaaaaaaaccttaaatacccgttcatgtcttactcaagagattttgttattgttrggatgcaaaatctcctgtccttggaagtcaacagctatgttaaggtggaaatgtcacctcctatctgttgtcacaytgctcrgttagatggagaattataaatgttaaagcttggtcatgcagcagctggggtgcacgttgggatgaaggaaagggtagttttagcttgaatgtgttcagataatacagccatgacaaggagcctttccttagctcctgccttcctaaaggcacggacattaaacaccagtaaagcaagtgtcatcatcattaagcttttgctttactgaaagcagggct

SEQ ID NO: 50633 - DNA, 560 bp, Chicken  19866894297712_6
aaaacagctgtgctattgcctcagcgagcccatattttgctatgcagtgagtggacatgcctatgcttcgaacaaatagctccccccacttatatggtttttaagatgagcgcctaacatatgcagttactgtaagacactgaatctatgtattagtatgaaggaaaaaaaaaaaaaccttaaatacccgttcatgtcttactcaagagattttgttattgttrggatgcaaaatctcctgtccttggaagtcaacagctatgttaaggtggaaatgtcacctcctatctgttgtcacaytgctcrgttagatggagaattataaatgttaaagcttggtcatgcagcagctggggtgcacgttgggatgaaggaaagggtagttttagcttgaatgtgttcagataatacagccatgacaaggagcctttccttagctcctgccttcctaaaggcacggacattaaacaccagtaaagcaagtgtcatcatcattaagcttttgctttactgaaagcagggctgagtgctcaaacctacataatagaagtttaaagctg

SEQ ID NO: 50634 - DNA, 554 bp, Chicken  19866894297712_7
gctgtgctattgcctcagcgagcccatattttgctatgcagtgagtggacatgcctatgcttcgaacaaatagctccccccacttatatggtttttaagatgagcgcctaacatatgcagttactgtaagacactgaatctatgtattagtatgaaggaaaaaaaaaaaaaccttaaatacccgttcatgtcttactcaagagattttgttattgttrggatgcaaaatctcctgtccttggaagtcaacagctatgttaaggtggaaatgtcacctcctatctgttgtcacaytgctcrgttagatggagaattataaatgttaaagcttggtcatgcagcagctggggtgcacgttgggatgaaggaaagggtagttttagcttgaatgtgttcagataatacagccatgacaaggagcctttccttagctcctgccttcctaaaggcacggacattaaacaccagtaaagcaagtgtcatcatcattaagcttttgctttactgaaagcagggctgagtgctcaaacctacataatagaagtttaaagctg

SEQ ID NO: 50635 - DNA, 600 bp, Chicken  19866894297713_1
tgattccatgcacagtctgcagcgcccacacgctgtgcggaggctctggacaaggtgagcacagtgtgtacggagagccgtgtgagcccttattgctccctgccctcttctgggcagcccagctgcaaatgctccaacagtacccaccgctgactgccagccaggggttttcttgccatgaggcagtgcatctcataagcagcagctcagtattgagtccccagataaaaccagcatcactaaaccaccatcactaaaaagcagctgaaaagtcatctgtgttttactgggctttccagkagaccccgtgctcttcaatctccccggccggcgccggggagggctgcgggctgagaacggccccgctcagcgcagccgcggggtgcggcggcagccggtgggtggcagcaggggagcggcagcgccgcgtgcgccgcggcaggaaaggaaacggcccggggaggttttcctctcgaggaacgacgctcgccctgcgctgcgtctcctcgtctccccgctgcagtgtgacactgaagtcgcacacagccccaccccaggctcccgcccgccccagcctgctcccatcccagctgctcgttt

SEQ ID NO: 50636 - DNA, 600 bp, Chicken  19866894297715_1
ccctactaaaggaagaaatgagtcccttctggattgcaacatttgtcaaaccagagcgttgccacctgcttctcttcctcctctaatgaatgttctctgaacaaaagaaaaggatgcacaaaacacccttagatgaggcagagagaatgctgtgtgacagtcatcttctccccctgcctgtgattaaccatgcttagtgcttgctaatagtgccctgtgagtggagttacactttttggctctgttcaggcacagctaacttgctcgggatgcctatctgaatgcaccagctgcttaacwaggtgggagattggcatcctgggcacagttagttcttgggctgcacatcagggctgtcagacagactgcagtgcaggaaataccgagggcactgctgtatgctgctgactgctgtgcgtggctgtatctaatccagccccagagggtaatggatgggattttaaggtggtaacacagatacatcctgcaaaattctttggtatgacctgcgagccccaagcggtgcttggtagatggtctgcaggctcaaacatttgctgatccaggctgggattgggtggagatgggacagcagakcga

SEQ ID NO: 50637 - DNA, 600 bp, Chicken  19866894297715_2
acwaggtgggagattggcatcctgggcacagttagttcttgggctgcacatcagggctgtcagacagactgcagtgcaggaaataccgagggcactgctgtatgctgctgactgctgtgcgtggctgtatctaatccagccccagagggtaatggatgggattttaaggtggtaacacagatacatcctgcaaaattctttggtatgacctgcgagccccaagcggtgcttggtagatggtctgcaggctcaaacatttgctgatccaggctgggattgggtggagatgggacagcagakcgattcgtacctcagccctactcctccgacccaagtcactgggatcgggttgctcatttgctmagcatgtggtatgcattaatacagtggtggcttccctcatttgcagtcatttctcctcctccttggatcgttcaagcctttttctggttttgattttatgtaggtttttattgtcagaccgctcccgcagcctccagaaggtagaattttctgagaggtgaggacgactgggaagtgccactatgtcacctcacacaggaagccttgagaggccagcagagtccccccagacctgcc

SEQ ID NO: 50638 - DNA, 600 bp, Chicken  19866894297715_3
acagactgcagtgcaggaaataccgagggcactgctgtatgctgctgactgctgtgcgtggctgtatctaatccagccccagagggtaatggatgggattttaaggtggtaacacagatacatcctgcaaaattctttggtatgacctgcgagccccaagcggtgcttggtagatggtctgcaggctcaaacatttgctgatccaggctgggattgggtggagatgggacagcagakcgattcgtacctcagccctactcctccgacccaagtcactgggatcgggttgctcatttgctmagcatgtggtatgcattaatacagtggtggcttccctcatttgcagtcatttctcctcctccttggatcgttcaagcctttttctggttttgattttatgtaggtttttattgtcagaccgctcccgcagcctccagaaggtagaattttctgagaggtgaggacgactgggaagtgccactatgtcacctcacacaggaagccttgagaggccagcagagtccccccagacctgccctgctggaagatgcccttgtgtagagcaggcgctacccctgtctgttcccctgagatgcactc

SEQ ID NO: 50639 - DNA, 599 bp, Chicken  19866894297718_1
  misc_feature (1)..(193): n is any nucleotide
nnnnnnnnnnnnnnnnnnnnnnnnnnnnnnnnnnnnnnnnnnnnnnnnnnnnnnnnnnnnnnnnnnnnnnnnnnnnnnnnnnnnnnnnnnnnnnnnnnnnnnnnnnnnnnnnnnnnnnnnnnnnnnnnnnnnnnnnnnnnnnnnnnnnnnnnnnnnnnnnnnnnnnnnnnnnnnnnnnnnnnnnnnnnnnnnntagtgaaaattccctgtttatcaggagtgtaaaatttagggtaacgatttaagcaagctcttattaaataagaagtgaagaaacgcatttggcagcacctaagctaraggcactggcagaccacgattaaaaagcaatagtggagtctgatctcctgactgtgaggtacagcagcagaaagagcgacattcactcatttctattattttgatacctaactgcagcgtgatccaggaaaatcagatagcatctgtttcaaatatgttatgcagggggaacagtcatgctttttttttttaattgttagaaaaatagttctcaaatttgcattgttttcacagaccttcaaagaactggggagtttctcatgcacagccaaggtgagccataaaatctcagcactgat

SEQ ID NO: 50640 - DNA, 600 bp, Chicken  19866894297727_1
gctctccacagagagaaacgaggagagcagaatctcctatttcccatcatttagtaaaaaatctgtctgtgtgagaaacacggaaacaaatagtgtgaatacgtaccggataagtagagcgtgtgagaatttttgttctctggcactttatctgatcgctcacagggctgcatgcccaagaacttgatgatgttattgacagcttctgcattcagaaattgaaaaagaaagttatctccagctcagtgccaagctttctgtgagaacaactcacttgtcatgtcctttctgctgccttarcaacctagaaaggcacccttcccttcaaccagactcagcctgaggactgccaagcttccactcataacagtcccaacactgcaacgcaaagctttgttgctggaacatgatatcacactagaaggcaccaaatcctcctcctcccacactaactaccttcttggagtggaagatttaccaggattactacatggttcagcaaaaaatgatgacaaatcatcttaccatcaagggttttaattgaaccaagtgcaaaggtttcctctttctcgaagtcgtctcctacttcttcccatgcag

SEQ ID NO: 50641 - DNA, 599 bp, Chicken  19866894297730_1
  misc_feature (1)..(190): n is any nucleotide
nnnnnnnnnnnnnnnnnnnnnnnnnnnnnnnnnnnnnnnnnnnnnnnnnnnnnnnnnnnnnnnnnnnnnnnnnnnnnnnnnnnnnnnnnnnnnnnnnnnnnnnnnnnnnnnnnnnnnnnnnnnnnnnnnnnnnnnnnnnnnnnnnnnnnnnnnnnnnnnnnnnnnnnnnnnnnnnnnnnnnnnnnnnnnntttattttttactgcccacagtgttaaaaactaattggtgaagaagcagatgtatagcactggacttcatgaaacaatgtgactgtgcagatgtgatggtttcacaccarttgagcatctggtcctcatggttatgaccaacgagagagaacttttcatgccctcagcggcaagaggcgtttgaagagtggcatctgttccactttccattggcagatttgaacttgtgaatttttatgagtctacacaatctgccaattcattctctagttatatatatatagcctgtcatacaacagtattcccttaatttatgtacaatttttgactgtataaatacacatacttctattagctagcatagaaccagtgatacttacctgtgatctaagtgatgaatagagaaaat

SEQ ID NO: 50642 - DNA, 448 bp, Chicken  19866894297730_2
tctaagtgatgaatagagaaaataacccctgaatttaaatgggcttgttttaaggtcaccaggattgtgaattcatatttatttctcaacttctgaaaaaagatttcagctgtttctggagacgcctttacacttcttgaagtatctaagaaaaaaatacagaaaaaaaaccattcagtataaaatcttattttactgtacaatctcagctcaaaaagcttacaaaaataacaagctagatctgagcagcacaatgaacagctagctaggcaagagcaggaataaaagtattttaaacascarctcttacatgaaatgagagccatttcaatagaagtgtgcacattttctaggacacccattctattctgggtgagggggggttttgttggtgatggttctgtgatggattttttttcacaacaggttcatgattcttttactctct

SEQ ID NO: 50643 - DNA, 445 bp, Chicken  19866894297730_3
aagtgatgaatagagaaaataacccctgaatttaaatgggcttgttttaaggtcaccaggattgtgaattcatatttatttctcaacttctgaaaaaagatttcagctgtttctggagacgcctttacacttcttgaagtatctaagaaaaaaatacagaaaaaaaaccattcagtataaaatcttattttactgtacaatctcagctcaaaaagcttacaaaaataacaagctagatctgagcagcacaatgaacagctagctaggcaagagcaggaataaaagtattttaaacascarctcttacatgaaatgagagccatttcaatagaagtgtgcacattttctaggacacccattctattctgggtgagggggggttttgttggtgatggttctgtgatggattttttttcacaacaggttcatgattcttttactctct

SEQ ID NO: 50644 - DNA, 491 bp, Chicken  19866894297733_1
aatgttacatacattttttttttgttttgttttcctgtttttctggaatacttacgttttaaaatcttgacaaacagcaaagtgtagatcgcacaatgcatgggttttagtacttgccatgaacatttttgcctgttaacgtgcagaggcagctttttctgaagctgctctttttgaattggtaatatttcttaggatttctttttccacgtaaagttaaagatttatttctcaacagaaatatcctgtggtgtgttaaaatgtgaaatagtgattgataatatttgaacagctatattygtcaggccaaaaactacttgttctagtttatttggtcttctgtattttaatttcctattcgtcatcacactttctataaggatgtgttcagagtacaggccaatatgatagcagtattgttaagtagtggcattggaaaaagactgttttgaggtcttcagtctgtgcatgtggtctgttaaaatctctgt

SEQ ID NO: 50645 - DNA, 600 bp, Chicken  19866894297738_1
aaattactgatagctggtagtttggttttttccactttgttcagttgtttcccaacagactaaggaaattgagacagacgtgtggacgtgctccaaaatagctggtaaaattagaaaactgaactttgctctgagttgtgctctgagttgtatatacaaccatactcatttgctactattgctaagtggataaataacattgctgtacttcttgaactgtattttaggtcgaagaagaataggacacgtggggaaaaaataatcaaccaaacccacaatctgtagtcatatggagtccaygcagtgaatgagtaaatgtaggaaaaaacctartaatttaggagaaagcaggaagtcaaccgtacttgattgtctgtgttttggtctttgtgctgcccgttttctggtgtgctttcttttttttagttttgttttctatttttgtctgcaggaaaaaatgtgaagcctgaaattagttttcattttgtacttattccttacagtgagtttctttctaagagcccttaggatctctaagtcccgcaatcataatttatgggtcatgattgttcttccctttgtatttttcagaatgccttt

SEQ ID NO: 50646 - DNA, 571 bp, Chicken  19866894297738_2
actttgttcagttgtttcccaacagactaaggaaattgagacagacgtgtggacgtgctccaaaatagctggtaaaattagaaaactgaactttgctctgagttgtgctctgagttgtatatacaaccatactcatttgctactattgctaagtggataaataacattgctgtacttcttgaactgtattttaggtcgaagaagaataggacacgtggggaaaaaataatcaaccaaacccacaatctgtagtcatatggagtccaygcagtgaatgagtaaatgtaggaaaaaacctartaatttaggagaaagcaggaagtcaaccgtacttgattgtctgtgttttggtctttgtgctgcccgttttctggtgtgctttcttttttttagttttgttttctatttttgtctgcaggaaaaaatgtgaagcctgaaattagttttcattttgtacttattccttacagtgagtttctttctaagagcccttaggatctctaagtcccgcaatcataatttatgggtcatgattgttcttccctttgtatttttcagaatgcctttccca

SEQ ID NO: 50647 - DNA, 552 bp, Chicken  19866894297739_1
gctgatattttctagctgataactgtgtaaattatttttacattgtgctacttgcagaagagaaggtgaattgtccccactacatatattttaatggcatgaggagtcttagcaactgttgtcttgtataaattgtataaatatatagcctacattcagtaattcattgcatattttttttgtgtgtgtgaatttgcaccttcagtgtttattgttgaaatactattattgctaaaatcctgcaggattttttaaataaatatactgttggcttttgtttgtttattttggtttcatagrtacaccatgtatagaggcaaataatagaagcagatmttaacttcctttaatttggatgtgggttttgcaggcctgaatgtctccttatgactgtctcatgtgcactaaacctgcaagtagtaatattgtatgttggttgtgcactggccttgacttaagcatgaacatttgagttattatagccataaagctattttggaagatagttttgaaacatcacaaccttccagtagatattaataatttatattt

SEQ ID NO: 50648 - DNA, 516 bp, Chicken  19866894297739_2
tttacattgtgctacttgcagaagagaaggtgaattgtccccactacatatattttaatggcatgaggagtcttagcaactgttgtcttgtataaattgtataaatatatagcctacattcagtaattcattgcatattttttttgtgtgtgtgaatttgcaccttcagtgtttattgttgaaatactattattgctaaaatcctgcaggattttttaaataaatatactgttggcttttgtttgtttattttggtttcatagrtacaccatgtatagaggcaaataatagaagcagatmttaacttcctttaatttggatgtgggttttgcaggcctgaatgtctccttatgactgtctcatgtgcactaaacctgcaagtagtaatattgtatgttggttgtgcactggccttgacttaagcatgaacatttgagttattatagccataaagctattttggaagatagttttgaaacatcacaaccttccagtagatattaataatttatattt

SEQ ID NO: 50649 - DNA, 562 bp, Chicken  19866894297740_1
aaattaagttgtcataatatgtgaagaaatttcacgccttacctggaaaaagtgtacagtattttcaaagacagtacaggtctctaacaggagatctatgtacagtggaaatcctgctgtttctataatgataccaaagttcctggcttttaagtctagactgaatcctagtaatgaaatgtaactcgtggtttagtcactacatattatagctacttctcactatttagatggactttgggctcagctgtgccacaccagtctgtcagctggaaaattcagatgaactctccaaactgktcctattctttaagatgccacatagaaatgcaaaatatcaaaatacatcagtataggccctaaactaacatgaattctgcaagagacttagacagctttggctagttgccaactttggccttttcactgtaagggaagtacataaacttattcaaataagctgtgcatacgtgtgtgtatgtatgtccaggtaggtatttgtatattcacacacacatacacatttcatagatgctaaaatctatgtgactgccaccagaat

SEQ ID NO: 50650 - DNA, 599 bp, Chicken  19866894297748_1
  misc_feature (1)..(115): n is any nucleotide
nnnnnnnnnnnnnnnnnnnnnnnnnnnnnnnnnnnnnnnnnnnnnnnnnnnnnnnnnnnnnnnnnnnnnnnnnnnnnnnnnnnnnnnnnnnnnnnnnnnnnnnnnnnnnnnnnnntgccaaatataaccagagttcaaagataacactgattgcaccagtccccagtcatacttcttggccaactgagtgttcacgggatattctgcagtcatctgcatatgaacaacttgaaagcagcaactagccacactgaagacaccgaagtgagaaaacacacctcgaaataaatcacagcctgyayttctacatttctacagtagatacagcaaaaaaggtttaaaatacacagagaggacttgctgaactgccatgaacgcaagccacatctaaatccaccatgaggctcacagcagcagcttaacaacgtggccaggtcattatagcccaagccagagtagccaggctcctaaatgatctggactacagccagaccaaaaccacctcgactcctgaaggaactgcagacaaaaatctcagaactgacagcagattcacttacggcatgtccttgccttccagatgaggtaaatacaatcag

SEQ ID NO: 50651 - DNA, 599 bp, Chicken  19866894297748_2
  misc_feature (1)..(113): n is any nucleotide
nnnnnnnnnnnnnnnnnnnnnnnnnnnnnnnnnnnnnnnnnnnnnnnnnnnnnnnnnnnnnnnnnnnnnnnnnnnnnnnnnnnnnnnnnnnnnnnnnnnnnnnnnnnnnnnnntgccaaatataaccagagttcaaagataacactgattgcaccagtccccagtcatacttcttggccaactgagtgttcacgggatattctgcagtcatctgcatatgaacaacttgaaagcagcaactagccacactgaagacaccgaagtgagaaaacacacctcgaaataaatcacagcctgyayttctacatttctacagtagatacagcaaaaaaggtttaaaatacacagagaggacttgctgaactgccatgaacgcaagccacatctaaatccaccatgaggctcacagcagcagcttaacaacgtggccaggtcattatagcccaagccagagtagccaggctcctaaatgatctggactacagccagaccaaaaccacctcgactcctgaaggaactgcagacaaaaatctcagaactgacagcagattcacttacggcatgtccttgccttccagatgaggtaaatacaatcagtc

SEQ ID NO: 50652 - DNA, 600 bp, Chicken  19866894297757_1
aggttcattaattctaacagtgcttttgcacaaatagaaatcttattttttatttatttatttttaaaattagaatctgcacagtaatctttttaggtcagctttgatctacaattttgtgtctatttcatggttagaaaacttctgccaatcaaaattttacaagaggggaagagtttgcatttttttaaatctggtttaagtagttcttattctaaggtatatccagcagtgggaataagctgcactaaaagaaaaaagattaaggcatgacaacatttttgagtgaagtatatcacrgtttctaaataaacaagtataaaacactttcccttactttaaagtcgtgtttcatcacaattctgacatggtctatacctcagctacaacagtgcacttaaaacatatagctggaattaataatctttgccctctctctttatacgaaataagaagttatgtcgaaaaaaaaaaagtggtatcattaaaataatatctaactgcaatgaacataaattatgtctactaacccacagcatgaaccgttctcctatgcttctttgaaatcttgtttgccttaactacgtgcagagcattttc

SEQ ID NO: 50653 - DNA, 424 bp, Chicken  19866894297759_1
taattctgcaaaccccatcaggaactttttttgaatgagacattctgttttgcgacaaaactgctcttactggaaatagtttggctacatctttgatttttactctcactgctggagtattctacagccagaagttcttacatgtcctcaatagattgattagcctgaaatagttcctactgctttctttggtgtttgtcattgcttagttacttgtgtacttatatttttttccactttaatcctggtcatgtgtagtatgtagtgctcttacaggtacagactcactggacagaacgsacactaacatttctggttgtctctgtttccttctcttctgtggcctcaatcaaattccagggaaacacgggtggcaaaggaaaagccattgaagtgtgttccaagactaatcactttgctttcc

SEQ ID NO: 50654 - DNA, 600 bp, Chicken  19866894297763_1
acaggatgggaggtagaaggcagcccctgtgcccagggggcagtctttctctctggcaagcaaaaaggcatagaggagccatcaccaagaaaagggtcctctgcctccttgaccctcttccttcttccacaagggaatcattcaaggctgggacacacagcatataatggcaggctcagagaactcctttggccagcacagggaagaggctcaggagtagagctaattggcagaccaaagccacggcttccatgttagtatctagtgcctcttcttctgtgtttttcttgttgttgtttrtttgtttgtgtatgtgtgtgtttctttccagttaatagttrattttttttttaaatagataaggtggagaataagacataataatatgagatggggagtaagatttaaaaattccccatatactgaaagtgacaaagatgttctaacaaccaaattccctttcttccccaggtctggtaacatttcttcagcaccactgagaaaactgtacttctttgcctctttgagagacaaggtaagaacctttggctgtggcctttgatttccatatgtatatttttgatggggtgaattgacaat

SEQ ID NO: 50655 - DNA, 596 bp, Chicken  19866894297763_2
agtctttctctctggcaagcaaaaaggcatagaggagccatcaccaagaaaagggtcctctgcctccttgaccctcttccttcttccacaagggaatcattcaaggctgggacacacagcatataatggcaggctcagagaactcctttggccagcacagggaagaggctcaggagtagagctaattggcagaccaaagccacggcttccatgttagtatctagtgcctcttcttctgtgtttttcttgttgttgtttrtttgtttgtgtatgtgtgtgtttctttccagttaatagttrattttttttttaaatagataaggtggagaataagacataataatatgagatggggagtaagatttaaaaattccccatatactgaaagtgacaaagatgttctaacaaccaaattccctttcttccccaggtctggtaacatttcttcagcaccactgagaaaactgtacttctttgcctctttgagagacaaggtaagaacctttggctgtggcctttgatttccatatgtatatttttgatggggtgaattgacaatctggaggccacagatgcaggatggggatatatcctgg

SEQ ID NO: 50656 - DNA, 600 bp, Chicken  19866894297764_1
tcaagctgcaaattacccaggaaacccctcaggtagagcttctgctaattatctgacatggttgcctgcttttaaaccaagaactatcagttgaagacctgcgctgggttgaagaataaaaactaaaaaaaaaaaaaaaaaggattaaaacaatttaatgtgagaagaacggtttgattcttagcacttctgagtgtagtcccaccctcaagacagacagcagtgaatgatgaaaattttaactcaaggtgttgaaaatgttaacttaagaaaatgttaaaatagccgaatatatcttgrcagatcgtgctttgcatacaggtagcattacagaggtgtctgcctatgagagttgaagtgagttatcctccacgtaagtcactctagattcatgtttagacatgggcaaagagaagtaagaacaagagaatgtcttcacactgttacctctcattttccttctgtcagatatacacatatatctatayataacagatatagacatatctgttacttgggaacctaaggcatatcttatagctagattaacatctaggaacacgatgcatagaacttgcctttgtttttgttttgtttgtt

SEQ ID NO: 50657 - DNA, 600 bp, Chicken  19866894297764_2
tctgagtgtagtcccaccctcaagacagacagcagtgaatgatgaaaattttaactcaaggtgttgaaaatgttaacttaagaaaatgttaaaatagccgaatatatcttgrcagatcgtgctttgcatacaggtagcattacagaggtgtctgcctatgagagttgaagtgagttatcctccacgtaagtcactctagattcatgtttagacatgggcaaagagaagtaagaacaagagaatgtcttcacactgttacctctcattttccttctgtcagatatacacatatatctatayataacagatatagacatatctgttacttgggaacctaaggcatatcttatagctagattaacatctaggaacacgatgcatagaacttgcctttgtttttgttttgtttgttttatttctagtgaagggaagttatcagctgccgtgcctgcagtgtgctctcttccattaatttttcctgtctcctcttctgcagacatatccttggaaggcatcaattttattggcaggcacataacatggaaattattgctctttcattgaagaagtagaaatgtttgtttcacaagttctttaaat

SEQ ID NO: 50658 - DNA, 600 bp, Chicken  19866894297770_1
atcttgttacgaagagctgaaaatatggaaaaattggatttgcagaattaaaggtaacttaaaatgagacatcagaaaagacatacggctgtgctgttgtatctgtcttgattttggcagtgcacctgcataggctattaaactgattgtctcagaatataagcttgagatgaagtaaactgcctggtattaatttaagaacaggtgataatggtgtcatgctgacagtgtacatttgtagtggcaacactggcaattctttctttgaaagctctgagatataagagcataggttttcaytgctgaaaaagaaatacaaaacgaaggacatgyctgaaattggaaattagagacagcctgatgccaagctacttaaaaatgtgttttttaaaagcattacttttattcctgattttttgtattaagggcgtgccatggccggcggtattcatttcagagagctgatggaatgcctggagaaaccaaaccagctcagtccatcttcacaattatatcttttcttagttacttggccaaatgacagcccctctgccactcaggggagtgtcttgattgaagtctgaagttggatctggattt

SEQ ID NO: 50659 - DNA, 600 bp, Chicken  19866894297770_2
ttggatttgcagaattaaaggtaacttaaaatgagacatcagaaaagacatacggctgtgctgttgtatctgtcttgattttggcagtgcacctgcataggctattaaactgattgtctcagaatataagcttgagatgaagtaaactgcctggtattaatttaagaacaggtgataatggtgtcatgctgacagtgtacatttgtagtggcaacactggcaattctttctttgaaagctctgagatataagagcataggttttcaytgctgaaaaagaaatacaaaacgaaggacatgyctgaaattggaaattagagacagcctgatgccaagctacttaaaaatgtgttttttaaaagcattacttttattcctgattttttgtattaagggcgtgccatggccggcggtattcatttcagagagctgatggaatgcctggagaaaccaaaccagctcagtccatcttcacaattatatcttttcttagttacttggccaaatgacagcccctctgccactcaggggagtgtcttgattgaagtctgaagttggatctggattttgtagctcaattatgtatattaatttttgcttg

SEQ ID NO: 50660 - DNA, 600 bp, Chicken  19866894297774_1
aatgcagactgttcttctctttctcaaagaactttacatgcttgggattgggagatgcattatggcaactgatctggaggtttaatttgagtttctcagacatactaatatgagatttatttttttttactccatgggcaccttctagaaaagttgaaattgacacagaggaacaaagtacatgtacctagaaaagataaaggaaaatagtattgccagtgaagcagcaccgctcaatttttccatctgtttttactcatctgctaatgtccaacaaatgtttatgaagggaagaggacytcttacatgcacattttaaataatcctgataaattttatatgagtaaatatttttcatttttaggttaaagtatacacatttttattcttatttgaaatgcaattatatgtatttgatctttcccaacttaccgtaatatatttttaaattacttacttttttacagaaagtttttttggttctgtgaaaaatttggaaatcctttgcttactgaaaatgttttaaatattcatgtttttctacaatatccttacatatcctataaagaagtgattttttaagtgatttaaaactctgaa

SEQ ID NO: 50661 - DNA, 600 bp, Chicken  19866894297775_1
ttctagttcctttataagaagcatcactggattcaaaagatctaggtgtggttctcaatcatatttccattttacagatagattttcagttcaagaatactcacagcatcctttgagaaatgcgcaactgcatagcactgtatatacctgtgtgtacacacaactgatgtatacatgtttagtatgtacatgacaatctatgctggagggtttggaattacatgatctggaaaggtcccttcagactcaaactgttctgtgattctacgatatattctaaatatataaatacaaaataawtaaatgcttatataacacacgtgtaatatatacatacatttcagaacagcaaatgacacaaaagattgtttgaatagttttggaagaaagcaattccagtcctctgctaggatatggccagcctggaggtgtgcttccactgcagacccgggccaatccagctctgactctggggatggagaacccacagcttccctgggctctggcacagtgcctgaccaccctctcaccaatagcatctccttgtgcctgctcaaaatgtacctcacttcagctgtgcsctctgtctctcctctgtcc

SEQ ID NO: 50662 - DNA, 600 bp, Chicken  19866894297775_2
tatataaatacaaaataawtaaatgcttatataacacacgtgtaatatatacatacatttcagaacagcaaatgacacaaaagattgtttgaatagttttggaagaaagcaattccagtcctctgctaggatatggccagcctggaggtgtgcttccactgcagacccgggccaatccagctctgactctggggatggagaacccacagcttccctgggctctggcacagtgcctgaccaccctctcaccaatagcatctccttgtgcctgctcaaaatgtacctcacttcagctgtgcsctctgtctctcctctgtccttccatgtccatctgccaagggcctggcatcccagagggcagctggagggagaaataaaatgcccattctgctcctctcacccagctgccaacactcattcacacagcattgcttctctccacccagtgtccatcatggcttggtttctaagtgcttcaaattaggagctttttgaaaataaacaagggtatacatattgaaaatatgtaccatcacttggctagcagagctccagttgagccttttgtgtgtttctgtggcacacggactttgtaagata

SEQ ID NO: 50663 - DNA, 600 bp, Chicken  19866894297782_1
caattattttgtgttccagaaaaatttactatcataaaattgcatagtagagcatggaaaaaaccctgaagctggacaatcctaggatagatggaaactttgtataaattgaagaggtatttcacaagtacatagcatcaaataaaatggaggaggtagaggatagtaataaagctagtgtacaagagaagcaatggaaaacaatgtagttagatgtgctaatatcacagctatataatgtagagtatgtattgtaagcaacccatgttctcagatagttagttggtttatgacaatctrttttatagctgttgcctaaaaaaaaaagcattcatgatttacctttttctttcttactgaaacagttgtacacttactacatcgaaataatgcctaagcattcaatagaagacagaggaaactgagtggcaatctgttggagatgccaataactttatacctttgtgtatacttkcaaagaaaattcttgaaaggagatgaggacctcatacagaatgcaatatattttgaacaatcatgctatttttatccaattattttgagaggatttgggttgatcttctaggaggcgtttgatag

SEQ ID NO: 50664 - DNA, 600 bp, Chicken  19866894297782_2
tagtgtacaagagaagcaatggaaaacaatgtagttagatgtgctaatatcacagctatataatgtagagtatgtattgtaagcaacccatgttctcagatagttagttggtttatgacaatctrttttatagctgttgcctaaaaaaaaaagcattcatgatttacctttttctttcttactgaaacagttgtacacttactacatcgaaataatgcctaagcattcaatagaagacagaggaaactgagtggcaatctgttggagatgccaataactttatacctttgtgtatacttkcaaagaaaattcttgaaaggagatgaggacctcatacagaatgcaatatattttgaacaatcatgctatttttatccaattattttgagaggatttgggttgatcttctaggaggcgtttgatagtgattcttgctgtgattcttagtactagtgttatggtctagtggtctagatccccaggagcatgtcagctttagctcagtcagcggcacatgaagagaccttgtgcacatcatttgaagctccagaagaaggaacactgatctccttaactatggaggagaggactaaagttcac

SEQ ID NO: 50665 - DNA, 599 bp, Chicken  19866894297784_1
  misc_feature (1)..(157): n is any nucleotide
nnnnnnnnnnnnnnnnnnnnnnnnnnnnnnnnnnnnnnnnnnnnnnnnnnnnnnnnnnnnnnnnnnnnnnnnnnnnnnnnnnnnnnnnnnnnnnnnnnnnnnnnnnnnnnnnnnnnnnnnnnnnnnnnnnnnnnnnnnnnnnnnnnnnnnnnnnnnntctttgtctcctaaaggcagatctcacaagagatttcaaggtttagttaagaatagattctttgtaaaggtcacaaagaaatttttgctagtgaaaaatactgctatctgctttttgaacaaaatcattagatgagatcataytctacccgtgctttgcrctgtctgatagcaattagcctgctgactgctagaccaagatgtagctgcttcgagatgccaaacagccttgaatycagctacctcagaatctgtctcaacttccttctctgtgtgagctcaggctgctggttayygaaggtgaggggcaagtgggatatttggatctggatatcaggttctcatctttgctgtataaaccagtatggggacaaatgcacctccatcatgctacccaaacataactggagctctactattacacaggagcagcaacatcatca

SEQ ID NO: 50666 - DNA, 599 bp, Chicken  19866894297784_2
  misc_feature (1)..(140): n is any nucleotide
nnnnnnnnnnnnnnnnnnnnnnnnnnnnnnnnnnnnnnnnnnnnnnnnnnnnnnnnnnnnnnnnnnnnnnnnnnnnnnnnnnnnnnnnnnnnnnnnnnnnnnnnnnnnnnnnnnnnnnnnnnnnnnnnnnnnnnnnnnnntctttgtctcctaaaggcagatctcacaagagatttcaaggtttagttaagaatagattctttgtaaaggtcacaaagaaatttttgctagtgaaaaatactgctatctgctttttgaacaaaatcattagatgagatcataytctacccgtgctttgcrctgtctgatagcaattagcctgctgactgctagaccaagatgtagctgcttcgagatgccaaacagccttgaatycagctacctcagaatctgtctcaacttccttctctgtgtgagctcaggctgctggttayygaaggtgaggggcaagtgggatatttggatctggatatcaggttctcatctttgctgtataaaccagtatggggacaaatgcacctccatcatgctacccaaacataactggagctctactattacacaggagcagcaacatcatcatcttttctcaaaggtac

SEQ ID NO: 50667 - DNA, 599 bp, Chicken  19866894297784_3
  misc_feature (1)..(65): n is any nucleotide
nnnnnnnnnnnnnnnnnnnnnnnnnnnnnnnnnnnnnnnnnnnnnnnnnnnnnnnnnnnnnnnnntctttgtctcctaaaggcagatctcacaagagatttcaaggtttagttaagaatagattctttgtaaaggtcacaaagaaatttttgctagtgaaaaatactgctatctgctttttgaacaaaatcattagatgagatcataytctacccgtgctttgcrctgtctgatagcaattagcctgctgactgctagaccaagatgtagctgcttcgagatgccaaacagccttgaatycagctacctcagaatctgtctcaacttccttctctgtgtgagctcaggctgctggttayygaaggtgaggggcaagtgggatatttggatctggatatcaggttctcatctttgctgtataaaccagtatggggacaaatgcacctccatcatgctacccaaacataactggagctctactattacacaggagcagcaacatcatcatcttttctcaaaggtaccacacctgatactctaccctaccctgagcattaattcagtgaaacctaaggccagaaaactaagcctatcttcag

SEQ ID NO: 50668 - DNA, 599 bp, Chicken  19866894297784_4
  misc_feature (1)..(6): n is any nucleotide
nnnnnntctttgtctcctaaaggcagatctcacaagagatttcaaggtttagttaagaatagattctttgtaaaggtcacaaagaaatttttgctagtgaaaaatactgctatctgctttttgaacaaaatcattagatgagatcataytctacccgtgctttgcrctgtctgatagcaattagcctgctgactgctagaccaagatgtagctgcttcgagatgccaaacagccttgaatycagctacctcagaatctgtctcaacttccttctctgtgtgagctcaggctgctggttayygaaggtgaggggcaagtgggatatttggatctggatatcaggttctcatctttgctgtataaaccagtatggggacaaatgcacctccatcatgctacccaaacataactggagctctactattacacaggagcagcaacatcatcatcttttctcaaaggtaccacacctgatactctaccctaccctgagcattaattcagtgaaacctaaggccagaaaactaagcctatcttcagcctgtatttaacctctcccctcctatccttctgattagttgcaccacatctgctacaaa

SEQ ID NO: 50669 - DNA, 599 bp, Chicken  19866894297784_5
  misc_feature (1)..(5): n is any nucleotide
nnnnntctttgtctcctaaaggcagatctcacaagagatttcaaggtttagttaagaatagattctttgtaaaggtcacaaagaaatttttgctagtgaaaaatactgctatctgctttttgaacaaaatcattagatgagatcataytctacccgtgctttgcrctgtctgatagcaattagcctgctgactgctagaccaagatgtagctgcttcgagatgccaaacagccttgaatycagctacctcagaatctgtctcaacttccttctctgtgtgagctcaggctgctggttayygaaggtgaggggcaagtgggatatttggatctggatatcaggttctcatctttgctgtataaaccagtatggggacaaatgcacctccatcatgctacccaaacataactggagctctactattacacaggagcagcaacatcatcatcttttctcaaaggtaccacacctgatactctaccctaccctgagcattaattcagtgaaacctaaggccagaaaactaagcctatcttcagcctgtatttaacctctcccctcctatccttctgattagttgcaccacatctgctacaaaa

SEQ ID NO: 50670 - DNA, 408 bp, Chicken  19866894297784_6
ctggatatcaggttctcatctttgctgtataaaccagtatggggacaaatgcacctccatcatgctacccaaacataactggagctctactattacacaggagcagcaacatcatcatcttttctcaaaggtaccacacctgatactctaccctaccctgagcattaattcagtgaaacctaaggccagaaaactaagcctatcttcagcctgtatttaacctctcccctcctatccttctgattagttgcaccacatctgctacaaaacagacaatccagcagagaattttcaccatayttactttttacttcccttcttaaatgcaggcagaaactcactgcagcctctacagctgcagagctgtagcagaatcccttcacctgaattcaatgggaagtataagtt

SEQ ID NO: 50671 - DNA, 600 bp, Chicken  19866894297785_1
gaacagccacggaaaaaggcagaaaaacagaagctcagaaaagcttcttaaacctgttttcattcactggtgctagaaaattcagtaagtttaaagaaaagtgttgttagcttgtaaaaaaaagattgctcaatgtaattaacaaaggaggaaattatacttgatgtagacatacataattttacccataaatggccagtgttgtacaaacagctatgcccaaaacaactaaagcccttcttagctggctcattccccacctctatatttagtgtgcaagcctcaaaaatacatatttcygaccttaataagtcactctatgtgttaaaagacaacatttattcatgagtaccctgaaaaggttctcacataaaatctcaaatgcgtatttgtcaaaggtttataccaagtaagtatattgatacattaaacatgcctaaagtaaaaatacagcagttatattctactttctttcactattctgccaaactattattagtctgcatttaaacaatccacaggggtcccttctcctaattctcagcagtattatcccttcttctgagcagtgttaaacaggaacagtactgcctcatgtag

SEQ ID NO: 50672 - DNA, 600 bp, Chicken  19866894297793_1
cctccatccttgcaaccttttcctcctcctcctccctcatactgccatttattctaaatccctttctttttgctattcccactcattggttcctgtcatctctgtatctccccttttcctccttctccacacgttctccatcccagccttgcccctcattctgccacctctgcctctgcctcccacatacactttcatgctgtgcaccttctggcttcttcctctaacttattctttgctcagaagatggattgtggatgccccattcctggagacactccagctaaggctggacaggcwctggacawcctgattgagctgaaggtgcacgtgttcattgtggaggagttggaatacatgacctttaagtttcctttccactcaaatgattctatgattctaagatagtcatcttccatctcttgcacagagtaatacaagaaagagatcaaactggtgtcaaactggacaccttgtgacaacacttctagtcttgtttcctctcactactctatagatcacacattgggaagctggactctcactcctcatttgctcatcatcttcatcattcctgccactctcacaattgtcccactc

SEQ ID NO: 50673 - DNA, 600 bp, Chicken  19866894297793_2
cttgcaaccttttcctcctcctcctccctcatactgccatttattctaaatccctttctttttgctattcccactcattggttcctgtcatctctgtatctccccttttcctccttctccacacgttctccatcccagccttgcccctcattctgccacctctgcctctgcctcccacatacactttcatgctgtgcaccttctggcttcttcctctaacttattctttgctcagaagatggattgtggatgccccattcctggagacactccagctaaggctggacaggcwctggacawcctgattgagctgaaggtgcacgtgttcattgtggaggagttggaatacatgacctttaagtttcctttccactcaaatgattctatgattctaagatagtcatcttccatctcttgcacagagtaatacaagaaagagatcaaactggtgtcaaactggacaccttgtgacaacacttctagtcttgtttcctctcactactctatagatcacacattgggaagctggactctcactcctcatttgctcatcatcttcatcattcctgccactctcacaattgtcccactcttcctagt

SEQ ID NO: 50674 - DNA, 600 bp, Chicken  19866894297799_1
tgtttttaaatttctttatctgaatatccaaattgctattgttttgatatttgttatgaacgagacatggcattactttattttgttaaaaggatctcagcaataacatacttttctcattgacgcctccttttaccctaaaatctgtaagtttgatactaattagcctcagattattcctgtggagaagatattactgaagatgctgaaaatgctgaagaaaacgagacattacaagccttgaatttttaaggaccattcacttaaaacaaccattctggaaaatctaccttcacacamctgagtttgtggtcacagaaatgcccagagcctgcagcacttgggcttcagcaggaaccaccggtgtttggcagccctcagaataacaggtcccagctgagacatgccaaaggagatttcaaaacaggaaattaagttccgaagctgagagtcttagttcarcacagtaacccttggacaacatacacttccatcttagcagtaygcaaaggcaattctctttatgctgataatgccctgagaattcagagttayacctgacactacagcagaaaaagctgcatccatataaagaaaatg

SEQ ID NO: 50675 - DNA, 600 bp, Chicken  19866894297799_2
ttagcctcagattattcctgtggagaagatattactgaagatgctgaaaatgctgaagaaaacgagacattacaagccttgaatttttaaggaccattcacttaaaacaaccattctggaaaatctaccttcacacamctgagtttgtggtcacagaaatgcccagagcctgcagcacttgggcttcagcaggaaccaccggtgtttggcagccctcagaataacaggtcccagctgagacatgccaaaggagatttcaaaacaggaaattaagttccgaagctgagagtcttagttcarcacagtaacccttggacaacatacacttccatcttagcagtaygcaaaggcaattctctttatgctgataatgccctgagaattcagagttayacctgacactacagcagaaaaagctgcatccatataaagaaaatgagaactccatagcacaaccacgctgcagctgatttggtgctaccttcaaagttgtgtacacacactgtatatatgaggaaaacgaagcacagaaaggataagggatttcatttttccagtttctttcctgccacacattcagtttctgcttccatgcctgac

SEQ ID NO: 50676 - DNA, 600 bp, Chicken  19866894297799_3
ctgaaaatgctgaagaaaacgagacattacaagccttgaatttttaaggaccattcacttaaaacaaccattctggaaaatctaccttcacacamctgagtttgtggtcacagaaatgcccagagcctgcagcacttgggcttcagcaggaaccaccggtgtttggcagccctcagaataacaggtcccagctgagacatgccaaaggagatttcaaaacaggaaattaagttccgaagctgagagtcttagttcarcacagtaacccttggacaacatacacttccatcttagcagtaygcaaaggcaattctctttatgctgataatgccctgagaattcagagttayacctgacactacagcagaaaaagctgcatccatataaagaaaatgagaactccatagcacaaccacgctgcagctgatttggtgctaccttcaaagttgtgtacacacactgtatatatgaggaaaacgaagcacagaaaggataagggatttcatttttccagtttctttcctgccacacattcagtttctgcttccatgcctgacgcagccaactttcttggctgtgaagtgcaacagttcgaccttc

SEQ ID NO: 50677 - DNA, 600 bp, Chicken  19866894297799_4
ccattcacttaaaacaaccattctggaaaatctaccttcacacamctgagtttgtggtcacagaaatgcccagagcctgcagcacttgggcttcagcaggaaccaccggtgtttggcagccctcagaataacaggtcccagctgagacatgccaaaggagatttcaaaacaggaaattaagttccgaagctgagagtcttagttcarcacagtaacccttggacaacatacacttccatcttagcagtaygcaaaggcaattctctttatgctgataatgccctgagaattcagagttayacctgacactacagcagaaaaagctgcatccatataaagaaaatgagaactccatagcacaaccacgctgcagctgatttggtgctaccttcaaagttgtgtacacacactgtatatatgaggaaaacgaagcacagaaaggataagggatttcatttttccagtttctttcctgccacacattcagtttctgcttccatgcctgacgcagccaactttcttggctgtgaagtgcaacagttcgaccttcacctgagctgcccctgcacttcagcaacacacttcactaagctgcagaca

SEQ ID NO: 50678 - DNA, 600 bp, Chicken  19866894297816_1
tagtgatagttttttcacatagagaaattactcactgtacgacattttgcataaaacatacttttccttatggaatatttctaatttctcaacttctctcaccaaagttcctatcacagagaagtacattgctttcataatcctctttaagtgtgatgtcttcagctctgctctgattcaaggtaaaatgctcagcaacatcaatggcactgatgaaagaaacattatacaaaatacaggatgaactgaaactcattcaccattttgctcagctgtgaaaacttgttgctaaccagtctrcaaacctggcattctgctgaaaaacccycaaagataactcctgtttcctatggcattgaaagtacccccacctgatcctcatttctgtggagagagaacaactgtctcccaaagccattagcatccaagctatttaagatttgattcataaaaccactgctttgaatttcctctaaaagctcaaaatgagcatgtggaaaacagatgctgtctgttgcttacaagggctacctccaagcaagtaggcagctgctttctttgcgagccaggcctcctatgcagtctccaatgtacgttgta

SEQ ID NO: 50679 - DNA, 600 bp, Chicken  19866894297816_2
tactcactgtacgacattttgcataaaacatacttttccttatggaatatttctaatttctcaacttctctcaccaaagttcctatcacagagaagtacattgctttcataatcctctttaagtgtgatgtcttcagctctgctctgattcaaggtaaaatgctcagcaacatcaatggcactgatgaaagaaacattatacaaaatacaggatgaactgaaactcattcaccattttgctcagctgtgaaaacttgttgctaaccagtctrcaaacctggcattctgctgaaaaacccycaaagataactcctgtttcctatggcattgaaagtacccccacctgatcctcatttctgtggagagagaacaactgtctcccaaagccattagcatccaagctatttaagatttgattcataaaaccactgctttgaatttcctctaaaagctcaaaatgagcatgtggaaaacagatgctgtctgttgcttacaagggctacctccaagcaagtaggcagctgctttctttgcgagccaggcctcctatgcagtctccaatgtacgttgtacagtgaagactgagtctggaatggttgt

SEQ ID NO: 50680 - DNA, 600 bp, Chicken  19866894297817_1
tcccctcttgaagccattgtgttcacaggtagacccaagaacttgtgacccccccctggtgagaggccttgagaatctgcagaacaaggatgctatctgcctgacctaaacaccatctgacctaatccaaatgttattttaaccacctggtctctataatcattacaattggcagtacctggctgcattcaagatctctgacatacctttgaacttccaggctatgggaagagaggtcagcacatctcaaactgaatggcgtcaataccctcctgccaagcccaggtggtcaatgggatrgctcacaatactatgtggtaaaccttcctgcaatgggaatcttttatcgcataagtaagagaaactttggtaaatccctattcctttgagctgcaaagagcacttgtaaagcaatcaatgactcagctcagctgggtgacagagtgtttgaattacctgaaacaacagctgagagaggtgtgacctttctcagctcagagcagcaggctgttggttttgaaacccaatgataaatgaaaatcagctttgttaacgacttaatgaaatcaccagaagagggaagattacactctgaagtaa

SEQ ID NO: 50681 - DNA, 600 bp, Chicken  19866894297817_2
acagctgagagaggtgtgacctttctcagctcagagcagcaggctgttggttttgaaacccaatgataaatgaaaatcagctttgttaacgacttaatgaaatcaccagaagagggaagattacactctgaagtaagcagcttgagtgatcagaatttacagtaacgtcaatggcattttttccccagatttaacctagacaggaaaaataatgtttaattgtgcatctcaagcccagtctcctactgcaatacaaaacattctgtaaatcacccaagtgcacgtgtaaaactaggtacrtgtctccacttctttcactaagaagctgctgcaggatgttactcctctgatggttaaatttttcactcaaatttcaggtcaaagtgtgcactccttcagggcatctctttgtatgctaggactgtcctttaactggaacagttttcagtgttccctcacttttattctcagacaggtagtaatcaaatcttcccaggctttgttttcttaaaccaaatagccagacctttaatctcacttccttgaagggctgttcttcctatcgcagcatttctacttgactgattcacaagatagccc

SEQ ID NO: 50682 - DNA, 600 bp, Chicken  19866894297817_3
tgatctaagaccaacaggaatttcactagtaatttccctctaggtaacatttcctctttcaacactaattgttgtcatattcctattagccaattccttactcatctcagatgattttctacgagtccaacttgttttatataacagtactctatgtaataaaattaaagccagttaaaaaaaatatatatcaaaagatatcctattaaaggaaaaaccctggcaaatatttcattaagtcatcttcaagctatgtaatgaaagctgtaatacagtagaagtctcctctaaacaccctgycttccagtggggactatgtgattccctttctcctctctcctcccagtttgagcaccaagtttggtataagtatggttttgaacctcagctgtggttatttccattgtaggagctctcatgtcaaagctgatttggaagtacgttggcttctcagcttaaactggtgatgaaaatatttgtatgccgacatctgaagatttccacccaactgacagaccttttcttctgctcacactgcggtgggggcagctgtctctagctgggaggtggggaccaacaacttctcaaactgctggggca

SEQ ID NO: 50683 - DNA, 600 bp, Chicken  19866894297820_1
acaaaacctttcagatgttatggcagcagtacaaatggtaggaaagctgtaccaccctcggcagggtacagcagaactgcatggggcctcaggtccttcacatggatttttcaaagtcacacagactgcagaagaggcctgccacgtttggacagaagcctgttctgagcaaagagggctttgttatttatataaggatgccaaacatctccctcggggaggatctaaatgtaaacttgtttatgtgaaatgtgaaaactaactgtgaactcacaaagttgccattgcaccgtagcagtrcagaacagacgccttcttatttaggcgtccaactattacctgcaatgtggatcttttcctcagctgtatgttcacaatgaattcattaaaaagtcaaaacatgcaaatagcaaactaaactggactaaatcaaccttgaacaagaaatgcatggtgactgttgtggaaaacatcgtgattcttaaagcttaggaacattcaaatcatggaatcatagaatggcctgagctgaaaaggaccacaatgatcatcgagtttcaacccccctgctatgtgcagggttgccaatcagcagaccag

SEQ ID NO: 50684 - DNA, 599 bp, Chicken  19866894297824_1
  misc_feature (1)..(73): n is any nucleotide
nnnnnnnnnnnnnnnnnnnnnnnnnnnnnnnnnnnnnnnnnnnnnnnnnnnnnnnnnnnnnnnnnnnnnnnnntctggccctctccattttgggtctggttgggcaaataataagagactaagtcccaaatggaggatcataatttgtaactcctgccttttctgtattcctatgtacagtataaatgaataactgctagcacatgccaattcttaccacaaataaataaatacataaaataaagataggaaagaaacagaagtgaaaatctacagacagaagtcctgcataaccatgasttgcataactgaattgctgcttccaatccagaaaactctcagtagtagctattggcaaatgcttttttttattattattatttttatttgaagcaaaccaagttttttcaggataatctcattcttttcctcaaacaaggagaacattaaattgatgttttactgttyggctgaagaaaactttaattcaaaccaagcagctctgtgcaccactcaaagctaagatgcacctaaaatttcatctgcaactttatcatttagttctgcccaccatttggatcatgtcacagttcttacgc

SEQ ID NO: 50685 - DNA, 600 bp, Chicken  19866894297824_2
tcctatgtacagtataaatgaataactgctagcacatgccaattcttaccacaaataaataaatacataaaataaagataggaaagaaacagaagtgaaaatctacagacagaagtcctgcataaccatgasttgcataactgaattgctgcttccaatccagaaaactctcagtagtagctattggcaaatgcttttttttattattattatttttatttgaagcaaaccaagttttttcaggataatctcattcttttcctcaaacaaggagaacattaaattgatgttttactgttyggctgaagaaaactttaattcaaaccaagcagctctgtgcaccactcaaagctaagatgcacctaaaatttcatctgcaactttatcatttagttctgcccaccatttggatcatgtcacagttcttacgctgaggatcacgcaaggagcacgatataatgattgtattggcaaaaaaatcagtacctaccctggacattttagggctgaaatattagctctccttcacaattaaaacatgcaggctgtagtcaaacgtgtgatgaccaaaatgtcaaatacaagttcctttaaaaattc

SEQ ID NO: 50686 - DNA, 600 bp, Chicken  19866894297832_1
acatatgtatgattggaaaattgaaagctcagaggaaatgggagaaaaatactgatgaatacaaactatttgacctttttttcccacagagtgcttcttagtagaaatcatgtagcaagctattaaattttatttggcgtgtcccataatcatattagaatatgtcatttatgttaacttcaggggtccttccctttctgctctctattgagagagaatttaattctgtttgcaaagattagtccacatcccactcttttcttctactcgttagtgcaaaatttttgtggtattatgtgrttccatttgtgttttactgatatgacttcatcaggaagattcagggacagagccaagtaattgggggttagttagctactgagcatcaaaacattttcatgctcttaccttgtgacatttgaagaaatatgggctaatgcattttgttctgtgttgcattgtcaattactgtggttcagctggtgtccagtaatgtgcctgagccctatgaatctgtttctattaagaggwgtatttgttttacttggatgttgtgtgggtaagtcacatgcctataagtatttttatatccttatcaca

SEQ ID NO: 50687 - DNA, 600 bp, Chicken  19866894297832_2
gcaaagattagtccacatcccactcttttcttctactcgttagtgcaaaatttttgtggtattatgtgrttccatttgtgttttactgatatgacttcatcaggaagattcagggacagagccaagtaattgggggttagttagctactgagcatcaaaacattttcatgctcttaccttgtgacatttgaagaaatatgggctaatgcattttgttctgtgttgcattgtcaattactgtggttcagctggtgtccagtaatgtgcctgagccctatgaatctgtttctattaagaggwgtatttgttttacttggatgttgtgtgggtaagtcacatgcctataagtatttttatatccttatcacacagtcatccttatgatcamtataattcagttatttatttgtgtcatagaagatcatccaaattagtttcctctgtaggagatattgatgtaaataaaattgtaacctcatacatctggagtttctgaaagattgccctggagcaaacctaggatttttgtgcagggtggagaatgataagatgtacaggacttagcttcctaaggcatggtttttgtcaaattgatacact

SEQ ID NO: 50688 - DNA, 600 bp, Chicken  19866894297832_3
atatgacttcatcaggaagattcagggacagagccaagtaattgggggttagttagctactgagcatcaaaacattttcatgctcttaccttgtgacatttgaagaaatatgggctaatgcattttgttctgtgttgcattgtcaattactgtggttcagctggtgtccagtaatgtgcctgagccctatgaatctgtttctattaagaggwgtatttgttttacttggatgttgtgtgggtaagtcacatgcctataagtatttttatatccttatcacacagtcatccttatgatcamtataattcagttatttatttgtgtcatagaagatcatccaaattagtttcctctgtaggagatattgatgtaaataaaattgtaacctcatacatctggagtttctgaaagattgccctggagcaaacctaggatttttgtgcagggtggagaatgataagatgtacaggacttagcttcctaaggcatggtttttgtcaaattgatacactggaaaccagacttgagatctgaaaacactctcaagatacacaagtgcttaaactcattatgcacctctgtatgtgctttttaatacct

SEQ ID NO: 50689 - DNA, 600 bp, Chicken  19866894297836_1
ttgttaaagatttccaagcatcacacacgatgagtgctgtagtagcatatatagttttgaaaaacatatatgaagcaaaaaagatgttgtgagactgttctgggtaggacagtaatcactaattcaaggtaagaatccaaaactagttctgctcactgaatgaagttctaatacactcaaacttttggatagagaaatcaaagaaatgaataccatacagtctgtaagcttacatagcaccattaaagagaataataatgaattcccaatacaatatgaaaaaaagtttgattctgctgytcagaaagcacttctattttgagatgtattagtagacatgttctttgtacggatgatctcaagacaatcattcccctctacctggggattataaggactcgactaagcatcatgacttctttgggcagaagctgagaatacttacaaaaactaaatatttcagaaaaaasatgcatgaagaaaggttgagacaactgtgtttgtatagtccaggaaagacaagtgtgttcgtaaggattttacagaatgctaatctgttacaaagatgatggtgatgagtttttcttggcatactctgag

SEQ ID NO: 50690 - DNA, 600 bp, Chicken  19866894297836_2
atacactcaaacttttggatagagaaatcaaagaaatgaataccatacagtctgtaagcttacatagcaccattaaagagaataataatgaattcccaatacaatatgaaaaaaagtttgattctgctgytcagaaagcacttctattttgagatgtattagtagacatgttctttgtacggatgatctcaagacaatcattcccctctacctggggattataaggactcgactaagcatcatgacttctttgggcagaagctgagaatacttacaaaaactaaatatttcagaaaaaasatgcatgaagaaaggttgagacaactgtgtttgtatagtccaggaaagacaagtgtgttcgtaaggattttacagaatgctaatctgttacaaagatgatggtgatgagtttttcttggcatactctgagatgagagaaagagttattaaatcaatttgtatcaaagaatatttaagaaggttatctggaaaaaaaacaaaattgacacagttcaagaaagttcaaggcacttaagttgcaagtcagtattcaaaaatataccaacagatgtggtaaaactttcagcagagtagaaaggg

SEQ ID NO: 50691 - DNA, 599 bp, Chicken  19866894297840_1
  misc_feature (1)..(125): n is any nucleotide
nnnnnnnnnnnnnnnnnnnnnnnnnnnnnnnnnnnnnnnnnnnnnnnnnnnnnnnnnnnnnnnnnnnnnnnnnnnnnnnnnnnnnnnnnnnnnnnnnnnnnnnnnnnnnnnnnnnnnnnnnnnnnatgtacacatagagagtgatttataggcaattaggagaggcgtttaagagccacaccaagtctccttacgtgacccttctgctggaatggtggatatgtggaataagctttgtaaccgcttccctaacatggtgtggctaaagtgaccagttgcagttgtactgacgatcctcgytgtgataacctgcttaggcgcgaggtgttctttctgttgctattgaacaatgctagatgagcgctccacctagaagaggtaccgtgtgaaatgtcaggtagaaacggggaaatagttctggaacacattacttgacagttgggcactgaaagcaaaagcctttgcataacatacagataagggtggattgtatcaaggaaagtataaatctggacctcatagcrtgtgccaacttgggaaggaacacagaatgcggtggaacgtggtccaygagaactaggaagataaggacacaaagc

SEQ ID NO: 50692 - DNA, 600 bp, Chicken  19866894297840_2
ggaataagctttgtaaccgcttccctaacatggtgtggctaaagtgaccagttgcagttgtactgacgatcctcgytgtgataacctgcttaggcgcgaggtgttctttctgttgctattgaacaatgctagatgagcgctccacctagaagaggtaccgtgtgaaatgtcaggtagaaacggggaaatagttctggaacacattacttgacagttgggcactgaaagcaaaagcctttgcataacatacagataagggtggattgtatcaaggaaagtataaatctggacctcatagcrtgtgccaacttgggaaggaacacagaatgcggtggaacgtggtccaygagaactaggaagataaggacacaaagctgacgacaggatggaaggtccactgaaggtcagcggagttgcactttgtaagtgaatatgcagcataaggaggataaggaggcagagctgccattgctgagcctaaggaagcgaagttgccgttgcgacacaatgcaagcccacccttctgaagctggaagctctcagcgaggtatgctgatcaccttcatccaacgctgaccagggaaccgcgccgcttcttta

SEQ ID NO: 50693 - DNA, 600 bp, Chicken  19866894297840_3
ccagttgcagttgtactgacgatcctcgytgtgataacctgcttaggcgcgaggtgttctttctgttgctattgaacaatgctagatgagcgctccacctagaagaggtaccgtgtgaaatgtcaggtagaaacggggaaatagttctggaacacattacttgacagttgggcactgaaagcaaaagcctttgcataacatacagataagggtggattgtatcaaggaaagtataaatctggacctcatagcrtgtgccaacttgggaaggaacacagaatgcggtggaacgtggtccaygagaactaggaagataaggacacaaagctgacgacaggatggaaggtccactgaaggtcagcggagttgcactttgtaagtgaatatgcagcataaggaggataaggaggcagagctgccattgctgagcctaaggaagcgaagttgccgttgcgacacaatgcaagcccacccttctgaagctggaagctctcagcgaggtatgctgatcaccttcatccaacgctgaccagggaaccgcgccgcttctttaggaccatggcagtagggtggggcaatgtattaataatgtcttggaat

SEQ ID NO: 50694 - DNA, 599 bp, Chicken  19866894297843_1
  misc_feature (1)..(51): n is any nucleotide
nnnnnnnnnnnnnnnnnnnnnnnnnnnnnnnnnnnnnnnnnnnnnnnnnnnccaaggctatcctcaagcagtcagccatatcttgcttggccaaaggtcaagctcacatgatgctctcagttctttgttctttatgagcttacccctatttttccacataatattttttaaaaatgggacctgatcatgcagggcagctgctgtaacagtgatcccatagggctccctgttatggctgtggaggccaagacacaagtatgcctgaaacgttactagaaaggtgctgcctctttcaggagragcaagtcttgaccacgggcccatgctccatggtgccagatggttccctcatgctggcagtgctcttgggtcttcccctgaagcttttaggactgtctgttgctggaggagtagtgattcttgccaaccatcatccccrtaccgttggtctcacacaatactccaaatatgtgtttaaattgagttctttctcaggcgtataaattacagcagttttaatcagtgcgctatatatttttattactatgaatgaactctggagacgttatttatgagggatcaagtgagattttatgtca

SEQ ID NO: 50695 - DNA, 600 bp, Chicken  19866894297843_2
ttacccctatttttccacataatattttttaaaaatgggacctgatcatgcagggcagctgctgtaacagtgatcccatagggctccctgttatggctgtggaggccaagacacaagtatgcctgaaacgttactagaaaggtgctgcctctttcaggagragcaagtcttgaccacgggcccatgctccatggtgccagatggttccctcatgctggcagtgctcttgggtcttcccctgaagcttttaggactgtctgttgctggaggagtagtgattcttgccaaccatcatccccrtaccgttggtctcacacaatactccaaatatgtgtttaaattgagttctttctcaggcgtataaattacagcagttttaatcagtgcgctatatatttttattactatgaatgaactctggagacgttatttatgagggatcaagtgagattttatgtcaggagccttaaaaggtttcttattacttaattaattaaaagcaactccaccaaaatcagtgaaattatgttacagtaagcagaatcagggctttcttttgtctttacttaacacatctgatttggacaatgtttactcagt

SEQ ID NO: 50696 - DNA, 542 bp, Chicken  19866894297843_3
catctgatttggacaatgtttactcagtctaatacttaacacaagacagagtgtctgttgctccaaatactgaaatattgtctttttaatgctaaacagcaaactaatcatttgtcggatactcaaactgaaattggaaaaaaaaaagatgctgaaaaaatgagagagaaagccaacagacaacctgaggaaacagactggcagactggtctcaggatacatgatgagctgcaggaattcagaactgaaatggaaaattgttaaagaaacaacacctatgggcagacaaatgtccatccraatcattttttcatgttttcaatgggatccattttactactcttcagtacttgtctagagggaggtgataggatatttcataaggagatacttctgtttattgtctggtcgacagcagaagatggtaggaacttcctatacttggaccatctgtatctcagcggagtgtgctgtgtgccagctcacagactgaaaggtaactgaggaatagggaggatggcagacaagtgaacagacaagct

SEQ ID NO: 50697 - DNA, 599 bp, Chicken  19866894297847_1
  misc_feature (1)..(239): n is any nucleotide
nnnnnnnnnnnnnnnnnnnnnnnnnnnnnnnnnnnnnnnnnnnnnnnnnnnnnnnnnnnnnnnnnnnnnnnnnnnnnnnnnnnnnnnnnnnnnnnnnnnnnnnnnnnnnnnnnnnnnnnnnnnnnnnnnnnnnnnnnnnnnnnnnnnnnnnnnnnnnnnnnnnnnnnnnnnnnnnnnnnnnnnnnnnnnnnnnnnnnnnnnnnnnnnnnnnnnnnnnnnnnnnnnnnnnnnnnnnnnnncagcacagcagccacgaggtgctgtcacacacagagctgctcggcccttctggaagcagcrcagaggggagggaggaaggacgaaggcactcaggaatctsagcgtgctgcccagcaggccagagccctctcaccaaaagcactcctcagcacattacaatagacagascagctctgctttttgcccagggtttcctgtttcggtgagaactgtcaatccaagcctcacatggaagcaaggcttgctgtatttcagcaaggcccagccacaagttttcagggacagagactggaggaactcaaaggctgctcctgagcactggataccagccagtaagtacagcactttagaaaccagcc

SEQ ID NO: 50698 - DNA, 599 bp, Chicken  19866894297847_2
  misc_feature (1)..(199): n is any nucleotide
nnnnnnnnnnnnnnnnnnnnnnnnnnnnnnnnnnnnnnnnnnnnnnnnnnnnnnnnnnnnnnnnnnnnnnnnnnnnnnnnnnnnnnnnnnnnnnnnnnnnnnnnnnnnnnnnnnnnnnnnnnnnnnnnnnnnnnnnnnnnnnnnnnnnnnnnnnnnnnnnnnnnnnnnnnnnnnnnnnnnnnnnnnnnnnnnnnnnnnncagcacagcagccacgaggtgctgtcacacacagagctgctcggcccttctggaagcagcrcagaggggagggaggaaggacgaaggcactcaggaatctsagcgtgctgcccagcaggccagagccctctcaccaaaagcactcctcagcacattacaatagacagascagctctgctttttgcccagggtttcctgtttcggtgagaactgtcaatccaagcctcacatggaagcaaggcttgctgtatttcagcaaggcccagccacaagttttcagggacagagactggaggaactcaaaggctgctcctgagcactggataccagccagtaagtacagcactttagaaaccagcctgcatcttcattcctcactgccccaaattgtcagagcctc

SEQ ID NO: 50699 - DNA, 599 bp, Chicken  19866894297847_3
  misc_feature (1)..(131): n is any nucleotide
nnnnnnnnnnnnnnnnnnnnnnnnnnnnnnnnnnnnnnnnnnnnnnnnnnnnnnnnnnnnnnnnnnnnnnnnnnnnnnnnnnnnnnnnnnnnnnnnnnnnnnnnnnnnnnnnnnnnnnnnnnnnnnnnnnncagcacagcagccacgaggtgctgtcacacacagagctgctcggcccttctggaagcagcrcagaggggagggaggaaggacgaaggcactcaggaatctsagcgtgctgcccagcaggccagagccctctcaccaaaagcactcctcagcacattacaatagacagascagctctgctttttgcccagggtttcctgtttcggtgagaactgtcaatccaagcctcacatggaagcaaggcttgctgtatttcagcaaggcccagccacaagttttcagggacagagactggaggaactcaaaggctgctcctgagcactggataccagccagtaagtacagcactttagaaaccagcctgcatcttcattcctcactgccccaaattgtcagagcctctgtttggtgttcatctaacatgatgtaaattactgttagcagcacaaccccctgacatgggcataaca

SEQ ID NO: 50700 - DNA, 600 bp, Chicken  19866894297848_1
ggcacagaaaccaggagacagaatttattttccttaccatttttattcttgctctcactacagtaggacttcagtcacattgcagatcgatgtttcaggtcagaactgacaatatgggttggccaaaagttggtgaagttgaactgtattcatttacattctgatgggtagcctggtttaatagattttagttgtggtataaatcaagttcttgagtccctatgaggtgcccatttcacggagaactgttaagaacagttcttatgttaaacatgaatgtttttccagtatataaactcygctactgaaagggtgttagatctttgtaccagtcttataaatctctcactgcagtagaacttcagtttttattattttgtctggatataaaataatcttttaacttaattaataaatatatttactttaggtagtacctcatatactttgggtatttggagtagycattggagatacagtttctgaacatggcaggaacaaatagctagtttatttgtaggaatttcttcattcagggcttggaagggacctcaagagatcatcaagtccaaccccrctgctaaagcaggctccctaccg

SEQ ID NO: 50701 - DNA, 600 bp, Chicken  19866894297848_2
gggtagcctggtttaatagattttagttgtggtataaatcaagttcttgagtccctatgaggtgcccatttcacggagaactgttaagaacagttcttatgttaaacatgaatgtttttccagtatataaactcygctactgaaagggtgttagatctttgtaccagtcttataaatctctcactgcagtagaacttcagtttttattattttgtctggatataaaataatcttttaacttaattaataaatatatttactttaggtagtacctcatatactttgggtatttggagtagycattggagatacagtttctgaacatggcaggaacaaatagctagtttatttgtaggaatttcttcattcagggcttggaagggacctcaagagatcatcaagtccaaccccrctgctaaagcaggctccctaccgtagtttgcacaagtagatgttcagacaggtcttgagtatctccatagaaggagactgcacaacccctctggtcaacctgttccagtattctgtaactcatgccataaagaagctcttctgcatgtttgaatgggacttcctgtgttcaagttttaggcaattgct

SEQ ID NO: 50702 - DNA, 600 bp, Chicken  19866894297848_3
tgtttttccagtatataaactcygctactgaaagggtgttagatctttgtaccagtcttataaatctctcactgcagtagaacttcagtttttattattttgtctggatataaaataatcttttaacttaattaataaatatatttactttaggtagtacctcatatactttgggtatttggagtagycattggagatacagtttctgaacatggcaggaacaaatagctagtttatttgtaggaatttcttcattcagggcttggaagggacctcaagagatcatcaagtccaaccccrctgctaaagcaggctccctaccgtagtttgcacaagtagatgttcagacaggtcttgagtatctccatagaaggagactgcacaacccctctggtcaacctgttccagtattctgtaactcatgccataaagaagctcttctgcatgtttgaatgggacttcctgtgttcaagttttaggcaattgctccttgtcctatcactgcacaccactgagaagagcctggcctcatccatttgcctcccatctccttttagatattagggtattttaggtataagtcagccttgaaatattgtc

SEQ ID NO: 50703 - DNA, 600 bp, Chicken  19866894297848_4
gttcaagttttaggcaattgctccttgtcctatcactgcacaccactgagaagagcctggcctcatccatttgcctcccatctccttttagatattagggtattttaggtataagtcagccttgaaatattgtcactgatctcactgcattgtgtgtttgggttcatctctcatcattctatcatatctggatatatcatcagctcatatatgctgaccaggcacagagaagtatttgtaatgtgccatgaaaccttagctcttttaaaaagcaaatgcctccttaccctgacgttcatkttcttgcctgatatgctgcaacaaccattgcatatctgcatgcacaccatgttctagagacattctgccctcctcacccacctaatagtagaggatttggggagaggattagagaatatttagcaagagctttaatcttgtttaaccctggattattttgtgtttaatcacaattttcaacaagcacaaatttctgcactgtcaaagactgccttacaggcatgaactcataaatttgtaataatttggttcagtttgtaagagctttttttctgcttaccttgcctttttggtaatcta

SEQ ID NO: 50704 - DNA, 600 bp, Chicken  19866894297848_5
ccagcctgggtataactcataagccagtttctccttgctggcatatcaggggaagggcaagagagatctaacacgaagtacatgattctgggtacataatcgtatgtgttcataagggacacttaaaggccatttagtccaattcccctgcagtgaacagaaacacctgcagctagatcaggttgctcagagccctgtccagcctgactttgagtgtctccatggtctcggcatccaccaccacctctatgggcaacctgttccagtgcctcatcacccttattgtaaagagcatttttyttatatctagtctaaatctctcctctttaagtttgaaaccatttccctttgtcctatcacaacagaccctgctaaagagtctgtcctgttctttcttatagcccccactttagaaactgaaatgccactatcaggtctccccagagccttctcttctccaagatgaacagccccagctctctcagctgagagaaaaatgatccatcccttggacaatttttgtgcccctcctctggatgcactccagcttgtccatgtctctcctgtactgaggactcaacatttggatgcagtagttga

SEQ ID NO: 50705 - DNA, 600 bp, Chicken  19866894297848_6
gttctttcttatagcccccactttagaaactgaaatgccactatcaggtctccccagagccttctcttctccaagatgaacagccccagctctctcagctgagagaaaaatgatccatcccttggacaatttttgtgcccctcctctggatgcactccagcttgtccatgtctctcctgtactgaggactcaacatttggatgcagtagttgaagtcccccacaagaacaagagagaccttgagacctcaaccaactatctatagtgtcttgtccacctcttcatcctggttgtgtggcrtgtagcagactcctgtgataatatcagtcttattggccttcrctttcattctgacccacaagctgtcaactctatcatcaccatcattaatttccatacattcacattctttcttaacatagaggactacaccaccgccttttctgccttccccttcagggaactagaaggggattcctcagtaaaatattggaaattttgacctctccacaggaacaggggtaataatgtttatatacccaaggaatgctgatgcatgagtgatttcagtgtccagtttcactgcaagggcagcagctg

SEQ ID NO: 50706 - DNA, 600 bp, Chicken  19866894297848_7
atcaggtctccccagagccttctcttctccaagatgaacagccccagctctctcagctgagagaaaaatgatccatcccttggacaatttttgtgcccctcctctggatgcactccagcttgtccatgtctctcctgtactgaggactcaacatttggatgcagtagttgaagtcccccacaagaacaagagagaccttgagacctcaaccaactatctatagtgtcttgtccacctcttcatcctggttgtgtggcrtgtagcagactcctgtgataatatcagtcttattggccttcrctttcattctgacccacaagctgtcaactctatcatcaccatcattaatttccatacattcacattctttcttaacatagaggactacaccaccgccttttctgccttccccttcagggaactagaaggggattcctcagtaaaatattggaaattttgacctctccacaggaacaggggtaataatgtttatatacccaaggaatgctgatgcatgagtgatttcagtgtccagtttcactgcaagggcagcagctgtcaacccaaaggaaaggaaatcacaggttctcacccacatgt

SEQ ID NO: 50707 - DNA, 599 bp, Chicken  19866894297856_1
  misc_feature (1)..(18): n is any nucleotide
nnnnnnnnnnnnnnnnnncattactggttcactagaagtatgagtggatttggggaagctgtctttgtccttccataccaagttgcaatcttcttcattcatgttaacagatacatgaatgtgtaacataagtacagttactatatctgaataggacccaagtagctatatcctataaataataaaaaatacatttttcttttgataactgactgtagatgtgaggactctgtataattcaaccaaacggttgtatgctgtacagtcctgtgcaaatatcataaaaaaattaataatccrttttttttttttgctataaggctttgaccctacatttttcacagcaacttaactaccatccagcctgtaccatatttcacaagccttcagtccaaaattcaaatattcaatccatatagtgtccatctgcagcaccctgaagtcatatgctctcgtcagtcatctaaaggcatacaaacttcaccagattcatcccatcgagactggtcattctgttcttctacgtcatcaccaagctcttcatcaccttctcccacttcattttcttcatattcttcatccctagggaaatctgtgtc

SEQ ID NO: 50708 - DNA, 599 bp, Chicken  19866894297856_2
  misc_feature (1)..(17): n is any nucleotide
nnnnnnnnnnnnnnnnncattactggttcactagaagtatgagtggatttggggaagctgtctttgtccttccataccaagttgcaatcttcttcattcatgttaacagatacatgaatgtgtaacataagtacagttactatatctgaataggacccaagtagctatatcctataaataataaaaaatacatttttcttttgataactgactgtagatgtgaggactctgtataattcaaccaaacggttgtatgctgtacagtcctgtgcaaatatcataaaaaaattaataatcctrtttttttttttgctataaggctttgaccctacatttttcacagcaacttaactaccatccagcctgtaccatatttcacaagccttcagtccaaaattcaaatattcaatccatatagtgtccatctgcagcaccctgaagtcatatgctctcgtcagtcatctaaaggcatacaaacttcaccagattcatcccatcgagactggtcattctgttcttctacgtcatcaccaagctcttcatcaccttctcccacttcattttcttcatattcttcatccctagggaaatctgtgtcc

SEQ ID NO: 50709 - DNA, 599 bp, Chicken  19866894297866_1
  misc_feature (1)..(182): n is any nucleotide
nnnnnnnnnnnnnnnnnnnnnnnnnnnnnnnnnnnnnnnnnnnnnnnnnnnnnnnnnnnnnnnnnnnnnnnnnnnnnnnnnnnnnnnnnnnnnnnnnnnnnnnnnnnnnnnnnnnnnnnnnnnnnnnnnnnnnnnnnnnnnnnnnnnnnnnnnnnnnnnnnnnnnnnnnnnnnnnnnnnnnnatccggagttactcagcacttctgaactcattaatgaaacatcagttagcagagggagagccgcgcgatgcttcgggctgtgtgtttgcctgggctgtggctgctgccattgggctcrgttactacacagacacacggcgtgatcagcatccctacctgcacactgcattygtctttgtggaattggagctgcctgcacccccagcttctgtgcatctggctgcagctgtatagagaagggcaagagtctcttcctttcgatatctaaggggctgtaagawagaaagggacagaattcagcagagtctgtttgatagcacagaaggaaatggtttccaactacaggaggggagatttaggttggctgtaagggagaagtttttcmtaataarggcacagagaggtggtgatgcccca

SEQ ID NO: 50710 - DNA, 599 bp, Chicken  19866894297866_2
  misc_feature (1)..(129): n is any nucleotide
nnnnnnnnnnnnnnnnnnnnnnnnnnnnnnnnnnnnnnnnnnnnnnnnnnnnnnnnnnnnnnnnnnnnnnnnnnnnnnnnnnnnnnnnnnnnnnnnnnnnnnnnnnnnnnnnnnnnnnnnnnnnnnnnnatccggagttactcagcacttctgaactcattaatgaaacatcagttagcagagggagagccgcgcgatgcttcgggctgtgtgtttgcctgggctgtggctgctgccattgggctcrgttactacacagacacacggcgtgatcagcatccctacctgcacactgcattygtctttgtggaattggagctgcctgcacccccagcttctgtgcatctggctgcagctgtatagagaagggcaagagtctcttcctttcgatatctaaggggctgtaagawagaaagggacagaattcagcagagtctgtttgatagcacagaaggaaatggtttccaactacaggaggggagatttaggttggctgtaagggagaagtttttcmtaataarggcacagagaggtggtgatgccccatccctgcagatagacaatgtcaggtggggctctgagcactgctggagctgtgg

SEQ ID NO: 50711 - DNA, 599 bp, Chicken  19866894297866_3
  misc_feature (1)..(19): n is any nucleotide
nnnnnnnnnnnnnnnnnnnatccggagttactcagcacttctgaactcattaatgaaacatcagttagcagagggagagccgcgcgatgcttcgggctgtgtgtttgcctgggctgtggctgctgccattgggctcrgttactacacagacacacggcgtgatcagcatccctacctgcacactgcattygtctttgtggaattggagctgcctgcacccccagcttctgtgcatctggctgcagctgtatagagaagggcaagagtctcttcctttcgatatctaaggggctgtaagawagaaagggacagaattcagcagagtctgtttgatagcacagaaggaaatggtttccaactacaggaggggagatttaggttggctgtaagggagaagtttttcmtaataarggcacagagaggtggtgatgccccatccctgcagatagacaatgtcaggtggggctctgagcactgctggagctgtgggtgtctctgtgcactgcagggggtggcacccgatggcctttaaggtcccttttaacttaagcaatcctgtggttctgtgacacgagcccaggagtgcaggtagcacaatc

SEQ ID NO: 50712 - DNA, 600 bp, Chicken  19866894297866_4
ttgcctgggctgtggctgctgccattgggctcrgttactacacagacacacggcgtgatcagcatccctacctgcacactgcattygtctttgtggaattggagctgcctgcacccccagcttctgtgcatctggctgcagctgtatagagaagggcaagagtctcttcctttcgatatctaaggggctgtaagawagaaagggacagaattcagcagagtctgtttgatagcacagaaggaaatggtttccaactacaggaggggagatttaggttggctgtaagggagaagtttttcmtaataarggcacagagaggtggtgatgccccatccctgcagatagacaatgtcaggtggggctctgagcactgctggagctgtgggtgtctctgtgcactgcagggggtggcacccgatggcctttaaggtcccttttaacttaagcaatcctgtggttctgtgacacgagcccaggagtgcaggtagcacaatcagtggagaagaaccatcctgctgatgggctcctggggaggctgggagtgatgcgtgtccaacagccaccctggcytcctggagactcccacaggggttgggtttt

SEQ ID NO: 50713 - DNA, 600 bp, Chicken  19866894297866_5
ggctgtggctgctgccattgggctcrgttactacacagacacacggcgtgatcagcatccctacctgcacactgcattygtctttgtggaattggagctgcctgcacccccagcttctgtgcatctggctgcagctgtatagagaagggcaagagtctcttcctttcgatatctaaggggctgtaagawagaaagggacagaattcagcagagtctgtttgatagcacagaaggaaatggtttccaactacaggaggggagatttaggttggctgtaagggagaagtttttcmtaataarggcacagagaggtggtgatgccccatccctgcagatagacaatgtcaggtggggctctgagcactgctggagctgtgggtgtctctgtgcactgcagggggtggcacccgatggcctttaaggtcccttttaacttaagcaatcctgtggttctgtgacacgagcccaggagtgcaggtagcacaatcagtggagaagaaccatcctgctgatgggctcctggggaggctgggagtgatgcgtgtccaacagccaccctggcytcctggagactcccacaggggttgggttttgtttgtt

SEQ ID NO: 50714 - DNA, 504 bp, Chicken  19866894297866_6
ttaggttggctgtaagggagaagtttttcmtaataarggcacagagaggtggtgatgccccatccctgcagatagacaatgtcaggtggggctctgagcactgctggagctgtgggtgtctctgtgcactgcagggggtggcacccgatggcctttaaggtcccttttaacttaagcaatcctgtggttctgtgacacgagcccaggagtgcaggtagcacaatcagtggagaagaaccatcctgctgatgggctcctggggaggctgggagtgatgcgtgtccaacagccaccctggcytcctggagactcccacaggggttgggttttgtttgttttcccttctgtatgtacacgggtgtctgaacaagactggaccgtgattttgtcaggagtgctgtgtggggtcctggggctctgcgttgggcaggaaaggagaggctccagtgctgcaaccacctccgctgagcagggtcctgtgctgtgagcagaatggggccaacg

SEQ ID NO: 50715 - DNA, 599 bp, Chicken  19866894297873_1
  misc_feature (1)..(170): n is any nucleotide
nnnnnnnnnnnnnnnnnnnnnnnnnnnnnnnnnnnnnnnnnnnnnnnnnnnnnnnnnnnnnnnnnnnnnnnnnnnnnnnnnnnnnnnnnnnnnnnnnnnnnnnnnnnnnnnnnnnnnnnnnnnnnnnnnnnnnnnnnnnnnnnnnnnnnnnnnnnnnnnnnnnnnnnnnntgccccactgcagcactgcctgctattcagcctcttccctccaatgttctgcttcatttggacacaaacccagagaggaaacgtttatttctcctgctggaaggaggtgagagatgctcaccttcttacyggtctcattcaaatgcacttgaatggtaggaaggagccaaacctgcccaactgactgagctccagcacctgctccagcctattgctgggtcctcccccagggttctctgccctcccctgggtatgggctgtaatgctgtgcaggaaccagctgctgttttgcattgtgcaaacaatttagttaagtaaaatcccatgtggtgctccacagaagcagcgcaggtctccttccagccctgtctgtgtctgcagaagcatccttactgtgccaggcgtgtgtctgagcgtgatacaggctga

SEQ ID NO: 50716 - DNA, 599 bp, Chicken  19866894297873_2
ccagcacctgctccagcctattgctgggtcctcccccagggttctctgccctcccctgggtatgggctgtaatgctgtgcaggaaccagctgctgttttgcattgtgcaaacaatttagttaagtaaaatcccatgtggtgctccacagaagcagcgcaggtctccttccagccctgtctgtgtctgcagaagcatccttactgtgccaggcgtgtgtctgagcgtgatacaggctgagcctttcgagccgctctgccctctgcttcacctccctgctttctcctttctaaggcttcacrctgtgctttggggacggcaccaagggcacgtgcagcagggagtgaaagaacagcttatcgttgggatggaaagtttctggctatcggggggttatcagttgctgctgcgtagaggttagattaaggtctgggagcagcagtgcacatcatggcacagcacgtgtctgtgttctccttatgctcaggtgggccaaggagatgaaggctgaacccacgggatggggatgcctgggcacggtgcttgcatcccgtccatcctccccatcactgcaccccttccagggtcctgcccctggtgg

SEQ ID NO: 50717 - DNA, 600 bp, Chicken  19866894297877_1
tgggagaagacaatgacaaatctctcccgttactcatcaggatagagttcttgctgattgttggtgcatcacagttctgttggttaaagccatgtttccagagtatcaggtagctgactgtttctgtgcttaacatagtacagaatatttacagcacgtggatgagtaaagcctgagtgtgcattttcttctgctggcatttatgctaaataaaaagggtagggggatggaagaagaaaagggaaaccataaacttttaatatttaaaagcactattttaaaatcaaaattaggaaaacrcagttaatgaaaataaccaggggagcatgatgtttaaaatgaactaaagaatgcagattattttttcaaagattatgaaatgtcarctcagttgcaggatgtatatcagcattccttttttgggataattttgtcttaatagattttattatagctcagtctctctcattttccccagtattcagtatgtagagcagagtctgggtagagtgagggagctggcagaggaggatggacccacaaagtattaagttcaactcaagcaaaagttgttgataaaagctctagtctacctaaaga

SEQ ID NO: 50718 - DNA, 600 bp, Chicken  19866894297877_2
aagccatgtttccagagtatcaggtagctgactgtttctgtgcttaacatagtacagaatatttacagcacgtggatgagtaaagcctgagtgtgcattttcttctgctggcatttatgctaaataaaaagggtagggggatggaagaagaaaagggaaaccataaacttttaatatttaaaagcactattttaaaatcaaaattaggaaaacrcagttaatgaaaataaccaggggagcatgatgtttaaaatgaactaaagaatgcagattattttttcaaagattatgaaatgtcarctcagttgcaggatgtatatcagcattccttttttgggataattttgtcttaatagattttattatagctcagtctctctcattttccccagtattcagtatgtagagcagagtctgggtagagtgagggagctggcagaggaggatggacccacaaagtattaagttcaactcaagcaaaagttgttgataaaagctctagtctacctaaagatatcttgtgcattcaaactctctcaaatcyttaattagtggcataactygtgggtgatatcagtaccagggggttggtttctttcc

SEQ ID NO: 50719 - DNA, 600 bp, Chicken  19866894297877_3
tgtttaaaatgaactaaagaatgcagattattttttcaaagattatgaaatgtcarctcagttgcaggatgtatatcagcattccttttttgggataattttgtcttaatagattttattatagctcagtctctctcattttccccagtattcagtatgtagagcagagtctgggtagagtgagggagctggcagaggaggatggacccacaaagtattaagttcaactcaagcaaaagttgttgataaaagctctagtctacctaaagatatcttgtgcattcaaactctctcaaatcyttaattagtggcataactygtgggtgatatcagtaccagggggttggtttctttccatatctgctgttggaaatgttccatttcatataaattattaactaccactggatcagaaatgaaagtagagggaagagagcaaggagagaaaagatgccctgactctctagccattagttaggaaatatagttgagttcagagttcaaataccttctcaaataagtacttaattattaagtagaacactcctcacaagagaggatgaaagatttatcccatattagcaagtagcctagtcatcc

SEQ ID NO: 50720 - DNA, 600 bp, Chicken  19866894297877_4
aatgcagattattttttcaaagattatgaaatgtcarctcagttgcaggatgtatatcagcattccttttttgggataattttgtcttaatagattttattatagctcagtctctctcattttccccagtattcagtatgtagagcagagtctgggtagagtgagggagctggcagaggaggatggacccacaaagtattaagttcaactcaagcaaaagttgttgataaaagctctagtctacctaaagatatcttgtgcattcaaactctctcaaatcyttaattagtggcataactygtgggtgatatcagtaccagggggttggtttctttccatatctgctgttggaaatgttccatttcatataaattattaactaccactggatcagaaatgaaagtagagggaagagagcaaggagagaaaagatgccctgactctctagccattagttaggaaatatagttgagttcagagttcaaataccttctcaaataagtacttaattattaagtagaacactcctcacaagagaggatgaaagatttatcccatattagcaagtagcctagtcatccaggcagccacctagactac

SEQ ID NO: 50721 - DNA, 600 bp, Chicken  19866894297886_1
tcataatgagtgagatttttgcattttaagccacagagggactttctaagttgacatcactgtaagtcaccgagctgctttatgtacactgtgctctcctttcagctgaatactctacttcttattcaaacgactcctgctgctgggatgaataattcttttatgaagtggaacgttcagtcacataagcccactcttgccagtgaggatccataactgctgtaaagactatcgccagattcaggcaaaacctaatagctttaagaatgtatccagaagtagaatatttctcagtaattygccttatcctgctacccacttattagaaatgggatatttgtgttgcaagggccttatcctggaagtattctcttttcctcccacctgaagatagggtaaaatgcttcacattttttttattakctatattgcaaggcaacaagataatagccttcttcccctctcactttcatagccagccttgaaattatcagctgctttctgctgctggaagctacatcagcttttgcatcgatctcctccagcagcagcaaaactgcagtggagtgaaacagggactcagccagggcagggagcaga

SEQ ID NO: 50722 - DNA, 600 bp, Chicken  19866894297886_2
attcaaacgactcctgctgctgggatgaataattcttttatgaagtggaacgttcagtcacataagcccactcttgccagtgaggatccataactgctgtaaagactatcgccagattcaggcaaaacctaatagctttaagaatgtatccagaagtagaatatttctcagtaattygccttatcctgctacccacttattagaaatgggatatttgtgttgcaagggccttatcctggaagtattctcttttcctcccacctgaagatagggtaaaatgcttcacattttttttattakctatattgcaaggcaacaagataatagccttcttcccctctcactttcatagccagccttgaaattatcagctgctttctgctgctggaagctacatcagcttttgcatcgatctcctccagcagcagcaaaactgcagtggagtgaaacagggactcagccagggcagggagcagagcagagctaagtcaggccaaggtgcagaaagcagattgctctttcctattactggtagctactcttaaagcatgagctattatttcaatattttatttgcaattaagtatctaactaatctcc

SEQ ID NO: 50723 - DNA, 599 bp, Chicken  19866894297897_1
  misc_feature (1)..(126): n is any nucleotide
nnnnnnnnnnnnnnnnnnnnnnnnnnnnnnnnnnnnnnnnnnnnnnnnnnnnnnnnnnnnnnnnnnnnnnnnnnnnnnnnnnnnnnnnnnnnnnnnnnnnnnnnnnnnnnnnnnnnnnnnnnnnnnatgctgcacaaaatcctttccctggggagtcttttgttcctaacagcaagccctgtgctgagccacgctctcagccagtgccttaatttaaggaaagcagagcccatgcagatcacttacacatcagcataaagcacaggggaaaggaggaggcagtgctgccggcgctttggrtaaacaagatattcaataattttaatctcggggtcactctgctatttccagattacataatcccacccttgaagagggttactccagcagactgtcacattaaatacacgcatttgctgcgtacgttaattgcagtagaaagctgttaagcaaataagcgtgttgcaccaaaatgttattcttttagcaggtctgctccttccatgggtctccaactcacaggccgtgctccttcggaatgcacatttcagtttgaggcacagaaacgccttcactgaactgatcaattcctttatcgt

SEQ ID NO: 50724 - DNA, 600 bp, Chicken  19866894297898_1
aaaatatatatgcattcagtagacagctgtacgttttgcactgtttagttatggtctttttatgttgatggagtgtgtctttttgatgcattgtcacgttggttttaaccttctggtagtcatgtgtgtaccagtgcagctaatataccatgacccaagggaaggaagagttcatctttgcattttgaatctgaattcaggtggtataaatgaaactctactggcaccatatgcatctggactcctgatgtctttacttttccattaagactggcagtcttcagtacttcaatggcagayttccacatgaaatggtgataaattggagcatgaaagcaaagaggactgtaagccaaagcatgttgcttgtctctgaaccgtgttttctgtgtttgtgagttgtaagggatgaagatgcaagtttctctccaccttggcctgactgctgctgttgtgcagagcaggtggtagtgaatgcaataggtggcagagaagaggtgtgtaggtaggtggtggatttttccatgtaagttaagatgcatgcagtgcttttcagggatgtgggagaggagaacgataatgtttagctgctgactccgg

SEQ ID NO: 50725 - DNA, 600 bp, Chicken  19866894297898_2
agtgcttttcagggatgtgggagaggagaacgataatgtttagctgctgactccggcatccttacccactagcgtgtctgtagcaaatagtgaggaaaaatggcaaaaagaaaatacacataaaaatggaaaatccaagaactcaaaacccaaaatgtcaactttgtctgaaggaagcatctctccagtaacatagcttgtttgcacttctgttcacccatgctcagtgcatctcctctcacctccacctctactggttcccatctgcagggaagctgaagctgactggcattaccaacrcttctctctctccttacacatcttccctttgaacacatcacagcaaggtccctatggccttgaactgccaacagagcaggtgggcagcagagaatccctcctggaggagtgcttcaccaaactaccctgtttccatggaagagagcactgggaatgaatccatcgtccaaaatcaatgcacacaaatccatgggccccaatgtgatgcacwcatgtgcggtgaggaagctggcagaagtgacatccaaaccactcttaaggatgtttgaagggtctccaggtgcttggttcagtattgct

SEQ ID NO: 50726 - DNA, 600 bp, Chicken  19866894297898_3
gttcacccatgctcagtgcatctcctctcacctccacctctactggttcccatctgcagggaagctgaagctgactggcattaccaacrcttctctctctccttacacatcttccctttgaacacatcacagcaaggtccctatggccttgaactgccaacagagcaggtgggcagcagagaatccctcctggaggagtgcttcaccaaactaccctgtttccatggaagagagcactgggaatgaatccatcgtccaaaatcaatgcacacaaatccatgggccccaatgtgatgcacwcatgtgcggtgaggaagctggcagaagtgacatccaaaccactcttaaggatgtttgaagggtctccaggtgcttggttcagtattgctcggcaacttcttcagttaactggatgaaggcatagaatccaccctcagcaggtttgctgatgatacaaagctgctgagagcatctgcgacaccagaaggctgtgctgccatttacgtagacatggacagtccagcagattggacagaagggaccctgacgaggttcaacaagagcacaggtagagtcttgcacccgggagaaataacagca

SEQ ID NO: 50727 - DNA, 600 bp, Chicken  19866894297902_1
cccagcagtctctgtgagatctatcactattctttaaaacatttgcaattgtgtgggaaggctcctcaaagaggaacgtccatccatacccaaagccaacgagctcaataagaagaacccaatgtgcaggttacgctgacccagggaaagcagcactgcaattcaatgatccccaatttctgagccatcagcccgctgtgctgcatcacgccttgaaggcacgccgaagtggtcaactgaattcaatcataaagagttcaggaaatctgtttcatgtgaatttcagggcagtttaataayaaaaactcgtgctttgtgtgataaagccatttgtacatgctgcaatcaaaggactctgggacacagcaacagaaaggtttggagtagaaaacgtagtaaagatactgagcgtcagcagcccccaaaacactctaagttgctttccatcctccttctccacagaaagcactgacaatcctatcttccttggccctgtagaaaccaaggaacaatcacaggaggccagggctgtaatcttcctctactgcagggaagacagctttattctgcttgaaagagaaaagaaccgacaaggcctgg

SEQ ID NO: 50728 - DNA, 600 bp, Chicken  19866894297907_1
gtttctatcctttctctcttctgagtccctgctgaaaatggcaatacaagtaacacagcagaagcttgtatacagacagaagatataatgagaatagcacttctcgtgggaattaaatgctgcatcacagggtttcatttgcaaatatctgcaatggaaaagcatatttaaaagtgcattcagattcactgtttagagtctcttctcttctgtactatgcttgcattataaaataagggatgcagtttgaagctggttgaggattagatatgtaaattcaaaggaaacaaagtctgaacrtggttttaaggtacgataaggacaagagtgactttaaatctacaacgaaattcaaaagcaayttgcaaatattgtttaataatatctttactttagaaccgaggaattcaaagagcaaaaacttcaagtgacttgaagttgtcaaatgttttttggccagataatggcaaactacagggcttcaaataacaactcctgtattcctctgggagatcggaggatttgaaatgagatgatcatattggctttgaacacattgattatgttatgagaagtctagatgaagttttttgcaacata

SEQ ID NO: 50729 - DNA, 600 bp, Chicken  19866894297907_2
agcttgtatacagacagaagatataatgagaatagcacttctcgtgggaattaaatgctgcatcacagggtttcatttgcaaatatctgcaatggaaaagcatatttaaaagtgcattcagattcactgtttagagtctcttctcttctgtactatgcttgcattataaaataagggatgcagtttgaagctggttgaggattagatatgtaaattcaaaggaaacaaagtctgaacrtggttttaaggtacgataaggacaagagtgactttaaatctacaacgaaattcaaaagcaayttgcaaatattgtttaataatatctttactttagaaccgaggaattcaaagagcaaaaacttcaagtgacttgaagttgtcaaatgttttttggccagataatggcaaactacagggcttcaaataacaactcctgtattcctctgggagatcggaggatttgaaatgagatgatcatattggctttgaacacattgattatgttatgagaagtctagatgaagttttttgcaacataataaaaggtggatagaatatatatggatagttcataaatgaaactgctgttaattcagtgaa

SEQ ID NO: 50730 - DNA, 599 bp, Chicken  19866894297919_1
  misc_feature (1)..(69): n is any nucleotide
nnnnnnnnnnnnnnnnnnnnnnnnnnnnnnnnnnnnnnnnnnnnnnnnnnnnnnnnnnnnnnnnnnnnnctcggaaattgctttaaggtactgaatattggtgcgttgtatctcgctgtggaaaaggtcaactttgttacttgtggagggagggatgcatttgcatcatggctggctgactttttaggcaacatggtctaacttacagtacttattgtttgtatacactgatatgaggatattttgtgtgtgaaagttaaaattcaggccattttaattggatgtatggaacagaattaytttgtctagagatagacagagacatctggttttgtcactcytggcttccgtgttggttggaggggagaacatgcggacttgtaaggtatgaattatcttatcctaaaatagctgtctaaaatagttcagatgcaacatatatcccaaagtagagagaaacagacgctggcaatgcagagatgctgagatttatctcacatgctggcatttacactggaggtaactcctgtttcctgcagagcttatgtaaaatcaaagacttaatgttaaygcacatgaaaattaagaagctatttart

SEQ ID NO: 50731 - DNA, 599 bp, Chicken  19866894297919_2
  misc_feature (1)..(28): n is any nucleotide
nnnnnnnnnnnnnnnnnnnnnnnnnnnnctcggaaattgctttaaggtactgaatattggtgcgttgtatctcgctgtggaaaaggtcaactttgttacttgtggagggagggatgcatttgcatcatggctggctgactttttaggcaacatggtctaacttacagtacttattgtttgtatacactgatatgaggatattttgtgtgtgaaagttaaaattcaggccattttaattggatgtatggaacagaattaytttgtctagagatagacagagacatctggttttgtcactcytggcttccgtgttggttggaggggagaacatgcggacttgtaaggtatgaattatcttatcctaaaatagctgtctaaaatagttcagatgcaacatatatcccaaagtagagagaaacagacgctggcaatgcagagatgctgagatttatctcacatgctggcatttacactggaggtaactcctgtttcctgcagagcttatgtaaaatcaaagacttaatgttaaygcacatgaaaattaagaagctatttartgcaggatttggatatttgagcaaytcacctctttgttgcag

SEQ ID NO: 50732 - DNA, 535 bp, Chicken  19866894297919_3
ttttaattggatgtatggaacagaattaytttgtctagagatagacagagacatctggttttgtcactcytggcttccgtgttggttggaggggagaacatgcggacttgtaaggtatgaattatcttatcctaaaatagctgtctaaaatagttcagatgcaacatatatcccaaagtagagagaaacagacgctggcaatgcagagatgctgagatttatctcacatgctggcatttacactggaggtaactcctgtttcctgcagagcttatgtaaaatcaaagacttaatgttaaygcacatgaaaattaagaagctatttartgcaggatttggatatttgagcaaytcacctctttgttgcagtgaagtcagttgcatgaaaacatgaaggactgtaaattccttaataaaaatagaatgctctaccatattcttggactgtcagcctcagaatttacaattccatgcagaattggctcaaaactgcccagaaacgcattacctgtcatggctcacttctttgctgcat

SEQ ID NO: 50733 - DNA, 508 bp, Chicken  19866894297919_4
aytttgtctagagatagacagagacatctggttttgtcactcytggcttccgtgttggttggaggggagaacatgcggacttgtaaggtatgaattatcttatcctaaaatagctgtctaaaatagttcagatgcaacatatatcccaaagtagagagaaacagacgctggcaatgcagagatgctgagatttatctcacatgctggcatttacactggaggtaactcctgtttcctgcagagcttatgtaaaatcaaagacttaatgttaaygcacatgaaaattaagaagctatttartgcaggatttggatatttgagcaaytcacctctttgttgcagtgaagtcagttgcatgaaaacatgaaggactgtaaattccttaataaaaatagaatgctctaccatattcttggactgtcagcctcagaatttacaattccatgcagaattggctcaaaactgcccagaaacgcattacctgtcatggctcacttctttgctgcat

SEQ ID NO: 50734 - DNA, 483 bp, Chicken  19866894297919_5
atctggttttgtcactcytggcttccgtgttggttggaggggagaacatgcggacttgtaaggtatgaattatcttatcctaaaatagctgtctaaaatagttcagatgcaacatatatcccaaagtagagagaaacagacgctggcaatgcagagatgctgagatttatctcacatgctggcatttacactggaggtaactcctgtttcctgcagagcttatgtaaaatcaaagacttaatgttaaygcacatgaaaattaagaagctatttartgcaggatttggatatttgagcaaytcacctctttgttgcagtgaagtcagttgcatgaaaacatgaaggactgtaaattccttaataaaaatagaatgctctaccatattcttggactgtcagcctcagaatttacaattccatgcagaattggctcaaaactgcccagaaacgcattacctgtcatggctcacttctttgctgcat

SEQ ID NO: 50735 - DNA, 600 bp, Chicken  19866894297921_1
cacaactgttatgactccagaaaccaaatatgcatgactgacctgtaaaaacagattgtaaatattgccctgtgtaatttcaataaaagacaacatttaggtgaaataataggaaattgcatataaattctacaagtctcaaaacattcaagtcaagtggtgtgctacaaagctgcatattggggtacggtaggatatatcctaatggtatagctccatacctgaagcctgtttttttctttatgatgtgcaaggcttatcaagacttggtggaagaactcctgagatcctgtcaagtgstyctctcttaaaatctacaaatttgttygtctgcctcctgatgttcacactcaagctagagaagagattcagatgcctcaagttacctagaaatgcatgggaacgtcacacggatctcatctgagcaattgagggaaatatgaataaaaagaattcttgatattcatcttcaatgaaatttaaggctttcactttaaggctggaaagttactttgcctagagaaaatagggctctagggagatattactttggccctccagtatttgaaggggacctacaggaaggatagggatggactc

SEQ ID NO: 50736 - DNA, 600 bp, Chicken  19866894297921_2
caactgttatgactccagaaaccaaatatgcatgactgacctgtaaaaacagattgtaaatattgccctgtgtaatttcaataaaagacaacatttaggtgaaataataggaaattgcatataaattctacaagtctcaaaacattcaagtcaagtggtgtgctacaaagctgcatattggggtacggtaggatatatcctaatggtatagctccatacctgaagcctgtttttttctttatgatgtgcaaggcttatcaagacttggtggaagaactcctgagatcctgtcaagtgstyctctcttaaaatctacaaatttgttygtctgcctcctgatgttcacactcaagctagagaagagattcagatgcctcaagttacctagaaatgcatgggaacgtcacacggatctcatctgagcaattgagggaaatatgaataaaaagaattcttgatattcatcttcaatgaaatttaaggctttcactttaaggctggaaagttactttgcctagagaaaatagggctctagggagatattactttggccctccagtatttgaaggggacctacaggaaggatagggatggactctt

SEQ ID NO: 50737 - DNA, 600 bp, Chicken  19866894297921_3
tatgcatgactgacctgtaaaaacagattgtaaatattgccctgtgtaatttcaataaaagacaacatttaggtgaaataataggaaattgcatataaattctacaagtctcaaaacattcaagtcaagtggtgtgctacaaagctgcatattggggtacggtaggatatatcctaatggtatagctccatacctgaagcctgtttttttctttatgatgtgcaaggcttatcaagacttggtggaagaactcctgagatcctgtcaagtgstyctctcttaaaatctacaaatttgttygtctgcctcctgatgttcacactcaagctagagaagagattcagatgcctcaagttacctagaaatgcatgggaacgtcacacggatctcatctgagcaattgagggaaatatgaataaaaagaattcttgatattcatcttcaatgaaatttaaggctttcactttaaggctggaaagttactttgcctagagaaaatagggctctagggagatattactttggccctccagtatttgaaggggacctacaggaaggatagggatggactctttaacagggagtatagcaataggacaa

SEQ ID NO: 50738 - DNA, 600 bp, Chicken  19866894297922_1
actttgtaatgtaaatttgttgttttgttggtggggaagtagtttcttctgacctagattaatatgctgagcaattctccttctggaattagaacaaagtgtcttttaagtaaggttgtgtcagtagctaagaggtttttagaaaccgagtatggaaaaagttaatttttggactctgagattaaaaactaatatgaaatgccagacatgatgtagcagggggactcggatagggcttcctgtgccagcatccccacttctgagaccagcattagctcctgccccttcccatagcagctrgggagaggtctggttaatgccatttgcaaagtctttagtaacttgggaactgaacatgctgtgtacctgtaaaacactgctgttggctgagagattctctttggatgtagttcttaccaacacatacttagcatcactcccactggcaaggccacactttgagtacagtgtttagttttgggcccctcactacaagaaagacattgaggccctggaatgtgtctagagaaggatagcaaagctggtgaagcggtgaaggatctagagctcaagtcttatggggagcagctgaggcaactg

SEQ ID NO: 50739 - DNA, 600 bp, Chicken  19866894297923_1
atatatggatttcttttttcctgcaaagttgtcaggattgtccaagatacttgacacaagccaaccagcatttgactagctaagcctacttcccattcaatatattctccaccactttcttggactagggaaatatttctaatggaatatataaaaaagcagtttcatatttctcatctaaaatattccagaaggctttttacaaaccatgacagagaaaggaaatagctgaaggagatatttttctcagttggctaaccacaatatataaacatagggttatgatacatatcagtatcrtttttgttttctttttacccaattaaaatatgcatgacataacacccagtggactgctctattctcactatttacagctttttaactttctattttttgttattttttaaatcagacggacttgaaagaagtacagtagttagaatgtgaattttcttcaatgactgtatgactggttaaaactcagaaacagacaatatacttttttgaaatgtcttagaatatcaagcgtccttcaacaggctacttggaatacaaggagcagatatggtgttacatttccatgaaaatcctcagaac

SEQ ID NO: 50740 - DNA, 600 bp, Chicken  19866894297923_2
ttgttttctttttacccaattaaaatatgcatgacataacacccagtggactgctctattctcactatttacagctttttaactttctattttttgttattttttaaatcagacggacttgaaagaagtacagtagttagaatgtgaattttcttcaatgactgtatgactggttaaaactcagaaacagacaatatacttttttgaaatgtcttagaatatcaagcgtccttcaacaggctacttggaatacaaggagcagatatggtgttacatttccatgaaaatcctcagaacatwcagaacctaggagaacacccaaactcgcactttgtgcaatacatacttcattttctgaaaacaaggaaatgcaaataagctacccactctcttctgcctctgcagcaccctcttgcgctatatgtcttcycctgtccytgctcttctgctcctattcccaaaccttcactctgacccacaaaagcttctgagaagtatttgagagtgttacgaagagacttatcctaaatgtgaaggcttgttcctagaaaggctgagccaagccaagccaatatgatccatgtcaaccttatgcaaaat

SEQ ID NO: 50741 - DNA, 600 bp, Chicken  19866894297923_3
cagtagttagaatgtgaattttcttcaatgactgtatgactggttaaaactcagaaacagacaatatacttttttgaaatgtcttagaatatcaagcgtccttcaacaggctacttggaatacaaggagcagatatggtgttacatttccatgaaaatcctcagaacatwcagaacctaggagaacacccaaactcgcactttgtgcaatacatacttcattttctgaaaacaaggaaatgcaaataagctacccactctcttctgcctctgcagcaccctcttgcgctatatgtcttcycctgtccytgctcttctgctcctattcccaaaccttcactctgacccacaaaagcttctgagaagtatttgagagtgttacgaagagacttatcctaaatgtgaaggcttgttcctagaaaggctgagccaagccaagccaatatgatccatgtcaaccttatgcaaaatgaagaatcaagaaagtttgcatgggacttcacaggtattagaagtgggggcactttggaattgactgctcacgtgatcttgaagctgcagtaataacactgcattgcagactcaagaggctgacagtttt

SEQ ID NO: 50742 - DNA, 600 bp, Chicken  19866894297923_4
agaatgtgaattttcttcaatgactgtatgactggttaaaactcagaaacagacaatatacttttttgaaatgtcttagaatatcaagcgtccttcaacaggctacttggaatacaaggagcagatatggtgttacatttccatgaaaatcctcagaacatwcagaacctaggagaacacccaaactcgcactttgtgcaatacatacttcattttctgaaaacaaggaaatgcaaataagctacccactctcttctgcctctgcagcaccctcttgcgctatatgtcttcycctgtccytgctcttctgctcctattcccaaaccttcactctgacccacaaaagcttctgagaagtatttgagagtgttacgaagagacttatcctaaatgtgaaggcttgttcctagaaaggctgagccaagccaagccaatatgatccatgtcaaccttatgcaaaatgaagaatcaagaaagtttgcatgggacttcacaggtattagaagtgggggcactttggaattgactgctcacgtgatcttgaagctgcagtaataacactgcattgcagactcaagaggctgacagttttctgaacaa

SEQ ID NO: 50743 - DNA, 600 bp, Chicken  19866894297935_1
atgttgtggcttttcctccattgcaagaacactgcaaagaagtgagatatatttttgtattatttttaagacagtgtttgcatgttaaattatgaaaatagagctttgaatttaaagacccagtaaatatattaataagaaatatataaggggaagaaataatagaaataaaccataatattgattcaaggatcaaaaatgaagtataggacaccaatgatggacacaaaagaaactgggtaataggattgatgctaaggtgcaaaggcagtaagctgtacgaaagtcaaagaaagaaarcccaatagttaaaagacaagcttaggatcaacaatgagcatgaaaggttaatttgtcacagatattctcagacatctttatggtgtcgtatacaagcttaaaagggaagcttatgatactgtaaaccaaatatgtgatgtgttgacagagaagatgattttggacttgcaaaatactggtagagcattctttgatctgtgagactgtttatacgaaatgactcccagttaaacaaggccaataccaacttcctgcattcaactcyaacaagatttgttaggctggcttcaacttaaacaa

SEQ ID NO: 50744 - DNA, 554 bp, Chicken  19866894297935_2
aggcagtaagctgtacgaaagtcaaagaaagaaarcccaatagttaaaagacaagcttaggatcaacaatgagcatgaaaggttaatttgtcacagatattctcagacatctttatggtgtcgtatacaagcttaaaagggaagcttatgatactgtaaaccaaatatgtgatgtgttgacagagaagatgattttggacttgcaaaatactggtagagcattctttgatctgtgagactgtttatacgaaatgactcccagttaaacaaggccaataccaacttcctgcattcaactcyaacaagatttgttaggctggcttcaacttaaacaaaaagtaattgacatagattctctatcaagcccaaaagctttgtgctgcttcctggggatgttgtgcttaaaattccatgcatttgtctgtccatgaagatcaccaaatcatatgtttcactgttgcgtgtttgatgttcagttttgatggcataatttttatggcagatgacaagctctgttatagctattaataaatggatgtcccaccatgagaaac

SEQ ID NO: 50745 - DNA, 600 bp, Chicken  19866894297940_1
ttctaaaaatgggtcagatgtgtttcctttcaggtaaatctaagcgcacattcatgactacatcaaagctattcatactatttgtaatcatattctccttgacttcagccccagatagtaagattataaatagccatcttctgtaattggaatacactgagcagcgtaagttaccaaaacagaacaacatagctgtatacagaaatctgagacaagagtttgtgtttttaggtacttcatgctttgaaaaattcatgaggcgtgtgcaattcacactgctactctggttcttcaagagcrygaaggttaacctaaaayggacctcattaagacacatgggaccagagggttgttgtaagtggggaaagcctacttttgtaaaaatctctgttacagggagctgaaacagtatttgaattatgcagtttaaagcaatcgtccctgagcgtgcmattctcttaagtgcacttggttcaaagaaatgacacagatttgctgtaataagactcaatggatctcaacacaaggagggactactttctttcccctctaagtgcctgtgaggcccagaaagggtttccttcaagaggcacagctgty

SEQ ID NO: 50746 - DNA, 600 bp, Chicken  19866894297940_2
tctaaaaatgggtcagatgtgtttcctttcaggtaaatctaagcgcacattcatgactacatcaaagctattcatactatttgtaatcatattctccttgacttcagccccagatagtaagattataaatagccatcttctgtaattggaatacactgagcagcgtaagttaccaaaacagaacaacatagctgtatacagaaatctgagacaagagtttgtgtttttaggtacttcatgctttgaaaaattcatgaggcgtgtgcaattcacactgctactctggttcttcaagagcrygaaggttaacctaaaayggacctcattaagacacatgggaccagagggttgttgtaagtggggaaagcctacttttgtaaaaatctctgttacagggagctgaaacagtatttgaattatgcagtttaaagcaatcgtccctgagcgtgcmattctcttaagtgcacttggttcaaagaaatgacacagatttgctgtaataagactcaatggatctcaacacaaggagggactactttctttcccctctaagtgcctgtgaggcccagaaagggtttccttcaagaggcacagctgtya

SEQ ID NO: 50747 - DNA, 600 bp, Chicken  19866894297940_3
tgtgtttcctttcaggtaaatctaagcgcacattcatgactacatcaaagctattcatactatttgtaatcatattctccttgacttcagccccagatagtaagattataaatagccatcttctgtaattggaatacactgagcagcgtaagttaccaaaacagaacaacatagctgtatacagaaatctgagacaagagtttgtgtttttaggtacttcatgctttgaaaaattcatgaggcgtgtgcaattcacactgctactctggttcttcaagagcrygaaggttaacctaaaayggacctcattaagacacatgggaccagagggttgttgtaagtggggaaagcctacttttgtaaaaatctctgttacagggagctgaaacagtatttgaattatgcagtttaaagcaatcgtccctgagcgtgcmattctcttaagtgcacttggttcaaagaaatgacacagatttgctgtaataagactcaatggatctcaacacaaggagggactactttctttcccctctaagtgcctgtgaggcccagaaagggtttccttcaagaggcacagctgtyatttttagaaragaggag

SEQ ID NO: 50748 - DNA, 600 bp, Chicken  19866894297940_4
tacactgagcagcgtaagttaccaaaacagaacaacatagctgtatacagaaatctgagacaagagtttgtgtttttaggtacttcatgctttgaaaaattcatgaggcgtgtgcaattcacactgctactctggttcttcaagagcrygaaggttaacctaaaayggacctcattaagacacatgggaccagagggttgttgtaagtggggaaagcctacttttgtaaaaatctctgttacagggagctgaaacagtatttgaattatgcagtttaaagcaatcgtccctgagcgtgcmattctcttaagtgcacttggttcaaagaaatgacacagatttgctgtaataagactcaatggatctcaacacaaggagggactactttctttcccctctaagtgcctgtgaggcccagaaagggtttccttcaagaggcacagctgtyatttttagaaragaggagggtcatcatcctggcaacttcaatcacccrccattcatttgaaaagtaactgctggatggaaaacatacatcagcccagcagccatgtgactatggatctaaagccccaaaaactgtcagtaaagacatggtac

SEQ ID NO: 50749 - DNA, 600 bp, Chicken  19866894297940_5
ygaaggttaacctaaaayggacctcattaagacacatgggaccagagggttgttgtaagtggggaaagcctacttttgtaaaaatctctgttacagggagctgaaacagtatttgaattatgcagtttaaagcaatcgtccctgagcgtgcmattctcttaagtgcacttggttcaaagaaatgacacagatttgctgtaataagactcaatggatctcaacacaaggagggactactttctttcccctctaagtgcctgtgaggcccagaaagggtttccttcaagaggcacagctgtyatttttagaaragaggagggtcatcatcctggcaacttcaatcacccrccattcatttgaaaagtaactgctggatggaaaacatacatcagcccagcagccatgtgactatggatctaaagccccaaaaactgtcagtaaagacatggtacaagatgggtcctcactgcttctaagccaaagcagaatgagcagataggagacagtacaaactctagagtctggtaaaacgccagggaagagacaagtagcaagaccaggactagcagtgcagtatgggtaatcagctcggaattcaga

SEQ ID NO: 50750 - DNA, 600 bp, Chicken  19866894297940_6
ctaaaayggacctcattaagacacatgggaccagagggttgttgtaagtggggaaagcctacttttgtaaaaatctctgttacagggagctgaaacagtatttgaattatgcagtttaaagcaatcgtccctgagcgtgcmattctcttaagtgcacttggttcaaagaaatgacacagatttgctgtaataagactcaatggatctcaacacaaggagggactactttctttcccctctaagtgcctgtgaggcccagaaagggtttccttcaagaggcacagctgtyatttttagaaragaggagggtcatcatcctggcaacttcaatcacccrccattcatttgaaaagtaactgctggatggaaaacatacatcagcccagcagccatgtgactatggatctaaagccccaaaaactgtcagtaaagacatggtacaagatgggtcctcactgcttctaagccaaagcagaatgagcagataggagacagtacaaactctagagtctggtaaaacgccagggaagagacaagtagcaagaccaggactagcagtgcagtatgggtaatcagctcggaattcagagcccagcttta

SEQ ID NO: 50751 - DNA, 600 bp, Chicken  19866894297940_7
gttgttgtaagtggggaaagcctacttttgtaaaaatctctgttacagggagctgaaacagtatttgaattatgcagtttaaagcaatcgtccctgagcgtgcmattctcttaagtgcacttggttcaaagaaatgacacagatttgctgtaataagactcaatggatctcaacacaaggagggactactttctttcccctctaagtgcctgtgaggcccagaaagggtttccttcaagaggcacagctgtyatttttagaaragaggagggtcatcatcctggcaacttcaatcacccrccattcatttgaaaagtaactgctggatggaaaacatacatcagcccagcagccatgtgactatggatctaaagccccaaaaactgtcagtaaagacatggtacaagatgggtcctcactgcttctaagccaaagcagaatgagcagataggagacagtacaaactctagagtctggtaaaacgccagggaagagacaagtagcaagaccaggactagcagtgcagtatgggtaatcagctcggaattcagagcccagctttacactgaagttcatttccctggatggtttcacattctc

SEQ ID NO: 50752 - DNA, 600 bp, Chicken  19866894297940_8
cccaaaaactgtcagtaaagacatggtacaagatgggtcctcactgcttctaagccaaagcagaatgagcagataggagacagtacaaactctagagtctggtaaaacgccagggaagagacaagtagcaagaccaggactagcagtgcagtatgggtaatcagctcggaattcagagcccagctttacactgaagttcatttccctggatggtttcacattctctgttgcatggctgcagcaggggacagaaaacaccagcagggatcttcagtaatcttaaagaaattaaaattaaakaaatcagcagaggacttccccttgaatagagttagtcacacaacagtcaagtaaaaaaatgaatccgccatccctgggaagctgtcactgtcttgtcacactcctcctcaaggtgtattgggttactaacaagggggaagggaacaaattcaagagtcagtgctcaacaggtctttagtttggggtttacacttgttatgtgcgctgtaacgcgagctttagctccttttataagttcatcacaagaaaagtaacgatgcacactccccattcctcagcacttgctgcatttacctacaa

SEQ ID NO: 50753 - DNA, 600 bp, Chicken  19866894297951_1
agggagcattcattcatcagaaagcactgttttctgctaacaaggcaactgtgatgaactgtgcccactcttctcatcagatgaactcagctgcactgagttgggagcagccctttggggtgaactcaggaatctacagaaggtgaactgaaagtcaggaatgctggattcagctcccagctgggcccccagtaaacaataacaaaggagtaagaagcttcaatcaggagacccatctgctcgtgctcggggaagatcaagaatttccattaaattcacctggtgggtattttgtgcccraccaacgccacgcagtgagctgtggctgcagtaagggctgctttcaaagtgtcggaggggttccgtggattttttcaagtgcaccttctctttgttcattttctggtaaactaatccagcttgatcttctagttttgttacagcygtgaccttttctgttctaattcatatacacaagcctaagcattttggcatctgttaagctatttgctgtaacaataatcttgcatcagtgagttccacgagtttataacctattgtacagcaacagttttatttaaacagataaactcagattct

SEQ ID NO: 50754 - DNA, 534 bp, Chicken  19866894297951_2
aactgaaagtcaggaatgctggattcagctcccagctgggcccccagtaaacaataacaaaggagtaagaagcttcaatcaggagacccatctgctcgtgctcggggaagatcaagaatttccattaaattcacctggtgggtattttgtgcccraccaacgccacgcagtgagctgtggctgcagtaagggctgctttcaaagtgtcggaggggttccgtggattttttcaagtgcaccttctctttgttcattttctggtaaactaatccagcttgatcttctagttttgttacagcygtgaccttttctgttctaattcatatacacaagcctaagcattttggcatctgttaagctatttgctgtaacaataatcttgcatcagtgagttccacgagtttataacctattgtacagcaacagttttatttaaacagataaactcagattctcacctgcagtaagttggacgaagtcaattcatgccatcaaaagagcggcccaaagctttaatttcatcaaaggcctctt

SEQ ID NO: 50755 - DNA, 600 bp, Chicken  19866894297969_1
gccaggatatcattggccttcttggccacctgggcacacagctggctcatattcagccaactgtccatcagtacaccaaggtccctttccatcaggcagcttatcagccactcctcctcaagcctgtagggttgtctggggttgttgtgaccaaaacgcaggccctattgaaactcatactcacatatatgaaatcttgcagtcataacaaagtagctgggcagtcacaaatccaaaaaagcaatgaaatgctttagaatttatatgccttacctgcacacaaacacttaggatctcacrtctcagctttctaaagtcttttgctacccctttaaaaatctgcccttgcatcaataccaggtraaagacttgtttgatagctctggcagctcctcgtttctctcccaaaccattcggtatttagaaactcagcaatcctttttctaagtacatttcctggaacgtctgattttctgggcattttctggcatataaagttcaggccataacatactgaaaaaaaaaaaaaagttgtaaccatgttctaataaccttggccctaaagtacaggtcttagactatagcatatagcttcttcag

SEQ ID NO: 50756 - DNA, 600 bp, Chicken  19866894297969_2
tccatcagtacaccaaggtccctttccatcaggcagcttatcagccactcctcctcaagcctgtagggttgtctggggttgttgtgaccaaaacgcaggccctattgaaactcatactcacatatatgaaatcttgcagtcataacaaagtagctgggcagtcacaaatccaaaaaagcaatgaaatgctttagaatttatatgccttacctgcacacaaacacttaggatctcacrtctcagctttctaaagtcttttgctacccctttaaaaatctgcccttgcatcaataccaggtraaagacttgtttgatagctctggcagctcctcgtttctctcccaaaccattcggtatttagaaactcagcaatcctttttctaagtacatttcctggaacgtctgattttctgggcattttctggcatataaagttcaggccataacatactgaaaaaaaaaaaaaagttgtaaccatgttctaataaccttggccctaaagtacaggtcttagactatagcatatagcttcttcagcacatggccataaaccaacttttccctcaactccaaagaatgactcagctatgagagtattgg

SEQ ID NO: 50757 - DNA, 600 bp, Chicken  19866894297972_1
cgtacaggcagcttctgcagggacacgagcagagacagtatcgtctcaagacgcggccttcgagagcgcatgcaaagtggacacaaaaacttcacttctttggcctgccaactagagcccttcttctgagaacttgttttggggagaggcacgcagctgctatgaaaccagtctttgcacagctcacactgcagcatgaatccgctagctgttttgcggcagacacagaacttgacttcttctatacgatccaccatagtcatcttggccaggttagctgctctgagagtgtgcatggcytcaatctccttctgttcccgctccttgaatatggccacctatccaaagacagaaacagttcatgaccttcacagctagaagagatcacacgcagcacagaaaaagaaaaaaaacattagatcttcttaattaaaccagcccaaaattatgagattgtgcaatctattaaaaacttcagttaaaatgcctcctcaattgcatattgctcctctatgtcctcctgacagaaccactgtacaaatattaatgttctctgtttaaaaaattgctgaaattcataattaaatccattataagaac

SEQ ID NO: 50758 - DNA, 600 bp, Chicken  19866894297972_2
gccaactagagcccttcttctgagaacttgttttggggagaggcacgcagctgctatgaaaccagtctttgcacagctcacactgcagcatgaatccgctagctgttttgcggcagacacagaacttgacttcttctatacgatccaccatagtcatcttggccaggttagctgctctgagagtgtgcatggcytcaatctccttctgttcccgctccttgaatatggccacctatccaaagacagaaacagttcatgaccttcacagctagaagagatcacacgcagcacagaaaaagyaaaaaaacattagatcttcttaattaaaccagcccaaaattatgagattgtgcaatctattaaaaacttcagttaaaatgcctcctcaattgcatattgctcctctatgtcctcctgacagaaccactgtacaaatattaatgttctctgtttaaaaaattgctgaaattcataattaaatccattataagaacacaagagaaacatagagactgtttaaatgctgacagcagcagggacttctgagtgacagtttatcttcctgaagcaacttctatttcctcagtgtctctattcaaa

SEQ ID NO: 50759 - DNA, 600 bp, Chicken  19866894297972_3
tagagactgtttaaatgctgacagcagcagggacttctgagtgacagtttatcttcctgaagcaacttctatttcctcagtgtctctattcaaataaatataatgaagcatactaagatataattggttgtatataagccatattaaagattctgcatgtattttctttgtttgtggaggaagggcagccaaatgacagcaagttcttctgacaagctgcatcaatatcctcccaacaaagaacaaatgtaacactgtttcctacccagtttccaggatgaagccttacagatagccctmgaatgctcttcatgtaggaagaaggaaggacaatgcttaaataaaaagactttctacrgtatggcaggcaatgcctaaggtcaacaaatttagaacacacttctgttgacccatgtcagtaaatcactaccatcaaatcttaagaatcaaaggagtgattgacgaaacaacccgaaataggatttactttagtttagtatactgtataaatgtaacgaatagtagtgtgctgggtactgcttaagagttgcatctcatttcacatgtattgaaatcctatcagaatattagaagaacagt

SEQ ID NO: 50760 - DNA, 600 bp, Chicken  19866894297972_4
gaagcaacttctatttcctcagtgtctctattcaaataaatataatgaagcatactaagatataattggttgtatataagccatattaaagattctgcatgtattttctttgtttgtggaggaagggcagccaaatgacagcaagttcttctgacaagctgcatcaatatcctcccaacaaagaacaaatgtaacactgtttcctacccagtttccaggatgaagccttacagatagccctmgaatgctcttcatgtaggaagaaggaaggacaatgcttaaataaaaagactttctacrgtatggcaggcaatgcctaaggtcaacaaatttagaacacacttctgttgacccatgtcagtaaatcactaccatcaaatcttaagaatcaaaggagtgattgacgaaacaacccgaaataggatttactttagtttagtatactgtataaatgtaacgaatagtagtgtgctgggtactgcttaagagttgcatctcatttcacatgtattgaaatcctatcagaatattagaagaacagtcacacgttattagaccaagagcattcaagccatttacacagccagatacatattatat

SEQ ID NO: 50761 - DNA, 600 bp, Chicken  19866894297977_1
agaattatatatgtaagcatatatacataatacatgcgataaatggcacattttttacaaatacatttctacgaatctttatataaatgtataaatataaacacaagcggaggtacaaaaaagcaagctgcaggagccatgagtatctgatcacacctcagcattggcagcggccaggtgtgcagaacacagggggaggtgacgctgtgcattgtttgccctgtttcagattttctttcttgagtgtggctgttctgttaagaactgcccaaagcgacccgagttctgtgagcaggagakgtagaagaacagcaggggttttctccttccaaaacaggagatctgtttaatgccacagtcaaaccgaccacgctttattctgaattgtggggagggctattaccactattatttgtctaacagaaagtggctgaaagaaaatatgttggagatgagctattttctgaagtcttttgatataaaggatttcatgtcccaggtgttccagttgtcctttctgagtgtgttccatgttcttggtgacgcccaccactgtgtgtgcagtacgtacttaacacacgtctcctgctcttctgatgc

SEQ ID NO: 50762 - DNA, 599 bp, Chicken  19866894297978_1
  misc_feature (1)..(180): n is any nucleotide
nnnnnnnnnnnnnnnnnnnnnnnnnnnnnnnnnnnnnnnnnnnnnnnnnnnnnnnnnnnnnnnnnnnnnnnnnnnnnnnnnnnnnnnnnnnnnnnnnnnnnnnnnnnnnnnnnnnnnnnnnnnnnnnnnnnnnnnnnnnnnnnnnnnnnnnnnnnnnnnnnnnnnnnnnnnnnnnnnnnntctgctgtcgtgagcctggtgtgggctgaggacggtctgcacatctcctgagcacccccgggcgtggtgtggggcagcttggcatgggtttggcaggttttgtccatcattctgcagccrgaggggaggagcgccgtgctgtcagcagtgctgaggtctcaytgggtgcgtgctggaattgtgcgcgttgtgcgggacggcactggaggagcrttcggagcttttgtgggtgcactgcaggtatctgtgtgtgccggaggaacggcgaagagggagaactgatccttatgttccgtgtaagaagatcttcaaactgagagtggtttgaagaaagggaattacatgcttcatgtcsaatcaatatgggaaggtgygtgaggtccactgattgcccgtgagygttgtgttagaggatggag

SEQ ID NO: 50763 - DNA, 600 bp, Chicken  19866894297978_10
ctctccgcttgttttcctgtgattgcttcgaccccagataaaggatgggatttgcaaagtcacacagccttgacctgctcgctttgtcacccaactcaactcaaattcaagaaattcaagagagtgaaaggaaagacagcgttattggtttaaggaaaacaattagagacctgtgcgtgtttccccacttagctttctgcaggaaaacaagtgctttcaaatgctgttctggtgttaacarctcttgtaaatctgtcactgtagctatrtgtgcctttcattcagcatccgcggaagacrcagaagtagcatcttatggatgaagaatctcctattttaacctttacaaatgtcaattgttctaaacttacacacagtacttagcatcagggctagctcaccaattattaacagcttctcctgctacatttgaaaacagattctcagtaagtgttggctggaaaacagctttagtacttggtagttgttccagtccagtctggtttcttccccttctctcctttttcttgaaccaccgtgcattaacagttttcccataatgatatcattttatccattctccagcagaccagaaatacg

SEQ ID NO: 50764 - DNA, 599 bp, Chicken  19866894297978_2
  misc_feature (1)..(138): n is any nucleotide
nnnnnnnnnnnnnnnnnnnnnnnnnnnnnnnnnnnnnnnnnnnnnnnnnnnnnnnnnnnnnnnnnnnnnnnnnnnnnnnnnnnnnnnnnnnnnnnnnnnnnnnnnnnnnnnnnnnnnnnnnnnnnnnnnnnnnnnnnntctgctgtcgtgagcctggtgtgggctgaggacggtctgcacatctcctgagcacccccgggcgtggtgtggggcagcttggcatgggtttggcaggttttgtccatcattctgcagccrgaggggaggagcgccgtgctgtcagcagtgctgaggtctcaytgggtgcgtgctggaattgtgcgcgttgtgcgggacggcactggaggagcrttcggagcttttgtgggtgcactgcaggtatctgtgtgtgccggaggaacggcgaagagggagaactgatccttatgttccgtgtaagaagatcttcaaactgagagtggtttgaagaaagggaattacatgcttcatgtcsaatcaatatgggaaggtgygtgaggtccactgattgcccgtgagygttgtgttagaggatggagacgtgatttggtcttgtaggagtggaacagcygttgtgtctt

SEQ ID NO: 50765 - DNA, 599 bp, Chicken  19866894297978_3
  misc_feature (1)..(87): n is any nucleotide
nnnnnnnnnnnnnnnnnnnnnnnnnnnnnnnnnnnnnnnnnnnnnnnnnnnnnnnnnnnnnnnnnnnnnnnnnnnnnnnnnnnnnnntctgctgtcgtgagcctggtgtgggctgaggacggtctgcacatctcctgagcacccccgggcgtggtgtggggcagcttggcatgggtttggcaggttttgtccatcattctgcagccrgaggggaggagcgccgtgctgtcagcagtgctgaggtctcaytgggtgcgtgctggaattgtgcgcgttgtgcgggacggcactggaggagcrttcggagcttttgtgggtgcactgcaggtatctgtgtgtgccggaggaacggcgaagagggagaactgatccttatgttccgtgtaagaagatcttcaaactgagagtggtttgaagaaagggaattacatgcttcatgtcsaatcaatatgggaaggtgygtgaggtccactgattgcccgtgagygttgtgttagaggatggagacgtgatttggtcttgtaggagtggaacagcygttgtgtcttttgtctctccgcttgttttcctgtgattgcttcgaccccagataaaggatg

SEQ ID NO: 50766 - DNA, 600 bp, Chicken  19866894297978_4
ccccgggcgtggtgtggggcagcttggcatgggtttggcaggttttgtccatcattctgcagccrgaggggaggagcgccgtgctgtcagcagtgctgaggtctcaytgggtgcgtgctggaattgtgcgcgttgtgcgggacggcactggaggagcrttcggagcttttgtgggtgcactgcaggtatctgtgtgtgccggaggaacggcgaagagggagaactgatccttatgttccgtgtaagaagatcttcaaactgagagtggtttgaagaaagggaattacatgcttcatgtcsaatcaatatgggaaggtgygtgaggtccactgattgcccgtgagygttgtgttagaggatggagacgtgatttggtcttgtaggagtggaacagcygttgtgtcttttgtctctccgcttgttttcctgtgattgcttcgaccccagataaaggatgggatttgcaaagtcacacagccttgacctgctcgctttgtcacccaactcaactcaaattcaagaaattcaagagagtgaaaggaaagacagcgttattggtttaaggaaaacaattagagacctgtgcgtgtttccccactt

SEQ ID NO: 50767 - DNA, 600 bp, Chicken  19866894297978_5
cagcttggcatgggtttggcaggttttgtccatcattctgcagccrgaggggaggagcgccgtgctgtcagcagtgctgaggtctcaytgggtgcgtgctggaattgtgcgcgttgtgcgggacggcactggaggagcrttcggagcttttgtgggtgcactgcaggtatctgtgtgtgccggaggaacggcgaagagggagaactgatccttatgttccgtgtaagaagatcttcaaactgagagtggtttgaagaaagggaattacatgcttcatgtcsaatcaatatgggaaggtgygtgaggtccactgattgcccgtgagygttgtgttagaggatggagacgtgatttggtcttgtaggagtggaacagcygttgtgtcttttgtctctccgcttgttttcctgtgattgcttcgaccccagataaaggatgggatttgcaaagtcacacagccttgacctgctcgctttgtcacccaactcaactcaaattcaagaaattcaagagagtgaaaggaaagacagcgttattggtttaaggaaaacaattagagacctgtgcgtgtttccccacttagctttctgcaggaaaaca

SEQ ID NO: 50768 - DNA, 600 bp, Chicken  19866894297978_6
tgtccatcattctgcagccrgaggggaggagcgccgtgctgtcagcagtgctgaggtctcaytgggtgcgtgctggaattgtgcgcgttgtgcgggacggcactggaggagcrttcggagcttttgtgggtgcactgcaggtatctgtgtgtgccggaggaacggcgaagagggagaactgatccttatgttccgtgtaagaagatcttcaaactgagagtggtttgaagaaagggaattacatgcttcatgtcsaatcaatatgggaaggtgygtgaggtccactgattgcccgtgagygttgtgttagaggatggagacgtgatttggtcttgtaggagtggaacagcygttgtgtcttttgtctctccgcttgttttcctgtgattgcttcgaccccagataaaggatgggatttgcaaagtcacacagccttgacctgctcgctttgtcacccaactcaactcaaattcaagaaattcaagagagtgaaaggaaagacagcgttattggtttaaggaaaacaattagagacctgtgcgtgtttccccacttagctttctgcaggaaaacaagtgctttcaaatgctgttctggtgt

SEQ ID NO: 50769 - DNA, 600 bp, Chicken  19866894297978_7
tgaggtctcaytgggtgcgtgctggaattgtgcgcgttgtgcgggacggcactggaggagcrttcggagcttttgtgggtgcactgcaggtatctgtgtgtgccggaggaacggcgaagagggagaactgatccttatgttccgtgtaagaagatcttcaaactgagagtggtttgaagaaagggaattacatgcttcatgtcsaatcaatatgggaaggtgygtgaggtccactgattgcccgtgagygttgtgttagaggatggagacgtgatttggtcttgtaggagtggaacagcygttgtgtcttttgtctctccgcttgttttcctgtgattgcttcgaccccagataaaggatgggatttgcaaagtcacacagccttgacctgctcgctttgtcacccaactcaactcaaattcaagaaattcaagagagtgaaaggaaagacagcgttattggtttaaggaaaacaattagagacctgtgcgtgtttccccacttagctttctgcaggaaaacaagtgctttcaaatgctgttctggtgttaacarctcttgtaaatctgtcactgtagctatrtgtgcctttcattcagc

SEQ ID NO: 50770 - DNA, 600 bp, Chicken  19866894297978_8
ttagaggatggagacgtgatttggtcttgtaggagtggaacagcygttgtgtcttttgtctctccgcttgttttcctgtgattgcttcgaccccagataaaggatgggatttgcaaagtcacacagccttgacctgctcgctttgtcacccaactcaactcaaattcaagaaattcaagagagtgaaaggaaagacagcgttattggtttaaggaaaacaattagagacctgtgcgtgtttccccacttagctttctgcaggaaaacaagtgctttcaaatgctgttctggtgttaacarctcttgtaaatctgtcactgtagctatrtgtgcctttcattcagcatccgcggaagacrcagaagtagcatcttatggatgaagaatctcctattttaacctttacaaatgtcaattgttctaaacttacacacagtacttagcatcagggctagctcaccaattattaacagcttctcctgctacatttgaaaacagattctcagtaagtgttggctggaaaacagctttagtacttggtagttgttccagtccagtctggtttcttccccttctctcctttttcttgaaccaccgtgc

SEQ ID NO: 50771 - DNA, 600 bp, Chicken  19866894297978_9
gtaggagtggaacagcygttgtgtcttttgtctctccgcttgttttcctgtgattgcttcgaccccagataaaggatgggatttgcaaagtcacacagccttgacctgctcgctttgtcacccaactcaactcaaattcaagaaattcaagagagtgaaaggaaagacagcgttattggtttaaggaaaacaattagagacctgtgcgtgtttccccacttagctttctgcaggaaaacaagtgctttcaaatgctgttctggtgttaacarctcttgtaaatctgtcactgtagctatrtgtgcctttcattcagcatccgcggaagacrcagaagtagcatcttatggatgaagaatctcctattttaacctttacaaatgtcaattgttctaaacttacacacagtacttagcatcagggctagctcaccaattattaacagcttctcctgctacatttgaaaacagattctcagtaagtgttggctggaaaacagctttagtacttggtagttgttccagtccagtctggtttcttccccttctctcctttttcttgaaccaccgtgcattaacagttttcccataatgatatcat

SEQ ID NO: 50772 - DNA, 600 bp, Chicken  19866894297980_1
aacctggccacagaacttcacttcctcctcagtgccgtaacagcaaggcattcctcacggggcactgttctttgtgttgttttaacgttattaattgtcttcggtgacacttctaaatggttggttgtttctccccccagataagacaaacatggttgaatggaacaagccttgacactgcactgaaataatgagggagctcttcaacagaacgccacaatacgtgtgggcaagttgttgcagttggaacagtacgagcttgtcaggtcacagcaaaacagttcttactgaaagaatggstatgaggaagagcagcagaaagcattctgctgtgcaaacatgcagctgagcaaaacctcyggaaaatcaggatgcgtgcaacatcaaactatttcctacgcaaagcttgatggcaatagggttccccacaaagaattraaccttttcctgctatgggaaaaaatgtgaattgagtcccagatatcagcagatccaggtgcatgaaatggagagaggatgaactgcgcggcgcagagcaaggaaagctcctgaagttgatcaaaaccaatggtggcttctgcagcagccatgcacgcagca

SEQ ID NO: 50773 - DNA, 600 bp, Chicken  19866894297980_2
ggcactgttctttgtgttgttttaacgttattaattgtcttcggtgacacttctaaatggttggttgtttctccccccagataagacaaacatggttgaatggaacaagccttgacactgcactgaaataatgagggagctcttcaacagaacgccacaatacgtgtgggcaagttgttgcagttggaacagtacgagcttgtcaggtcacagcaaaacagttcttactgaaagaatggstatgaggaagagcagcagaaagcattctgctgtgcaaacatgcagctgagcaaaacctcyggaaaatcaggatgcgtgcaacatcaaactatttcctacgcaaagcttgatggcaatagggttccccacaaagaattraaccttttcctgctatgggaaaaaatgtgaattgagtcccagatatcagcagatccaggtgcatgaaatggagagaggatgaactgcgcggcgcagagcaaggaaagctcctgaagttgatcaaaaccaatggtggcttctgcagcagccatgcacgcagcatacaaaaatctgtgcckamaaaatgtatatccaaatctgtttcttgatttatttgctgca

SEQ ID NO: 50774 - DNA, 600 bp, Chicken  19866894297980_3
agataagacaaacatggttgaatggaacaagccttgacactgcactgaaataatgagggagctcttcaacagaacgccacaatacgtgtgggcaagttgttgcagttggaacagtacgagcttgtcaggtcacagcaaaacagttcttactgaaagaatggstatgaggaagagcagcagaaagcattctgctgtgcaaacatgcagctgagcaaaacctcyggaaaatcaggatgcgtgcaacatcaaactatttcctacgcaaagcttgatggcaatagggttccccacaaagaattraaccttttcctgctatgggaaaaaatgtgaattgagtcccagatatcagcagatccaggtgcatgaaatggagagaggatgaactgcgcggcgcagagcaaggaaagctcctgaagttgatcaaaaccaatggtggcttctgcagcagccatgcacgcagcatacaaaaatctgtgcckamaaaatgtatatccaaatctgtttcttgatttatttgctgcagactgtagacctgaagcatgcaagcaaaaaggtcacaggatgacttttgttaaaatactcatggttacagcaaattta

SEQ ID NO: 50775 - DNA, 600 bp, Chicken  19866894297980_4
gaaagcattctgctgtgcaaacatgcagctgagcaaaacctcyggaaaatcaggatgcgtgcaacatcaaactatttcctacgcaaagcttgatggcaatagggttccccacaaagaattraaccttttcctgctatgggaaaaaatgtgaattgagtcccagatatcagcagatccaggtgcatgaaatggagagaggatgaactgcgcggcgcagagcaaggaaagctcctgaagttgatcaaaaccaatggtggcttctgcagcagccatgcacgcagcatacaaaaatctgtgcckamaaaatgtatatccaaatctgtttcttgatttatttgctgcagactgtagacctgaagcatgcaagcaaaaaggtcacaggatgacttttgttaaaatactcatggttacagcaaatttaggcagccatatactgagttacattgcatatatgggtgagcttctcgtgggaccgcagcaagaaatactgcccatttaaccctaggtgcatctctaatagtattaatttactaaaatgaaggaaaagagagtgtggcaggagctcttcacactcagtgtgtgttggattgcctgtgtgca

SEQ ID NO: 50776 - DNA, 600 bp, Chicken  19866894297980_5
aagcattctgctgtgcaaacatgcagctgagcaaaacctcyggaaaatcaggatgcgtgcaacatcaaactatttcctacgcaaagcttgatggcaatagggttccccacaaagaattraaccttttcctgctatgggaaaaaatgtgaattgagtcccagatatcagcagatccaggtgcatgaaatggagagaggatgaactgcgcggcgcagagcaaggaaagctcctgaagttgatcaaaaccaatggtggcttctgcagcagccatgcacgcagcatacaaaaatctgtgcckamaaaatgtatatccaaatctgtttcttgatttatttgctgcagactgtagacctgaagcatgcaagcaaaaaggtcacaggatgacttttgttaaaatactcatggttacagcaaatttaggcagccatatactgagttacattgcatatatgggtgagcttctcgtgggaccgcagcaagaaatactgcccatttaaccctaggtgcatctctaatagtattaatttactaaaatgaaggaaaagagagtgtggcaggagctcttcacactcagtgtgtgttggattgcctgtgtgcaca

SEQ ID NO: 50777 - DNA, 600 bp, Chicken  19866894297983_1
ggtgaggccttcccagatctgaaacttccttcaagagccattttggaaggcaaaaaactacttgcttatgtttcagattgacttcattttgtgtgagtgagtgaatgagcactgcaggtttgtcaggactgcattgtaaagcttcttgcagaacgtagctcacaaaaaagcgtttacttaattatcagttgaaataattacttactagggtagatatattctttctactcctaatgaaaaggtttgtagctgttagaatttgtgaagtaggcagaaccagttcagttcctgccttctaakccttttcagctcagtttttctgtaactttcagctaggctgtcacagcatgctctgaagttttatagtgatttatggctttggtgatgtaaacctcctagggctgaatgcgacagagatactgctgctcatctgagctgcattcataccaaccacattttatattcctgtttcttttctctgagacaaggaaggcaatattccagaagtctcagcatagacacagtgcaattacccttccagcaagagctctgtttatcattaatataattcttaatgaattattgtaatattctgaacat

SEQ ID NO: 50778 - DNA, 600 bp, Chicken  19866894297983_2
accaacaaaggtcttgtagtatttagtggtatgagatccaaatgaacgtgggctgttggcaagcgtatgagaagttattcagaagatttaaattggtacatttgggggcaactgcaatatctgggaattcattaactgttaggattgaaccttcacaccagctgtgtgatctggggagcgtgagtagtcagtaacacgagttcctgttcttctttcattgtgcagctctttggagatgtttgctacaactgcagccacgtgatagagggagatggtaagatttgttctcttcttattttkggtcactgtccctgttccgtttgttagtgcagctgttgcaggctcacagttgcaaggcaccagtgtttgtttttcacatctggcctcatttgaatttggatacaaatccgaattcaaataatctggcagattccttttattttgtgcttttgcagtggtatcagctcttaacaaggcctggtgtgtgaactgcttctcctgctccacctgcaacatcaagctcacactgaagtaagtcagcktttgtgctttgggccatattaaacacttgcccctaaggcagagtatcagcttgggagt

SEQ ID NO: 50779 - DNA, 600 bp, Chicken  19866894297983_3
ctacaactgcagccacgtgatagagggagatggtaagatttgttctcttcttattttkggtcactgtccctgttccgtttgttagtgcagctgttgcaggctcacagttgcaaggcaccagtgtttgtttttcacatctggcctcatttgaatttggatacaaatccgaattcaaataatctggcagattccttttattttgtgcttttgcagtggtatcagctcttaacaaggcctggtgtgtgaactgcttctcctgctccacctgcaacatcaagctcacactgaagtaagtcagcktttgtgctttgggccatattaaacacttgcccctaaggcagagtatcagcttgggagtgctgtgagccagagcccctgaggggcaatgttctgctgatccactggtttgtaatgycttctctctgtgggagtgctgatttcacaactaaaagagagctgggacccaacattatcttattttcctcctgttcacaaaggaagaatttcttctataaggaggttgggtaagaggacagctgtacagaaggaaagttctacactctgagtaactgcctgtactgaaatacctgcagcttccat

SEQ ID NO: 50780 - DNA, 600 bp, Chicken  19866894297983_4
caccagtgtttgtttttcacatctggcctcatttgaatttggatacaaatccgaattcaaataatctggcagattccttttattttgtgcttttgcagtggtatcagctcttaacaaggcctggtgtgtgaactgcttctcctgctccacctgcaacatcaagctcacactgaagtaagtcagcktttgtgctttgggccatattaaacacttgcccctaaggcagagtatcagcttgggagtgctgtgagccagagcccctgaggggcaatgttctgctgatccactggtttgtaatgycttctctctgtgggagtgctgatttcacaactaaaagagagctgggacccaacattatcttattttcctcctgttcacaaaggaagaatttcttctataaggaggttgggtaagaggacagctgtacagaaggaaagttctacactctgagtaactgcctgtactgaaatacctgcagcttccattgctccttagtttggatgcaccccttgctggcagtgcttgcagttacttagagtagcataatgtcttctttcagaatagttacccaaatatgtagatgaacagaaaacaaagcaa

SEQ ID NO: 50781 - DNA, 599 bp, Chicken  19866894297989_1
  misc_feature (1)..(59): n is any nucleotide
nnnnnnnnnnnnnnnnnnnnnnnnnnnnnnnnnnnnnnnnnnnnnnnnnnnnnnnnnnnacaagagatcacccacatggagacaaaagattttccagaaggacaagatgatcgggttctctacctggtgtttattttagataattttagatggtttgtcacgttctttctacattggccagcaccatcaccacacaaagctttcctccttgaaggtaatttgggaacttgctcctttaaagcatatagatgaaacttgcagcattatttggaaaaaaacttcattggcaggtgcacatgyttagcttcctcatttcacaaatttgccagaagacctgagatgattcaagccatcaccaagctgtagcaatagttagactactaystcaatattcaaaatgcagttgttgtctggtagaaataattcttgttacgaatcaaccattctataattaaacagctttgtttcaccaagtcctttctctatccaagcacgtaacttaatcacacatgttgacatttctcagatagaacactgtaaaaaattttggcttgactgattatctcagatttctgtgctgattacatgcagaacacttt

SEQ ID NO: 50782 - DNA, 600 bp, Chicken  19866894297989_2
aaagattttccagaaggacaagatgatcgggttctctacctggtgtttattttagataattttagatggtttgtcacgttctttctacattggccagcaccatcaccacacaaagctttcctccttgaaggtaatttgggaacttgctcctttaaagcatatagatgaaacttgcagcattatttggaaaaaaacttcattggcaggtgcacatgyttagcttcctcatttcacaaatttgccagaagacctgagatgattcaagccatcaccaagctgtagcaatagttagactactaystcaatattcaaaatgcagttgttgtctggtagaaataattcttgttacgaatcaaccattctataattaaacagctttgtttcaccaagtcctttctctatccaagcacgtaacttaatcacacatgttgacatttctcagatagaacactgtaaaaaattttggcttgactgattatctcagatttctgtgctgattacatgcagaacacttttgaaaagctccatcacagttgtttttatcatcaggatgcaacccttttattttgagaatacattcgaaaatgattgtttttcttg

SEQ ID NO: 50783 - DNA, 600 bp, Chicken  19866894297989_3
aagattttccagaaggacaagatgatcgggttctctacctggtgtttattttagataattttagatggtttgtcacgttctttctacattggccagcaccatcaccacacaaagctttcctccttgaaggtaatttgggaacttgctcctttaaagcatatagatgaaacttgcagcattatttggaaaaaaacttcattggcaggtgcacatgyttagcttcctcatttcacaaatttgccagaagacctgagatgattcaagccatcaccaagctgtagcaatagttagactactaystcaatattcaaaatgcagttgttgtctggtagaaataattcttgttacgaatcaaccattctataattaaacagctttgtttcaccaagtcctttctctatccaagcacgtaacttaatcacacatgttgacatttctcagatagaacactgtaaaaaattttggcttgactgattatctcagatttctgtgctgattacatgcagaacacttttgaaaagctccatcacagttgtttttatcatcaggatgcaacccttttattttgagaatacattcgaaaatgattgtttttcttga

SEQ ID NO: 50784 - DNA, 600 bp, Chicken  19866894297991_1
ctaaggtgaagtcacctggacaggagcaggatagaaaagtttgggttcgtgctaccagagtttgtgctaccagagtagcaggaatgggaggaaatgggcttctttcatgtgagactgatgtttccaatgggatgttgggaggtgtgtggtaactgttgagtcccggcctgaaccactgatggagcacctggggaaaggacccggtcagccctgggagcacaggtgaaggcaattcagctgtgcaatctgaaagggtggagcctggctgcacctctcttagacctcatttaaggactgackgcccctggggaaggatttctggttggagatccctccttggtggagttttccctgtgctcctagatcttcagagatgggtgagtactttgcctttttctttgaaacactttaccatcatgttggtccctttgtcattatacctcctgtatcaccattccatcgcattgaccattctgattgttacagagggaacccactctgagaagctcagtctagatacaccttgttgctgtgaaaatcaggagcagcttaaagggcttctaagctttatgttctcctatattgcgttgctctgggaaa

SEQ ID NO: 50785 - DNA, 600 bp, Chicken  19866894297991_2
gctttatgttctcctatattgcgttgctctgggaaaagagaccatataggtggccactgactgtgggaagttcacagaagcgtaaaactttccctcatcctttaattttttttggttccagttgggcattcttagggtgaagaccagctgggaggctgcagggagctggggctgagcccctaacttcatcccaacactacctctatcccaccggtggtttcatcccaccgatgggccccatcccaacactgaccctatcctactgatgatcctatcccaccaatggtttcattccacccyactgcactctctcagagcccagtaagtgctgtgttctcctcccttcatgaagatcctcacacaggtgcacaccacattgttttttccccttttctctcatttttctcatgctttgcatcctcttctcatcccggaggtacctttgaaatctcccaacgtcaactggaatcagctctggcttatgccgtggctaataaattagaaatgccacgttctcccaaactgcattattaccgtttataattttgattgttaatttgcatacgaaaattagtcctgtgacatgcgtgaattttattt

SEQ ID NO: 50786 - DNA, 600 bp, Chicken  19866894297991_3
ttaaatcacagtcccattctacattggttaacgatgcaaatgaacaatcagagaacatttctaaagtttctgaatttgttctatttgcatcaaatacaaattcctttgaatgggagatgatatgcttttccattttaatggacgtaaattaggctgattttaatttatagttaatttgaaggaataattctgtctacctgcgtttattttttttcagaggccggttgtagatgtttattaactcatcaatctgccttttgtgataaacaaagggaaattttgcccccaaagtggttttcytcctttcttttcagcctggtccctgagtcatgcatgctccctccctggctctccatgatgggggcaaggtaggtttgcagacagcagcacagcccctcaagcacaggctccttcttccyatctttyctctgtgcatgcagggaggttgatccacgtggagctgcagctctcccaccagggaggctctgccctgctccccaccagcccacccgcaccgccagcgcatggagggcacgctaattgtctgtaatgggattaggaacctaatatgctcagatcagaatgagaatttaataaact

SEQ ID NO: 50787 - DNA, 600 bp, Chicken  19866894297991_4
atatgcttttccattttaatggacgtaaattaggctgattttaatttatagttaatttgaaggaataattctgtctacctgcgtttattttttttcagaggccggttgtagatgtttattaactcatcaatctgccttttgtgataaacaaagggaaattttgcccccaaagtggttttcytcctttcttttcagcctggtccctgagtcatgcatgctccctccctggctctccatgatgggggcaaggtaggtttgcagacagcagcacagcccctcaagcacaggctccttcttccyatctttyctctgtgcatgcagggaggttgatccacgtggagctgcagctctcccaccagggaggctctgccctgctccccaccagcccacccgcaccgccagcgcatggagggcacgctaattgtctgtaatgggattaggaacctaatatgctcagatcagaatgagaatttaataaactctaatgtgaaggtgggggaaaaaaaaagatgcagtgtggcttccagtgtctccctggtccagaagggaaggagaatggtgattagagcagcagcccgggatagttatttgcaagtattg

SEQ ID NO: 50788 - DNA, 600 bp, Chicken  19866894297991_5
tttccattttaatggacgtaaattaggctgattttaatttatagttaatttgaaggaataattctgtctacctgcgtttattttttttcagaggccggttgtagatgtttattaactcatcaatctgccttttgtgataaacaaagggaaattttgcccccaaagtggttttcytcctttcttttcagcctggtccctgagtcatgcatgctccctccctggctctccatgatgggggcaaggtaggtttgcagacagcagcacagcccctcaagcacaggctccttcttccyatctttyctctgtgcatgcagggaggttgatccacgtggagctgcagctctcccaccagggaggctctgccctgctccccaccagcccacccgcaccgccagcgcatggagggcacgctaattgtctgtaatgggattaggaacctaatatgctcagatcagaatgagaatttaataaactctaatgtgaaggtgggggaaaaaaaaagatgcagtgtggcttccagtgtctccctggtccagaagggaaggagaatggtgattagagcagcagcccgggatagttatttgcaagtattgcggcaag

SEQ ID NO: 50789 - DNA, 600 bp, Chicken  19866894297994_1
ctcagtttattctagggacatattaggctctgatattagttgccatgaggtcattcgtattacaaggagcaacacatttctggctcttttctgttccttgacaaccaactccatacactcattggcagtattttctggcaatactggcaagctcctaggatttcttagcacagtctagatttaacaattcagtacagattacgactttttcaagccatagtaaataaagccaattggtctttcccatcctatcccatggcctagacccttaaagtccatgtatggagtgcaacaggcaaygcaggtctgtgagcgctgtgcctgggcacagttccttgaaagcaatgcagagttctctttcacaggcagtgcatgagttaagtgtgcctacccaaatgctcccctgactgaagggatagagaaaaaaaaaaaaggtagaaaaagtttttactcttttactcttcaagatcaaataatacatataatacatctctgaatactgtttaggtgatatcaagttatttacctatattcttcaaacttttgtgattctattcagaattgtttgcctgttttctcatttatcagatatacataata

SEQ ID NO: 50790 - DNA, 600 bp, Chicken  19866894297994_2
acaaacaaagacacaaaggaaggaagtaccaaaaggctgcatgtaacaaggtcatttgcaggtgtcatctctttccagtgcaccatgcaaaccttgaggggtctaaagtgtacaagggcagcaaatcctaattatataattagaaattctctaaatgattatggtaattaattctgtggttacttagcagtaggaaggtggtgaatgctagctgtgaaatgtaagcacactctgagatggatggatgaaaaaaatacatttttcatagtttctcttggtttccccaacctgtgaacatcrggtacactgtattgatatcagtgaaccaagacttatcttgcagcttcagccaaatcttagataggggcttcaataacattgcaggctgaagatgcagaacttgcagatgatagcactrtgcagcctgtgtctccctctggtcttccccgtaagacaaycagaatctctttcataacatggaaggaagaaaggactgcaactgcaaattttagcaggatgacctttaggtagaataaaccactgtctcacacgattttctgaagaattacagcttggaagaaggcaaattgcttgagagca

SEQ ID NO: 50791 - DNA, 600 bp, Chicken  19866894297994_3
cagcaaatcctaattatataattagaaattctctaaatgattatggtaattaattctgtggttacttagcagtaggaaggtggtgaatgctagctgtgaaatgtaagcacactctgagatggatggatgaaaaaaatacatttttcatagtttctcttggtttccccaacctgtgaacatcrggtacactgtattgatatcagtgaaccaagacttatcttgcagcttcagccaaatcttagataggggcttcaataacattgcaggctgaagatgcagaacttgcagatgatagcactrtgcagcctgtgtctccctctggtcttccccgtaagacaaycagaatctctttcataacatggaaggaagaaaggactgcaactgcaaattttagcaggatgacctttaggtagaataaaccactgtctcacacgattttctgaagaattacagcttggaagaaggcaaattgcttgagagcaggcctaccattaagcaaaaacaaagggagatgacagtagcctgtatctggatatctgcttagtagttaagtatcctagtgatacttaactacataagattgctgaatctttttcttct

SEQ ID NO: 50792 - DNA, 600 bp, Chicken  19866894297994_4
ttatggtaattaattctgtggttacttagcagtaggaaggtggtgaatgctagctgtgaaatgtaagcacactctgagatggatggatgaaaaaaatacatttttcatagtttctcttggtttccccaacctgtgaacatcrggtacactgtattgatatcagtgaaccaagacttatcttgcagcttcagccaaatcttagataggggcttcaataacattgcaggctgaagatgcagaacttgcagatgatagcactrtgcagcctgtgtctccctctggtcttccccgtaagacaaycagaatctctttcataacatggaaggaagaaaggactgcaactgcaaattttagcaggatgacctttaggtagaataaaccactgtctcacacgattttctgaagaattacagcttggaagaaggcaaattgcttgagagcaggcctaccattaagcaaaaacaaagggagatgacagtagcctgtatctggatatctgcttagtagttaagtatcctagtgatacttaactacataagattgctgaatctttttcttctactgtatttgtcctaaaatttccttttacgttattctcat

SEQ ID NO: 50793 - DNA, 600 bp, Chicken  19866894297996_1
atccaggctggccttgagcacctccagggatggggcattcatagcttctctgagcagctgtaccacagcctctccactcagataataagcaggtctagtggacgcattaccctctacaaataggaaaatttggaggacattagcatcttcagagagcagtggtaatctggtttaggctactagtattcggtcattgctctaggtctgaagcaacgttgctgaattgctgcgtgggttaggattaaacccctggtgatccttgtgcagggcctcgcactggctcgtagcatcagggacagygaaagaggcggccgcgctcaaatcggcatcatcgacaacgagaaggactccccagacctcctgaagatcatgaagatggtgctgggtgagaggcgtggggagctccgggatgccatcccggacacgaaagcagatgagctgcagaaagcaaacgtccggctctaccagtgagtgtgggtctgggctcccaccccttgtcatgggcgggtgctgtggggcctgaccactagctggctctgtctttcagtgtctacgagaaggacaacgacctcgtggtacaggagatagccactcggcccc

SEQ ID NO: 50794 - DNA, 600 bp, Chicken  19866894298002_1
agaagtctagactcaagatcttctcctatttcctgtcacaaacaaacaaaagagtagtaaagtgcacaaactttccaattggactgaatcccgtactgttaattacaagttaagtatacatattcatttcttgaaaaaagtcaaatcaggctggtagaagaaagctctcaaagagtaaggctacagtctgttagataaagatctaaaaccattttcaatcatattcacaaatcacttgtagagctcactcatgtatacatggatagttgcattattattgctatgataggttgagcttgkaatctttcaagactgctcccatgtttctgtccatgcagtctggctatataaagccaaggaagctaccccaaggttagcaccccatccaattattctcttggtattttgtgccctgaactctttaaaacatgaacgttttgaccttgagctccagattaatttaatcaccaacactattaatagagaaccatttggctttgggggtcagtgcagccagagctgctcttcctggctacatgttcatagctagtttgtttgcttgaagattgattctgcagtgttttaaacaggtcattcact

SEQ ID NO: 50795 - DNA, 600 bp, Chicken  19866894298002_2
ccccatccaattattctcttggtattttgtgccctgaactctttaaaacatgaacgttttgaccttgagctccagattaatttaatcaccaacactattaatagagaaccatttggctttgggggtcagtgcagccagagctgctcttcctggctacatgttcatagctagtttgtttgcttgaagattgattctgcagtgttttaaacaggtcattcactttgtgtttctgattaatgtgtgcctcacaaagcttgacctaaatgcattgttttaagcacttttattaaaaaaaaaaawaaaaacagcttctctctctaatagtatatcactcacaatcgatttgttgttaattgtgattatccctcctcagtaaacagaaggcactgcggtattcattctcctgatttgtacctctctgctatgggttaatggcatggctaaaaaaatgtttcaygctgagtttacagcatcagaaaagcaataatattcagtgactgtcttttacattagacttaatgttcaactcattccggtgtagcttacctggaaagaagaatagtaaccttagcaaatacaaataattatatttcagcaatg

SEQ ID NO: 50796 - DNA, 600 bp, Chicken  19866894298002_3
atgttcatagctagtttgtttgcttgaagattgattctgcagtgttttaaacaggtcattcactttgtgtttctgattaatgtgtgcctcacaaagcttgacctaaatgcattgttttaagcacttttattaaaaaaaaaaawaaaaacagcttctctctctaatagtatatcactcacaatcgatttgttgttaattgtgattatccctcctcagtaaacagaaggcactgcggtattcattctcctgatttgtacctctctgctatgggttaatggcatggctaaaaaaatgtttcaygctgagtttacagcatcagaaaagcaataatattcagtgactgtcttttacattagacttaatgttcaactcattccggtgtagcttacctggaaagaagaatagtaaccttagcaaatacaaataattatatttcagcaatgcaaaatactgtagtgatatttatttgcctcttcactcactttattactttgtacaccttaactttgtaccttgttttttaaggttatatctgacatttcaatactgttgaacattcaaaaaatgccccaaagagtactgttttcaagtggttaaaca

SEQ ID NO: 50797 - DNA, 600 bp, Chicken  19866894298003_1
tttgcaataggttacctatggatttaagtcatcattagaatcatattcaaaggattgagaaggtaccctttcttttttgtgtgtatttctcgggggtggtttttgctttgcattgggtatttttggcactgggggcggggaaggttatacatataaattagcaccacgttcatagggaagttcagcaacctcagcaactgctgaggaatttcttgctctcctaccaaccagttttcccaaagcacatacatttaaatgagcccatctttatagatacaagcccagtatatggctgaacamaacatgtagcatttcaaaaaagtaatgcagtccgatgcatgcttaaatggagaaaactccaccacttaatatgcgcacagagagcacgagattatccaaaaggctaagtggacagtcaagaagagtgcatagattagagaaagcactgtcaaaagatggcaggcaaaagtaataaagtatcccagtgttatcagtatcttgcacattctcaaaagtctctgaaggcacagcaggatatttcctgcacagagtgatggatgactgcatgtaagctgtgcagaagggatgctgttatagatg

SEQ ID NO: 50798 - DNA, 599 bp, Chicken  19866894298008_1
  misc_feature (1)..(48): n is any nucleotide
nnnnnnnnnnnnnnnnnnnnnnnnnnnnnnnnnnnnnnnnnnnnnnnnctaaaagctgtgccctcacgagaagttatccgagacttgctgtctgaaaacattcatgcaactatatttttgttccaaattgccttaaattataaagagaataatgtgattaggagataacttgttgtctaatgcagttgatcttgctacattttgtgctttgacatactgtctgtatgatcagataggacagctggagcttgattagattagacattccaggaacatagagcaggaacaagtccattccasacagagatcttgaaaactcaagggcagaatgtgccaagttcccacctccaaacattaggagatgctctgagaaggcaagagaacaaacagagggtgtgctttcccttgtgctttccctgttcttatgctatgatgtcctccaagttatggatcattttagctctgacacctttgtattccctgaaagcttctcctttgcctcatcgtagaaagaggcctttggtgctcttaaaccaactatgtagaaatgatttgaggttactaaatcaaaatcactaaaagtagctttaaatttgata

SEQ ID NO: 50799 - DNA, 518 bp, Chicken  19866894298008_2
tgaaaactcaagggcagaatgtgccaagttcccacctccaaacattaggagatgctctgagaaggcaagagaacaaacagagggtgtgctttcccttgtgctttccctgttcttatgctatgatgtcctccaagttatggatcattttagctctgacacctttgtattccctgaaagcttctcctttgcctcatcgtagaaagaggcctttggtgctcttaaaccaactatgtagaaatgatttgaggttactaaatcaaaatcactaaaagtagctttaaatttgatagcaacacatgraaggttctgggaaatattttaggtagttgtaactcaaagaaaccatcagttactctgtattctatatagagctgcagtggctatttgtaatcttagggagcagtgaacataaaatagccgccccttggctgtggcctggagttccctagtagtcatagctggtctcaacccagggactgatgccataacctaaaattttatacatcttcaattacaat

SEQ ID NO: 50800 - DNA, 553 bp, Chicken  19866894298018_1
atagagtgagcattctcatttaaaaatgctaactggctgcacataccagctcattgattatgttctggaaggtgtgctaaggagaagagacagaataaatgggactgacagataacaacaatttatgtttttcagagtttgagattatcacacaccaaattccatgcaccacacctccttgttcagatagcaccgttcaatacattctttccacataagttctgaaagattaaaggaaagaaagagcaggatccatgttttggatcctacatcctagttttgcaaatttgttctctggaraaaatggatgtgagtcacatgcattgtcaacaaatgagcaatccaaacaggtgctgcagttgaaaactatagatgaagaaaaaaaacctcacttctttccatattttgtccttttacatttttagccagatgtcatatgagtacttcagtaaatgaacgctctgttgaaatgttatacaaaagtgagaaatagaaggaggataagcatatgcacatttcccagttgaactatgtttgccatccagtgcattgg

SEQ ID NO: 50801 - DNA, 600 bp, Chicken  19866894298033_1
gcatccctggatgtgtttaaaaactgtttggatgtggtgctcagggacatgatttagcagagggttgtcagttagggtagtatggttaggtcatagttggactcaatgatctttaaggtcttttccaacctgagtgattctatgattctatgattttaatgacattgctatgtgtatccctcagtgacccatcctcgccattgagctgtgtgagaagactgtgactgtttctaatttgcttcagggcaagggcagtgagctcattttacactgccttcttctgtgatgctccagcagatractttccactcaagaagattgggaaagatcacaggaaccggtgacacagcttggctgygtaggtagtaacataaggcctgtgggtaggaaggtattgaaatgctcagagctctttctcaagtgagtgtgttgcaatgcccttcatctatctgtgcacgagcgacccaggagaatgaaacagtatttgaagggatgtgacatttacttgtgtgggaacccaaacatatagactatgatgtttcttgagtctctgaattaatctgagatataaatgcttcactctgtgctgttattcataat

SEQ ID NO: 50802 - DNA, 600 bp, Chicken  19866894298033_2
agagggttgtcagttagggtagtatggttaggtcatagttggactcaatgatctttaaggtcttttccaacctgagtgattctatgattctatgattttaatgacattgctatgtgtatccctcagtgacccatcctcgccattgagctgtgtgagaagactgtgactgtttctaatttgcttcagggcaagggcagtgagctcattttacactgccttcttctgtgatgctccagcagatractttccactcaagaagattgggaaagatcacaggaaccggtgacacagcttggctgygtaggtagtaacataaggcctgtgggtaggaaggtattgaaatgctcagagctctttctcaagtgagtgtgttgcaatgcccttcatctatctgtgcacgagcgacccaggagaatgaaacagtatttgaagggatgtgacatttacttgtgtgggaacccaaacatatagactatgatgtttcttgagtctctgaattaatctgagatataaatgcttcactctgtgctgttattcataatgaaatgtttgtggtaaggctctgtttacaactacagcagcttgatttgcccatatttt

SEQ ID NO: 50803 - DNA, 600 bp, Chicken  19866894298036_1
aaggaccaaaacagaggagtctttcctgtgcctcctacagagttttaggctccctttgctgcagagaaacatccctttggaggagctgggtggaaacctttttgggggataaaatttgtaagtttcttcctgatcgtctcctctggtttgttttgctgtgttcttgaatagtactaaatttgtcctgttgtcagttcctttttctcatttttaatgtttgggtttttttgtgttgtggtgttttctgttttgttttgaagagctcgacgtggctgtttatgtgcaggataccatcaaaayaagaatacaggcagtattaatgcacgaataggatgaagagaggttggcacagaagattgctagcaagtcagtagagctgaaatttcttagaagccatttgaatttctggttagatggattcagtactctcagtaggtttaatagcaaaagactgaatttttttttcagtctgctttctttctttgtacggttgcctctctggctgtttctgcacacctagcagggggatttcctttatttcacatttctcctgtacagcgggctaattggaggggtgttttcttctgtaaaatcctgttc

SEQ ID NO: 50804 - DNA, 600 bp, Chicken  19866894298036_2
gattgctagcaagtcagtagagctgaaatttcttagaagccatttgaatttctggttagatggattcagtactctcagtaggtttaatagcaaaagactgaatttttttttcagtctgctttctttctttgtacggttgcctctctggctgtttctgcacacctagcagggggatttcctttatttcacatttctcctgtacagcgggctaattggaggggtgttttcttctgtaaaatcctgttctttactgttcagctgtgcggttttggcaagctatattctgattgtctagggttrkttttttttcagagtgtgatgaagtataagacacacaaacaaaccacgagatggatccaagtgatcgagtaggctctagctagaacatgttacgtctgctgtgaagtgtgcttcctcatcagtgcaaatgatgcagcattccctgttttctcaccgcctgctttgttgaccggtagctgtttgtattccttctgcaaagccaaacacrgtcatyggtatctaggagatgttatgcagtccctgtacatcgcagttgcagccctccaggggcaggagggagggtggtgcctgcatgcgaga

SEQ ID NO: 50805 - DNA, 600 bp, Chicken  19866894298036_3
attgctagcaagtcagtagagctgaaatttcttagaagccatttgaatttctggttagatggattcagtactctcagtaggtttaatagcaaaagactgaatttttttttcagtctgctttctttctttgtacggttgcctctctggctgtttctgcacacctagcagggggatttcctttatttcacatttctcctgtacagcgggctaattggaggggtgttttcttctgtaaaatcctgttctttactgttcagctgtgcggttttggcaagctatattctgattgtctagggttrkttttttttcagagtgtgatgaagtataagacacacaaacaaaccacgagatggatccaagtgatcgagtaggctctagctagaacatgttacgtctgctgtgaagtgtgcttcctcatcagtgcaaatgatgcagcattccctgttttctcaccgcctgctttgttgaccggtagctgtttgtattccttctgcaaagccaaacacrgtcatyggtatctaggagatgttatgcagtccctgtacatcgcagttgcagccctccaggggcaggagggagggtggtgcctgcatgcgagat

SEQ ID NO: 50806 - DNA, 574 bp, Chicken  19866894298036_4
ctaattggaggggtgttttcttctgtaaaatcctgttctttactgttcagctgtgcggttttggcaagctatattctgattgtctagggttrkttttttttcagagtgtgatgaagtataagacacacaaacaaaccacgagatggatccaagtgatcgagtaggctctagctagaacatgttacgtctgctgtgaagtgtgcttcctcatcagtgcaaatgatgcagcattccctgttttctcaccgcctgctttgttgaccggtagctgtttgtattccttctgcaaagccaaacacrgtcatyggtatctaggagatgttatgcagtccctgtacatcgcagttgcagccctccaggggcaggagggagggtggtgcctgcatgcgagatgcgctgctggcagagtgcggccattgctaggcgacgctgccgcggatgctcgcgccgcgccggctgtaatggcagcactgcagctgggggagttgcactctggggctgtgcatccgctctgaggtaccactgggaatcccatgtctcgtaagctttgcgtttacactctttacgctctatg

SEQ ID NO: 50807 - DNA, 568 bp, Chicken  19866894298036_5
ggaggggtgttttcttctgtaaaatcctgttctttactgttcagctgtgcggttttggcaagctatattctgattgtctagggttrkttttttttcagagtgtgatgaagtataagacacacaaacaaaccacgagatggatccaagtgatcgagtaggctctagctagaacatgttacgtctgctgtgaagtgtgcttcctcatcagtgcaaatgatgcagcattccctgttttctcaccgcctgctttgttgaccggtagctgtttgtattccttctgcaaagccaaacacrgtcatyggtatctaggagatgttatgcagtccctgtacatcgcagttgcagccctccaggggcaggagggagggtggtgcctgcatgcgagatgcgctgctggcagagtgcggccattgctaggcgacgctgccgcggatgctcgcgccgcgccggctgtaatggcagcactgcagctgggggagttgcactctggggctgtgcatccgctctgaggtaccactgggaatcccatgtctcgtaagctttgcgtttacactctttacgctctatg

SEQ ID NO: 50808 - DNA, 599 bp, Chicken  19866894298039_1
  misc_feature (1)..(210): n is any nucleotide
nnnnnnnnnnnnnnnnnnnnnnnnnnnnnnnnnnnnnnnnnnnnnnnnnnnnnnnnnnnnnnnnnnnnnnnnnnnnnnnnnnnnnnnnnnnnnnnnnnnnnnnnnnnnnnnnnnnnnnnnnnnnnnnnnnnnnnnnnnnnnnnnnnnnnnnnnnnnnnnnnnnnnnnnnnnnnnnnnnnnnnnnnnnnnnnnnnnnnnnnnnnnnnnnnntcttgacttggaaaattaattttaaacacccaggtgcatataacatgcaccaaacccaagatgtgttatgtaacttcatcgattaactgyttttgttaatgaacagctagatgcataaaagtgctgctgaggtaggatgttaataacttcatacagttttatgaagccagcaaacatgaactataatgactgttatgtgtatatacagttgaagcattgtttggtcagctggaaacactatggacattttcttaagtcatggatgatgtccttgccattgcactctagaactggggttgacttgatactcctgactctaggtctgctcaggaagttgagtttcttgttcaaatatatgttttctgatgcattttaaatcttaaaatttt

SEQ ID NO: 50809 - DNA, 553 bp, Chicken  19866894298039_2
atgttaataacttcatacagttttatgaagccagcaaacatgaactataatgactgttatgtgtatatacagttgaagcattgtttggtcagctggaaacactatggacattttcttaagtcatggatgatgtccttgccattgcactctagaactggggttgacttgatactcctgactctaggtctgctcaggaagttgagtttcttgttcaaatatatgttttctgatgcattttaaatcttaaaattttggggctgggtgtttcttggagagtgagtgagtatgctgaaagaagtsattcagaggagaaagaacaattatatgaatggagcacaacaaactgccagagctcctgtgttgtttatattacagtgtgaaaaatagcattttaatagaaacctgaaaactcagataagtaattttcaatactatttaatgtctggaaagcaagcaggccttttctaagtatataaaaaataaaaataggacaaaataaaggagtactagtaaatttagcatatggtatacagatctataatttttataattt

SEQ ID NO: 50810 - DNA, 600 bp, Chicken  19866894298054_1
ctcttctggaagattcagctcatctgcctaaagagtgagtactttcctttgcagaacagcttgatttcccttatacctactctcttagataaaacaggttctctttgactctgtggattgctttgttacctcacccaaagggcagtgctattaaacatgatccttgctaggcaatggagatagttcttcatttgcatttcaatttgaaaggaggcagttgcagttttagtaacatttttgccacaacccctgaaccagagtccatattttctgtcaaggaataagatctattgagtttgytggatgtgtaaacgaacctttaaatgtaacaagcttgcccaattcctcctgtactccctctgggacaaaatggcttttcctttcctagacagggaagcacacttcaactacmggtgtcactgagccactgtaccactaatggtttttctcttttgattgattgttgttaacagaggtggtgtgtattctccaggagccgccttctctaaaacgaaactgattgatcgcctcagcaaacgtggtgttgagttctctgttattagccagcccgaagtctgacatcaaaacagccacacgaac

SEQ ID NO: 50811 - DNA, 600 bp, Chicken  19866894298054_2
gtggattgctttgttacctcacccaaagggcagtgctattaaacatgatccttgctaggcaatggagatagttcttcatttgcatttcaatttgaaaggaggcagttgcagttttagtaacatttttgccacaacccctgaaccagagtccatattttctgtcaaggaataagatctattgagtttgytggatgtgtaaacgaacctttaaatgtaacaagcttgcccaattcctcctgtactccctctgggacaaaatggcttttcctttcctagacagggaagcacacttcaactacmggtgtcactgagccactgtaccactaatggtttttctcttttgattgattgttgttaacagaggtggtgtgtattctccaggagccgccttctctaaaacgaaactgattgatcgcctcagcaaacgtggtgttgagttctctgttattagccagcccgaagtctgacatcaaaacagccacacgaactaacatcttacctgcgcctcattccaataaagctcattgggctgtaaaatagttgcattrtgctgttgtttacagcagaaacaggtgaaaaattaagttgaaaattgtggta

SEQ ID NO: 50812 - DNA, 600 bp, Chicken  19866894298054_3
tgggacaaaatggcttttcctttcctagacagggaagcacacttcaactacmggtgtcactgagccactgtaccactaatggtttttctcttttgattgattgttgttaacagaggtggtgtgtattctccaggagccgccttctctaaaacgaaactgattgatcgcctcagcaaacgtggtgttgagttctctgttattagccagcccgaagtctgacatcaaaacagccacacgaactaacatcttacctgcgcctcattccaataaagctcattgggctgtaaaatagttgcattrtgctgttgtttacagcagaaacaggtgaaaaattaagttgaaaattgtggtattttctattgtgagaaaacccataaaggatactgacttaattcatgaatatatgaaatcagtgatttattgggtactagaactttgtttaatgtctttcaccttaagttgcagaacagcagcctcagttactgcttaattcattctgcttcacaattaaccacagccttcttgccccaactatttaaagcaggccagccctggataccaagtgccttagcagaggaaactgctagttactcctcatgt

SEQ ID NO: 50813 - DNA, 600 bp, Chicken  19866894298055_1
acctcgaaaacatcttcagtcgaccgaatgcaacaacaaattgaaactcctattttttttgtttgtgacgatttattggcaccgacgttcattatttcaaacatgaaaaaaaaaaaagaaaatcacagactgggaaagcatcaaaatgacagcagcaacaaacatgtaactttaaaattagaatctactctttataacaaagtagaggtctttttcattatggcaaagtaacatgtaaactactaattcaatgtgcgctggaaggtgtgggataaaataagaattaaacagtgctttcawacctgcaatamgctttacatgatacaggcaagtatagctgtgagatgcagaatgcccggggctgcacgaggaggtgagctgctggaaggygaggatgggtctgcctcaatacagctcatgtcctcactgggctgcagagccagccagcttgggtgggaggttcaccatggaggatgctgatgccagttragrcagttagaaaagaaatgacggagaagtcacaagctttaagggctctccccgtttccacgtgacccagcctcaccaggagaagtgctcttcaagcagacagggcacaay

SEQ ID NO: 50814 - DNA, 600 bp, Chicken  19866894298055_2
atcttcagtcgaccgaatgcaacaacaaattgaaactcctattttttttgtttgtgacgatttattggcaccgacgttcattatttcaaacatgaaaaaaaaaaaagaaaatcacagactgggaaagcatcaaaatgacagcagcaacaaacatgtaactttaaaattagaatctactctttataacaaagtagaggtctttttcattatggcaaagtaacatgtaaactactaattcaatgtgcgctggaaggtgtgggataaaataagaattaaacagtgctttcawacctgcaatamgctttacatgatacaggcaagtatagctgtgagatgcagaatgcccggggctgcacgaggaggtgagctgctggaaggygaggatgggtctgcctcaatacagctcatgtcctcactgggctgcagagccagccagcttgggtgggaggttcaccatggaggatgctgatgccagttragrcagttagaaaagaaatgacggagaagtcacaagctttaagggctctccccgtttccacgtgacccagcctcaccaggagaagtgctcttcaagcagacagggcacaaygccaccagcca

SEQ ID NO: 50815 - DNA, 600 bp, Chicken  19866894298055_3
attatttcaaacatgaaaaaaaaaaaagaaaatcacagactgggaaagcatcaaaatgacagcagcaacaaacatgtaactttaaaattagaatctactctttataacaaagtagaggtctttttcattatggcaaagtaacatgtaaactactaattcaatgtgcgctggaaggtgtgggataaaataagaattaaacagtgctttcawacctgcaatamgctttacatgatacaggcaagtatagctgtgagatgcagaatgcccggggctgcacgaggaggtgagctgctggaaggygaggatgggtctgcctcaatacagctcatgtcctcactgggctgcagagccagccagcttgggtgggaggttcaccatggaggatgctgatgccagttragrcagttagaaaagaaatgacggagaagtcacaagctttaagggctctccccgtttccacgtgacccagcctcaccaggagaagtgctcttcaagcagacagggcacaaygccaccagccaacgtgtttagctgggtgcaggtcagggatcagagcaccagtcctccaagagcaatgaccatttctgcccaacgcagcat

SEQ ID NO: 50816 - DNA, 600 bp, Chicken  19866894298055_4
ctttataacaaagtagaggtctttttcattatggcaaagtaacatgtaaactactaattcaatgtgcgctggaaggtgtgggataaaataagaattaaacagtgctttcawacctgcaatamgctttacatgatacaggcaagtatagctgtgagatgcagaatgcccggggctgcacgaggaggtgagctgctggaaggygaggatgggtctgcctcaatacagctcatgtcctcactgggctgcagagccagccagcttgggtgggaggttcaccatggaggatgctgatgccagttragrcagttagaaaagaaatgacggagaagtcacaagctttaagggctctccccgtttccacgtgacccagcctcaccaggagaagtgctcttcaagcagacagggcacaaygccaccagccaacgtgtttagctgggtgcaggtcagggatcagagcaccagtcctccaagagcaatgaccatttctgcccaacgcagcatgagaagcaatgccacatcacctcaccaacgtgtcggtgtggcactgagggatgtggcttagcggggttatgttggtggtaggtggatggttggactccg

SEQ ID NO: 50817 - DNA, 600 bp, Chicken  19866894298055_5
tataacaaagtagaggtctttttcattatggcaaagtaacatgtaaactactaattcaatgtgcgctggaaggtgtgggataaaataagaattaaacagtgctttcawacctgcaatamgctttacatgatacaggcaagtatagctgtgagatgcagaatgcccggggctgcacgaggaggtgagctgctggaaggygaggatgggtctgcctcaatacagctcatgtcctcactgggctgcagagccagccagcttgggtgggaggttcaccatggaggatgctgatgccagttragrcagttagaaaagaaatgacggagaagtcacaagctttaagggctctccccgtttccacgtgacccagcctcaccaggagaagtgctcttcaagcagacagggcacaaygccaccagccaacgtgtttagctgggtgcaggtcagggatcagagcaccagtcctccaagagcaatgaccatttctgcccaacgcagcatgagaagcaatgccacatcacctcaccaacgtgtcggtgtggcactgagggatgtggcttagcggggttatgttggtggtaggtggatggttggactccggtg

SEQ ID NO: 50818 - DNA, 600 bp, Chicken  19866894298055_6
acctgcaatamgctttacatgatacaggcaagtatagctgtgagatgcagaatgcccggggctgcacgaggaggtgagctgctggaaggygaggatgggtctgcctcaatacagctcatgtcctcactgggctgcagagccagccagcttgggtgggaggttcaccatggaggatgctgatgccagttragrcagttagaaaagaaatgacggagaagtcacaagctttaagggctctccccgtttccacgtgacccagcctcaccaggagaagtgctcttcaagcagacagggcacaaygccaccagccaacgtgtttagctgggtgcaggtcagggatcagagcaccagtcctccaagagcaatgaccatttctgcccaacgcagcatgagaagcaatgccacatcacctcaccaacgtgtcggtgtggcactgagggatgtggcttagcggggttatgttggtggtaggtggatggttggactccggtgactctattattctgtgaaactcaaatcacaacataggatgagcaattctctcagagccctgttaatgagcccagcatgtgtcccgtgcatggccacccctggagcagc

SEQ ID NO: 50819 - DNA, 600 bp, Chicken  19866894298059_1
aattgcttcctgtattttcagaaacttgagcattggggaatttgctcgtgttgctttacagctctgtccagctggcagcacctctgcttgaaccacagtggcagcaggtaattgtagcagaacagcccctgtcaaaacaagcgagatttactgtgccagcggataatgaaatggaacagttcatgcaagcaataaagaaaaagcactgccggaaagatggaaaggcatattcagacctttaaggaccataaaaacaatacagtggaaaagtgagctgttgagtgtatcgctgtttaacayctcaggacaaaaggagagctgcgttcacaggcagcgcttgcagacatgctgtgtgtctgaggaattcttgcttcccagcatcattagcacctcctgtatcacagcctgtatcaggaactcctctatgccagtgtgctggtgatttctgatggcaggctgtgccctaaccatttagaaagtgatgctagaagcaattatgaatatagaatatggaatatggaacatagaaaacagaatatatagaatacagaatattacgtgcttcctgtaattattcagccctgcccaaacggtgcactg

SEQ ID NO: 50820 - DNA, 600 bp, Chicken  19866894298061_1
tggaaattggaagttggaagcctaggatgaaaagaggaatggattgctgcagcagtgggtgccaatgtgtctcagccaacagctggaggtggttaaggggaaaatgctcagcctgggacagaaggcaatggggagctcttgctgttgacagttgcaatatctcagcttcaagggaaacttcaagggccctgtgaaaagctcgaagatctccatccaagaagatcaacagctttatttctccaaagagcaactgtgaccactgcgggcgtgtggtccaggggtgagaacatctccccatcytcactctgagcccactcagagtcatttgtggaagacaagacttttggcaggggattcagagggctttccccaagttcagtaggatttggtcttttcccagacaatgactattaaagacaacaggctttaaagccattcaggagcccacagaccatccaatctgtggtgggttttggaggaatcctttcccagaaacatgactttytgaggtctattatcccaggaccacatggaacagtcctcatttccaacaggaatcatagaacggctgggttggaagggatctcaaggatcatgaag

SEQ ID NO: 50821 - DNA, 600 bp, Chicken  19866894298061_2
atctccatccaagaagatcaacagctttatttctccaaagagcaactgtgaccactgcgggcgtgtggtccaggggtgagaacatctccccatcytcactctgagcccactcagagtcatttgtggaagacaagacttttggcaggggattcagagggctttccccaagttcagtaggatttggtcttttcccagacaatgactattaaagacaacaggctttaaagccattcaggagcccacagaccatccaatctgtggtgggttttggaggaatcctttcccagaaacatgactttytgaggtctattatcccaggaccacatggaacagtcctcatttccaacaggaatcatagaacggctgggttggaagggatctcaaggatcatgaagctccaacctccccccaccacaggcagggccaccaacctccacatttcataccagaccaggctgcccagggccmcatccaacctggccttgaagacctccagagatggacgaggcatccacagcctctctgtgcaagccattccagcacctcaccactctcatagtaaagaacttggggaagacctccagtctcactctctttgta

SEQ ID NO: 50822 - DNA, 600 bp, Chicken  19866894298061_3
gttcagtaggatttggtcttttcccagacaatgactattaaagacaacaggctttaaagccattcaggagcccacagaccatccaatctgtggtgggttttggaggaatcctttcccagaaacatgactttytgaggtctattatcccaggaccacatggaacagtcctcatttccaacaggaatcatagaacggctgggttggaagggatctcaaggatcatgaagctccaacctccccccaccacaggcagggccaccaacctccacatttcataccagaccaggctgcccagggccmcatccaacctggccttgaagacctccagagatggacgaggcatccacagcctctctgtgcaagccattccagcacctcaccactctcatagtaaagaacttggggaagacctccagtctcactctctttgtagtgccaagtctacaccacgattagagcagtgctgggactatggactaactacaccaggagtcctggggcaatgaactgaggttttcttcttggctgcagccttggagcaatctaaatttgttctsctggatctcagtgggtatggggagtttgagggttggtgaacag

SEQ ID NO: 50823 - DNA, 600 bp, Chicken  19866894298061_4
accaacctccacatttcataccagaccaggctgcccagggccmcatccaacctggccttgaagacctccagagatggacgaggcatccacagcctctctgtgcaagccattccagcacctcaccactctcatagtaaagaacttggggaagacctccagtctcactctctttgtagtgccaagtctacaccacgattagagcagtgctgggactatggactaactacaccaggagtcctggggcaatgaactgaggttttcttcttggctgcagccttggagcaatctaaatttgttctsctggatctcagtgggtatggggagtttgagggttggtgaacagggcttgtgggcaaaacccagccaagaatatacaccagctccacactttgaaaataaatgactgggataacactgctgaaaacctagacaggcatccttaggggccacaacaattctttgcatttaaaatatccttgcactgagtgcaggaagagtgggagaaaagtgtccatgtgaccctgccaagccccagcactgacgacagccccgtttttgggtgagtctcacctgcttttcaggttcagaggtctttttctc

SEQ ID NO: 50824 - DNA, 600 bp, Chicken  19866894298065_1
gtgtcttctgtataaatctgtttatttccttcaaaatggaattcagactaagttaatcattctgggagtggttttttttttctccctggcataatcatttccttgacggttattgttatctctaagagacacatcagctaacagtagagctatctgctattattagcacccagtaactagataattcctgagtttccatataattgggaacaaagatgcacagttttaaatcccactataatatttaattacttgatcgtgagctctttccacaaaacagttatctgctcctttaagagkaaaacctcaggctttttggctacaaggccacatctgtccctttaaagatgccggtggtcttttttccttttggtaagctatttggaaggccaggcctcaggctttgcccctttcaggagtgtttagacaagtatgtcacctcaggaatatgataccaaagccaatatttggttatatgattgcgaaagatcttgtgtttataaacaagcaaacaatttttcacaggggggataaatccagcccgccttatcttttcttatcagagtgagctattaagcggctttgtaaaataatttattc

SEQ ID NO: 50825 - DNA, 600 bp, Chicken  19866894298065_2
ttttttccttttggtaagctatttggaaggccaggcctcaggctttgcccctttcaggagtgtttagacaagtatgtcacctcaggaatatgataccaaagccaatatttggttatatgattgcgaaagatcttgtgtttataaacaagcaaacaatttttcacaggggggataaatccagcccgccttatcttttcttatcagagtgagctattaagcggctttgtaaaataatttattctcacttaaactgacatttcatactggaagataaacattcctttcaactttttggagaaytgtctttattactttcctcccctctcagccctcagacaaaagccactacattacgcactggtaacgctgacctgagtctgccccataccacatcctgctgtcgacaagagcagcggtggcactcagttccctcagatatctgatggattcagctctccagcctacagcaaaggcctcagttaactgaatggagatagtcctgggacagatgtggtcttgggcaccctgctctgggtagccctgctggtgcaggccagagggacccagtaggccctgccagcctcagccatcctctgagtt

SEQ ID NO: 50826 - DNA, 600 bp, Chicken  19866894298070_1
gcataggatgtaagccagtgccgacttcattcttgaaaatttcaagaaattgcagggtaggtaaaaatagattctgtctttggtaatctttgcacgtgtacttggtgttgcagaagaatgggaaaatatctgaggggaatatctgagagaccgaatcactccatacctgaagtttacctctctgtcactacagtttctctctgttgttatgttggcacgcttaaaagaaaagattaagaatactgaattgcctgtgttggaaagtgcagcagagctttaagttgcctatggtgcagcaaygtcctgtacgatatcataacactgaagccaccagcaaccaaaaggaggttttccttctaagagaggaattagaggtgactacattcaggctttaacacacgtgaaatggagacactctggatatagagggatggatgtaagtgrcaactgtcttttccatctcacactgatcagtggttgagtcttcatctcttgcttctcctcatccgtattccaaaacttctgtgaactgtgtcactaacagagggcatttggctatttctaaaagtttgtatctcaacttaagggaagatatttctt

SEQ ID NO: 50827 - DNA, 600 bp, Chicken  19866894298070_2
gagagaccgaatcactccatacctgaagtttacctctctgtcactacagtttctctctgttgttatgttggcacgcttaaaagaaaagattaagaatactgaattgcctgtgttggaaagtgcagcagagctttaagttgcctatggtgcagcaaygtcctgtacgatatcataacactgaagccaccagcaaccaaaaggaggttttccttctaagagaggaattagaggtgactacattcaggctttaacacacgtgaaatggagacactctggatatagagggatggatgtaagtgrcaactgtcttttccatctcacactgatcagtggttgagtcttcatctcttgcttctcctcatccgtattccaaaacttctgtgaactgtgtcactaacagagggcatttggctatttctaaaagtttgtatctcaacttaagggaagatatttctttatttacatgattttctcctcaccttactactttctcctcaccttctccacgtgtgttatgaaatggcttttgactactcaggttttggttgtagaaatagcattccatattggcaaagggctcttccatgcacagtgcaatgt

SEQ ID NO: 50828 - DNA, 600 bp, Chicken  19866894298072_1
atacaaccccaaaatcgttaggcctactcagataaaccgagacagacttgccttgactcgcagcatagaattttggcacctggagaaacaaccaactcaaaaagcattgcatggcctcgttagcactccccaacacaggtccaccaggatggaagaaaaacaccagtgaaagagaggaaaagcaataataaaaatatattaaagcactcactgtgaatgcctcccttctcccagtccttctgagctggcattgtgtggtgctcctcagtcactgcagggaagtcccagctgtgcatctcycacaggtgttccagatgtacatcagggaggttgttctttcagcattgcctacagctgctgggcagcaaaggggagagcggccctcacacagttaattgataggtctgcccgtcttcaccaccttgctgtacagcttcacccgcagaggtgcaaagagaggcagatgtggtatttggcaagctgtcaagacacatctttctttttaaaagtaaggcacacatcaccggctgctctcagccgggtccttctgtctgcaacaacactgccgtcggcactgaaatgcccttttcaaacatggtc

SEQ ID NO: 50829 - DNA, 600 bp, Chicken  19866894298075_1
tgcagcttttgctgcattcaatgacatcacaattatgctggttttgagctaaaacttctgtccttaaacaggaacagcttgcgtgaaacctcttatgctttccttctcatttcctttgattgttcctggactaaaattggttgaaatagtgaatatgttagggtagtgcatttttacaggctttgtgcctgggtttgcagctgagatattgtaggtagctcacattgttgagtgtggaaaatggatgaatgttattgaaaaccaagtcaagttgtgctctcctggtctggggggtatttrkcaatcctgtgatttgyggtaatggaattacagaaaaaagttattgacaaaggcatggtayttcaagtgctcaaaacaaagcttcagttttagaagtaaccaygatttttgaagtgaaatacctgagtgtgtgtcttccagcacagtgttagttgttaaactacccaagccagctcttggcctgtacagacagccacagcttgtcacactggtaggactcrtatatgctcatgagctgaaaagatgtttgtgctcttcatcacacttgtgtctatttgtgcttgttcatgaggttctgga

SEQ ID NO: 50830 - DNA, 600 bp, Chicken  19866894298075_2
gcagcttttgctgcattcaatgacatcacaattatgctggttttgagctaaaacttctgtccttaaacaggaacagcttgcgtgaaacctcttatgctttccttctcatttcctttgattgttcctggactaaaattggttgaaatagtgaatatgttagggtagtgcatttttacaggctttgtgcctgggtttgcagctgagatattgtaggtagctcacattgttgagtgtggaaaatggatgaatgttattgaaaaccaagtcaagttgtgctctcctggtctggggggtatttrkcaatcctgtgatttgyggtaatggaattacagaaaaaagttattgacaaaggcatggtayttcaagtgctcaaaacaaagcttcagttttagaagtaaccaygatttttgaagtgaaatacctgagtgtgtgtcttccagcacagtgttagttgttaaactacccaagccagctcttggcctgtacagacagccacagcttgtcacactggtaggactcrtatatgctcatgagctgaaaagatgtttgtgctcttcatcacacttgtgtctatttgtgcttgttcatgaggttctggaa

SEQ ID NO: 50831 - DNA, 600 bp, Chicken  19866894298075_3
tcaatgacatcacaattatgctggttttgagctaaaacttctgtccttaaacaggaacagcttgcgtgaaacctcttatgctttccttctcatttcctttgattgttcctggactaaaattggttgaaatagtgaatatgttagggtagtgcatttttacaggctttgtgcctgggtttgcagctgagatattgtaggtagctcacattgttgagtgtggaaaatggatgaatgttattgaaaaccaagtcaagttgtgctctcctggtctggggggtatttrkcaatcctgtgatttgyggtaatggaattacagaaaaaagttattgacaaaggcatggtayttcaagtgctcaaaacaaagcttcagttttagaagtaaccaygatttttgaagtgaaatacctgagtgtgtgtcttccagcacagtgttagttgttaaactacccaagccagctcttggcctgtacagacagccacagcttgtcacactggtaggactcrtatatgctcatgagctgaaaagatgtttgtgctcttcatcacacttgtgtctatttgtgcttgttcatgaggttctggaagagatctggtcttgtt

SEQ ID NO: 50832 - DNA, 600 bp, Chicken  19866894298075_4
ccttaaacaggaacagcttgcgtgaaacctcttatgctttccttctcatttcctttgattgttcctggactaaaattggttgaaatagtgaatatgttagggtagtgcatttttacaggctttgtgcctgggtttgcagctgagatattgtaggtagctcacattgttgagtgtggaaaatggatgaatgttattgaaaaccaagtcaagttgtgctctcctggtctggggggtatttrkcaatcctgtgatttgyggtaatggaattacagaaaaaagttattgacaaaggcatggtayttcaagtgctcaaaacaaagcttcagttttagaagtaaccaygatttttgaagtgaaatacctgagtgtgtgtcttccagcacagtgttagttgttaaactacccaagccagctcttggcctgtacagacagccacagcttgtcacactggtaggactcrtatatgctcatgagctgaaaagatgtttgtgctcttcatcacacttgtgtctatttgtgcttgttcatgaggttctggaagagatctggtcttgttccaagtggttgcatgaattgtccctaaatggaagaagctgtggt

SEQ ID NO: 50833 - DNA, 600 bp, Chicken  19866894298075_5
ttctcatttcctttgattgttcctggactaaaattggttgaaatagtgaatatgttagggtagtgcatttttacaggctttgtgcctgggtttgcagctgagatattgtaggtagctcacattgttgagtgtggaaaatggatgaatgttattgaaaaccaagtcaagttgtgctctcctggtctggggggtatttrkcaatcctgtgatttgyggtaatggaattacagaaaaaagttattgacaaaggcatggtayttcaagtgctcaaaacaaagcttcagttttagaagtaaccaygatttttgaagtgaaatacctgagtgtgtgtcttccagcacagtgttagttgttaaactacccaagccagctcttggcctgtacagacagccacagcttgtcacactggtaggactcrtatatgctcatgagctgaaaagatgtttgtgctcttcatcacacttgtgtctatttgtgcttgttcatgaggttctggaagagatctggtcttgttccaagtggttgcatgaattgtccctaaatggaagaagctgtggttgacccatgcttactaggttcctggtacttcccatttttgat

SEQ ID NO: 50834 - DNA, 600 bp, Chicken  19866894298075_6
acattgttgagtgtggaaaatggatgaatgttattgaaaaccaagtcaagttgtgctctcctggtctggggggtatttrkcaatcctgtgatttgyggtaatggaattacagaaaaaagttattgacaaaggcatggtayttcaagtgctcaaaacaaagcttcagttttagaagtaaccaygatttttgaagtgaaatacctgagtgtgtgtcttccagcacagtgttagttgttaaactacccaagccagctcttggcctgtacagacagccacagcttgtcacactggtaggactcrtatatgctcatgagctgaaaagatgtttgtgctcttcatcacacttgtgtctatttgtgcttgttcatgaggttctggaagagatctggtcttgttccaagtggttgcatgaattgtccctaaatggaagaagctgtggttgacccatgcttactaggttcctggtacttcccatttttgatgaaggcctttatagtcccagacttgaactacttgctgctccaaaaggacactgcagcacatctcccagcctgtagtcagagatgtttcttgtgaacatcaggaaccatggtaacatcc

SEQ ID NO: 50835 - DNA, 600 bp, Chicken  19866894298084_1
aggctgtgcttggagggctgacgccttcctgggataccggtgggggggtggctgtgcacagcagctgtgccccctgcagcctcagggtgggctggaatcggtcagcacttccagctttggaaactccaattacatggaataagtttccctttggaaagggaagggcgacccactgccccagagggaagctggcagtgtggcacatgtgccaacagcacacacgtgggctcctgatctgagtgcattcacttcctcaggctgcaggaacagctctgctcctccagcagtttgcttgctgcrggcagcaggtctgcaagctgaaggctggaatatgctgcttartgcaatgggcaggagaagaaaacaggttttatggataaaggcttgtgctgagctcagctgaaagaactgctgctgtcccagctggtgggcagcgcctgtttgctgtgctgatgctgcactaagcttggatgtgatggccctaacactgctatggtgatgcttccatactgcagagctgatgcggttgtgatttctggaaggaagctggcccggcagatcagacaagaagcccgccatgaagttgaacagtgggtagca

SEQ ID NO: 50836 - DNA, 600 bp, Chicken  19866894298084_2
ggggggtggctgtgcacagcagctgtgccccctgcagcctcagggtgggctggaatcggtcagcacttccagctttggaaactccaattacatggaataagtttccctttggaaagggaagggcgacccactgccccagagggaagctggcagtgtggcacatgtgccaacagcacacacgtgggctcctgatctgagtgcattcacttcctcaggctgcaggaacagctctgctcctccagcagtttgcttgctgcrggcagcaggtctgcaagctgaaggctggaatatgctgcttartgcaatgggcaggagaagaaaacaggttttatggataaaggcttgtgctgagctcagctgaaagaactgctgctgtcccagctggtgggcagcgcctgtttgctgtgctgatgctgcactaagcttggatgtgatggccctaacactgctatggtgatgcttccatactgcagagctgatgcggttgtgatttctggaaggaagctggcccggcagatcagacaagaagcccgccatgaagttgaacagtgggtagcagctgggaacaagagacctcacctcagcgtggttctggttggt

SEQ ID NO: 50837 - DNA, 600 bp, Chicken  19866894298084_3
ttctggaaggaagctggcccggcagatcagacaagaagcccgccatgaagttgaacagtgggtagcagctgggaacaagagacctcacctcagcgtggttctggttggtgaaaatcctgcaagtcactcctatgtgctgaacaaaaccaaggcggctgctgatgtgggtaagtgtcgtgctctgcttgcaaagctgcagcaggtgagtgctgcttgttgcttttgctaggagtcctctgctggatactgggagggcattgaggattcattcacccagcagctttttgcctcagctgcatkggctcagtgcagagtttgctctgtctgccttccyagtagtgctgyggtgcagttaataggcacagctcacacgtgcttygtgctgcttcaatcctcccgggcaacgtcaggctctgcagcttggatttgtgggcttggtgggcctatgtagagcaccagcagggctttgatttgccttctttaattgactgttcaagatgcagtcatcattcagcacagtcacgttgtgctgtgatgctttcagtcttgcaagctgagatcctgcttggtttcccaagtgtattcctagagaaaacgtgc

SEQ ID NO: 50838 - DNA, 600 bp, Chicken  19866894298084_4
gaagcccgccatgaagttgaacagtgggtagcagctgggaacaagagacctcacctcagcgtggttctggttggtgaaaatcctgcaagtcactcctatgtgctgaacaaaaccaaggcggctgctgatgtgggtaagtgtcgtgctctgcttgcaaagctgcagcaggtgagtgctgcttgttgcttttgctaggagtcctctgctggatactgggagggcattgaggattcattcacccagcagctttttgcctcagctgcatkggctcagtgcagagtttgctctgtctgccttccyagtagtgctgyggtgcagttaataggcacagctcacacgtgcttygtgctgcttcaatcctcccgggcaacgtcaggctctgcagcttggatttgtgggcttggtgggcctatgtagagcaccagcagggctttgatttgccttctttaattgactgttcaagatgcagtcatcattcagcacagtcacgttgtgctgtgatgctttcagtcttgcaagctgagatcctgcttggtttcccaagtgtattcctagagaaaacgtgctgaaaaaggggcagggcacacagtggtttaattc

SEQ ID NO: 50839 - DNA, 600 bp, Chicken  19866894298084_5
tgaagttgaacagtgggtagcagctgggaacaagagacctcacctcagcgtggttctggttggtgaaaatcctgcaagtcactcctatgtgctgaacaaaaccaaggcggctgctgatgtgggtaagtgtcgtgctctgcttgcaaagctgcagcaggtgagtgctgcttgttgcttttgctaggagtcctctgctggatactgggagggcattgaggattcattcacccagcagctttttgcctcagctgcatkggctcagtgcagagtttgctctgtctgccttccyagtagtgctgyggtgcagttaataggcacagctcacacgtgcttygtgctgcttcaatcctcccgggcaacgtcaggctctgcagcttggatttgtgggcttggtgggcctatgtagagcaccagcagggctttgatttgccttctttaattgactgttcaagatgcagtcatcattcagcacagtcacgttgtgctgtgatgctttcagtcttgcaagctgagatcctgcttggtttcccaagtgtattcctagagaaaacgtgctgaaaaaggggcagggcacacagtggtttaattccatgctgggtt

SEQ ID NO: 50840 - DNA, 600 bp, Chicken  19866894298084_6
agacctcacctcagcgtggttctggttggtgaaaatcctgcaagtcactcctatgtgctgaacaaaaccaaggcggctgctgatgtgggtaagtgtcgtgctctgcttgcaaagctgcagcaggtgagtgctgcttgttgcttttgctaggagtcctctgctggatactgggagggcattgaggattcattcacccagcagctttttgcctcagctgcatkggctcagtgcagagtttgctctgtctgccttccyagtagtgctgyggtgcagttaataggcacagctcacacgtgcttygtgctgcttcaatcctcccgggcaacgtcaggctctgcagcttggatttgtgggcttggtgggcctatgtagagcaccagcagggctttgatttgccttctttaattgactgttcaagatgcagtcatcattcagcacagtcacgttgtgctgtgatgctttcagtcttgcaagctgagatcctgcttggtttcccaagtgtattcctagagaaaacgtgctgaaaaaggggcagggcacacagtggtttaattccatgctgggttctgtgctgttaaaacctttggagctgagattttg

SEQ ID NO: 50841 - DNA, 600 bp, Chicken  19866894298096_1
ggcccaagactaccccttatggagcaacttaagagggtagagtgagagagtaaaggtaacttgagaaatatttctggaaatactgcctcggtatgtttgttgtggcagttcattgattcaaaatctaaggagcctttctaagttataggcaaagcctcccctttaagagaatccacaaactcagttagagtaagcttgtcattgcacttcaaaagcccaaattacattgaaggtcaagaactgcacacatgaaacttaactggaacctttgcctaggaagatctgcagaattactgtgcrcatyagctgtttggygatggcctctgtyagattgagttctgaccgtgttactcaggagaaagtagagctgggatctcaggaagtcattgggactgaagtggtcacttggacttttcctgccacarcactatgcttaacctgttmctgacagatatctgattaaactgtactaaaatgttccacagctcagacaaatctatgtagaaaaacacacagaacagcatacctcctttctacctttcttccatttttattgctttgtaaagwaatacattttcttctctatcaggactttggttt

SEQ ID NO: 50842 - DNA, 600 bp, Chicken  19866894298096_2
caagactaccccttatggagcaacttaagagggtagagtgagagagtaaaggtaacttgagaaatatttctggaaatactgcctcggtatgtttgttgtggcagttcattgattcaaaatctaaggagcctttctaagttataggcaaagcctcccctttaagagaatccacaaactcagttagagtaagcttgtcattgcacttcaaaagcccaaattacattgaaggtcaagaactgcacacatgaaacttaactggaacctttgcctaggaagatctgcagaattactgtgcrcatyagctgtttggygatggcctctgtyagattgagttctgaccgtgttactcaggagaaagtagagctgggatctcaggaagtcattgggactgaagtggtcacttggacttttcctgccacarcactatgcttaacctgttmctgacagatatctgattaaactgtactaaaatgttccacagctcagacaaatctatgtagaaaaacacacagaacagcatacctcctttctacctttcttccatttttattgctttgtaaagwaatacattttcttctctatcaggactttggtttgtaa

SEQ ID NO: 50843 - DNA, 600 bp, Chicken  19866894298096_3
cttatggagcaacttaagagggtagagtgagagagtaaaggtaacttgagaaatatttctggaaatactgcctcggtatgtttgttgtggcagttcattgattcaaaatctaaggagcctttctaagttataggcaaagcctcccctttaagagaatccacaaactcagttagagtaagcttgtcattgcacttcaaaagcccaaattacattgaaggtcaagaactgcacacatgaaacttaactggaacctttgcctaggaagatctgcagaattactgtgcrcatyagctgtttggygatggcctctgtyagattgagttctgaccgtgttactcaggagaaagtagagctgggatctcaggaagtcattgggactgaagtggtcacttggacttttcctgccacarcactatgcttaacctgttmctgacagatatctgattaaactgtactaaaatgttccacagctcagacaaatctatgtagaaaaacacacagaacagcatacctcctttctacctttcttccatttttattgctttgtaaagwaatacattttcttctctatcaggactttggtttgtaaaacatcctcat

SEQ ID NO: 50844 - DNA, 600 bp, Chicken  19866894298096_4
ttaagagggtagagtgagagagtaaaggtaacttgagaaatatttctggaaatactgcctcggtatgtttgttgtggcagttcattgattcaaaatctaaggagcctttctaagttataggcaaagcctcccctttaagagaatccacaaactcagttagagtaagcttgtcattgcacttcaaaagcccaaattacattgaaggtcaagaactgcacacatgaaacttaactggaacctttgcctaggaagatctgcagaattactgtgcrcatyagctgtttggygatggcctctgtyagattgagttctgaccgtgttactcaggagaaagtagagctgggatctcaggaagtcattgggactgaagtggtcacttggacttttcctgccacarcactatgcttaacctgttmctgacagatatctgattaaactgtactaaaatgttccacagctcagacaaatctatgtagaaaaacacacagaacagcatacctcctttctacctttcttccatttttattgctttgtaaagwaatacattttcttctctatcaggactttggtttgtaaaacatcctcatatccagtcaacgt

SEQ ID NO: 50845 - DNA, 600 bp, Chicken  19866894298096_5
taaggagcctttctaagttataggcaaagcctcccctttaagagaatccacaaactcagttagagtaagcttgtcattgcacttcaaaagcccaaattacattgaaggtcaagaactgcacacatgaaacttaactggaacctttgcctaggaagatctgcagaattactgtgcrcatyagctgtttggygatggcctctgtyagattgagttctgaccgtgttactcaggagaaagtagagctgggatctcaggaagtcattgggactgaagtggtcacttggacttttcctgccacarcactatgcttaacctgttmctgacagatatctgattaaactgtactaaaatgttccacagctcagacaaatctatgtagaaaaacacacagaacagcatacctcctttctacctttcttccatttttattgctttgtaaagwaatacattttcttctctatcaggactttggtttgtaaaacatcctcatatccagtcaacgtgaagtttgacaaagtaattaaagcagagaaacatccagtagactttgaaacactatcatatacagaaatggcctgaagggaagctgtcttttctggc

SEQ ID NO: 50846 - DNA, 600 bp, Chicken  19866894298096_6
ataggcaaagcctcccctttaagagaatccacaaactcagttagagtaagcttgtcattgcacttcaaaagcccaaattacattgaaggtcaagaactgcacacatgaaacttaactggaacctttgcctaggaagatctgcagaattactgtgcrcatyagctgtttggygatggcctctgtyagattgagttctgaccgtgttactcaggagaaagtagagctgggatctcaggaagtcattgggactgaagtggtcacttggacttttcctgccacarcactatgcttaacctgttmctgacagatatctgattaaactgtactaaaatgttccacagctcagacaaatctatgtagaaaaacacacagaacagcatacctcctttctacctttcttccatttttattgctttgtaaagwaatacattttcttctctatcaggactttggtttgtaaaacatcctcatatccagtcaacgtgaagtttgacaaagtaattaaagcagagaaacatccagtagactttgaaacactatcatatacagaaatggcctgaagggaagctgtcttttctggctccttctgtgatgtctgtg

SEQ ID NO: 50847 - DNA, 600 bp, Chicken  19866894298096_7
tttgcctaggaagatctgcagaattactgtgcrcatyagctgtttggygatggcctctgtyagattgagttctgaccgtgttactcaggagaaagtagagctgggatctcaggaagtcattgggactgaagtggtcacttggacttttcctgccacarcactatgcttaacctgttmctgacagatatctgattaaactgtactaaaatgttccacagctcagacaaatctatgtagaaaaacacacagaacagcatacctcctttctacctttcttccatttttattgctttgtaaagwaatacattttcttctctatcaggactttggtttgtaaaacatcctcatatccagtcaacgtgaagtttgacaaagtaattaaagcagagaaacatccagtagactttgaaacactatcatatacagaaatggcctgaagggaagctgtcttttctggctccttctgtgatgtctgtgtaggtaatatatctgaaaaagaagacatttattatactattttaaataaattattgctgtgtgaacccccaagccttttccagtgagtgacatgtagctaagctgctgtatagaacatggaaa

SEQ ID NO: 50848 - DNA, 600 bp, Chicken  19866894298098_1
ttcttctcagaaagagcggtgatgcatcggcacagactgcccagggggtggggggagtcaccctccatggaggggctgatggaaagaggaggtgtggcactgagggatgtggtttagtggcaatattggtggtaggaaaatgaccttagaagacttttccaacctgaacgattctatgatttgcaagcagtctttctgcagactattttttgcagaccttttagcaatcacagtcatatgactctcatttgcttgcagaaatttcaccagcaactctatttcttccattgaaaaagaagygtggagggaatacccgtgggctgagcacttgtaagtattcattttaaatgtcaggagttcagatagtttcaatccagacattatttctctgagctgagggtgygagraacacaagcacgcacacaaagcatttccacgtgagyttggagctgagctgctcagcaaggagggatgagaagccccctaacttccatgagtggtcaaaatgctctgagctatggggaaggctaatggtgccagtcagacagggccatccctgtgcctaattaatcagtaatcaggatacagctggcttcagca

SEQ ID NO: 50849 - DNA, 590 bp, Chicken  19866894298098_2
gggatgtggtttagtggcaatattggtggtaggaaaatgaccttagaagacttttccaacctgaacgattctatgatttgcaagcagtctttctgcagactattttttgcagaccttttagcaatcacagtcatatgactctcatttgcttgcagaaatttcaccagcaactctatttcttccattgaaaaagaagygtggagggaatacccgtgggctgagcacttgtaagtattcattttaaatgtcaggagttcagatagtttcaatccagacattatttctctgagctgagggtgygagraacacaagcacgcacacaaagcatttccacgtgagyttggagctgagctgctcagcaaggagggatgagaagccccctaacttccatgagtggtcaaaatgctctgagctatggggaaggctaatggtgccagtcagacagggccatccctgtgcctaattaatcagtaatcaggatacagctggcttcagcagctcggggggagtgcctcctcctcctggtgtagcagtaaacgactgtttgtttcattgcagaattctccaggacaatgatctgagggcggtga

SEQ ID NO: 50850 - DNA, 586 bp, Chicken  19866894298098_3
tgtggtttagtggcaatattggtggtaggaaaatgaccttagaagacttttccaacctgaacgattctatgatttgcaagcagtctttctgcagactattttttgcagaccttttagcaatcacagtcatatgactctcatttgcttgcagaaatttcaccagcaactctatttcttccattgaaaaagaagygtggagggaatacccgtgggctgagcacttgtaagtattcattttaaatgtcaggagttcagatagtttcaatccagacattatttctctgagctgagggtgygagraacacaagcacgcacacaaagcatttccacgtgagyttggagctgagctgctcagcaaggagggatgagaagccccctaacttccatgagtggtcaaaatgctctgagctatggggaaggctaatggtgccagtcagacagggccatccctgtgcctaattaatcagtaatcaggatacagctggcttcagcagctcggggggagtgcctcctcctcctggtgtagcagtaaacgactgtttgtttcattgcagaattctccaggacaatgatctgagggcggtga

SEQ ID NO: 50851 - DNA, 550 bp, Chicken  19866894298098_4
ccttagaagacttttccaacctgaacgattctatgatttgcaagcagtctttctgcagactattttttgcagaccttttagcaatcacagtcatatgactctcatttgcttgcagaaatttcaccagcaactctatttcttccattgaaaaagaagygtggagggaatacccgtgggctgagcacttgtaagtattcattttaaatgtcaggagttcagatagtttcaatccagacattatttctctgagctgagggtgygagraacacaagcacgcacacaaagcatttccacgtgagyttggagctgagctgctcagcaaggagggatgagaagccccctaacttccatgagtggtcaaaatgctctgagctatggggaaggctaatggtgccagtcagacagggccatccctgtgcctaattaatcagtaatcaggatacagctggcttcagcagctcggggggagtgcctcctcctcctggtgtagcagtaaacgactgtttgtttcattgcagaattctccaggacaatgatctgagggcggtga

SEQ ID NO: 50852 - DNA, 600 bp, Chicken  19866894298104_1
aaagctttgttatttctttactatattttgggggggggaagggggggccaaattcaggtgacgatgacaagagctgtcagctcttccagttctaacagctggcttcagttgtaaggaacgagtgaaaggtctccctaggtcagtgaagattctgggagggaggatgcctgtgaactgctggagaacttgttatctggcaacagcaagtctactgactggcttcagatgtggttatctagcaaaaaagccacagggagttatcttcacaggggaagtcacttttactttaggcttcaaaartgcaaaaactaactgaactttgagggtgtgtctgcaaacgggagtcaagttcttactaaaggctcctagtgaggacactcaatacagctcaactgcaggtctcttggtcaacaagtctggtctttcaaatcagagcccactgcgcttccatattaygtgatgtctcttgccagagggtatatttactgtattttgtttaggagtaacttgaaaaaraccaaccaaacaaaacttgctccacacagcagttatttggcaccatggcctgagggcaacaaatttactcttgggtaggatctt

SEQ ID NO: 50853 - DNA, 600 bp, Chicken  19866894298104_2
agggaggatgcctgtgaactgctggagaacttgttatctggcaacagcaagtctactgactggcttcagatgtggttatctagcaaaaaagccacagggagttatcttcacaggggaagtcacttttactttaggcttcaaaartgcaaaaactaactgaactttgagggtgtgtctgcaaacgggagtcaagttcttactaaaggctcctagtgaggacactcaatacagctcaactgcaggtctcttggtcaacaagtctggtctttcaaatcagagcccactgcgcttccatattaygtgatgtctcttgccagagggtatatttactgtattttgtttaggagtaacttgaaaaaraccaaccaaacaaaacttgctccacacagcagttatttggcaccatggcctgagggcaacaaatttactcttgggtaggatcttcttcaatttgcaaacaggtttcagcactgtcccagacagaagttgggcagacaagacctcaacccacacaatcagcacaaagggaattacctgcaagctgtgtcacttccttcatgtttccatccttgaccagagctgctgctcctaaaatgacaa

SEQ ID NO: 50854 - DNA, 600 bp, Chicken  19866894298104_3
tggcttcagatgtggttatctagcaaaaaagccacagggagttatcttcacaggggaagtcacttttactttaggcttcaaaartgcaaaaactaactgaactttgagggtgtgtctgcaaacgggagtcaagttcttactaaaggctcctagtgaggacactcaatacagctcaactgcaggtctcttggtcaacaagtctggtctttcaaatcagagcccactgcgcttccatattaygtgatgtctcttgccagagggtatatttactgtattttgtttaggagtaacttgaaaaaraccaaccaaacaaaacttgctccacacagcagttatttggcaccatggcctgagggcaacaaatttactcttgggtaggatcttcttcaatttgcaaacaggtttcagcactgtcccagacagaagttgggcagacaagacctcaacccacacaatcagcacaaagggaattacctgcaagctgtgtcacttccttcatgtttccatccttgaccagagctgctgctcctaaaatgacaaaagaggttcctgtcaatgttccatcttggagctttgggatgaaaatggacagtggagagc

SEQ ID NO: 50855 - DNA, 600 bp, Chicken  19866894298107_1
aaacgcgtcacaaaaaactcacaatatatcaagtggtaaatggcaatatgcagacaaacaccatttcaaatcctacctccaaatcccttcaactcccctggttcttttcatttttttaagatttatttcttctcaacagcatccaaaaatgcatacaaagaagccataaattaacatgcctgtatcatcagcagtactgtacttctggaaacacatgcataaagtaactttacgtgtaaattttaatcatcttatttaacacctacagttaaaacactctgtaagcactaaatcacttaygcaagtaggaaactaataactataccttcttcagcgaagaatttctctataggtcctacaaactggttgatctcctgtagctcttcattgctaatttctgggtaagggaaaacttcttcctaaaataacagacgtttgttttaattaaaagaaaaaaaagcatcactaatgcaattgaaagaaaagctcaagaaatcctttttatttgaaatccttcaaataccaggctctaaaagctgtgaaaattaaggactgtggaaagtgttcagaaattttatctgatgcaatgaatgggacttg

SEQ ID NO: 50856 - DNA, 600 bp, Chicken  19866894298107_2
atttctgggtaagggaaaacttcttcctaaaataacagacgtttgttttaattaaaagaaaaaaaagcatcactaatgcaattgaaagaaaagctcaagaaatcctttttatttgaaatccttcaaataccaggctctaaaagctgtgaaaattaaggactgtggaaagtgttcagaaattttatctgatgcaatgaatgggacttgattaagctgcgtaccaaagcatatcagagacactgagcagaaaacagaaacttcaagaattcttagaatacaaaatcctttgttaaccatgartttagcaacataatcatagaatcatagaatggcctggattgaaaaggaccacaatgatcatcaagtttcaaccccctgctacgtgcagggttgccaaccaccagaccaggctgcacagacccacatccagcctggacttgaatgcctccagggatggagaatccacaacctccttgggcaacctgttcagtgtgtcaccatcctctgtatgaaaaacttcctcctaatatccaacctaagcctccccttttaaaaccatttttaaaaccattcccccttgtcctatgactatccaccctt

SEQ ID NO: 50857 - DNA, 552 bp, Chicken  19866894298108_1
aagaaaatgagccaattgctgcattcagcataatctttgcaagattgttttaaagcagtgttcagcttaccagatcatctgcatgtgctcctacttgaagcactgggccaaagagccagggcaggccaagcacctcctctccaagcacatcagcctctgcaacacagacaaatgttcaccagagccaagggttgccttctgatgtactctgggcacaggccagcaagggtcagacaaattcctgttgctgctgaaatggccaagtcagctggaaattgggagggggacaacaaaactagyctaagactcctgcagaggttgcaggwgacccatttgyacagtgtttgagtccagctggcagggaacacacagccctggtgtgccactgtctcattcctacagggacagcttccagagaggagctacacttgaaataaattaaaccaaaggaaaagtgagagcgctgaaaaactttctagctagttggcctgcacaatacagtagctttgtaatagctcttgcagggtaataaatgtgcttcaactaatacca

SEQ ID NO: 50858 - DNA, 526 bp, Chicken  19866894298108_2
agcataatctttgcaagattgttttaaagcagtgttcagcttaccagatcatctgcatgtgctcctacttgaagcactgggccaaagagccagggcaggccaagcacctcctctccaagcacatcagcctctgcaacacagacaaatgttcaccagagccaagggttgccttctgatgtactctgggcacaggccagcaagggtcagacaaattcctgttgctgctgaaatggccaagtcagctggaaattgggagggggacaacaaaactagyctaagactcctgcagaggttgcaggwgacccatttgyacagtgtttgagtccagctggcagggaacacacagccctggtgtgccactgtctcattcctacagggacagcttccagagaggagctacacttgaaataaattaaaccaaaggaaaagtgagagcgctgaaaaactttctagctagttggcctgcacaatacagtagctttgtaatagctcttgcagggtaataaatgtgcttcaactaatacca

SEQ ID NO: 50859 - DNA, 515 bp, Chicken  19866894298108_3
tgcaagattgttttaaagcagtgttcagcttaccagatcatctgcatgtgctcctacttgaagcactgggccaaagagccagggcaggccaagcacctcctctccaagcacatcagcctctgcaacacagacaaatgttcaccagagccaagggttgccttctgatgtactctgggcacaggccagcaagggtcagacaaattcctgttgctgctgaaatggccaagtcagctggaaattgggagggggacaacaaaactagyctaagactcctgcagaggttgcaggwgacccatttgyacagtgtttgagtccagctggcagggaacacacagccctggtgtgccactgtctcattcctacagggacagcttccagagaggagctacacttgaaataaattaaaccaaaggaaaagtgagagcgctgaaaaactttctagctagttggcctgcacaatacagtagctttgtaatagctcttgcagggtaataaatgtgcttcaactaatacca

SEQ ID NO: 50860 - DNA, 531 bp, Chicken  19866894298111_1
tccttctaggagatccctatctttttgaacaggggagcccagaattgcgcactatattctaaatgtgacttcaccaaggcagagtagagggggaggatcaccctccccctccacctgctggccacgctctttttaatgcatcccaggatccaattggccttcttggccacaaggacacactgctggctcatggccaacctgttgtccactgggacctgtaggtccctctctgcagagctcctcttcagcaggtcatcccctaacctgtactgatgcatgcagttattcctccccaggtgrcttttgtcagcttgggtgtgggtcttgagatattcaaactcacagcagtacatgcactttctagtcaggatcatggtcttatcatacttggtcctgtgcagaggcattgtaatagggagtcactgtggcaaagccttagcgtatgagtgaagtaaactcataaatcaagagaaaaggagaattatcctttaggatcctgtttagattactcgtccagtgcacacaggcact

SEQ ID NO: 50861 - DNA, 600 bp, Chicken  19866894298113_1
cctctctggtgcctgaccaccctttcagagaagataataatcttcaatttgaaatgtttatcttattcttccatggaatacgaacattttcttaccaaagcgtaaagaaaacagaagctcttcaagcataccaaatcaccattcgcaaaggaaggttttctttatctcactcaaactccagacatgggaattaagtcacttaaaaaaggaattttgatgtcattataaaaatatactcttttctgttggggaaagttcataaacttggagtttttaaagcactgctaacatcagataaamatgtgtgaggagaataatcctgggctcagctgcttgtttgttattcttcacttctgacacttcatgatcccacacagactaggcagtaattttatcagagctaattctaaccagataatcaaacaaattgtgagcaaaagcactgccactgcagtaccccatcaygtcagaaacagcattccccttttgctttctctgaaccttccttctgtctcccatctctgtcctctacatcctgctaccactctaaacatttaacacgacaaacttggtaatcttttagtagaacaacttctgtat

SEQ ID NO: 50862 - DNA, 600 bp, Chicken  19866894298113_2
ctcactcaaactccagacatgggaattaagtcacttaaaaaaggaattttgatgtcattataaaaatatactcttttctgttggggaaagttcataaacttggagtttttaaagcactgctaacatcagataaamatgtgtgaggagaataatcctgggctcagctgcttgtttgttattcttcacttctgacacttcatgatcccacacagactaggcagtaattttatcagagctaattctaaccagataatcaaacaaattgtgagcaaaagcactgccactgcagtaccccatcaygtcagaaacagcattccccttttgctttctctgaaccttccttctgtctcccatctctgtcctctacatcctgctaccactctaaacatttaacacgacaaacttggtaatcttttagtagaacaacttctgtattttaaagagagagataagctttcaggcacacaagtccttctttggatataaaacaggagcagcaaacttcagagctaaatcctactttctctgtatttaattagatatgtaaatcatttcagacagctgagagtagttgagtagtttgaacctctggaatagcat

SEQ ID NO: 50863 - DNA, 600 bp, Chicken  19866894298121_1
tctgacacaaacctgggaagagacgtctgccttcagcacactgctcatctctcttaacttccctgaaagtgcagctagctcttttctcctccttacttcagcaatggcttctccagtgctggtgaaggggcaaaggagctcagcatcgttgccatcaggacccaggctcgctggctctgttccacatctgggttcttccatgtctgggtggccacttggctgaagatttcgttgcacagagccttgttgttcaaagctctcccagcaatgtagttgcccagaaggacctcctgccagtcrtggagattcctgtcaccaatgaaccgcaaaatctagaagtattcagaggggaaaagaaacagctttagctgcagctttctggcttgagctgtgttgtgaagcagcaacctggggagtagamaccggtgtgtttgtgagcctcagagcacccagcactcagatctggatctgctctcaggttctgtgcactattgaagttctggggaatttgggaagcagcgctcatagacagggcaggaccctgactacargtcagaacgtcttcactttattcttcaggctattcttagttatgctttt

SEQ ID NO: 50864 - DNA, 600 bp, Chicken  19866894298121_2
gtgaaggggcaaaggagctcagcatcgttgccatcaggacccaggctcgctggctctgttccacatctgggttcttccatgtctgggtggccacttggctgaagatttcgttgcacagagccttgttgttcaaagctctcccagcaatgtagttgcccagaaggacctcctgccagtcrtggagattcctgtcaccaatgaaccgcaaaatctagaagtattcagaggggaaaagaaacagctttagctgcagctttctggcttgagctgtgttgtgaagcagcaacctggggagtagamaccggtgtgtttgtgagcctcagagcacccagcactcagatctggatctgctctcaggttctgtgcactattgaagttctggggaatttgggaagcagcgctcatagacagggcaggaccctgactacargtcagaacgtcttcactttattcttcaggctattcttagttatgcttttgcccaagaacaaaatcttagtcagaatacttccccttctttgagcatcagagctcagatccacgagcaaattactgcaggcycattacagtgtctgagcccacaggctgcctggctgtaca

SEQ ID NO: 50865 - DNA, 600 bp, Chicken  19866894298121_3
caaagctctcccagcaatgtagttgcccagaaggacctcctgccagtcrtggagattcctgtcaccaatgaaccgcaaaatctagaagtattcagaggggaaaagaaacagctttagctgcagctttctggcttgagctgtgttgtgaagcagcaacctggggagtagamaccggtgtgtttgtgagcctcagagcacccagcactcagatctggatctgctctcaggttctgtgcactattgaagttctggggaatttgggaagcagcgctcatagacagggcaggaccctgactacargtcagaacgtcttcactttattcttcaggctattcttagttatgcttttgcccaagaacaaaatcttagtcagaatacttccccttctttgagcatcagagctcagatccacgagcaaattactgcaggcycattacagtgtctgagcccacaggctgcctggctgtacaaacrggtaaatgaaattgatgctcagctgatcctcgtgaagagctcaggcagtcagacataaggaagcactgactgctgaatggtaaactgactttggtgtagctaacgctgtgccaagtagcatgaggt

SEQ ID NO: 50866 - DNA, 600 bp, Chicken  19866894298121_4
cttgagctgtgttgtgaagcagcaacctggggagtagamaccggtgtgtttgtgagcctcagagcacccagcactcagatctggatctgctctcaggttctgtgcactattgaagttctggggaatttgggaagcagcgctcatagacagggcaggaccctgactacargtcagaacgtcttcactttattcttcaggctattcttagttatgcttttgcccaagaacaaaatcttagtcagaatacttccccttctttgagcatcagagctcagatccacgagcaaattactgcaggcycattacagtgtctgagcccacaggctgcctggctgtacaaacrggtaaatgaaattgatgctcagctgatcctcgtgaagagctcaggcagtcagacataaggaagcactgactgctgaatggtaaactgactttggtgtagctaacgctgtgccaagtagcatgaggtgtgctatgctatgctcaaccaactcactgaagcaatgatttrggttcttggccatgcacattaatttaacagcatgtagttctcagagggattaatgggtttactctttttacagtttcattctgttgtca

SEQ ID NO: 50867 - DNA, 600 bp, Chicken  19866894298121_5
gtgtgtttgtgagcctcagagcacccagcactcagatctggatctgctctcaggttctgtgcactattgaagttctggggaatttgggaagcagcgctcatagacagggcaggaccctgactacargtcagaacgtcttcactttattcttcaggctattcttagttatgcttttgcccaagaacaaaatcttagtcagaatacttccccttctttgagcatcagagctcagatccacgagcaaattactgcaggcycattacagtgtctgagcccacaggctgcctggctgtacaaacrggtaaatgaaattgatgctcagctgatcctcgtgaagagctcaggcagtcagacataaggaagcactgactgctgaatggtaaactgactttggtgtagctaacgctgtgccaagtagcatgaggtgtgctatgctatgctcaaccaactcactgaagcaatgatttrggttcttggccatgcacattaatttaacagcatgtagttctcagagggattaatgggtttactctttttacagtttcattctgttgtcagggagtaaccatcacgtttttaagaamtgtatttcacatccac

SEQ ID NO: 50868 - DNA, 600 bp, Chicken  19866894298121_6
tgcttttgcccaagaacaaaatcttagtcagaatacttccccttctttgagcatcagagctcagatccacgagcaaattactgcaggcycattacagtgtctgagcccacaggctgcctggctgtacaaacrggtaaatgaaattgatgctcagctgatcctcgtgaagagctcaggcagtcagacataaggaagcactgactgctgaatggtaaactgactttggtgtagctaacgctgtgccaagtagcatgaggtgtgctatgctatgctcaaccaactcactgaagcaatgatttrggttcttggccatgcacattaatttaacagcatgtagttctcagagggattaatgggtttactctttttacagtttcattctgttgtcagggagtaaccatcacgtttttaagaamtgtatttcacatccacagagaggaggaggttatgctgtcctccctgtgccaacactacagactgagggtgtggttccaggtgtagttttcttgatgacaaagtccctgctttgtcacagcctttatacaacagttcactgtcccctgttgyatattgcatggatttaactgtacgtctgaggga

SEQ ID NO: 50869 - DNA, 600 bp, Chicken  19866894298121_7
cctggctgtacaaacrggtaaatgaaattgatgctcagctgatcctcgtgaagagctcaggcagtcagacataaggaagcactgactgctgaatggtaaactgactttggtgtagctaacgctgtgccaagtagcatgaggtgtgctatgctatgctcaaccaactcactgaagcaatgatttrggttcttggccatgcacattaatttaacagcatgtagttctcagagggattaatgggtttactctttttacagtttcattctgttgtcagggagtaaccatcacgtttttaagaamtgtatttcacatccacagagaggaggaggttatgctgtcctccctgtgccaacactacagactgagggtgtggttccaggtgtagttttcttgatgacaaagtccctgctttgtcacagcctttatacaacagttcactgtcccctgttgyatattgcatggatttaactgtacgtctgagggactaccaatatgttcactataaaccagatggtggggaaaaaaatctgggttaaattaaacatttttgtgattgagggagaagccaggtctcccttacgctgtcatggctactgaatc

SEQ ID NO: 50870 - DNA, 600 bp, Chicken  19866894298121_8
tatgctcaaccaactcactgaagcaatgatttrggttcttggccatgcacattaatttaacagcatgtagttctcagagggattaatgggtttactctttttacagtttcattctgttgtcagggagtaaccatcacgtttttaagaamtgtatttcacatccacagagaggaggaggttatgctgtcctccctgtgccaacactacagactgagggtgtggttccaggtgtagttttcttgatgacaaagtccctgctttgtcacagcctttatacaacagttcactgtcccctgttgyatattgcatggatttaactgtacgtctgagggactaccaatatgttcactataaaccagatggtggggaaaaaaatctgggttaaattaaacatttttgtgattgagggagaagccaggtctcccttacgctgtcatggctactgaatctggaatgctgtgaaactaaggcttrgcagtctgatttctatttgtccagccaagttttgagacaacatcacgaggcagttggctggaatcccatgggtctcacctattagttggtttatgtcacaccaagaacacaaccgccaggggctgt

SEQ ID NO: 50871 - DNA, 600 bp, Chicken  19866894298121_9
gaggttatgctgtcctccctgtgccaacactacagactgagggtgtggttccaggtgtagttttcttgatgacaaagtccctgctttgtcacagcctttatacaacagttcactgtcccctgttgyatattgcatggatttaactgtacgtctgagggactaccaatatgttcactataaaccagatggtggggaaaaaaatctgggttaaattaaacatttttgtgattgagggagaagccaggtctcccttacgctgtcatggctactgaatctggaatgctgtgaaactaaggcttrgcagtctgatttctatttgtccagccaagttttgagacaacatcacgaggcagttggctggaatcccatgggtctcacctattagttggtttatgtcacaccaagaacacaaccgccaggggctgtcagattgccccaatacctcgaaggaacagggatttattctgctctcttaacacaccatgtactgtatgatgagccaccaccagcatctggctgcccagagaggcggtggtgccccatccctgcagacagccgaggtcaggggatgggctgtgagcactgctggaacctgtgggt

SEQ ID NO: 50872 - DNA, 600 bp, Chicken  19866894298129_1
ttgcagctcttctcgtctgtttatttgcaggatgggttgtcctcccagtttaccagctgaggaagtgagcaaagatctgtttctgccaacattggcctgtgcaaagtgaatgtagggcattatttattaaagatcatacgagttcacttaaactggtgagagtcaaacaaggtggcattcaggcagctatcgttagtcaagatggtctaatgaaggtgactgtggggaaaccatatctcctattagaccatcgtgtatcatttggaaaaaagagacccagacattcttctgggtaattcraaagaatgagcctcctcctgtgcctgggtgaggcctccgggcatgcaatccttcaatccagttccattcactttgcttacaatgctccttcatagcataaatttgaggcttgtccaaatttaaatgattcctgggtgactctgagcaaggacaacccactaactgatagcaggcacaatctccaggtcactccattgaagggctgttgtagctatgattgaacctagtactgattaagaaactcttcctacagcatgctagaaaaaccatatgggtttgtggctgtcaagcatgattctt

SEQ ID NO: 50873 - DNA, 600 bp, Chicken  19866894298129_2
atctcagcaaacctccagcaattcacttaaaagagaataaatttaagttaaagaatattcccttacttaaaaagagaagaaaataaaatgcaatgtttgttaacaaacactgagttctcatgtaagatacgtgtctccagcatttaatattttatggtcttatgcaattacagactaataggggaagagagctcttctgagagatcttccttttctttttacaaataatttattgtcagctgcacagaataacctgcatttggatcatctaagtgcaatggaatgctttatctgtatatyaagaccattaaaaacatgaatatttaatctcattactccatcccaatggtgagttctcatctggtaacaaagaaatgtgacttctcttgccatctaaatcaacattaattgacctgaaagatttaaagaagaaaagaaaagaacacytcatttttcatctcttagatgatagcatctggactgacagaccaaaggtatggtcagagtcgtatttacatttacatcattcggtttgcttctttctttacactraatccttttatgatccaaagacatccatacattctaacactgaactgc

SEQ ID NO: 50874 - DNA, 600 bp, Chicken  19866894298129_3
tattttatggtcttatgcaattacagactaataggggaagagagctcttctgagagatcttccttttctttttacaaataatttattgtcagctgcacagaataacctgcatttggatcatctaagtgcaatggaatgctttatctgtatatyaagaccattaaaaacatgaatatttaatctcattactccatcccaatggtgagttctcatctggtaacaaagaaatgtgacttctcttgccatctaaatcaacattaattgacctgaaagatttaaagaagaaaagaaaagaacacytcatttttcatctcttagatgatagcatctggactgacagaccaaaggtatggtcagagtcgtatttacatttacatcattcggtttgcttctttctttacactraatccttttatgatccaaagacatccatacattctaacactgaactgctttgaagaaaaaacaaacaaacaaacacaaagctgtctttgttgttaagcaggaattgaggttgtgaaagatttgtttcagatttccaaagggttattgtaataagacaacctttagcttaagaatatatgtgagcggtggtcatgg

SEQ ID NO: 50875 - DNA, 600 bp, Chicken  19866894298129_4
cctgcatttggatcatctaagtgcaatggaatgctttatctgtatatyaagaccattaaaaacatgaatatttaatctcattactccatcccaatggtgagttctcatctggtaacaaagaaatgtgacttctcttgccatctaaatcaacattaattgacctgaaagatttaaagaagaaaagaaaagaacacytcatttttcatctcttagatgatagcatctggactgacagaccaaaggtatggtcagagtcgtatttacatttacatcattcggtttgcttctttctttacactraatccttttatgatccaaagacatccatacattctaacactgaactgctttgaagaaaaaacaaacaaacaaacacaaagctgtctttgttgttaagcaggaattgaggttgtgaaagatttgtttcagatttccaaagggttattgtaataagacaacctttagcttaagaatatatgtgagcggtggtcatggctaagttataaaagctcggatgataaatggcatcaaggtgtatcctggattattcaacacaggatacggatttgctatgaaggattttaaatcaagttagataaa

SEQ ID NO: 50876 - DNA, 600 bp, Chicken  19866894298131_1
atgcagcctccagcacagagcgagtcccaaaacaaaatcccacttcatgtcccctgagaacaaaccactccatactcagccattcacaacaccacctggaaagcggtcagtagccatctgaatatgaagaacagctcgtttttcaaactatcactgggtatttcctccaaaagacttatttacatgatttcagatataacactccagaagagcagtgcaattcgtgttttgagagatagaaagacttgctcatccttctgcacaagacaatattaacctgtctttctgaagagctcattmtttcaaaattcccccttgtcaagcaagtggatatttccagctgctaagtcgacttgctcccatccaacccaagagccctggtgtaggctaacagaagctccttggcgaggtgatttggtgcagacccacaagcaggaagcagaaagccataaaaatgctgtattattaattctttttttattaacttctcacatctcaacatatcaacagccacatatcaaaacagaacgactaaacggctgggagattatcccattctttacacccaaaaatttaaataagaaagcatcctgttctttc

SEQ ID NO: 50877 - DNA, 599 bp, Chicken  19866894298138_1
  misc_feature (1)..(114): n is any nucleotide
nnnnnnnnnnnnnnnnnnnnnnnnnnnnnnnnnnnnnnnnnnnnnnnnnnnnnnnnnnnnnnnnnnnnnnnnnnnnnnnnnnnnnnnnnnnnnnnnnnnnnnnnnnnnnnnnnncatttgagagagcatattctgttttcaactacttttgctggacaaggcaggagaggtgagaaatctttcccctgtccccattggtgcacattatgtggagctgcagtagccaatttctgtatgcagagagactgaggacctctttggcctccactgaagtcagaaaggaaaatagagatgactgayggctctcatgctatgtaggtgactcacttgtcattgcaatgcataagtgtagtgaggcatgacactaagcttaacttcgtttgtttctgtgcaagcctagagatttcagggactttttaaagtaacaacaagtgtgggatgcaagaccattaacagcctttggtggatcaagaaaggaagtctgaatcctcctgacctccagctcagtgcaacaggcaccaaagttccgtatgcctgcagagtcctgtaatgctgccattgctacatggcagtagcgtcccatggtgatcactgacgag

SEQ ID NO: 50878 - DNA, 600 bp, Chicken  19866894298140_1
caagcacttgcgggagatgatttatggctctgaaggcaggagctttgctgtcagtggggctcgctttgccagcagagacctgtacctgagcaggtcagcagaatggattgcattaaagaaagtacaatacattaatttggaaaataagaaggacagtgacgtgggggggaaagtgcatgcatgtgttatttatttctacaattagaagcagattgtgctctgcatttcaaccagataaaagtcttccttctttttaacagcagcaacaaaatctacttagtagcagtattaggtattatrttaaggctttggatttttattagcttttatttttatttcttattttgtcacaaagtrcactttacaaaacagaatgaaatctctgaagtgactatcagaacttggcctcataagcacaaaaccacaaacgcttggtgcataagcagcttttgacatgtcaaagctttctgcagactttaagtacacagctgcaggagagctttctgtgctacatccgtaaaggaaattgctgcccccattctggagatgggcagtagtgtgttcccagcgctgtgttatcagtgccagactgcaggcagg

SEQ ID NO: 50879 - DNA, 600 bp, Chicken  19866894298140_2
ggctcgctttgccagcagagacctgtacctgagcaggtcagcagaatggattgcattaaagaaagtacaatacattaatttggaaaataagaaggacagtgacgtgggggggaaagtgcatgcatgtgttatttatttctacaattagaagcagattgtgctctgcatttcaaccagataaaagtcttccttctttttaacagcagcaacaaaatctacttagtagcagtattaggtattatrttaaggctttggatttttattagcttttatttttatttcttattttgtcacaaagtrcactttacaaaacagaatgaaatctctgaagtgactatcagaacttggcctcataagcacaaaaccacaaacgcttggtgcataagcagcttttgacatgtcaaagctttctgcagactttaagtacacagctgcaggagagctttctgtgctacatccgtaaaggaaattgctgcccccattctggagatgggcagtagtgtgttcccagcgctgtgttatcagtgccagactgcaggcagggtgggtgttgtgagaagggcttctcagcagagtgtggacacagctgctggccatgca

SEQ ID NO: 50880 - DNA, 527 bp, Chicken  19866894298140_3
attcaagtacaatcattccaaaatgaaaggtccgtaatgccaatttctttaggcatattcttccaaaggtaaaactcaagacagcaattttcagcttctacttgcattgattccaaggaggatttggagtgctggttgcaagccctgtggttcacaatcaacagagccttagcaaaggttttcctagaccacctccaaagcagtggtctagagatggaatgttccatggcaactgtcagaaaaccttgctcttctctcatggtggaagtttcatgttgcatgacatctgcctcaccctgmgagagctattactactctgtaaaatcagttagcaacttaacactcagtaccgagaaaaaaaaaaaagctgtttatgtacttatcacaatgtattaaacaatgctttcatcaaaggctttattgctggggtgacctgccaccctcgcagggaaaagggtgtccaagacaggaaacatatgtgtaagatttccactgtcagtattaataagatcaggcaccaaacagta

SEQ ID NO: 50881 - DNA, 599 bp, Chicken  19866894298141_1
  misc_feature (1)..(183): n is any nucleotide
nnnnnnnnnnnnnnnnnnnnnnnnnnnnnnnnnnnnnnnnnnnnnnnnnnnnnnnnnnnnnnnnnnnnnnnnnnnnnnnnnnnnnnnnnnnnnnnnnnnnnnnnnnnnnnnnnnnnnnnnnnnnnnnnnnnnnnnnnnnnnnnnnnnnnnnnnnnnnnnnnnnnnnnnnnnnnnnnnnnnnnnctaagctgttaccaaagatccaaacccgtcacttacttatacagtgctgcgtagtacctatcggatacagtctgctgggagtccataacctggaacagcaacatcagggcctggacrctggtgctgaagttcacaaggtgcagaactttaaacaaggtgttcatttgttctttcactttctcatcaccratctcagcataagggtaagctctgttaaccccgctaagaagagcgctgagcattttggattcgacatcttttttcttaatgcagttccgaaaaaaacagaagtacaaagttatcagcttgttggccaatggtgtttcttcatgactgaggactatctgatttaaaaagcacatggcgtaatactgagtctttgcactgatgtttgtgcggtacaaaagtctctccac

SEQ ID NO: 50882 - DNA, 599 bp, Chicken  19866894298141_2
  misc_feature (1)..(111): n is any nucleotide
nnnnnnnnnnnnnnnnnnnnnnnnnnnnnnnnnnnnnnnnnnnnnnnnnnnnnnnnnnnnnnnnnnnnnnnnnnnnnnnnnnnnnnnnnnnnnnnnnnnnnnnnnnnnnnnctaagctgttaccaaagatccaaacccgtcacttacttatacagtgctgcgtagtacctatcggatacagtctgctgggagtccataacctggaacagcaacatcagggcctggacrctggtgctgaagttcacaaggtgcagaactttaaacaaggtgttcatttgttctttcactttctcatcaccratctcagcataagggtaagctctgttaaccccgctaagaagagcgctgagcattttggattcgacatcttttttcttaatgcagttccgaaaaaaacagaagtacaaagttatcagcttgttggccaatggtgtttcttcatgactgaggactatctgatttaaaaagcacatggcgtaatactgagtctttgcactgatgtttgtgcggtacaaaagtctctccacctcactgcacaccactcctttcatatttggatgcttgtgaagtaaagtctctagaagataagacgctttggt

SEQ ID NO: 50883 - DNA, 600 bp, Chicken  19866894298141_3
gcactgatgtttgtgcggtacaaaagtctctccacctcactgcacaccactcctttcatatttggatgcttgtgaagtaaagtctctagaagataagacgctttggtggctattttgttctgagggtctcccagtttatttaccagctggacaagcagaaatttctcctgctcaggcttgttgcagagaagctcgtgggcagctgccagcgctcgggtttttgttgctgtcagggaatcgtggctcagtgcttccaaggtctgcacaaactctgccaccaacagcttcagctggtgctcraagtaccatagtatcagccgtctgtccctggaatctctgttgccactcgacattttctctatgttgttaaatggacgctgtgagaaagaccacagcttgcgagtatctggtaagagatctgaaagaagcagctctctgaaagtatccagagccatgaggctctgttgcctgctgccctttttctttacgaggttcaccaggttctcaacaaagtggagactgtgaacagcgctgtcctggatgaggagggtcatggctgccatcctgtcagcgagggtacccgacgacacaacggttttc

SEQ ID NO: 50884 - DNA, 600 bp, Chicken  19866894298158_1
tgccaccttcccctttcttcctccttcccttctacactgtggatacacaccctgataatggtgtaagcagccctattgatatcctccctttcttctagcacttagactggggccctcagagttctatcaaaataagaaggatttcatatagatggcaaagacagatacactccctttctttcaggagagcatgtggtcccagatgctgcttgtagaaataacagtggttacaaggcctacacagtacaggaaggtatggctgcccaaggaattgtttttactgcagcaatgaaaacccartgtggaagccattaaggaagcaaggatgaattcaaggctgttgcccattgcaaagatagcatcttactgaagaatcacacccaagaatcaaaattgcagccctacctattaccgtagttatgagtgagaagttattctcctttctgtcaaacttcacttctacaatggataggcatgttgatgttgaatttaagaggattttataactggtggcaatacagctagtgcacacagactagattttcttcttgcttataacttgttgaagttcagtgaatttgaatttaatttgatggattt

SEQ ID NO: 50885 - DNA, 600 bp, Chicken  19866894298167_1
ccttcctatgctggctggagagacagagtttttaccgatcagctaatggcagtttttcatctaatgctgggagaaaagttatgagcaagaaaaactcattcaacctctttcatgtattccagcagtcaaagtgatcaggtaaagctacaaaatactaatcaccatttaattatacttcatcttacattttgcagttttagttggatgcaaaaaaagtaatcttaaggaaaagcacaatactatttttgacattttaagcatcaaaagtttccttgttacctcaacttctgaactccttaytgtgaatgccaaagaaagttcaattaaaaaaatattatcaaaagttatatccctactataaaatgtcatgcaatttgtcaccagagaagacgcttgtgaagacaaaagccataagatgtttagaatgctagtttatatagccaccttcctttcctagtgccccacatactaacaaaaaccaaaccaaatcaaccaacaaagtggtagcatgttccttgcaaaagtaattatgttgactggcagacgaaattatcttttacttttcactgcttccactcatacaagccaacagcttaattg

SEQ ID NO: 50886 - DNA, 600 bp, Chicken  19866894298170_1
aacaccagaaatggagggtttcttatttggcttttatagtttgttgaatgatggcattgctgggagaaaagtgtaataaagctcaaggaaacaggagaaaggctaaagggttttgtcagagctcttctccagacttcagaactgtttcctgggctgtgtgtcttaacacaagtccacaccatattaattctccaggcaatatggagcttccccatatgagctttagggaatgtagaaagcagtataaattctcactcccaattcccactgggccttttacaaactgtgtattaaataccyaccaagtttcattctgtttataatgctaatttttcagtctggttttctgcaccaggtaacgtaaaccagaartaacttctccctctacctttacgctcagctctcctaagagcagcatttgggtgaaggcaacagagaattaaaaggaattaatagctgcggtgaaaaacccgtttgcagttaactcagcctgctgaccctctgcagatgggccctggtgacccttcccaaaggccttaatgtaatcacttccatgatyggtgcaatgatagcattccagcagagctgcaccgatcagct

SEQ ID NO: 50887 - DNA, 600 bp, Chicken  19866894298170_2
gtaataaagctcaaggaaacaggagaaaggctaaagggttttgtcagagctcttctccagacttcagaactgtttcctgggctgtgtgtcttaacacaagtccacaccatattaattctccaggcaatatggagcttccccatatgagctttagggaatgtagaaagcagtataaattctcactcccaattcccactgggccttttacaaactgtgtattaaataccyaccaagtttcattctgtttataatgctaatttttcagtctggttttctgcaccaggtaacgtaaaccagaartaacttctccctctacctttacgctcagctctcctaagagcagcatttgggtgaaggcaacagagaattaaaaggaattaatagctgcggtgaaaaacccgtttgcagttaactcagcctgctgaccctctgcagatgggccctggtgacccttcccaaaggccttaatgtaatcacttccatgatyggtgcaatgatagcattccagcagagctgcaccgatcagctgtgctcatcagaactgtgagcttttcttgacacagttcagcaagagctgttcatattggctgtcgtaaagca

SEQ ID NO: 50888 - DNA, 499 bp, Chicken  19866894298170_3
aattcccactgggccttttacaaactgtgtattaaataccyaccaagtttcattctgtttataatgctaatttttcagtctggttttctgcaccaggtaacgtaaaccagaartaacttctccctctacctttacgctcagctctcctaagagcagcatttgggtgaaggcaacagagaattaaaaggaattaatagctgcggtgaaaaacccgtttgcagttaactcagcctgctgaccctctgcagatgggccctggtgacccttcccaaaggccttaatgtaatcacttccatgatyggtgcaatgatagcattccagcagagctgcaccgatcagctgtgctcatcagaactgtgagcttttcttgacacagttcagcaagagctgttcatattggctgtcgtaaagcacgagcatgaacaccttgcagagctgggggctgctacacagaacatctcgaagggatcatgaaataatgggcaggaaatgatgcatt

SEQ ID NO: 50889 - DNA, 600 bp, Chicken  19866894298171_1
tctcttaatcacctcaaccatcaccccatctcctttattcagtctctctcctgtttagtagcagacctagactgttcttaaaacccttttggttttgtttacacaagacaacacaagagaaagctgtcccttactttggactactaatgtgcaatctctgccttggttaaatttcagtcgcccactctaccacccttttccattcccttagtgtctcacctgtcatctcatagcctttccaaaatgctgcctgaccagctgtcatcttagtttccctgattccactgacccactagtccmctcacttcaccrgcatctctttgctccttttagaagaatctccagtgttagctctctaacacagaagtggacacacatgcaaagagacccattcaatcactcaataaataaataaaataaaaataaaaaatkaaaattaaaattaaaaaaattaaatattccacactagaaattagcattccattaagcggagagccaaaggtgttgtttgaccaaagaagccttctctgtgtttataatcttgacaataattatcccttctcaaactcagaactgtgccgccagtcagaacatgtgaat

SEQ ID NO: 50890 - DNA, 600 bp, Chicken  19866894298171_2
ctcaaccatcaccccatctcctttattcagtctctctcctgtttagtagcagacctagactgttcttaaaacccttttggttttgtttacacaagacaacacaagagaaagctgtcccttactttggactactaatgtgcaatctctgccttggttaaatttcagtcgcccactctaccacccttttccattcccttagtgtctcacctgtcatctcatagcctttccaaaatgctgcctgaccagctgtcatcttagtttccctgattccactgacccactagtccmctcacttcaccrgcatctctttgctccttttagaagaatctccagtgttagctctctaacacagaagtggacacacatgcaaagagacccattcaatcactcaataaataaataaaataaaaataaaaaatkaaaattaaaattaaaaaaattaaatattccacactagaaattagcattccattaagcggagagccaaaggtgttgtttgaccaaagaagccttctctgtgtttataatcttgacaataattatcccttctcaaactcagaactgtgccgccagtcagaacatgtgaatatccctgctgtg

SEQ ID NO: 50891 - DNA, 600 bp, Chicken  19866894298171_3
actttggactactaatgtgcaatctctgccttggttaaatttcagtcgcccactctaccacccttttccattcccttagtgtctcacctgtcatctcatagcctttccaaaatgctgcctgaccagctgtcatcttagtttccctgattccactgacccactagtccmctcacttcaccrgcatctctttgctccttttagaagaatctccagtgttagctctctaacacagaagtggacacacatgcaaagagacccattcaatcactcaataaataaataaaataaaaataaaaaatkaaaattaaaattaaaaaaattaaatattccacactagaaattagcattccattaagcggagagccaaaggtgttgtttgaccaaagaagccttctctgtgtttataatcttgacaataattatcccttctcaaactcagaactgtgccgccagtcagaacatgtgaatatccctgctgtgtgagctaattaactgtatcatttataacataaataacgtataacacattgatgctactgacatgcataaatatcggggattttgggtaacatcagcgatacaacatatggaatccttttt

SEQ ID NO: 50892 - DNA, 600 bp, Chicken  19866894298173_1
gctaatgttattctcattttacatctctgtgtttaatcaaaacttttgtcaagctggcaccatctgtttcattagctaacaaaacctacaggtgacccaacactaatacccatctcctattactgtgtctgtcttacagtcagctgtgctgccaacctgtgttgaacacagaatatctttttgcttcactgatgtcagtaactccaactgcttttcaccccacatatcctccccaatacgcactttgaacagtgaaccacatgatcagacagatctgcattgcagatacattataaaagyatctttctaaggctgaggctcagtttttgctttgtaactttgttgttgatcgttttagaaatcctccaagcagtcacggaaatctcctggagatgaagatgataaggactgcaaagaggaagaaaataagagcagctctgatgctggggacgcaggcaatgacacaagaaacacttcttcagacttgcagaaaaccagtgaaggggtaatctttcattagtataattctctttacatgcagtttgctcccagaaggctctgaagttaggggtgaaaggcattgtgttgcagtgagctgtt

SEQ ID NO: 50893 - DNA, 600 bp, Chicken  19866894298181_1
tggtagtcagtcagatttatttatttatttatttatttttctggaatggcctaggatatgtgttgcttttccactgtgttgcagtgtgaactgacagctcttgaatgagatgagcagaatggtgtagtgttttactagaagttcagcctggcttttttatcaaacattctgacaagtattagaaatactttgttttgttttgtgattgctttctttgaagcttctttatattggttgttcataatcatgctagtagttcatagtcatccagtgataaattagtagttttgccttcttccygctcagttgtactcagatgagattctggagcatagctgatgttttgattattaattgaattaatccttgagtacatttcttcttttttttctcctcatttctattacatcagtcctaaagattatccattactttctgtgggatataccagtgttctgtgtgaatgataactttgaagattttgaaattgtattgctgatgctgtcatgtctgttaatattagtacaagtagtataaaaatgaaatagtgaagaggagtcattggaggaaaacaaacaaacaacaacaacaacaaaaaga

SEQ ID NO: 50894 - DNA, 600 bp, Chicken  19866894298181_2
tgtgtgaatgataactttgaagattttgaaattgtattgctgatgctgtcatgtctgttaatattagtacaagtagtataaaaatgaaatagtgaagaggagtcattggaggaaaacaaacaaacaacaacaacaacaaaaagaaacccccaaaaaacagacatcacaagcattaatgacttcctccaagactctcttcctttcagttcctgacatcaccttccataagcatttcgtgtttccctacatttcctgtgctggtatcaatcttttgcctaatttacatgctggatgtgtgcratctcattctaatacatttaagtaaagataaagctactaaacatttattatctgccagcaatcagattgaccttgactgattgtgtttgttaacttcgttttaatttgctgaccttggttgactatgccagtttttctgatcacttctttcacttcttccaagccatttccagggaacaaatcagctcatcctggccaatctatacaagatgacttgatggtggattttttaggtagagtttattagtcaggacagttgttatttagcaagtgtaatgtatagtggtgatttaaaaaaaa

SEQ ID NO: 50895 - DNA, 600 bp, Chicken  19866894298197_1
tatttatagtattcccacgtttcagctaggaacacggggcaaacatatgaagtcaagacaacaacgtaacagagagtaattaacaaggaaaccctactgtatatattacaaaaactgaatgtggggatgaataggtcataatacaacaaaaaaacagcaacaacaacaatcaactaatgaagtaaaagaaatgtgtgttagaaggaatctctggaaaccacctagtccagcctcctactcaagagaagtctactgccaacattgaatcagaacagccttggccgtattaccatgtacacraagcccacaacattactgagtaaaacttgatccagtgctgcaacagtcctagcacaaaaagaatactggggggttggaactagctgatctttaaagtcacctccaatctaagccattctatgaaatacgattctatgactacttacagcacctaacgaatttcaagcgacttctctgaatgctgaaattgcaggaagaaaacatccccagctagctactcagtgtaaagaacaaaaaaataacatgaattaaaactcgtaattgctagctcagattttattcagaaataaggtacaaaaa

SEQ ID NO: 50896 - DNA, 599 bp, Chicken  19866894298202_1
  misc_feature (1)..(39): n is any nucleotide
nnnnnnnnnnnnnnnnnnnnnnnnnnnnnnnnnnnnnnnctatttctaacatcagcccagagaaggcactcatttatctcatccagccacaaagcttgatcaaataccaaacctgtcactcattgtcctttattccacagtctggcaaataacaagcataacattgtataacaatgattaaacagcatgcagaaggtttcagaagctggcaaccagggattgcaagtgataacgatcctttatatccatgctttcctatttgaaactaccttctgtcatgcatctagcatgtattttaakaggtatttagattagccaaacattaagcatgtttgcaaggtcaggtactaaatatttaagtctttgcatactatatttgcccattcctggacaggatatcatcacatggtatgacatctgccttgtgcacatccttgttagctctccaatgaaccacagaaaacctgctccttagcatgctaccagctgcacacctgcaagtgtttttagtgcttctcaggtccttcatagccacactgcattggctgtttatatacaagtttgcctatgtatacacatacatacacacatcttgaaat

SEQ ID NO: 50897 - DNA, 599 bp, Chicken  19866894298207_1
  misc_feature (1)..(9): n is any nucleotide
nnnnnnnnntggaataaacactttcatcttcagtagctgctaaaacaaacactcttttacaggctttgacagagaacagaattcatttcccctttacagctgcactgcttcaaagtcagttaaacatcaatgtgacagcttacttgccagagcttagacatttactgtattatcttagctggacacaacaaggaagcagagactgaaggcagagaggtaaaggggaaggagagggaaattggtattgtttttcttaaacactgtatgaagtatttgccttacttgctgccagagagttgmtcttcttatacacatattccgtatttaagacttggctaatacaaatacacgtcatcttctgaaggaaaattgaactcgatgatctttaaggtcttttccaaactgagtgattctacgattctatgaaacagagcacaagtctgaaggcaaagagttcgctacaatagagattatttacacagattgtaatcaggcaccaaattctcactctgcaatagtgtgcttctataaatgaaacttggtagactgagctattatccgaaattacaaattagaccatcttatttgcgaccagctat

SEQ ID NO: 50898 - DNA, 599 bp, Chicken  19866894298216_1
  misc_feature (1)..(152): n is any nucleotide
nnnnnnnnnnnnnnnnnnnnnnnnnnnnnnnnnnnnnnnnnnnnnnnnnnnnnnnnnnnnnnnnnnnnnnnnnnnnnnnnnnnnnnnnnnnnnnnnnnnnnnnnnnnnnnnnnnnnnnnnnnnnnnnnnnnnnnnnnnnnnnnnnnnnnnnntcacacaggcaaattgccttcacctgtgctcccatggctgactcagtccttgcctcaggtgatcaatcagtggttcaggccgtgattcaacagttcccatacactcccctttagatactgaaaggccactatcaggtcactgtggagscttttctccagactgaacagccctagctctctcagtctgtcctcataggagaggcattccatcccttgaatcatttttgtggccctcctctggatgcactccaactggactatgtctctcctgtactgaggattctgcatttggatgcagtactgcaggtgaggcctcaccagcacaaagcagggaggcaggatcacctccctcaacctgatggccatgcttcttttgatacagctcagggtactgttggctttctgggctgcgagggcacattgctggttcacatccagcttcccatc

SEQ ID NO: 50899 - DNA, 599 bp, Chicken  19866894298220_1
  misc_feature (1)..(111): n is any nucleotide
nnnnnnnnnnnnnnnnnnnnnnnnnnnnnnnnnnnnnnnnnnnnnnnnnnnnnnnnnnnnnnnnnnnnnnnnnnnnnnnnnnnnnnnnnnnnnnnnnnnnnnnnnnnnnnnctttgaacttcaggaagcaaatagagaaattcaagtgcatggtcagctttgcaaaggaaacacaaagcagaccgaaacctgtagtcacttccccacacacctccagggacgttgcctgcctctgcaagaggcatgagccacttgggaggccaggctttggccttggacagccagagcctggagaggagyatatgggctgtggatccataggtrcagagctggggtaggagagctcttccaaaaacctggtgagccttgttcgacagttgtgagaattcactccaggctctggaataaagatattctcaaggaatttcctgcttcagagctctaacaacagtgcatcatttggttggcagaagctgagagtttgtgcttccccccctcaccagtcaccaagcattagcaagagaaaggaaggctgcattgatgttctctgttcaccctcccattttctaagaagaaaaactgctcagatgcagatatta

SEQ ID NO: 50900 - DNA, 599 bp, Chicken  19866894298220_2
  misc_feature (1)..(87): n is any nucleotide
nnnnnnnnnnnnnnnnnnnnnnnnnnnnnnnnnnnnnnnnnnnnnnnnnnnnnnnnnnnnnnnnnnnnnnnnnnnnnnnnnnnnnnnctttgaacttcaggaagcaaatagagaaattcaagtgcatggtcagctttgcaaaggaaacacaaagcagaccgaaacctgtagtcacttccccacacacctccagggacgttgcctgcctctgcaagaggcatgagccacttgggaggccaggctttggccttggacagccagagcctggagaggagyatatgggctgtggatccataggtrcagagctggggtaggagagctcttccaaaaacctggtgagccttgttcgacagttgtgagaattcactccaggctctggaataaagatattctcaaggaatttcctgcttcagagctctaacaacagtgcatcatttggttggcagaagctgagagtttgtgcttccccccctcaccagtcaccaagcattagcaagagaaaggaaggctgcattgatgttctctgttcaccctcccattttctaagaagaaaaactgctcagatgcagatattaaagaaggcatttcccacaccccag

SEQ ID NO: 50901 - DNA, 600 bp, Chicken  19866894298222_1
gactctatgctcatgtgtaatctgtattagtttactcttctgtttaaaatagaaacacggaaatgccatactatacaattgagagacattaaattcagcagtgttgggattcagaaagttttctgtagagaaagctgtccaactgtaggctgcatttgctttaggcataattatctttgtgttcagaagggccttttaacaaagagaggcttatgtgcattgtgagcttgaataagaacttctgaaagaatgcagtgaaaagcagacattggacagtgctgtgtttgataactggacttsgccacttcaaactratgcaacagtgcttgttagctacttaaggcaaagtatggcaataaaggatagtaggcttttagataattaacatagttaattatcaattaagtatggtcttgcaatctagaagaaagttgattgttagcggaaattaactgacattcttttgtagtcattgaatggttcctttcaacaaaaacaagatgatgagaaggaataaaacacttgttttaatatatttctcagtgcatcccttcatttatggagagtaggtatactcttgaagacaataatatcttgtag

SEQ ID NO: 50902 - DNA, 600 bp, Chicken  19866894298222_2
gtgtaatctgtattagtttactcttctgtttaaaatagaaacacggaaatgccatactatacaattgagagacattaaattcagcagtgttgggattcagaaagttttctgtagagaaagctgtccaactgtaggctgcatttgctttaggcataattatctttgtgttcagaagggccttttaacaaagagaggcttatgtgcattgtgagcttgaataagaacttctgaaagaatgcagtgaaaagcagacattggacagtgctgtgtttgataactggacttsgccacttcaaactratgcaacagtgcttgttagctacttaaggcaaagtatggcaataaaggatagtaggcttttagataattaacatagttaattatcaattaagtatggtcttgcaatctagaagaaagttgattgttagcggaaattaactgacattcttttgtagtcattgaatggttcctttcaacaaaaacaagatgatgagaaggaataaaacacttgttttaatatatttctcagtgcatcccttcatttatggagagtaggtatactcttgaagacaataatatcttgtagaacttcaaattcca

SEQ ID NO: 50903 - DNA, 600 bp, Chicken  19866894298223_1
aagcatgtataagggaacatgaggaagtccaaagctctatgaatgagccttttaataagggctaaaatatttgtgtgaaggatattctgataatcagattcccatggcgttccaaggaacgcgtggttcactttgctgggattagatagactgtgtgtattgtctttgttccacagccttagtcactgtttttaagaaaactaagaatattaaaaagctacattttaatatacaagaaatgttacttcttctgtacctggtgcctaaaaatttagcagtatttctgccattttcttcctygaatttcaagtacttaaacacttttgacaaattagggaaattaacaactgcctcactttttttcttacagtaaaacaaaacctcctgtactcctcccatactgtctgctaaggtgaatgatctgtcagtgaaagctgtttctctgtctttgtggcatcctagtactcagcctttaacactggatgctttaggatggccttgggataaggatgccaatgtctccattttgtgctcgcttgaacctaatgattcyggggagattattcctgatttacagaagcataagtgagatcagagcta

SEQ ID NO: 50904 - DNA, 600 bp, Chicken  19866894298223_2
tacctggtgcctaaaaatttagcagtatttctgccattttcttcctygaatttcaagtacttaaacacttttgacaaattagggaaattaacaactgcctcactttttttcttacagtaaaacaaaacctcctgtactcctcccatactgtctgctaaggtgaatgatctgtcagtgaaagctgtttctctgtctttgtggcatcctagtactcagcctttaacactggatgctttaggatggccttgggataaggatgccaatgtctccattttgtgctcgcttgaacctaatgattcyggggagattattcctgatttacagaagcataagtgagatcagagctaaggaaacagatcctcagagttatttagtcatttattcctagggaatatatcctgatttktctatgaatgagatacctatatgaatggttttttttgttttttttttggaatgtgttgaatggatctcagagaagaatcctaactgtaggcatttcayggctccatttaatcacattgaaatattggtaaggaaaagtttagcttggaaaagagaaggcttcagggcgacctcactgtggccttccaatacttg

SEQ ID NO: 50905 - DNA, 600 bp, Chicken  19866894298223_3
ttttcttacagtaaaacaaaacctcctgtactcctcccatactgtctgctaaggtgaatgatctgtcagtgaaagctgtttctctgtctttgtggcatcctagtactcagcctttaacactggatgctttaggatggccttgggataaggatgccaatgtctccattttgtgctcgcttgaacctaatgattcyggggagattattcctgatttacagaagcataagtgagatcagagctaaggaaacagatcctcagagttatttagtcatttattcctagggaatatatcctgatttktctatgaatgagatacctatatgaatggttttttttgttttttttttggaatgtgttgaatggatctcagagaagaatcctaactgtaggcatttcayggctccatttaatcacattgaaatattggtaaggaaaagtttagcttggaaaagagaaggcttcagggcgacctcactgtggccttccaatacttgaagggagcatataagcaggagaggggatgactgtttacatgggtggatagtgataggacaagggggaatggctttaaactgagacaggggagctttaggttagata

SEQ ID NO: 50906 - DNA, 598 bp, Chicken  19866894298223_4
cctagtactcagcctttaacactggatgctttaggatggccttgggataaggatgccaatgtctccattttgtgctcgcttgaacctaatgattcyggggagattattcctgatttacagaagcataagtgagatcagagctaaggaaacagatcctcagagttatttagtcatttattcctagggaatatatcctgatttktctatgaatgagatacctatatgaatggttttttttgttttttttttggaatgtgttgaatggatctcagagaagaatcctaactgtaggcatttcayggctccatttaatcacattgaaatattggtaaggaaaagtttagcttggaaaagagaaggcttcagggcgacctcactgtggccttccaatacttgaagggagcatataagcaggagaggggatgactgtttacatgggtggatagtgataggacaagggggaatggctttaaactgagacaggggagctttaggttagatattaggaagaagtttttcacacagagggtggtgaagcacggaagaagttgcccaaggtggttgtggatgccccatcccggaggcattcaaggccagg

SEQ ID NO: 50907 - DNA, 600 bp, Chicken  19866894298224_1
ctttttgcccttaaaatgacttagaggaaaggcagttaacagtacagcccagaggaagctccatctatcaatgttttttgtctgctttgctatgatgctgctgtttcagattagtcaagcatattttccatgcaatacatgattctcagtttcacctccctcctaaatacacagccactctaacaagcggagtgcagggcagaccttttgtttgctccatccttggaacaaaggcagttaccttttatttcagcatataactgtatgcgacacacgtgtaaccacaaacattcttgctcrttacatacagacaagtttaaaaatggactaacgagtgaaactaaaaggctagtgtagagctttgtgggcaggatgctcttgttcagctaacagaaggaaaaggaaaaagaaagaaaagttagtaaaaaagtttcagtttcaaagtaacttagttgaagcaagaattgagacttttttttacatacaaacactgaaacacagcagcccatcactttactatggcacagtcatgccgtgttctacgccaatggtaccagaggctttttattctgctcactgctccttcttccaaactagata

SEQ ID NO: 50908 - DNA, 593 bp, Chicken  19866894298229_1
ccagctctaaggattctatgagtctatgattctaagttcttctcccatcatttactgcaggtgttaaatgatggtttcttgaaacagtaaggatttctgggaaaagataattttgacaaactcgaatcacagttcgaatggcaaacaggcataaactccttaaaatctcgtcagattttgaaaaagatctgtattttttttttcattctaaatgacatttgttccaaacttttgtatgtaatgaaaagtgaaacataactgaaacactgcaagtgaaataaatatcttcaaagatcgaargaggaatgttacgaagtccgtcccaaatttctgctgtcagtcaggatgaatatttttaaatatcttttatttcttctgttttcggagaggaaaaaaaaaacatccaaatctcggtatttctcaccccaccttcactcccagctcctttttcctgcctcatcttttyccagagaagcccaagttgtgagaaagcagctctcttacagctacagaaagtgccagcaggagcagcaattccagcctggctgtcccgtctactgagaccaacaatttacataaatacacagcggcat

SEQ ID NO: 50909 - DNA, 427 bp, Chicken  19866894298229_2
ctcgtcagattttgaaaaagatctgtattttttttttcattctaaatgacatttgttccaaacttttgtatgtaatgaaaagtgaaacataactgaaacactgcaagtgaaataaatatcttcaaagatcgaargaggaatgttacgaagtccgtcccaaatttctgctgtcagtcaggatgaatatttttaaatatcttttatttcttctgttttcggagaggaaaaaaaaaacatccaaatctcggtatttctcaccccaccttcactcccagctcctttttcctgcctcatcttttyccagagaagcccaagttgtgagaaagcagctctcttacagctacagaaagtgccagcaggagcagcaattccagcctggctgtcccgtctactgagaccaacaatttacataaatacacagcggcat

SEQ ID NO: 50910 - DNA, 599 bp, Chicken  19866894298230_1
  misc_feature (1)..(33): n is any nucleotide
nnnnnnnnnnnnnnnnnnnnnnnnnnnnnnnnnaacacagggctccaggagggatgttttcccttgaggaatttccaatacatctgttgttggcaaagctgaaagaaacaggaaagctcagactacaattttgaccagcatgtgtcccaacacaaactatttgtaagtagatacgtggtatttgactgtgaaatgagctaagctgctgatattcttacaaattcagaaaaatgtgaaatccacaaagccaaagaaagtactgctcagtttatactgttgctgactttaatacgtcagcayagatcaacacaaatgataatactgatagcacctttgttgtaactgagaggagttttttgcttcacattctgaaattagcttttgcagaattgaggcatggtttggtaggtgtcagctgcagttaggctttgctacagtgattacttaatcttcttgatgtyttttgtctaaggacagaagttcatgggagaaaaaaaacaacagtttctgagatggtctgaagaatatttacttaactatattagagaagagaagaagctctatggagttctctggaattacagtggcttgacaacagt

SEQ ID NO: 50911 - DNA, 600 bp, Chicken  19866894298230_2
tgtaagtagatacgtggtatttgactgtgaaatgagctaagctgctgatattcttacaaattcagaaaaatgtgaaatccacaaagccaaagaaagtactgctcagtttatactgttgctgactttaatacgtcagcayagatcaacacaaatgataatactgatagcacctttgttgtaactgagaggagttttttgcttcacattctgaaattagcttttgcagaattgaggcatggtttggtaggtgtcagctgcagttaggctttgctacagtgattacttaatcttcttgatgtyttttgtctaaggacagaagttcatgggagaaaaaaaacaacagtttctgagatggtctgaagaatatttacttaactatattagagaagagaagaagctctatggagttctctggaattacagtggcttgacaacagtttaattgcagacaaaatatgatgcacagtgtttcaactcttgaaattagacagtaactgcagaattccatttaacaggaaagctgcaacattctgtcctttgatacatacgtaaatcaaactttttgtgccatgttcatcctgccttgttgtggctcttggc

SEQ ID NO: 50912 - DNA, 496 bp, Chicken  19866894298236_1
aatggaaagttgaaagttattcatggctggtgctaccattaggtacgttaatccacttgaatagcacagtagtctggttatccctaagcatatagattagcctgatttgcacttccactctttagaacgaacttcatttttaagtaaaataaaatccagtgattggtatgaaactgagctgaatttagaatcccagaattcatactacatatttctgaggcataatttagacaactgttgtggtatttaaacttaaaagaaatgtttagtataattggagctgtaggaactctgaatgcrtggacaagtgacttcagacttgaatgtttctaattctcttccccacctcattctgtatgaagcatttaatactggtcgtaattctgtagttatttccactgcttcacagttgccggaaggcagttctaacactaaactatccatctcaaactcgtaattaatgaatgcacatcttggatgtgaagttgcacaaaga

SEQ ID NO: 50913 - DNA, 599 bp, Chicken  19866894298238_1
  misc_feature (1)..(51): n is any nucleotide
nnnnnnnnnnnnnnnnnnnnnnnnnnnnnnnnnnnnnnnnnnnnnnnnnnntcacataagcaaaaacctcctttaattggacttgcaaaagcagttttgttgtagaatcactgcaacagtggctagcacctctagactggtaggctggagtctaacaaaactatttttttgtttgtttttttttccccctttatttgagacaacttctatataaaaatcatacatgactaaaccattgtttttggatagtctcaaggcaaagccaaggacagcagcaattactctgcagatatttttacwaagttctatggctacatctcacagtaagcagtaaacaacatacattattaaatagtttaccttgtctagtattgacttgtatccactctagaagttcctcctgtggcaaattgctaaattctcccatgatgttccactgagtctgaagatttgctgacccttctattgccatcagtgctaaaatagcaaagaccaatgttttgggctggattttacagaagagccatccaaacaactgaaatacaagaattattttcttgagaacaattcagtaataatgtatgcagaacaactcattt

SEQ ID NO: 50914 - DNA, 600 bp, Chicken  19866894298247_1
ttcaggaaactgacggactaattactccagtacagtattgttatttttccttccagttcgtgaacttcttgcaatttttcccatgtatgcacagaaatgtccttcctggtgatatgcttgcatatacagacctcctagacatggtttgcatacagtaaaaccattcttggctggtgagattagtctgataataacagcataactggctcgcaattaatttttgcctggatagcgttaaagtattcaaacatcttctggatattttcataggtagtaactggtgctttccattgaagactrccaacatattgtcactgtcaggattttacagtgtaaaggtttttagccaccttttttttctaaaatcaacaacatttttatgctgcttagacgcacagttgctgcaaagcgagtacaatggctataataacggctttccatgttttgcttgtgttgttgccagcaataacagctgttggattaacagttattaaatttgcaataatgtatgtcaaactaagactaaaagtgggcaggattacacaatttttcagtgttctaggaaatactagtgatcagcttattgtctttagatcttat

SEQ ID NO: 50915 - DNA, 600 bp, Chicken  19866894298248_1
atttttgtttgtgttttttgtttgcctggagtttgtgagaaccagtggcaaaatcactacaagctagatcctttcttgctatttctagctgtacacattacaataggagagatagcccaaagactctagagatctgttggaagatgcagtccacactttcaagtagatttcactacaaggtaatctacatgagctagaagttggtcacactcaacactgttccagtcgtgaggtcaggacacattcatggaccagcagtagggtgtgcacacactgtagcatccttttgttgaactgttygtgtgtgaccaaaatcagtctcctcttgtatacagttcagggtacctgagataaaaatggctcagctctgggagttacttccagattttttcttcagcatgtgctcatttttactgaggaagaattcatcataacttgtgctgagccatactttcttttttatgtgtatagatggttgattttacagtatttcttattactacaaagacccagctgaggcctaagcttcctgactatcattgtgcaggcaatttggtatctgatttctagatgcaattaacagaaataggggagataata

SEQ ID NO: 50916 - DNA, 600 bp, Chicken  19866894298249_1
ttacgctttgtaaatttgttggaagtgacaatttcagaaatacttacatctatttagtgcatacactacaggtttttttaaaccttggtacatgactgagctgtgattatcttaaaataaaaatatggattacgttgccattttttttaatgcaaggaaacatttagaaatgaattccttcttctaaatgtgtagtccagcttgttaattatgtcacacacttcctagtgcaaccctttctttccatctggaacaggctgtccagagaggctgtggagtctccttctctggagatatccmaaacccaccaggacattttgctgcacaacttcctgtagagaaactgctgtagcaggggagttggactggatgaactccagaattcccttccagcctctacaattctgcgattctgtcatctctcatcactccctttccttayttagcctgaaatgctggaggttatatccaaatccatcttgccccttttcttcctaattttggcttgcgtgtctctatgcaaaatggtaagctccctttcaccttccaaggaagtcaatgatttacttccagcttcttctgtttccttccaagaaactt

SEQ ID NO: 50917 - DNA, 600 bp, Chicken  19866894298249_2
ttttttaatgcaaggaaacatttagaaatgaattccttcttctaaatgtgtagtccagcttgttaattatgtcacacacttcctagtgcaaccctttctttccatctggaacaggctgtccagagaggctgtggagtctccttctctggagatatccmaaacccaccaggacattttgctgcacaacttcctgtagagaaactgctgtagcaggggagttggactggatgaactccagaattcccttccagcctctacaattctgcgattctgtcatctctcatcactccctttccttayttagcctgaaatgctggaggttatatccaaatccatcttgccccttttcttcctaattttggcttgcgtgtctctatgcaaaatggtaagctccctttcaccttccaaggaagtcaatgatttacttccagcttcttctgtttccttccaagaaacttgcaaaacaaccactggagaattagaaagttagtttcagatcaccaggaataaaaccttatctaacaggaattgattcatcattttttcttccacttattaccaaatacatcttttctatctcaacagagctcagtcatttta

SEQ ID NO: 50918 - DNA, 599 bp, Chicken  19866894298260_1
  misc_feature (1)..(10): n is any nucleotide
nnnnnnnnnnctgatgcttgctgaatgctgatgaagaccaacagtggatgtgagcacagtgaggcaatgggtggggcatttcagcagtggcaacagtggatcatctccaatggcacagatgcaggctcctgttcattgctgttgaaaatgcatagctaacagtggtgactatgttgaaaaatagcgttctgtagctgagcttttgctttaccaaacagcgttattgtgctctttgtatcagttgcagtttctgtggaaataaataggaggtattacttttggagcgcacttcgtatatgyggcccaagacaattcctgttcacacagtgtggaccaggcaagccgaaaggttagacacgcatgaactatatgacacaattaacacatcttgtttaaaaatcctgtgttgtaatgcacatttagatcaaggggttttgacagatttgctgaatgatgcctaamgtctgtctgcagtgcaaggatgataactgataacccagactactctgcaacaatttcttcttccactgctttggctacaggattgagatgtcctcaatggccttcaaagccagaatcaggaagctgtgctgtttctc

SEQ ID NO: 50919 - DNA, 600 bp, Chicken  19866894298260_2
tggtgactatgttgaaaaatagcgttctgtagctgagcttttgctttaccaaacagcgttattgtgctctttgtatcagttgcagtttctgtggaaataaataggaggtattacttttggagcgcacttcgtatatgyggcccaagacaattcctgttcacacagtgtggaccaggcaagccgaaaggttagacacgcatgaactatatgacacaattaacacatcttgtttaaaaatcctgtgttgtaatgcacatttagatcaaggggttttgacagatttgctgaatgatgcctaamgtctgtctgcagtgcaaggatgataactgataacccagactactctgcaacaatttcttcttccactgctttggctacaggattgagatgtcctcaatggccttcaaagccagaatcaggaagctgtgctgtttctcagacacactaattctccggggttgccataccacgttaccatgcatgcctcacctaccacagtcttctgcaaatggaacctgagctgtcactgagctgatcctggaactgctgtgaccctgagcaacaatcccagggggcagtgtatgtaacacgtgatgaaac

SEQ ID NO: 50920 - DNA, 600 bp, Chicken  19866894298263_1
atctctaggtcttacagttcctgtaggcaaagcggtgtgaaggaaatgcttctctcgttgatagtgctagatgcccgtgtagatcagtgtcttaaaatcttcctgccacctctcccaatacctgctcattatttaccatccacaaattcctgttttctatttaagcttctaaataataattaaaagaagaggtgttgtgacaagttgacttagtgaagaattgtatttcttctgtgcattgacttgcctgtctgtgttgcgactgcagagtgcttagcacgattcgtgagccgaacagtkaagagtccttgcacagtcaaaagagcagttagaatttaccattgagaatgatcaatgtgtaaggtctttggagaagggattgcrtatttatttcaggggttttgactgctcagaagtttgtgtgagtgcatttgttgttctgtgttactacattcctagtatagctgaaagttgcagcttacacttactcggatgagaaaccttttctgctagaatttcttagtaagtagtaagtaacttagttacttaccaccacataaaatatgtgagatgctaaatagaagaaacaggcagctgcac

SEQ ID NO: 50921 - DNA, 600 bp, Chicken  19866894298263_2
cagtgtcttaaaatcttcctgccacctctcccaatacctgctcattatttaccatccacaaattcctgttttctatttaagcttctaaataataattaaaagaagaggtgttgtgacaagttgacttagtgaagaattgtatttcttctgtgcattgacttgcctgtctgtgttgcgactgcagagtgcttagcacgattcgtgagccgaacagtkaagagtccttgcacagtcaaaagagcagttagaatttaccattgagaatgatcaatgtgtaaggtctttggagaagggattgcrtatttatttcaggggttttgactgctcagaagtttgtgtgagtgcatttgttgttctgtgttactacattcctagtatagctgaaagttgcagcttacacttactcggatgagaaaccttttctgctagaatttcttagtaagtagtaagtaacttagttacttaccaccacataaaatatgtgagatgctaaatagaagaaacaggcagctgcacagggagaagaggttcacagagattgctgtaattaggttttgggcaaaaaataccaagtgtgtgtgtgtgcttccaaaaccaaca

SEQ ID NO: 50922 - DNA, 600 bp, Chicken  19866894298263_3
gagatgctaaatagaagaaacaggcagctgcacagggagaagaggttcacagagattgctgtaattaggttttgggcaaaaaataccaagtgtgtgtgtgtgcttccaaaaccaacaagggagtcctggccagttcagcagttcttgaaatgctggtaaacatggggattccctggaagggagatttttgtctctcttccaagttgctgccaaattctattgggtgaagaagagcgttggtagtttccgtattgccgaggtggacttgagcaaagggaacttggactcatttcaaaacastgactccttctttaagtttgcgcacttcaatcttttcttcccctacgcagcgtgtacgcgtgtgtgtgcgtgtgtggaggaacttgtcttagccgtgggctctgtcggagaccatgtatgggtaaagcacttgggccagttcagctccctgctcctccctcctggagagccgagcaggatctcttctgctgaaatgcttgttccactttctatatttgtacagcagcagcagcggctagctaggcggtgtggccggccttgtgtgtgtgcggcatttgctgagcagaattgagagccagg

SEQ ID NO: 50923 - DNA, 600 bp, Chicken  19866894298263_4
tgctgtaattaggttttgggcaaaaaataccaagtgtgtgtgtgtgcttccaaaaccaacaagggagtcctggccagttcagcagttcttgaaatgctggtaaacatggggattccctggaagggagatttttgtctctcttccaagttgctgccaaattctattgggtgaagaagagcgttggtagtttccgtattgccgaggtggacttgagcaaagggaacttggactcatttcaaaacastgactccttctttaagtttgcgcacttcaatcttttcttcccctacgcagcgtgtscgcgtgtgtgtgcgtgtgtggaggaacttgtcttagccgtgggctctgtcggagaccatgtatgggtaaagcacttgggccagttcagctccctgctcctccctcctggagagccgagcaggatctcttctgctgaaatgcttgttccactttctatatttgtacagcagcagcagcggctagctaggcggtgtggccggccttgtgtgtgtgcggcatttgctgagcagaattgagagccagggtcacagtctctgtcgttacgtctgtgtgtctgtctgcgtctggggaggactggca

SEQ ID NO: 50924 - DNA, 600 bp, Chicken  19866894298263_5; identical to SEQ ID NO: 50923

SEQ ID NO: 50925 - DNA, 600 bp, Chicken  19866894298263_6
tgtaattaggttttgggcaaaaaataccaagtgtgtgtgtgtgcttccaaaaccaacaagggagtcctggccagttcagcagttcttgaaatgctggtaaacatggggattccctggaagggagatttttgtctctcttccaagttgctgccaaattctattgggtgaagaagagcgttggtagtttccgtattgccgaggtggacttgagcaaagggaacttggactcatttcaaaacastgactccttctttaagtttgcgcacttcaatcttttcttcccctacgcagcgtgtacgsgtgtgtgtgcgtgtgtggaggaacttgtcttagccgtgggctctgtcggagaccatgtatgggtaaagcacttgggccagttcagctccctgctcctccctcctggagagccgagcaggatctcttctgctgaaatgcttgttccactttctatatttgtacagcagcagcagcggctagctaggcggtgtggccggccttgtgtgtgtgcggcatttgctgagcagaattgagagccagggtcacagtctctgtcgttacgtctgtgtgtctgtctgcgtctggggaggactggcattc

SEQ ID NO: 50926 - DNA, 600 bp, Chicken  19866894298263_7
tttgggcaaaaaataccaagtgtgtgtgtgtgcttccaaaaccaacaagggagtcctggccagttcagcagttcttgaaatgctggtaaacatggggattccctggaagggagatttttgtctctcttccaagttgctgccaaattctattgggtgaagaagagcgttggtagtttccgtattgccgaggtggacttgagcaaagggaacttggactcatttcaaaacastgactccttctttaagtttgcgcacttcaatcttttcttcccctacgcagcgtgtacgcgtgtgtgtgcstgtgtggaggaacttgtcttagccgtgggctctgtcggagaccatgtatgggtaaagcacttgggccagttcagctccctgctcctccctcctggagagccgagcaggatctcttctgctgaaatgcttgttccactttctatatttgtacagcagcagcagcggctagctaggcggtgtggccggccttgtgtgtgtgcggcatttgctgagcagaattgagagccagggtcacagtctctgtcgttacgtctgtgtgtctgtctgcgtctggggaggactggcattccgagtgaaagg

SEQ ID NO: 50927 - DNA, 600 bp, Chicken  19866894298263_8
ttgggcaaaaaataccaagtgtgtgtgtgtgcttccaaaaccaacaagggagtcctggccagttcagcagttcttgaaatgctggtaaacatggggattccctggaagggagatttttgtctctcttccaagttgctgccaaattctattgggtgaagaagagcgttggtagtttccgtattgccgaggtggacttgagcaaagggaacttggactcatttcaaaacastgactccttctttaagtttgcgcacttcaatcttttcttcccctacgcagcgtgtacgcgtgtgtgtgcgsgtgtggaggaacttgtcttagccgtgggctctgtcggagaccatgtatgggtaaagcacttgggccagttcagctccctgctcctccctcctggagagccgagcaggatctcttctgctgaaatgcttgttccactttctatatttgtacagcagcagcagcggctagctaggcggtgtggccggccttgtgtgtgtgcggcatttgctgagcagaattgagagccagggtcacagtctctgtcgttacgtctgtgtgtctgtctgcgtctggggaggactggcattccgagtgaaaggt

SEQ ID NO: 50928 - DNA, 600 bp, Chicken  19866894298265_1
cttcacgcagggccctcgtggaaggaatggcatcaaaggggacagaggaggcatgggagagccggtgagttgtccaccagtggttagtcactatggaagagccactggccataatgggaggggacattggtctgggaacaccagctgtcacatagggtggctagggaggagcaacatctactgccaactcacgtcagccgccaccgtgagatgctttgctctgctgattagggctggcacaagaagcagggccaattaagcatttctcacttcgtagtctccatcctgctgatccaccaytcgccaaaagaaaaatgttaggagaacaacacagccactcattatagtaaaagcaaggacatgttctcatggctcagagtaaacttgtgagaactacatccattaccctgctcacaatgaccacaaacgctttggcacgatcaatcatgctgatggacaatagagactgttgcatgatgaaggctgctccaaartggcartgattccaccttcagcctctgtatcacccatggagcagctgagtgcagcccggctccttcccacatcccaaccctctycccctctcaggaggagagaaaa

SEQ ID NO: 50929 - DNA, 600 bp, Chicken  19866894298265_2
cagccgccaccgtgagatgctttgctctgctgattagggctggcacaagaagcagggccaattaagcatttctcacttcgtagtctccatcctgctgatccaccaytcgccaaaagaaaaatgttaggagaacaacacagccactcattatagtaaaagcaaggacatgttctcatggctcagagtaaacttgtgagaactacatccattaccctgctcacaatgaccacaaacgctttggcacgatcaatcatgctgatggacaatagagactgttgcatgatgaaggctgctccaaartggcartgattccaccttcagcctctgtatcacccatggagcagctgagtgcagcccggctccttcccacatcccaaccctctycccctctcaggaggagagaaaagagctggggcaagtccagagggggcaataaggtggctcaaaagtgtaggatggtaaatagactgtgagggtggcagatttgggacaaaaaagaaggaggtaactcttcagacaagaagtcccacatggatattttcagtgtcagaagagaaacacaagaagagaaatagtccatgggaacctactaaggataaa

SEQ ID NO: 50930 - DNA, 600 bp, Chicken  19866894298265_3
ccaccgtgagatgctttgctctgctgattagggctggcacaagaagcagggccaattaagcatttctcacttcgtagtctccatcctgctgatccaccaytcgccaaaagaaaaatgttaggagaacaacacagccactcattatagtaaaagcaaggacatgttctcatggctcagagtaaacttgtgagaactacatccattaccctgctcacaatgaccacaaacgctttggcacgatcaatcatgctgatggacaatagagactgttgcatgatgaaggctgctccaaartggcartgattccaccttcagcctctgtatcacccatggagcagctgagtgcagcccggctccttcccacatcccaaccctctycccctctcaggaggagagaaaagagctggggcaagtccagagggggcaataaggtggctcaaaagtgtaggatggtaaatagactgtgagggtggcagatttgggacaaaaaagaaggaggtaactcttcagacaagaagtcccacatggatattttcagtgtcagaagagaaacacaagaagagaaatagtccatgggaacctactaaggataaagaaacc

SEQ ID NO: 50931 - DNA, 600 bp, Chicken  19866894298265_4
ctccatcctgctgatccaccaytcgccaaaagaaaaatgttaggagaacaacacagccactcattatagtaaaagcaaggacatgttctcatggctcagagtaaacttgtgagaactacatccattaccctgctcacaatgaccacaaacgctttggcacgatcaatcatgctgatggacaatagagactgttgcatgatgaaggctgctccaaartggcartgattccaccttcagcctctgtatcacccatggagcagctgagtgcagcccggctccttcccacatcccaaccctctycccctctcaggaggagagaaaagagctggggcaagtccagagggggcaataaggtggctcaaaagtgtaggatggtaaatagactgtgagggtggcagatttgggacaaaaaagaaggaggtaactcttcagacaagaagtcccacatggatattttcagtgtcagaagagaaacacaagaagagaaatagtccatgggaacctactaaggataaagaaaccatgttgggtttggaaagtccatgggttctaaataactcaaacctgagagatgggtacccggtctctatcctcccatat

SEQ ID NO: 50932 - DNA, 600 bp, Chicken  19866894298277_1
tcctctgtagcccaactctggatggtgctggaatgccccaggctgcttggatggagttgcatgaggccagcccacgtctcggggccgagcagcccctgcagcccccgcaggctgcgctgacaccagccatgagccagccaagaatgcgtcccaggaatttttatgacctcaggaacataaacaagagctgagagcactcctgacagtgtgagcagccggcgactggctctccatcctccacccaccgtggtggccattgcaggcaccgcactgtgcacccagcacgaccctgacgatggscatttctccccccgtttccttccccagacactgaactccttcaccaagcagcacccgctttgcttttggggaggactgggagcatgctggctcagcaagcaggctgacagccctactgcacggccccactctccacccaaagcatttcccaaaggcataaagggacacctcgatggggagaagcagcagggtgttgagctgggggtgacagccctaagagtgagagctggggacggcgaaagtccagcagagccaaggtgatgccagctcccatcagcatcactcgagggcagcccaaac

SEQ ID NO: 50933 - DNA, 597 bp, Chicken  19866894298283_1
gatatcagagcaaagaggtgtgtcctggcacaattggacctgcaacatcaaaacgttattcatgttggcaggccatgaaatgtttgcataaggagaaagggaacaaaacaggaatgctttaatgctgcgccctcattggagtttttattttttttcccttcagttttgtataactctgacagttgtaaaaaaattaaatgtaaaaataaaaaataagaaaggaaagcactgacagttctggcatgagcaggacaggaatggaatgagctcatctcctcctgtgggaccagaaggttggakatgctggaggtgttaaagaaaacratccaccattttcagtagaaatctcattttatattaagctttggtgaaaataattcactgtactatgtaaaaagctcttgttcccttgactaccttctcaaggaaagaagtgccattggtacttcattgaggtcccttccaatccaagccattctatgtttctatcatgtttcaggatacacctataggcatgatgctgtgcccactggacatggtcaaatttgcttctggtcatagctaacctgagcagatgagggaatagcttcactaaca

SEQ ID NO: 50934 - DNA, 573 bp, Chicken  19866894298283_2
ctggcacaattggacctgcaacatcaaaacgttattcatgttggcaggccatgaaatgtttgcataaggagaaagggaacaaaacaggaatgctttaatgctgcgccctcattggagtttttattttttttcccttcagttttgtataactctgacagttgtaaaaaaattaaatgtaaaaataaaaaataagaaaggaaagcactgacagttctggcatgagcaggacaggaatggaatgagctcatctcctcctgtgggaccagaaggttggakatgctggaggtgttaaagaaaacratccaccattttcagtagaaatctcattttatattaagctttggtgaaaataattcactgtactatgtaaaaagctcttgttcccttgactaccttctcaaggaaagaagtgccattggtacttcattgaggtcccttccaatccaagccattctatgtttctatcatgtttcaggatacacctataggcatgatgctgtgcccactggacatggtcaaatttgcttctggtcatagctaacctgagcagatgagggaatagcttcactaaca

SEQ ID NO: 50935 - DNA, 599 bp, Chicken  19866894298286_1
  misc_feature (1)..(144): n is any nucleotide
nnnnnnnnnnnnnnnnnnnnnnnnnnnnnnnnnnnnnnnnnnnnnnnnnnnnnnnnnnnnnnnnnnnnnnnnnnnnnnnnnnnnnnnnnnnnnnnnnnnnnnnnnnnnnnnnnnnnnnnnnnnnnnnnnnnnnnnnnnnnnnnnttatgctatttgcaaaaatctcatgtacaaaactatcttcatatgcagctgaatgaaaaatgaattgtgtaagtgttccaggtcacagtttctacttccattcaccctggaacagcgagttgtcagccctgacagcatgcttattaacaccatggracaatcatgccagctcacaaacaatgcagcagaatcctaactgactcaatagagtacttcaggaagatagggacataagagccatgttgttgatttggaccaaaagttcatcttggtatgttatttccaactctcaccaayggtgaaggcttaagaagaatggacgaataggaytagactaaatcatggtatgtctttgatattcgcttggcatcaaactatacaacagctcaagggtttctgagacctctgcatatttctgatgtcaagtagtgggtaagagttgcccagtttaaaca

SEQ ID NO: 50936 - DNA, 599 bp, Chicken  19866894298286_2
  misc_feature (1)..(3): n is any nucleotide
nnnttatgctatttgcaaaaatctcatgtacaaaactatcttcatatgcagctgaatgaaaaatgaattgtgtaagtgttccaggtcacagtttctacttccattcaccctggaacagcgagttgtcagccctgacagcatgcttattaacaccatggracaatcatgccagctcacaaacaatgcagcagaatcctaactgactcaatagagtacttcaggaagatagggacataagagccatgttgttgatttggaccaaaagttcatcttggtatgttatttccaactctcaccaayggtgaaggcttaagaagaatggacgaataggaytagactaaatcatggtatgtctttgatattcgcttggcatcaaactatacaacagctcaagggtttctgagacctctgcatatttctgatgtcaagtagtgggtaagagttgcccagtttaaacacatgcaaccgtatgcatatgtatgaagaaaaagagtattctttcacgtgttttgaactcgacatctggtaattccttctgctgccctttgttttttacaaatgtggaagttttgggggagttggactcagtgatctctcga

SEQ ID NO: 50937 - DNA, 600 bp, Chicken  19866894298286_3
aactatcttcatatgcagctgaatgaaaaatgaattgtgtaagtgttccaggtcacagtttctacttccattcaccctggaacagcgagttgtcagccctgacagcatgcttattaacaccatggracaatcatgccagctcacaaacaatgcagcagaatcctaactgactcaatagagtacttcaggaagatagggacataagagccatgttgttgatttggaccaaaagttcatcttggtatgttatttccaactctcaccaayggtgaaggcttaagaagaatggacgaataggaytagactaaatcatggtatgtctttgatattcgcttggcatcaaactatacaacagctcaagggtttctgagacctctgcatatttctgatgtcaagtagtgggtaagagttgcccagtttaaacacatgcaaccgtatgcatatgtatgaagaaaaagagtattctttcacgtgttttgaactcgacatctggtaattccttctgctgccctttgttttttacaaatgtggaagttttgggggagttggactcagtgatctctcgaggtcctttccaacccctgaaattctgtgattctg

SEQ ID NO: 50938 - DNA, 600 bp, Chicken  19866894298287_1
ccccacagcaaattaaacataatttccttttctttatatatatatatgattttatattgaatatctctaaatattatcattctgctcttgttatggagcaaccatgctgccacaagctgtgtcttggagggatgggacaggagaatgctggtgtcccatacaggaggcacatggattgtctcttgggccattctgggatggcaaagtatccaggagacttctttccaacactgggaaaaggtctattctccaaaattatccaccagaaggtacatggcaacttgccaaacttgtaagtgygccctgcagtcagtaagggaaaacccaaatcctgttcaaactgtcgggttttgacagtcaatgtttagcatttcactgagaagcagcaattcagatatggtgtcattctcccaacttttttctcctctgcttggagctacaraaacagagctcctggtgctctttctgtgtgtctcacttcaaaaagcctttgttgaaggtggatccttgccctgtcctctacgcaaatacgaatggccccaggcaagcagaacgcagatattagtgggatggccagagtgcagccagcaatggcatggg

SEQ ID NO: 50939 - DNA, 600 bp, Chicken  19866894298287_2
gaatgctggtgtcccatacaggaggcacatggattgtctcttgggccattctgggatggcaaagtatccaggagacttctttccaacactgggaaaaggtctattctccaaaattatccaccagaaggtacatggcaacttgccaaacttgtaagtgygccctgcagtcagtaagggaaaacccaaatcctgttcaaactgtcgggttttgacagtcaatgtttagcatttcactgagaagcagcaattcagatatggtgtcattctcccaacttttttctcctctgcttggagctacaraaacagagctcctggtgctctttctgtgtgtctcacttcaaaaagcctttgttgaaggtggatccttgccctgtcctctacgcaaatacgaatggccccaggcaagcagaacgcagatattagtgggatggccagagtgcagccagcaatggcatgggatgtggctgtccatcagccaccagcacatagccaaagcactgtgtatgggcatgcatggcaggcgtttatgaattatttcctcaaatgtctttgcccctttctttggatgctgcaagagtgacgctggcagaaagaagtaca

SEQ ID NO: 50940 - DNA, 600 bp, Chicken  19866894298287_3
agaacgcagatattagtgggatggccagagtgcagccagcaatggcatgggatgtggctgtccatcagccaccagcacatagccaaagcactgtgtatgggcatgcatggcaggcgtttatgaattatttcctcaaatgtctttgcccctttctttggatgctgcaagagtgacgctggcagaaagaagtacataaacaaacagaacagcgtcccacgagttccctgtggaaagtgatgtgagaagcttcagcaatgagggctgtggaggaaataggttggggagggtttgtggcgtggrtttttttttttttttcctttttaaaataaatatttgaggcacaccgcgggagctgagcagcagtgtggtaagtatatcaaacacagagaatccccagattatccgctcagaaggcattagctggctgctgaacacaaccatcttgaacctgcggagtgaaggtgcagaaatatgggaaagtaaacaaatagtgtgtgaagcagcaccaggaattaagccatcccaagcaagccatctgaataaacagggtgaggggaatcagtatttctgctgctctctgtctgtctgtctctcttctgc

SEQ ID NO: 50941 - DNA, 600 bp, Chicken  19866894298287_4; identical to SEQ ID NO: 50940

SEQ ID NO: 50942 - DNA, 600 bp, Chicken  19866894298287_5; identical to SEQ ID NO: 50940

SEQ ID NO: 50943 - DNA, 600 bp, Chicken  19866894298288_1
tgtttgaatattctgggttgcttctttgtcaggggacctgaatactctgaattgtatagcaattatgaatataatagctcaacaatgttaaatatcattaatgactgatctaagggaacttgcaaatgaccatgtagttacacagtgttggcagcataaataccaattaatgttgtaactgtagctgtttgtacttagtagattatatcagcgaatcccacagagagggaaggagtgtcaaatgatctaacacaggagaaaataataatgatagtgataatatgaaactgataattaggraaattgtgtgtcctccctctgatacatcctctaaagcaatagtgatgctcaggagtcatatgcagaaacctgaaaaatggtaagtgtgtatctatgtctatgtccatccgtctgtccctaacaaactaggcaaggcaaaggaaatatatggcagttagatgaagaaattgtgttttagcttaagctgcagatgtttatattcttggggaaaaaaaggcgtgggactctgggttttgttctccatgatttgtgcagtaattatctgtagtgtgcaggacttagatttgtttttactggaag

SEQ ID NO: 50944 - DNA, 599 bp, Chicken  19866894298289_1
  misc_feature (1)..(195): n is any nucleotide
nnnnnnnnnnnnnnnnnnnnnnnnnnnnnnnnnnnnnnnnnnnnnnnnnnnnnnnnnnnnnnnnnnnnnnnnnnnnnnnnnnnnnnnnnnnnnnnnnnnnnnnnnnnnnnnnnnnnnnnnnnnnnnnnnnnnnnnnnnnnnnnnnnnnnnnnnnnnnnnnnnnnnnnnnnnnnnnnnnnnnnnnnnnnnnnnnnntttagctttatgtgaagtagccctctagaaaggctctttctttactgcttctaagagatgtttcctttggtacttttgttgctccttcagtctgttaaggggaamrgctgcctggaatgtgtgatttgggaatggttaaactgcatgtcacaggcactatagttggtaggcaaggactgaggtcatgtgctggtgtaatgagctgctgcgatgtgtgcctggtggtgtgtccctgcaagcggattgccagctcctcaatgcatgtcctgcatggctttgaaacatcaatggcatgaactgtttttattctttgcttctttttattgatgtgaaacaaatgtttccactgttggcagcatcagtgatgaaggcttctgtagctccagcactgaagatgtacctga

SEQ ID NO: 50945 - DNA, 599 bp, Chicken  19866894298289_2
  misc_feature (1)..(194): n is any nucleotide
nnnnnnnnnnnnnnnnnnnnnnnnnnnnnnnnnnnnnnnnnnnnnnnnnnnnnnnnnnnnnnnnnnnnnnnnnnnnnnnnnnnnnnnnnnnnnnnnnnnnnnnnnnnnnnnnnnnnnnnnnnnnnnnnnnnnnnnnnnnnnnnnnnnnnnnnnnnnnnnnnnnnnnnnnnnnnnnnnnnnnnnnnnnnnnnnnntttagctttatgtgaagtagccctctagaaaggctctttctttactgcttctaagagatgtttcctttggtacttttgttgctccttcagtctgttaaggggaamrgctgcctggaatgtgtgatttgggaatggttaaactgcatgtcacaggcactatagttggtaggcaaggactgaggtcatgtgctggtgtaatgagctgctgcgatgtgtgcctggtggtgtgtccctgcaagcggattgccagctcctcaatgcatgtcctgcatggctttgaaacatcaatggcatgaactgtttttattctttgcttctttttattgatgtgaaacaaatgtttccactgttggcagcatcagtgatgaaggcttctgtagctccagcactgaagatgtacctgac

SEQ ID NO: 50946 - DNA, 600 bp, Chicken  19866894298289_3
tgtgtgatttgggaatggttaaactgcatgtcacaggcactatagttggtaggcaaggactgaggtcatgtgctggtgtaatgagctgctgcgatgtgtgcctggtggtgtgtccctgcaagcggattgccagctcctcaatgcatgtcctgcatggctttgaaacatcaatggcatgaactgtttttattctttgcttctttttattgatgtgaaacaaatgtttccactgttggcagcatcagtgatgaaggcttctgtagctccagcactgaagatgtacctgacccaaactcaagygcgttgccttccaagggracaggacagtgtggtatcatacaagaagatggaggagatacaggctctgccttacagcaagctgcagaaggaaaggagagatgtctgcctatctcagtgcctgcagagggctgtttggagggtgtcacagcagatcttgcaagcagcagtgatgtgtcaccaacctcaagctgcagtgaagcaatgaaggacaaagaggagggaacagcacatggtgtttctgaggacagaggcccccaaacgtgaccccgttgcacctgctgctctgagaactggtgggga

SEQ ID NO: 50947 - DNA, 597 bp, Chicken  19866894298289_4
ttaaactgcatgtcacaggcactatagttggtaggcaaggactgaggtcatgtgctggtgtaatgagctgctgcgatgtgtgcctggtggtgtgtccctgcaagcggattgccagctcctcaatgcatgtcctgcatggctttgaaacatcaatggcatgaactgtttttattctttgcttctttttattgatgtgaaacaaatgtttccactgttggcagcatcagtgatgaaggcttctgtagctccagcactgaagatgtacctgacccaaactcaagygcgttgccttccaagggracaggacagtgtggtatcatacaagaagatggaggagatacaggctctgccttacagcaagctgcagaaggaaaggagagatgtctgcctatctcagtgcctgcagagggctgtttggagggtgtcacagcagatcttgcaagcagcagtgatgtgtcaccaacctcaagctgcagtgaagcaatgaaggacaaagaggagggaacagcacatggtgtttctgaggacagaggcccccaaacgtgaccccgttgcacctgctgctctgagaactggtggggaatggtcccgggaagc

SEQ ID NO: 50948 - DNA, 600 bp, Chicken  19866894298291_1
atcttccatgagataacatctgcccttcattatcttcacattcagggttctctctgatgtgtgtttgaatagctccttttttcctgtgataaccctgacatgacagaactcacacttgtactggaaaacaagggttctttttgttgaatcataagtactgagtctttcagagttatgtttttaatgaaagtttccatagatgcgggattttatttggatggcattgcacttccataaaaaacagtagatctttattgcttccatacttatgtctcacagtagttttttgagctggtcacrggaaaagttgatgccatgcaaaacttctataaagggattttcgaaattattctggatcattatcaaagaagtacaatagagaggagatgtgattaaaagaccagagaaatttttactaacccacttttctcatattcaggtataaagctcagattagttatgcctggctacacttgtactccctgtgttaaagaaaaaacaatggatgtgatgctctttctactcatgcttaattttagtgctacttttaaattttacctgctccccatgcagatctctacatatagaatctgtaaacaa

SEQ ID NO: 50949 - DNA, 600 bp, Chicken  19866894298293_1
cccatccatacctgcatgtctcgatgctggtgtccagcacagacccttgcagcaacagaagtatctctactgaaggacttgacaagcaatggatgggcctctctgactgccagccacaaggatgaaatgaccttcagaacctctgccaccacacatcaggcagtcccactgattctgctaagaatggtcaaagcccaccagtgccagcccactcatgcaatccagagaacacagggcatgaagttgccttatagtccaagcactattgtccactggacttcatcttcctttagagaactytttcccattgagagaacattagctttttccactgattgagaagggtgaattttatatctagtggttacatactgtatagtggcataaattaagtcaaagtggagctgaggaaatccattagagtgaagtctctgcaggattgagatggtttgcagtaaatagggcctgtggccacacaatgaatgctgagaatgaaccagtaataacgaattgctacccactcaatgagcaccagacagccagcacactaaaaagggacatcatgtcacagaaaatagagcacacaagtgtgtaattgga

SEQ ID NO: 50950 - DNA, 448 bp, Chicken  19866894298293_2
agttcaaaaatcagcacaactataaattccttcatgtgctgtcatagtaccttattgtggaaacatatatggatctgcagaaacttattccacctgcctcgaaggaactaagatatatagagtgcaagcttgtaaaggctgacaatcactgaacatcaataattcaaaacctgagtatgactcacactgcccaacccatccccctaaggttacttttacttaatattcacagaaggcacattgttatttctttttcaaaaaagtcatgaataacttaccattcattacccgagcactctytttttttttttctattttaacaattgacttcatctcaagtaagcatagaaaacgttgatttcctaacctcttaaaatcttctcagttcattgttgatgagcataaaagtattatcgaaaaactcttagtttgcagaagattacatttt

SEQ ID NO: 50951 - DNA, 447 bp, Chicken  19866894298293_3
gttcaaaaatcagcacaactataaattccttcatgtgctgtcatagtaccttattgtggaaacatatatggatctgcagaaacttattccacctgcctcgaaggaactaagatatatagagtgcaagcttgtaaaggctgacaatcactgaacatcaataattcaaaacctgagtatgactcacactgcccaacccatccccctaaggttacttttacttaatattcacagaaggcacattgttatttctttttcaaaaaagtcatgaataacttaccattcattacccgagcactcttyttttttttttctattttaacaattgacttcatctcaagtaagcatagaaaacgttgatttcctaacctcttaaaatcttctcagttcattgttgatgagcataaaagtattatcgaaaaactcttagtttgcagaagattacatttt

SEQ ID NO: 50952 - DNA, 600 bp, Chicken  19866894298296_1
caagtgtgttgccctgtatttgccccccatgccaggtattgtacatgccagtcttcttgggcccagctcagtaaccacactgtaaggggtttgtgtacgacccagctggcagtgcagaagcaatgtgccttccctgccaggatggcctgggatactgcagtcagttctgcccatggattagatgctaatacacctgtttgccccagtagaatgcctgggaattgagcatatgcaactgctctcctttgactttagccagcagctattccattggtaaatcaggcatcatttttatgctcktctattaacctgtcataagggggagcttcctccacagcagatacggggcatctccttgctgactttttgtcccaggcatttcccaccagactgtgccagatagagtagttctaattcaaatgtatgtccttgtctatgagtgtctaatggcacatgctcaattttgcagccaycaaaggyttcttgttccttggtctgctgccaaacaactttcttcccagtcaatcccagagttgtgaatttcttgctgttatgtgtgtgggttttttttctatgagtgtagccacatctggtcctgta

SEQ ID NO: 50953 - DNA, 600 bp, Chicken  19866894298296_2
tggattagatgctaatacacctgtttgccccagtagaatgcctgggaattgagcatatgcaactgctctcctttgactttagccagcagctattccattggtaaatcaggcatcatttttatgctcktctattaacctgtcataagggggagcttcctccacagcagatacggggcatctccttgctgactttttgtcccaggcatttcccaccagactgtgccagatagagtagttctaattcaaatgtatgtccttgtctatgagtgtctaatggcacatgctcaattttgcagccaycaaaggyttcttgttccttggtctgctgccaaacaactttcttcccagtcaatcccagagttgtgaatttcttgctgttatgtgtgtgggttttttttctatgagtgtagccacatctggtcctgtaactgcgagctgggagtgacaatttagttctctctgacctacagtcattcactaagtgccctctaacattcaaacaggccarataagattaataaaagcaacyatggtgtctttaccaactctcacatgctgaygttgcctggatgcctgtagtaattccctcctgccctctgg

SEQ ID NO: 50954 - DNA, 600 bp, Chicken  19866894298296_3
gatgctaatacacctgtttgccccagtagaatgcctgggaattgagcatatgcaactgctctcctttgactttagccagcagctattccattggtaaatcaggcatcatttttatgctcktctattaacctgtcataagggggagcttcctccacagcagatacggggcatctccttgctgactttttgtcccaggcatttcccaccagactgtgccagatagagtagttctaattcaaatgtatgtccttgtctatgagtgtctaatggcacatgctcaattttgcagccaycaaaggyttcttgttccttggtctgctgccaaacaactttcttcccagtcaatcccagagttgtgaatttcttgctgttatgtgtgtgggttttttttctatgagtgtagccacatctggtcctgtaactgcgagctgggagtgacaatttagttctctctgacctacagtcattcactaagtgccctctaacattcaaacaggccarataagattaataaaagcaacyatggtgtctttaccaactctcacatgctgaygttgcctggatgcctgtagtaattccctcctgccctctgggatgcaa

SEQ ID NO: 50955 - DNA, 600 bp, Chicken  19866894298296_4
cccaccagactgtgccagatagagtagttctaattcaaatgtatgtccttgtctatgagtgtctaatggcacatgctcaattttgcagccaycaaaggyttcttgttccttggtctgctgccaaacaactttcttcccagtcaatcccagagttgtgaatttcttgctgttatgtgtgtgggttttttttctatgagtgtagccacatctggtcctgtaactgcgagctgggagtgacaatttagttctctctgacctacagtcattcactaagtgccctctaacattcaaacaggccarataagattaataaaagcaacyatggtgtctttaccaactctcacatgctgaygttgcctggatgcctgtagtaattccctcctgccctctgggatgcaattctgttttacagccacsgtgtcagcacaacagggtcccacatcagaaacccacatgaaatggctacagatcaaacagcagatcctgcttgtggagtcctgaagcagaagtgaccattcggtgtttcagctgtccatgctgccatcacatcratatgcaaaatgtattccttaattaggacagttaacgccattgctgcca

SEQ ID NO: 50956 - DNA, 600 bp, Chicken  19866894298296_5
gagtagttctaattcaaatgtatgtccttgtctatgagtgtctaatggcacatgctcaattttgcagccaycaaaggyttcttgttccttggtctgctgccaaacaactttcttcccagtcaatcccagagttgtgaatttcttgctgttatgtgtgtgggttttttttctatgagtgtagccacatctggtcctgtaactgcgagctgggagtgacaatttagttctctctgacctacagtcattcactaagtgccctctaacattcaaacaggccarataagattaataaaagcaacyatggtgtctttaccaactctcacatgctgaygttgcctggatgcctgtagtaattccctcctgccctctgggatgcaattctgttttacagccacsgtgtcagcacaacagggtcccacatcagaaacccacatgaaatggctacagatcaaacagcagatcctgcttgtggagtcctgaagcagaagtgaccattcggtgtttcagctgtccatgctgccatcacatcratatgcaaaatgtattccttaattaggacagttaacgccattgctgccaatgttgggttggcatttcctg

SEQ ID NO: 50957 - DNA, 600 bp, Chicken  19866894298296_6
ctatgagtgtctaatggcacatgctcaattttgcagccaycaaaggyttcttgttccttggtctgctgccaaacaactttcttcccagtcaatcccagagttgtgaatttcttgctgttatgtgtgtgggttttttttctatgagtgtagccacatctggtcctgtaactgcgagctgggagtgacaatttagttctctctgacctacagtcattcactaagtgccctctaacattcaaacaggccarataagattaataaaagcaacyatggtgtctttaccaactctcacatgctgaygttgcctggatgcctgtagtaattccctcctgccctctgggatgcaattctgttttacagccacsgtgtcagcacaacagggtcccacatcagaaacccacatgaaatggctacagatcaaacagcagatcctgcttgtggagtcctgaagcagaagtgaccattcggtgtttcagctgtccatgctgccatcacatcratatgcaaaatgtattccttaattaggacagttaacgccattgctgccaatgttgggttggcatttcctgttcttaacgtagcctcagcttggaaatgtct

SEQ ID NO: 50958 - DNA, 600 bp, Chicken  19866894298296_7
ctgccaaacaactttcttcccagtcaatcccagagttgtgaatttcttgctgttatgtgtgtgggttttttttctatgagtgtagccacatctggtcctgtaactgcgagctgggagtgacaatttagttctctctgacctacagtcattcactaagtgccctctaacattcaaacaggccarataagattaataaaagcaacyatggtgtctttaccaactctcacatgctgaygttgcctggatgcctgtagtaattccctcctgccctctgggatgcaattctgttttacagccacsgtgtcagcacaacagggtcccacatcagaaacccacatgaaatggctacagatcaaacagcagatcctgcttgtggagtcctgaagcagaagtgaccattcggtgtttcagctgtccatgctgccatcacatcratatgcaaaatgtattccttaattaggacagttaacgccattgctgccaatgttgggttggcatttcctgttcttaacgtagcctcagcttggaaatgtctcttctgactgccctgtccagattggctcctgtaattaatgcataagccatccccatctgctgcgc

SEQ ID NO: 50959 - DNA, 483 bp, Chicken  19866894298296_8
ctgacctacagtcattcactaagtgccctctaacattcaaacaggccarataagattaataaaagcaacyatggtgtctttaccaactctcacatgctgaygttgcctggatgcctgtagtaattccctcctgccctctgggatgcaattctgttttacagccacsgtgtcagcacaacagggtcccacatcagaaacccacatgaaatggctacagatcaaacagcagatcctgcttgtggagtcctgaagcagaagtgaccattcggtgtttcagctgtccatgctgccatcacatcratatgcaaaatgtattccttaattaggacagttaacgccattgctgccaatgttgggttggcatttcctgttcttaacgtagcctcagcttggaaatgtctcttctgactgccctgtccagattggctcctgtaattaatgcataagccatccccatctgctgcgctacattaatgccttctt

SEQ ID NO: 50960 - DNA, 600 bp, Chicken  19866894298310_1
tgacccagttggagttttctggatgatggaaagatgagtagttgcctgaaccgaatccttattctcctgtagcaaggctgaacaaggagaaaggaggcaaacctcaagaaatctgaggtttagaaacaaatgtttctcatttgtgataaaaattactgatctatgtttcgagtaatagggtgaaattattattacaagtgcattgcacatattaaaatccctcacttgtttccaattagttatgagcaatccctaatttttatgaacgcttgcattatttacaacattttgaagagcctrcatgaagaaatgtcaggtttcttccagagccaaccacagtgtgtttaattcactcgaggacctgtasagttcagcaactgtggttgcwctyttaaatactaataaawgytggcttttctgtggtgctttaaaactgcaaacctcagcctcaccagacagagtaaatgggatatttacaccatctaacgtaaaagaacctttaaaagaaattctttttgcattggctctacagggggtctaacatatatatcttctgtattatgacctcctttttaactgagggtaatagtgaagagcgta

SEQ ID NO: 50961 - DNA, 600 bp, Chicken  19866894298310_2
tgtagcaaggctgaacaaggagaaaggaggcaaacctcaagaaatctgaggtttagaaacaaatgtttctcatttgtgataaaaattactgatctatgtttcgagtaatagggtgaaattattattacaagtgcattgcacatattaaaatccctcacttgtttccaattagttatgagcaatccctaatttttatgaacgcttgcattatttacaacattttgaagagcctrcatgaagaaatgtcaggtttcttccagagccaaccacagtgtgtttaattcactcgaggacctgtasagttcagcaactgtggttgcwctyttaaatactaataaawgytggcttttctgtggtgctttaaaactgcaaacctcagcctcaccagacagagtaaatgggatatttacaccatctaacgtaaaagaacctttaaaagaaattctttttgcattggctctacagggggtctaacatatatatcttctgtattatgacctcctttttaactgagggtaatagtgaagagcgtagagggaagaaattcaccccagatctcacagcatatcatctgaaggaccagaagtagaagtgaggctt

SEQ ID NO: 50962 - DNA, 600 bp, Chicken  19866894298310_3
gaaaggaggcaaacctcaagaaatctgaggtttagaaacaaatgtttctcatttgtgataaaaattactgatctatgtttcgagtaatagggtgaaattattattacaagtgcattgcacatattaaaatccctcacttgtttccaattagttatgagcaatccctaatttttatgaacgcttgcattatttacaacattttgaagagcctrcatgaagaaatgtcaggtttcttccagagccaaccacagtgtgtttaattcactcgaggacctgtasagttcagcaactgtggttgcwctyttaaatactaataaawgytggcttttctgtggtgctttaaaactgcaaacctcagcctcaccagacagagtaaatgggatatttacaccatctaacgtaaaagaacctttaaaagaaattctttttgcattggctctacagggggtctaacatatatatcttctgtattatgacctcctttttaactgagggtaatagtgaagagcgtagagggaagaaattcaccccagatctcacagcatatcatctgaaggaccagaagtagaagtgaggctttctgaaccttccactgtatta

SEQ ID NO: 50963 - DNA, 600 bp, Chicken  19866894298310_4
aggaggcaaacctcaagaaatctgaggtttagaaacaaatgtttctcatttgtgataaaaattactgatctatgtttcgagtaatagggtgaaattattattacaagtgcattgcacatattaaaatccctcacttgtttccaattagttatgagcaatccctaatttttatgaacgcttgcattatttacaacattttgaagagcctrcatgaagaaatgtcaggtttcttccagagccaaccacagtgtgtttaattcactcgaggacctgtasagttcagcaactgtggttgcwctyttaaatactaataaawgytggcttttctgtggtgctttaaaactgcaaacctcagcctcaccagacagagtaaatgggatatttacaccatctaacgtaaaagaacctttaaaagaaattctttttgcattggctctacagggggtctaacatatatatcttctgtattatgacctcctttttaactgagggtaatagtgaagagcgtagagggaagaaattcaccccagatctcacagcatatcatctgaaggaccagaagtagaagtgaggctttctgaaccttccactgtattaggg

SEQ ID NO: 50964 - DNA, 600 bp, Chicken  19866894298310_5
gaaatctgaggtttagaaacaaatgtttctcatttgtgataaaaattactgatctatgtttcgagtaatagggtgaaattattattacaagtgcattgcacatattaaaatccctcacttgtttccaattagttatgagcaatccctaatttttatgaacgcttgcattatttacaacattttgaagagcctrcatgaagaaatgtcaggtttcttccagagccaaccacagtgtgtttaattcactcgaggacctgtasagttcagcaactgtggttgcwctyttaaatactaataaawgytggcttttctgtggtgctttaaaactgcaaacctcagcctcaccagacagagtaaatgggatatttacaccatctaacgtaaaagaacctttaaaagaaattctttttgcattggctctacagggggtctaacatatatatcttctgtattatgacctcctttttaactgagggtaatagtgaagagcgtagagggaagaaattcaccccagatctcacagcatatcatctgaaggaccagaagtagaagtgaggctttctgaaccttccactgtattagggctttactgtacttaag

SEQ ID NO: 50965 - DNA, 600 bp, Chicken  19866894298310_6
aatctgaggtttagaaacaaatgtttctcatttgtgataaaaattactgatctatgtttcgagtaatagggtgaaattattattacaagtgcattgcacatattaaaatccctcacttgtttccaattagttatgagcaatccctaatttttatgaacgcttgcattatttacaacattttgaagagcctrcatgaagaaatgtcaggtttcttccagagccaaccacagtgtgtttaattcactcgaggacctgtasagttcagcaactgtggttgcwctyttaaatactaataaawgytggcttttctgtggtgctttaaaactgcaaacctcagcctcaccagacagagtaaatgggatatttacaccatctaacgtaaaagaacctttaaaagaaattctttttgcattggctctacagggggtctaacatatatatcttctgtattatgacctcctttttaactgagggtaatagtgaagagcgtagagggaagaaattcaccccagatctcacagcatatcatctgaaggaccagaagtagaagtgaggctttctgaaccttccactgtattagggctttactgtacttaagct

SEQ ID NO: 50966 - DNA, 599 bp, Chicken  19866894298315_1
  misc_feature (1)..(15): n is any nucleotide
nnnnnnnnnnnnnnnctctgcagagaagggcctggttgccctggtgagcacaggttggccatgagccagcagtgtgccctggagtccaagaaggaaaatggaatcctgaggtacattaaaaagggagtgaccagcagcagatcgaaggaggtgatcctccccctctgctctgctctgatgaggccacatttgaagtactgtgtccagctctgctctcctctgttcaaaaaaagacagacatctcctgtgtagagtccagcagaggacaacaaagatgattacaggcctggagcatctccyttgtgaggaaaggcagagagactcggggctgttcagccttgagaagagatgactgagagggaatgtgatcaatgtttataaatatctaaagtgcaggaggcaattggatgaggccagattcttttcagtggtgtgtagttacaggacaaggggcaatggccaaaacctggaacacaggaagttccatacaaatacatagaacttcttcacagtgagggtgacagagaactagaacaggttgcctggactggttgtggaatttccttctttggggatattcagaatctctctggacacct

SEQ ID NO: 50967 - DNA, 600 bp, Chicken  19866894298325_1
tatactcaaaaaagtgttttgcaatcaaggaaaacgccaataaatgcaccagtggccaagggccagtttgggctaaccagtcagactcactgaagctacggcacaggggctgaagatcttaatccttttaaaatcagacctgtcgagtgctgatctaagtgtgcttgagaggaagcagagccgtacaagcagttcctctgagtcaaagaaggcagagcatggcatgcagcctgcccatggcagagcgtcctggctgccgtgctaactgagccatggtggggatgggccaaacaccaacayygggaggtgggagcacagtgcctgctttgctacttcttctaaaatgcatgtgttttatcatttccttctaaggtcgtgctattgtgccaatcgggaaaagggaaagatttcgtttcagagagctttgcagggtgagaatttggcatttcatgctgcttctgcacaaccccaaacgtggtggttacaggagctacagcagctccattaaaggcagttcttggaagttacgatctaaacatacaattgggatttgctcttgaagtaaaaccaaagcactgctcctaaggaagttacctagga

SEQ ID NO: 50968 - DNA, 600 bp, Chicken  19866894298325_2
atactcaaaaaagtgttttgcaatcaaggaaaacgccaataaatgcaccagtggccaagggccagtttgggctaaccagtcagactcactgaagctacggcacaggggctgaagatcttaatccttttaaaatcagacctgtcgagtgctgatctaagtgtgcttgagaggaagcagagccgtacaagcagttcctctgagtcaaagaaggcagagcatggcatgcagcctgcccatggcagagcgtcctggctgccgtgctaactgagccatggtggggatgggccaaacaccaacayygggaggtgggagcacagtgcctgctttgctacttcttctaaaatgcatgtgttttatcatttccttctaaggtcgtgctattgtgccaatcgggaaaagggaaagatttcgtttcagagagctttgcagggtgagaatttggcatttcatgctgcttctgcacaaccccaaacgtggtggttacaggagctacagcagctccattaaaggcagttcttggaagttacgatctaaacatacaattgggatttgctcttgaagtaaaaccaaagcactgctcctaaggaagttacctaggaa

SEQ ID NO: 50969 - DNA, 600 bp, Chicken  19866894298329_1
ttctccaaaaatcaccaagacaagggacaggcctcaaaggcagcaacatctgtccagaggtacttgtgtcctgtgttgtgtgttgagtgggtgccctcctgacagtgccaggcatcctatgcctgtggaggaaggagtgtggtgaaaacccatgactcccaccctggagtgggctttgtgggctcttctccagcatgaacgaggcaaaataaagtgagagatgtgagaagaggggctcaggctctccaaccagctgtgcattcatcctcctgggaccacggctactatgcttgctataaycctgaagagggtatttttatgacaaatggatatataactttgacacttttctactggctgtttaaatctttcaagagattgcaaaaggcagaactaaccagtttaagaggcagaagacaggtgtggtgtcttctgcctattaaaaaaacaaaacgacaaacctgtcattaacaaatagattgtcattatccttacgagttagtgcttatcacacatgtaggccgcttttcatcagtggcccctcagtacacctacattatccaaagaccagaacctctttgcccgttaaattttcaagac

SEQ ID NO: 50970 - DNA, 600 bp, Chicken  19866894298331_1
ggaagtggctgaaggatccaggagctgggactgcagtgtgctgcaggcaccatcacatctggttggcaggtgacagcctagtaccttgtgaaacagctgacataattgctggcacaaagcagtgccatgagattacacatttgaaactgaatcacgatgaaaatatttaaaggcaaaaagaagagagaagtgaaacagtgctgcttttggcctggctttctctattgttcagaatgacttgctgtgcagtagaacttatttgtaaagtgcagtttaacaattttgattaaaaaaaccccmtaaacttcctcaagttatttccacaaagattagaaatgaagacaattctgatcctcttctataattattctttatgattcaaaactctgacctcaataacaccattcagtaatcaggagacctaatttacgtacttaatggatcagattatgtggacctttcagttttgttaagagagttataagtataaaaaatgaagatgcaattaatgctgccttgataatagttataaaggatggccctttcaagagaaaattattctgtttttcaagcagttaccccagtgtaattgctacttgt

SEQ ID NO: 50971 - DNA, 600 bp, Chicken  19866894298332_1
tttcaaggcagagagaatgctggctctggctgctgcccaggcaccaacctcagcactaaaagcagctaagaaccactatttgttgcactaaataaaaatatctcgctggcaaatgagatcaaaactgccgcagatgacaacatttcctatggaaagttacatagattcacggtgaatggcaatctaaaaaaaaaaatccttagaggaaataacaaacgcagaaggcaccaaaagacattgtatattcaggagggatggaagcaacagcatctgagccattggggccatttctttacgtgytcctttgaaatgcagtgcatcctcactcagcatcacacatctgctttctccaatgtgacaggagctctgttcccctgaatacaactaaaagaccgagcccacacacaccagcaatgcccacagcagcgaggactgctcttcttgcaaaaggagatgctcctgttgctccaatttctactcttgctggggctcgacagctggccatccaccttctttctttgtctaatgggaaagcagctgtgggaagagcttgtcttgctctgcaggtgtgtgctcctgtaaattcatgcatgctggatg

SEQ ID NO: 50972 - DNA, 599 bp, Chicken  19866894298334_1
  misc_feature (1)..(39): n is any nucleotide
nnnnnnnnnnnnnnnnnnnnnnnnnnnnnnnnnnnnnnncagaacttagcaaatacatcagaaaaaaatgttttgtgggtattgttttctgacagtgttagttttaagataaacgatgtagctttttaccagacatctgactactcagacccaggaggcaatattttttcctttatgctagaaatttctcatactcagggttatattaaagataataatatggatctgaggcatgtggcatatgttgcatgctttcttctagaaacattcttctgctttgtacaggcagagaatgagtgyagtttataatgtgaacattcaccaaaaagaacttaaatacctccaaaactcctcaagtctttcagtcttgaggatcataaagatatataggaattacttatacaggacaaaatcaacacttgctaagacttcttaaagtccatagaaagaacaaaagcagcaggctccagaggccgtccagcaaagctgacttccctgctggggatgtcgggtccggtcctggctcaagacaaatctcctgctgctgtttggtttctgtaggtcactgcgctctgtggaaaagggcctcraaagcactt

SEQ ID NO: 50973 - DNA, 600 bp, Chicken  19866894298334_2
gaatgagtgyagtttataatgtgaacattcaccaaaaagaacttaaatacctccaaaactcctcaagtctttcagtcttgaggatcataaagatatataggaattacttatacaggacaaaatcaacacttgctaagacttcttaaagtccatagaaagaacaaaagcagcaggctccagaggccgtccagcaaagctgacttccctgctggggatgtcgggtccggtcctggctcaagacaaatctcctgctgctgtttggtttctgtaggtcactgcgctctgtggaaaagggcctcraaagcacttcattctcaagcctaccgacttcacattgaagatacgatggaattacttttaaaatgaagatagaaaagacacccaaaaggccagatttacttgtttgggggagatttccatagtgacagaatggtgtaacctccttgatacaatagcatgagctacctaggcagaaaggtttctgctttctagagaagtagccagcatttttgggtatctcatctgagtttgctcaaccagcaaacttttttttttttttttaacatctttgtgtggctgacaattcagctaagcttgaaa

SEQ ID NO: 50974 - DNA, 599 bp, Chicken  19866894298342_1
  misc_feature (1)..(9): n is any nucleotide
nnnnnnnnnaactgcctcctggctctaacactggctgtcataaatctttctgttttcaaaataacaacaataataatgataagcatagtacagaaaaaaaagctttgaagtcattcagttctctcattaaaggaacactgcaaattttggaaatgtgaactgtgaaagaagaagggatttcacaatggtatggaaggtaaaaacaaaaatgaaaacaacgaaagcaccataagacatacaaaagaactccccattcagtaccccagatgctgagaccagagtctgaaacccagatttctrtattatgtagccagatcactccagtcttggctgtttgctttccttccaaacagttgtttagtgaattattaaatacagaatgatttcaggtgttctctgcctctattttccttttcttcctgataagataggcttataagtttcaacattcattttgctgtgactcaaaagtaacatttgcagtggaaaaaaaagaaatgagtttcataaaataatctctgaaatctaattgtcactgtcagttataataaaaatrtctcctttactgcctaaaaccagaatggggaaaaggctcttaa

SEQ ID NO: 50975 - DNA, 600 bp, Chicken  19866894298342_2
agtaccccagatgctgagaccagagtctgaaacccagatttctrtattatgtagccagatcactccagtcttggctgtttgctttccttccaaacagttgtttagtgaattattaaatacagaatgatttcaggtgttctctgcctctattttccttttcttcctgataagataggcttataagtttcaacattcattttgctgtgactcaaaagtaacatttgcagtggaaaaaaaagaaatgagtttcataaaataatctctgaaatctaattgtcactgtcagttataataaaaatrtctcctttactgcctaaaaccagaatggggaaaaggctcttaaacaactgaattatgttgacatagcaagtcactgaaagcactaactaattagcttagtggtattgctgtaatgtactacagtgcaatcacataatttagacactttctggtctttaaaagatacttgaacattttctattttgttttctgcagatttgaagtcaatagaatagccaccaacttactgaaaacagcgttttgccagtgctgatgcctttgaaaaatctcatcctcaaagcagcatagaaataattgggt

SEQ ID NO: 50976 - DNA, 599 bp, Chicken  19866894298345_1
  misc_feature (1)..(202): n is any nucleotide
nnnnnnnnnnnnnnnnnnnnnnnnnnnnnnnnnnnnnnnnnnnnnnnnnnnnnnnnnnnnnnnnnnnnnnnnnnnnnnnnnnnnnnnnnnnnnnnnnnnnnnnnnnnnnnnnnnnnnnnnnnnnnnnnnnnnnnnnnnnnnnnnnnnnnnnnnnnnnnnnnnnnnnnnnnnnnnnnnnnnnnnnnnnnnnnnnnnnnnnnnnattcccccaaacagaaagtgagggcaaacatttgtttctacaaggtgatatgctgtaaaacagtataaggaaatccgtgataaaaatgaaagcagtgraactgatccttgtacagagacatagcaaagcatctggaatattctgcacaaggtttgaatatctgcctgccacttttgtaactgtaaacttagaatgctgagagtacaaaataggcgaaatataagaatcacattttgatgcatcctaatgccttattcttaacagaggctgtgtagacaacagtgactagaaacataatttcttatggagttaggagagtgtatttaattttggcaaaacagattaattatgttctgttgctacataacgtcacaattaatgtatgctgccacctcag

SEQ ID NO: 50977 - DNA, 600 bp, Chicken  19866894298353_1
cccctctgcaattacctggaatagtactttttaaagaactaccagagttcagatctgcgatatttgaaaaagcagaagctactagatagccccactaacaatagtaataatttaaaaaccaaaaaacaacaaaaaataccacccaaacttgctttacacacgcaccattaatgtattaaagcttacgtggtcctttgctttcattttcctaccagaactgacaattacgtttgctggaagatgcactggggaagacttgtgttggatgttctcaaaccaaaccagtacaacacttcagtytttatgagtgatacaaggcaaagtaagtcctggaaacagtatgttttcttcttctacagaattgtgcaaccacagaaaggtgaaagagtcccactttttactygtgctctaacttggaaaattgattggaagaattactcagataatagtttactcataatgcaattactgtaacttgcgtaagtgtggaggacgcagtgatgtctagtggttaggagaccagaccatgtgtcagggttttattccttatcttgctactgcttgctgtgagaacctgaacagttgcttaacatctactac

SEQ ID NO: 50978 - DNA, 600 bp, Chicken  19866894298353_2
gtaataatttaaaaaccaaaaaacaacaaaaaataccacccaaacttgctttacacacgcaccattaatgtattaaagcttacgtggtcctttgctttcattttcctaccagaactgacaattacgtttgctggaagatgcactggggaagacttgtgttggatgttctcaaaccaaaccagtacaacacttcagtytttatgagtgatacaaggcaaagtaagtcctggaaacagtatgttttcttcttctacagaattgtgcaaccacagaaaggtgaaagagtcccactttttactygtgctctaacttggaaaattgattggaagaattactcagataatagtttactcataatgcaattactgtaacttgcgtaagtgtggaggacgcagtgatgtctagtggttaggagaccagaccatgtgtcagggttttattccttatcttgctactgcttgctgtgagaacctgaacagttgcttaacatctactacatttagcttccctttcaaagtgagagtaaggttgtggttttacaggcagctcagcaaggatactgaattgctgcagaaaacccatgctgactgtatcacgctt

SEQ ID NO: 50979 - DNA, 600 bp, Chicken  19866894298353_3
agtgagagtaaggttgtggttttacaggcagctcagcaaggatactgaattgctgcagaaaacccatgctgactgtatcacgcttgtctttttcctccagttttacagaacatgaggaatctgccagaaaggaacaaaaattatgtggctactgtaagtggtttttggttttaaactcatgcaagctagtagtcttgtaaaatatcattttcttaattctcatcgtcacagctctcagggaaaggctgttgcagactgctgtgcaacaatgttagtaaggaagagaacagatttcacaasaaaagtaccaccaaaggaagcaaaggataaacctgtgcttctttttgttgaaatagaaaaggaaataaaaaggaactaaactgcaagataaagaggtagccacatagggcacttgacataggctctgcccaactcctctcaccaaggagsattcagaagccaaacagatggttatttcagcagagggcaccaaaacgacaaatatgttgtagtgttttgactttgtctgccctgtgagcattaaatctctgatattcccacagcctcagaatgggtttgtgtccttgatatgccttgact

SEQ ID NO: 50980 - DNA, 600 bp, Chicken  19866894298353_4
actgtaagtggtttttggttttaaactcatgcaagctagtagtcttgtaaaatatcattttcttaattctcatcgtcacagctctcagggaaaggctgttgcagactgctgtgcaacaatgttagtaaggaagagaacagatttcacaasaaaagtaccaccaaaggaagcaaaggataaacctgtgcttctttttgttgaaatagaaaaggaaataaaaaggaactaaactgcaagataaagaggtagccacatagggcacttgacataggctctgcccaactcctctcaccaaggagsattcagaagccaaacagatggttatttcagcagagggcaccaaaacgacaaatatgttgtagtgttttgactttgtctgccctgtgagcattaaatctctgatattcccacagcctcagaatgggtttgtgtccttgatatgccttgactttacttgcactgcttccagacattggatttttttgctttgttttgttttgtttatccctcctgcctggaaagagatagtgctgaatgacactggaagatatacagttaaagcaagcaaggcaaagacaagtaagcaaaaagtcactagag

SEQ ID NO: 50981 - DNA, 456 bp, Chicken  19866894298357_1
gtaaagcagtaatttgtggttgttaggctgactccagattacgaaattacactgattgcgtatacagcctgctgagcactggcaacacggatgctcagcaacatcccgggagctgctatcactcaaactacatctgcagatcagttgtgccgataatttgaaactaaaaatgcaagcatgttgactgcagtgtactacagaaggcaccaggcctatatgtgtctcatgtaatcctcctgctgggctggaatcaccaccttcagcctaacatgccattcacaagttcattctcaagatctytttctcttgcttttctgcacttgtgcacaaaggtggaaatatttatcatcacacactcagaatccaatagaagaggattgcatatagaccacaactgactttagtaaagtctaacatttactgcccatttcttgtactgatctacacaaggaatta

SEQ ID NO: 50982 - DNA, 600 bp, Chicken  19866894298367_1
gtcacctcgcctgcttctgcttgctgcactacttctgatacaggtcaggatgccattggcctgtttgtccacctggacacactcctggcacatgttcagccaatggtcgaccaatacccccagatccttttcctctgtacattcttccagccactctgccatcaccttgtagcattgcctagggttgttgtggtggaagtgtaggacctggcacttgatcttgtcgaacttcattccactgacctctgtccattaatcctgcctgttcagatctctttgccgggcgttcctactctcagrgagatcagcacttctttgtgacttggcgtcatctgcaaactcaaagattggaacaatcttgttaggaaggtgtttgatgccccatgcctgtcagtgttcaagaggagtttggataatacctttaataatatgctctaacttttcattagccccaaagtgatcaggctgttggagttgatgatctttatagatcccttctaactcaactattctaattattctaattctaatcctaattaattctgattttaattttacaatattagatgttggtgacagaagtagcaagaaagctccagg

SEQ ID NO: 50983 - DNA, 600 bp, Chicken  19866894298367_2
aaaacctgaatgttttttacgataattttaggaatggttattcttttgcttctcttcgctcctctttttccttcccttcctctcccctccctcctcttactcctactcctactcctactcctacttctactcctgctcctgctcctactcctactcctactcctactcctactcctactccttctattatttttctccaatggtttcctattttctattcagtatttaaataagaactattaaaagaacagatccttctatttccttggttgtatatattgtccattctaatttgtttcyaaaagccaaacatgaaaattcttaattatctggctagtagaaaaggtagatctcactagttgaacttaagagacaacagctgttgatttaaccattgttctgttatcataatacagttgttttatctgttttaataatagcattatagctgtttaaatatgaatgtttcattctggcttcacagttaatttggtgtaatgtccttgttgaaggaactcctattacattaggtgaaattaaaattttcaataaaaaaataaagttttctaaacaattccaaataagaagaggcattgcaga

SEQ ID NO: 50984 - DNA, 600 bp, Chicken  19866894298369_1
cgctgcaaactttgtagtcaatgttgccaccgtcatttccaatgaactgaagccaatgttcagatttgtacacagttctcttgttgtaatccaataatctgtgtgaatgagctgattgagacactctttattttgtggtctaacagttgtgcatggcaacctagaacactggtgttgccactgctgaaatgcaccacccactgcctcactgtgctgacatgtgctctttggtctccataagctttcagctagtgttgatgaatgccaatgggtgcaatttttttccacatggagaaattmagttccacacctttgcttcacacacacatctatgtcagacaccactgtgtcacactgcccctctgctgccttctgtcacatggaaacaaaatatagttgaatattggtgggaaggtgcaacttttactgccataccaccaacatctgcttttgatgtcatgaaccaacataataaaataggaggtattacttttggagcagcccttgaacctgggagtctgtctccttgaactggctaaaaaaaaaatcagtcggtgagaggattacaagacaaataaaaaggcactatgcakctgtcct

SEQ ID NO: 50985 - DNA, 585 bp, Chicken  19866894298369_2
gaaattmagttccacacctttgcttcacacacacatctatgtcagacaccactgtgtcacactgcccctctgctgccttctgtcacatggaaacaaaatatagttgaatattggtgggaaggtgcaacttttactgccataccaccaacatctgcttttgatgtcatgaaccaacataataaaataggaggtattacttttggagcagcccttgaacctgggagtctgtctccttgaactggctaaaaaaaaaatcagtcggtgagaggattacaagacaaataaaaaggcactatgcakctgtcctgttttatacatgtaacagagaagtataaattgtgggggtgggtatctcagctcattttaactttgataatctctaacatcaaatatggcaggcacacacacacacacacacacacacgcacacacaaagtagtgaagaaggaagagttaatacgggctgctttgaactactcatttaattcttattttggccaaggaggactagtggtaacacctgatggtcattctgtaaccacatcacagtcaaagtggggaattacaggggtactatgtgtcttg

SEQ ID NO: 50986 - DNA, 600 bp, Chicken  19866894298374_1
ctgctcgcagtgggagcctcagggatttgggaaatggggtaaagttcaggcgctcaccgcagctcacaacgcgcccagccacgccagctgccgcccagctgtagcctcgttgttcttcctcctcagctcctttaagtgtgtgctgttagcatgctcagttggtattcttcaaacgctggggcttgctgaagctggctcctggagtagcctcgcttctgctggagaggccggggagagctgtcagcaagcagaggggctggcagaccggcagaacctgcactgtaggtataggggcctgtrcatgcccttcagctcaggcttaagggaacacagtgctcgcaagcactaaattaaatgttgctctcaaagagtgcacgtgcagtaatttttttttatcgttgtcagtatatatactgtttcttttgcaattttacagtttgttttgcattctcttttcttcagagtcattaattagtccttctcmmttgctgcaaaacagcacttccttagaccaccatcctgtgtgtttgtttggtgtgaattgcacaggctgtgtttcagtagagcatgcagcagggttagctgtgtgggaagctgcag

SEQ ID NO: 50987 - DNA, 600 bp, Chicken  19866894298374_2
gctgaagctggctcctggagtagcctcgcttctgctggagaggccggggagagctgtcagcaagcagaggggctggcagaccggcagaacctgcactgtaggtataggggcctgtrcatgcccttcagctcaggcttaagggaacacagtgctcgcaagcactaaattaaatgttgctctcaaagagtgcacgtgcagtaatttttttttatcgttgtcagtatatatactgtttcttttgcaattttacagtttgttttgcattctcttttcttcagagtcattaattagtccttctcmmttgctgcaaaacagcacttccttagaccaccatcctgtgtgtttgtttggtgtgaattgcacaggctgtgtttcagtagagcatgcagcagggttagctgtgtgggaagctgcagggctgcacctctgtaagcagggctgctgacaggacctgtgcttgtgtgcaggctgggctgcacctgaccgacagtgctgtgctctgatctcacccaactgggatgagattggtgttaagtttgcgcctctctgcggcgtccrttatccttgtggtcaagcgtgaccagttcataaaagatgtag

SEQ ID NO: 50988 - DNA, 600 bp, Chicken  19866894298374_3
ctgaagctggctcctggagtagcctcgcttctgctggagaggccggggagagctgtcagcaagcagaggggctggcagaccggcagaacctgcactgtaggtataggggcctgtrcatgcccttcagctcaggcttaagggaacacagtgctcgcaagcactaaattaaatgttgctctcaaagagtgcacgtgcagtaatttttttttatcgttgtcagtatatatactgtttcttttgcaattttacagtttgttttgcattctcttttcttcagagtcattaattagtccttctcmmttgctgcaaaacagcacttccttagaccaccatcctgtgtgtttgtttggtgtgaattgcacaggctgtgtttcagtagagcatgcagcagggttagctgtgtgggaagctgcagggctgcacctctgtaagcagggctgctgacaggacctgtgcttgtgtgcaggctgggctgcacctgaccgacagtgctgtgctctgatctcacccaactgggatgagattggtgttaagtttgcgcctctctgcggcgtccrttatccttgtggtcaagcgtgaccagttcataaaagatgtagg

SEQ ID NO: 50989 - DNA, 600 bp, Chicken  19866894298374_4
ttgcattctcttttcttcagagtcattaattagtccttctcmmttgctgcaaaacagcacttccttagaccaccatcctgtgtgtttgtttggtgtgaattgcacaggctgtgtttcagtagagcatgcagcagggttagctgtgtgggaagctgcagggctgcacctctgtaagcagggctgctgacaggacctgtgcttgtgtgcaggctgggctgcacctgaccgacagtgctgtgctctgatctcacccaactgggatgagattggtgttaagtttgcgcctctctgcggcgtccrttatccttgtggtcaagcgtgaccagttcataaaagatgtaggataataaataatcatcttaaactcactgacctgtcatcatcatgtgcctcatttcccttaacaacttaatgccttaacagatgagagtcctggtccagggaacctcaaatgaataattgcaaacgagccgtgctggtcagctgagagcaaacgtcctccgtgctgtggtctatcagtgaggtgagctgaggccaagccctgagaagtcgcaaatactgggagttgtgtgtctttcacatcgtgccttcatttcattt

SEQ ID NO: 50990 - DNA, 599 bp, Chicken  19866894298375_1
  misc_feature (1)..(123): n is any nucleotide
nnnnnnnnnnnnnnnnnnnnnnnnnnnnnnnnnnnnnnnnnnnnnnnnnnnnnnnnnnnnnnnnnnnnnnnnnnnnnnnnnnnnnnnnnnnnnnnnnnnnnnnnnnnnnnnnnnnnnnnnnnngaagtgccctcatgtaaaacagaatacctcgaatgcccagaccaggcttcctctaacaacaaagacacaaaccgtattgcacaagtgccaagcaatgcctcagtcaagaatttcttcctgacatctaaaccaaatttcccctcactccattaaaatgtgctattgctgacataccaygtaaaaagttgtttcccctcctgcctgtaagctcccttcaagtactggaagggcacagtgaggtctttgtggagccaactcttctgcaggatgaacaaacccaactccagcagcctttctgcacagcagatgtgctccagccctttcatcttctctgtggccctcctctggacccaatccatgcagctcagtcagcattcctgggtgacacccagcaggcctcacacacagttcggcacatccagttgaacagcccctctgtgttctttgctcagtcttcctcagaaaaagcagtactg

SEQ ID NO: 50991 - DNA, 599 bp, Chicken  19866894298380_1
  misc_feature (1)..(92): n is any nucleotide
nnnnnnnnnnnnnnnnnnnnnnnnnnnnnnnnnnnnnnnnnnnnnnnnnnnnnnnnnnnnnnnnnnnnnnnnnnnnnnnnnnnnnnnnnnnnctatgttttgggccagggaaaggaagtggagtctgtgtttgaaccacattttcctgcaggagcattactgccctcttgggctttcccttaccttgctagctctccccagtgtctctgcctatactgggttggacagaggtgggagatgctgaccttgctccttctgtacctgtgggcagcaagcctgggaggcagcagtgtttgaagmatactggttgttttcagctgtaacttgacagtaggaaactagttcaaatccttgtgtcatatatatgaactaagactcaaagtcagatttaccatcgttaggagttatcaaagctgtcacccagcagttgctgaaattgcaaaggaagcagtattaaagttattgtaggtattgttttttagaaggtgtgggtgtggttctgtttcggccatctccccttgcaatggcttcattttaatactcttttaagtaaccctaagtgatcttgcttctttgctaatcttttattatttttttta

SEQ ID NO: 50992 - DNA, 600 bp, Chicken  19866894298380_2
agtctttcagtttatgcagtatcaaaaatgtttgttgataaatatttttcctacctcgtatactgtgtatatatttgacctcaagtaaaccaacatcatgcatcattgctcctgaagttaatgttttcttaggaatgatttaaagtgggatcagccagaaacaggaaatgaaacagcctttcttgtaatattaattagcctgagactttttaaaatagttttgtctttttcctgctccctctctgcctccaggagactcaccagcagttggcaaaccagaaaaacctctacgtggtggarttycgtgaggagcaaggcccactgcccattgtcgtggcgctgcccgaggggactgtccgcgaggatcctgagcctgaggatgaggttccagacactaaactggagtggtgtgaggtgaaagaagctcagggaatgaagaaatcaccctgggcaaatgttagacggacagtatggtaaaaaaaaaataataataaaattcagtacrtatgtctcttctgctyagagatgcagctgtgaaagcccagcccaaatgggcaggcttgcatttcagaagatggctacagtagatttcatgccatc

SEQ ID NO: 50993 - DNA, 600 bp, Chicken  19866894298380_3
ctttcagtttatgcagtatcaaaaatgtttgttgataaatatttttcctacctcgtatactgtgtatatatttgacctcaagtaaaccaacatcatgcatcattgctcctgaagttaatgttttcttaggaatgatttaaagtgggatcagccagaaacaggaaatgaaacagcctttcttgtaatattaattagcctgagactttttaaaatagttttgtctttttcctgctccctctctgcctccaggagactcaccagcagttggcaaaccagaaaaacctctacgtggtggarttycgtgaggagcaaggcccactgcccattgtcgtggcgctgcccgaggggactgtccgcgaggatcctgagcctgaggatgaggttccagacactaaactggagtggtgtgaggtgaaagaagctcagggaatgaagaaatcaccctgggcaaatgttagacggacagtatggtaaaaaaaaaataataataaaattcagtacrtatgtctcttctgctyagagatgcagctgtgaaagcccagcccaaatgggcaggcttgcatttcagaagatggctacagtagatttcatgccatccat

SEQ ID NO: 50994 - DNA, 600 bp, Chicken  19866894298380_4
ctttttaaaatagttttgtctttttcctgctccctctctgcctccaggagactcaccagcagttggcaaaccagaaaaacctctacgtggtggarttycgtgaggagcaaggcccactgcccattgtcgtggcgctgcccgaggggactgtccgcgaggatcctgagcctgaggatgaggttccagacactaaactggagtggtgtgaggtgaaagaagctcagggaatgaagaaatcaccctgggcaaatgttagacggacagtatggtaaaaaaaaaataataataaaattcagtacrtatgtctcttctgctyagagatgcagctgtgaaagcccagcccaaatgggcaggcttgcatttcagaagatggctacagtagatttcatgccatccatgttgctgctcccattactaccattcagtaacagtttgctctcccacaactcttctgatcgctgttcagctaggaacatacaggagaaagcagccaatggacatgactttgacttcaagcgtgcttttacttaattcctgcagatgtgtaatcaacagatcctgtgtttccttcacawactcttgggaaactcctgaaaatac

SEQ ID NO: 50995 - DNA, 600 bp, Chicken  19866894298380_5
tgtctttttcctgctccctctctgcctccaggagactcaccagcagttggcaaaccagaaaaacctctacgtggtggarttycgtgaggagcaaggcccactgcccattgtcgtggcgctgcccgaggggactgtccgcgaggatcctgagcctgaggatgaggttccagacactaaactggagtggtgtgaggtgaaagaagctcagggaatgaagaaatcaccctgggcaaatgttagacggacagtatggtaaaaaaaaaataataataaaattcagtacrtatgtctcttctgctyagagatgcagctgtgaaagcccagcccaaatgggcaggcttgcatttcagaagatggctacagtagatttcatgccatccatgttgctgctcccattactaccattcagtaacagtttgctctcccacaactcttctgatcgctgttcagctaggaacatacaggagaaagcagccaatggacatgactttgacttcaagcgtgcttttacttaattcctgcagatgtgtaatcaacagatcctgtgtttccttcacawactcttgggaaactcctgaaaatacaagattgtggaagcaa

SEQ ID NO: 50996 - DNA, 600 bp, Chicken  19866894298380_6
aaaaataataataaaattcagtacrtatgtctcttctgctyagagatgcagctgtgaaagcccagcccaaatgggcaggcttgcatttcagaagatggctacagtagatttcatgccatccatgttgctgctcccattactaccattcagtaacagtttgctctcccacaactcttctgatcgctgttcagctaggaacatacaggagaaagcagccaatggacatgactttgacttcaagcgtgcttttacttaattcctgcagatgtgtaatcaacagatcctgtgtttccttcacawactcttgggaaactcctgaaaatacaagattgtggaagcaataaagaatcctcagaatgagtttggtggaggagttagcgtcttttttgcacaatgctgatatctgggagaccttgaagaaagcagcagtagtgagagtcagtgtgtctactctccatctcactctacaggcttcagagtagyggggcaactgaaatcaagaaggtagatgatttatagctcaaargacataggcaaagtgatgaagggcaacatctgaatctgtgcgaacactagttgtgaaagtgggggagttcctcc

SEQ ID NO: 50997 - DNA, 600 bp, Chicken  19866894298380_7
ctgttcagctaggaacatacaggagaaagcagccaatggacatgactttgacttcaagcgtgcttttacttaattcctgcagatgtgtaatcaacagatcctgtgtttccttcacawactcttgggaaactcctgaaaatacaagattgtggaagcaataaagaatcctcagaatgagtttggtggaggagttagcgtcttttttgcacaatgctgatatctgggagaccttgaagaaagcagcagtagtgagagtcagtgtgtctactctccatctcactctacaggcttcagagtagyggggcaactgaaatcaagaaggtagatgatttatagctcaaargacataggcaaagtgatgaagggcaacatctgaatctgtgcgaacactagttgtgaaagtgggggagttcctccattgaagcagagcccaaatatcrgaggacggtaatctcacaatctcctattttagccggtgttggaagtgcaaaacctgcattcacatctttctcacagaaccttcctttgcaaatgtgctgggacaggacttggctttcctctctgccaatttggtactgagaacagcaatatcttgggccc

SEQ ID NO: 50998 - DNA, 600 bp, Chicken  19866894298380_8
gactttgacttcaagcgtgcttttacttaattcctgcagatgtgtaatcaacagatcctgtgtttccttcacawactcttgggaaactcctgaaaatacaagattgtggaagcaataaagaatcctcagaatgagtttggtggaggagttagcgtcttttttgcacaatgctgatatctgggagaccttgaagaaagcagcagtagtgagagtcagtgtgtctactctccatctcactctacaggcttcagagtagyggggcaactgaaatcaagaaggtagatgatttatagctcaaargacataggcaaagtgatgaagggcaacatctgaatctgtgcgaacactagttgtgaaagtgggggagttcctccattgaagcagagcccaaatatcrgaggacggtaatctcacaatctcctattttagccggtgttggaagtgcaaaacctgcattcacatctttctcacagaaccttcctttgcaaatgtgctgggacaggacttggctttcctctctgccaatttggtactgagaacagcaatatcttgggccctgtccaaggcttaggaagtgttacagctgttgagattaaagga

SEQ ID NO: 50999 - DNA, 594 bp, Chicken  19866894298380_9
acaagattgtggaagcaataaagaatcctcagaatgagtttggtggaggagttagcgtcttttttgcacaatgctgatatctgggagaccttgaagaaagcagcagtagtgagagtcagtgtgtctactctccatctcactctacaggcttcagagtagyggggcaactgaaatcaagaaggtagatgatttatagctcaaargacataggcaaagtgatgaagggcaacatctgaatctgtgcgaacactagttgtgaaagtgggggagttcctccattgaagcagagcccaaatatcrgaggacggtaatctcacaatctcctattttagccggtgttggaagtgcaaaacctgcattcacatctttctcacagaaccttcctttgcaaatgtgctgggacaggacttggctttcctctctgccaatttggtactgagaacagcaatatcttgggccctgtccaaggcttaggaagtgttacagctgttgagattaaaggaaaaagagaaagtctgtgatgtgtaccagcttcttgtcagagaaggagtaaaccccttcatgtagggatctccatctaagcatgcagaggta

SEQ ID NO: 51000 - DNA, 600 bp, Chicken  19866894298384_1
tatcttgcagtcattgtggttcactgagttatgtggtctacatcatgtgcacttgatgcacgtgagattagacttctttttttactacctacttccattacaagcaggtctacatcctgaatgtcttccggcccattcctacctttcctgattcaagtgcaggaaataatagaatcacgtatgaaatattgtatagatgcacaagctagatgcgaggcttccaaagcttttctgaacttactttcactgagctttccattcgcttcgctcacagcacgtacaggactgcacaaagaaacrttctcattgagttctaaatgagaagctggtctttgtgtcataccttgggcgaccaccaaagctaagtcagtctcaaggcgagaggctcagttagaggcaagaaggtcataccaactcaagaatggccatccacccacctggaccttaaacaaacaaacattaagagcaactaggcctggcacaacgcccttcacaccttaatggtgacagtctcctaccaagcactcagacacaactgccagtggctttgtcttgaaaagctgcagtcctctggttgtgcacttaaccatcccatgtcct

SEQ ID NO: 51001 - DNA, 600 bp, Chicken  19866894298391_1
gtctaaggctatcatttgtttattcccatggaggaaaactaagggaaaaaaaaaaaatgatgtttgacctgctggtagataagagacacagcactactgaatttttctaatttagtttcagtatttttctctggaagctttgctttaaaagcataagaaaacaacattttgaaagtgtactgattggatcttcaccagctagagcttccagtcaaaacagctcaagggaaaaacaagaaaagttgtcttaaatcaacttcttgttcttcttcatcccgaagtgaccagctggacagctcmtggcatgaactgcaccagagtaaagaccacagaaatacaatccttcctagccacctccctgtcaagagcatcatgcggcatgactgctggttctcataactgcctctccataccctactacaagggaacaaaaataagccagagcctgacttatatagcgggccaaattttaaaaacccgaagtgcctgcacttcaggacttcagccaatattcttgcaaagttaagggtgaaacaacacaatccttatctgtatgaagatgttgaatggaataatcagcattattcagataattgtttc

SEQ ID NO: 51002 - DNA, 600 bp, Chicken  19866894298392_1
tcaaagcatgacaactacttacaggctgaggtgtttttcttttttttccctttacagagcatttaacttctttttttcattagttaaattttctctgaccatcttctgagcctgtgtgcagcagcatgtgtgaggatcccttatgctcatccgtgccatgtgagaattggctgagcagttctacgacagatttggcttttaattttgttattaaggctgtcagcacatagtttctatttgacgtctgaaacctcagcatagaggttggcgtgctgcaagcagaggggtctgagttgcatyggggaagggtgatcacgtcagggtgatccgcgctcaaagtgactcctgtgagtcataccctgcaagtgaatgccaggaaagtgcttttgcagagctccatatgtgttgtctgctgcatgtgtgctccagaagaagctattcttggaattactttaaaagtttatcccattcagagacaacttctgtttcctctgctagggtagtcaggtgatagcaggtttttgctgacgagagggatgacacggaggacttgaaagctgaagtgatttaaggaagaaagactgctgttctttcaaacaa

SEQ ID NO: 51003 - DNA, 600 bp, Chicken  19866894298394_1
tcctctctgcagcatgacattttgattactacaagcataccaatcccaagttaatgaacaattccaaattaatattaggaaattaatattaggaaattaatatatggtgcatattgaatgaattattttttttttccatctagtagggaggtctgtcatgggaaatgtgggctcggagctctgctgaactctgccatttcaagcttcactcccaactggcaccatctccttgtgcagccccagaaatgccagtcacttctgtgctctgcgttcctggtttgtacagcagcgatgctgcaygaaacccctctccaaaaaggttttgaaacttactgacaaaaacactatacatcattacaaaaggggtgtttaatggtagagtcctgacagccttgatcctacggttttttgtttcttttctaaatgagctgctgccgccgctggtttgggaatcctggctacctgttagtgagcaggtcggcagcagggcaattaccccctttcctctgcatcgatttgtgactccatacattgggcaagatggaatagaacaaattcagttacagacaaatgcgacctcacaagtctcacttaaggact

SEQ ID NO: 51004 - DNA, 600 bp, Chicken  19866894298399_1
tatacaaaatagctaataatagatctcatggagcgacctgcaagaagtagtagtattatggcattagtactttatttctgtagtttcattaatattagcagtagttacataaaatatttgcaaatagtgatcattctaagtatctagaatgatagaatgatcatctaagtatgtagaagattctaagtatcgtgaatgggagtatataagaggaaggctgaagagtacatctgattttcaaactgccaaaactatacattttctgaatattaagaaatggatttacatctgaaataaagyttcttttgaattttgtttatactcttctgagaagctgcttgrctgggtaaaggcagactgagactgaataccgagaatgctgctacccaagggggccagtcgaaatttggctaccatgttttaaggcagtactcttcagtcatctaaaaactttaagaaccattacaaataagtgaaccaaaacatcctgaacttctcagtcagttataaaactggtagatcttcagaaatatgagacacatcactttttaatgttacaataatatatattactaataaactaataaatataatttatgt

SEQ ID NO: 51005 - DNA, 600 bp, Chicken  19866894298399_2
agaagtagtagtattatggcattagtactttatttctgtagtttcattaatattagcagtagttacataaaatatttgcaaatagtgatcattctaagtatctagaatgatagaatgatcatctaagtatgtagaagattctaagtatcgtgaatgggagtatataagaggaaggctgaagagtacatctgattttcaaactgccaaaactatacattttctgaatattaagaaatggatttacatctgaaataaagyttcttttgaattttgtttatactcttctgagaagctgcttgrctgggtaaaggcagactgagactgaataccgagaatgctgctacccaagggggccagtcgaaatttggctaccatgttttaaggcagtactcttcagtcatctaaaaactttaagaaccattacaaataagtgaaccaaaacatcctgaacttctcagtcagttataaaactggtagatcttcagaaatatgagacacatcactttttaatgttacaataatatatattactaataaactaataaatataatttatgtataaacagctaataawttagagcaagtataatgctatttctt

SEQ ID NO: 51006 - DNA, 600 bp, Chicken  19866894298399_3
ttatactcttctgagaagctgcttgrctgggtaaaggcagactgagactgaataccgagaatgctgctacccaagggggccagtcgaaatttggctaccatgttttaaggcagtactcttcagtcatctaaaaactttaagaaccattacaaataagtgaaccaaaacatcctgaacttctcagtcagttataaaactggtagatcttcagaaatatgagacacatcactttttaatgttacaataatatatattactaataaactaataaatataatttatgtataaacagctaataawttagagcaagtataatgctatttcttgactgagactttatccgtttcagtttaatttcacattccttttgctcagaaaaaaaaaaaaagtaagactttgaaactrtaaaatcatttgtagtcattaatctatttctagttatctatcagtaaggactaatcaactaatcataattttaacaagtaataagaataaaaagatcactccaaaatactagattgtttttcattttaaatatcttctatgctttagattggcatggactgttttatattttcctcctttgaaaagatatgggca

SEQ ID NO: 51007 - DNA, 600 bp, Chicken  19866894298399_4
atttggctaccatgttttaaggcagtactcttcagtcatctaaaaactttaagaaccattacaaataagtgaaccaaaacatcctgaacttctcagtcagttataaaactggtagatcttcagaaatatgagacacatcactttttaatgttacaataatatatattactaataaactaataaatataatttatgtataaacagctaataawttagagcaagtataatgctatttcttgactgagactttatccgtttcagtttaatttcacattccttttgctcagaaaaaaaaaaaawgtaagactttgaaactrtaaaatcatttgtagtcattaatctatttctagttatctatcagtaaggactaatcaactaatcataattttaacaagtaataagaataaaaagatcactccaaaatactagattgtttttcattttaaatatcttctatgctttagattggcatggactgttttatattttcctcctttgaaaagatatgggcatcttggttgagtgccagtgggcagcaaatgtgcccagcactgcctaggaataaggagcatkgattaagggaagtgattactcccttca

SEQ ID NO: 51008 - DNA, 600 bp, Chicken  19866894298399_5
taaggcagtactcttcagtcatctaaaaactttaagaaccattacaaataagtgaaccaaaacatcctgaacttctcagtcagttataaaactggtagatcttcagaaatatgagacacatcactttttaatgttacaataatatatattactaataaactaataaatataatttatgtataaacagctaataawttagagcaagtataatgctatttcttgactgagactttatccgtttcagtttaatttcacattccttttgctcagaaaaaaaaaaaaagtaagactttgaaactrtaaaatcatttgtagtcattaatctatttctagttatctatcagtaaggactaatcaactaatcataattttaacaagtaataagaataaaaagatcactccaaaatactagattgtttttcattttaaatatcttctatgctttagattggcatggactgttttatattttcctcctttgaaaagatatgggcatcttggttgagtgccagtgggcagcaaatgtgcccagcactgcctaggaataaggagcatkgattaagggaagtgattactcccttcactttgtacttgttagtc

SEQ ID NO: 51009 - DNA, 600 bp, Chicken  19866894298399_6
ttccttttgctcagaaaaaaaaaaaaagtaagactttgaaactrtaaaatcatttgtagtcattaatctatttctagttatctatcagtaaggactaatcaactaatcataattttaacaagtaataagaataaaaagatcactccaaaatactagattgtttttcattttaaatatcttctatgctttagattggcatggactgttttatattttcctcctttgaaaagatatgggcatcttggttgagtgccagtgggcagcaaatgtgcccagcactgcctaggaataaggagcatkgattaagggaagtgattactcccttcactttgtacttgttagtctgcaactggaatgctacatccagtttaggtttcccagtaaaggaaaatgttaataagctggaagaagtacagtggaaggccactgagatgatgatgagaagaaacagctgaaggarcaacctttgcttagcttcttctcttctctaggctaacaagagccttcttctacctatgaggaaatcattaacaggatagaactgagctctttgtagtgatgccctgcagaacaggagacacaaagtgaaaagaaagattc

SEQ ID NO: 51010 - DNA, 600 bp, Chicken  19866894298399_7
tttttcattttaaatatcttctatgctttagattggcatggactgttttatattttcctcctttgaaaagatatgggcatcttggttgagtgccagtgggcagcaaatgtgcccagcactgcctaggaataaggagcatkgattaagggaagtgattactcccttcactttgtacttgttagtctgcaactggaatgctacatccagtttaggtttcccagtaaaggaaaatgttaataagctggaagaagtacagtggaaggccactgagatgatgatgagaagaaacagctgaaggarcaacctttgcttagcttcttctcttctctaggctaacaagagccttcttctacctatgaggaaatcattaacaggatagaactgagctctttgtagtgatgccctgcagaacaggagacacaaagtgaaaagaaagattctgactggttacagaaaaaaaccttacgccaaccttcaagttgggcagggcagcagatggtccagagggactgtgatctctgttagttaagattttcaagaccccactggataaaaccctgatcaacctggtctgacctgatggctcaccttgctttagtg

SEQ ID NO: 51011 - DNA, 600 bp, Chicken  19866894298401_1
atttctccaccaaagtacttttaattgcctcataaatcatagcataatagcgtgtttttcttgcctaatttcctatgcagactcttctgtttcagcatatgtttgactttgttgcagatttccatgtctaattcccagagtctggcttcaaaaacaagtgaaaaactactgaaaaccgaaacacaccctccttagtatattagcttctcgttcttacagagctactgatttgctgtaaatagaggcagtggtcaatattggtgctgggacctctgaaaaatacttttttttttttttttyccccaaatagttattttaagactgaagcccaacaccatttatacagccattaccttgtgtagcagaaatcccactctaattgctcaagctacaagagtaattcttgcacttcccctgtttccttcattgttgaaggatataaagaaaaaaagtttttgaaaatttgggctttggtataaaagagaagtttttattgcaaagactggcaataaaatattcaaggaaacctaataagataacttaatgtatttactttgatgcattgtgtaaatgagggaatttctaatccagacatctgat

SEQ ID NO: 51012 - DNA, 599 bp, Chicken  19866894298403_1
  misc_feature (1)..(45): n is any nucleotide
nnnnnnnnnnnnnnnnnnnnnnnnnnnnnnnnnnnnnnnnnnnnnaaaacttatgtaaataaccaagggtccattttgttcaattatatactgtcatggtaaaataattgttcaatacagtcaaaaattccttccactaacttttatattccttataggaagtttctccatcagtgaatataataatagtcactgaaaacgtggtccaaaaaataaattttatgtacccgatgagcattattaaaatatagttgtatagcattgttttcaggaagactattgtgctgaccactgtgctcrtaagttggtaagtagatcttttttctttcaaggcagtagaaattgcttgaagatcttaatcctctttactgttcttttccaaaacaaagaacaaaacaaaacaaaacaaaacaaaaaaaagatttcattgactccatattttagagatatttatcttgtctcttcagtgatttatgtgaacatcaaacatcaataattctgtcacaaaagtgcttagaattatgacacatttaaatgttttgggtttttttccatatcaattgatatttccccagaagcaacactgttggaatttatga

SEQ ID NO: 51013 - DNA, 600 bp, Chicken  19866894298407_1
attgccagcccggagctgcagcagcgtgcagtggcacagcagggccccaagtaagcctaagcacagtgctcgctgcagaggagagctcagagcagggctggggcacgggtgggcctcctgcacgtcactgttatctgcaggaattgcaattgggttgctaaaacaggctcgtagggattagtcacaagagcagcacatcagtcctgcaaatctgcttaagcaaagcgcaggagtgagggagaagcactaattgtgctgctgagtgaaggctctggttaatctcccaaggacggagcactyggggcattgccacggggaggtggcagctgtcccagcagtgctctgggcatggctggatggaagccctgcttcccccttctctgggtgctccccatccactgtgcccaatgcaaagctgttcctctgcagccccatagcagtaagactccagcttctctctgtgccactcaactgactgaagggaagygctaaggtgtccacatagcattcttccaccttccaaaactcatgctgagctgtaggcgagcacatggtgcagcacacctttggggtgcagccgtgctttgcatagcagtgcaa

SEQ ID NO: 51014 - DNA, 600 bp, Chicken  19866894298407_2
gagcagcacatcagtcctgcaaatctgcttaagcaaagcgcaggagtgagggagaagcactaattgtgctgctgagtgaaggctctggttaatctcccaaggacggagcactyggggcattgccacggggaggtggcagctgtcccagcagtgctctgggcatggctggatggaagccctgcttcccccttctctgggtgctccccatccactgtgcccaatgcaaagctgttcctctgcagccccatagcagtaagactccagcttctctctgtgccactcaactgactgaagggaagygctaaggtgtccacatagcattcttccaccttccaaaactcatgctgagctgtaggcgagcacatggtgcagcacacctttggggtgcagccgtgctttgcatagcagtgcaagcagtgtctgctgggacaaaacaacgtatcaggaactaccatggctggtgtgagcagcacagccactgggaagccaatgcacctccccgtcccacacactccgatgtccccctgtggtcatggatccacaactccatccatcccacggctcacactgagagagggagaagcgctgtaagtgggggct

SEQ ID NO: 51015 - DNA, 599 bp, Chicken  19866894298416_1
  misc_feature (1)..(43): n is any nucleotide
nnnnnnnnnnnnnnnnnnnnnnnnnnnnnnnnnnnnnnnnnnnattcctttcacccctacaatactgtgattctataatacctaagactatgcccagatttgtttttaagaaaacaatggaagtcatatacttcataggtagacaactttcctttgataactttttgtagtaccccggcattccagatctgctcctcacaaaaaatatcctcaactggaccgtttttatttttaagctacagaacaatttgtttttcttcagtgcatttctcaggaaggcactgaagaaaggcacaaaayaggacaagtttctggcagatctgcagctcaaagtttagcaaagttacaagcttctctcactagatgtgctggtagatctgcagctcaaagttataagcttctctcactagaggtgctgggttttatctactagaagtcatgcaacaagctccaagtaatacacatttttaatgtctgtcataataatagtataaamtattaaaaatgaaagaaaaaaaatgaaataaaatggccagatattgcccttatcaccaataaatcagtctggcttacctcagtgggctctaaaattctaaatg

SEQ ID NO: 51016 - DNA, 600 bp, Chicken  19866894298416_2
cacaaaaaatatcctcaactggaccgtttttatttttaagctacagaacaatttgtttttcttcagtgcatttctcaggaaggcactgaagaaaggcacaaaayaggacaagtttctggcagatctgcagctcaaagtttagcaaagttacaagcttctctcactagatgtgctggtagatctgcagctcaaagttataagcttctctcactagaggtgctgggttttatctactagaagtcatgcaacaagctccaagtaatacacatttttaatgtctgtcataataatagtataaamtattaaaaatgaaagaaaaaaaatgaaataaaatggccagatattgcccttatcaccaataaatcagtctggcttacctcagtgggctctaaaattctaaatgagggaagaatcaccagaagtttttccagctcttttttcagacttctgcctcttttggctgtctgcctgtgagagcttgcgtctctgaaacagcytccctgatgcattgtttcctgaaaacaaagaatacaaaaaggcaagcataattattctcattcttggatactygaagcaaatggtagaagacataagtaatga

SEQ ID NO: 51017 - DNA, 600 bp, Chicken  19866894298416_3
taagcttctctcactagaggtgctgggttttatctactagaagtcatgcaacaagctccaagtaatacacatttttaatgtctgtcataataatagtataaamtattaaaaatgaaagaaaaaaaatgaaataaaatggccagatattgcccttatcaccaataaatcagtctggcttacctcagtgggctctaaaattctaaatgagggaagaatcaccagaagtttttccagctcttttttcagacttctgcctcttttggctgtctgcctgtgagagcttgcgtctctgaaacagcytccctgatgcattgtttcctgaaaacaaagaatacaaaaaggcaagcataattattctcattcttggatactygaagcaaatggtagaagacataagtaatgagaagacctgtaagtctgtatctgatgagaaataatgaagtatcttacagacagagaaaaattgaagtgcaaaggcatgtaacrtttcacacattaataatgcaatcacactttctaagataacgcatctttctcatttttttagagaaggatagtggtgttttgccttagaacatattttatctggaccatttcgyt

SEQ ID NO: 51018 - DNA, 600 bp, Chicken  19866894298416_4
tttaatgtctgtcataataatagtataaamtattaaaaatgaaagaaaaaaaatgaaataaaatggccagatattgcccttatcaccaataaatcagtctggcttacctcagtgggctctaaaattctaaatgagggaagaatcaccagaagtttttccagctcttttttcagacttctgcctcttttggctgtctgcctgtgagagcttgcgtctctgaaacagcytccctgatgcattgtttcctgaaaacaaagaatacaaaaaggcaagcataattattctcattcttggatactygaagcaaatggtagaagacataagtaatgagaagacctgtaagtctgtatctgatgagaaataatgaagtatcttacagacagagaaaaattgaagtgcaaaggcatgtaacrtttcacacattaataatgcaatcacactttctaagataacgcatctttctcatttttttagagaaggatagtggtgttttgccttagaacatattttatctggaccatttcgyttaccatcaatactaagcaacagtaggacaacagttgtttttctgattgacttgtttagccttatgtttttaag

SEQ ID NO: 51019 - DNA, 600 bp, Chicken  19866894298416_5
gggctctaaaattctaaatgagggaagaatcaccagaagtttttccagctcttttttcagacttctgcctcttttggctgtctgcctgtgagagcttgcgtctctgaaacagcytccctgatgcattgtttcctgaaaacaaagaatacaaaaaggcaagcataattattctcattcttggatactygaagcaaatggtagaagacataagtaatgagaagacctgtaagtctgtatctgatgagaaataatgaagtatcttacagacagagaaaaattgaagtgcaaaggcatgtaacrtttcacacattaataatgcaatcacactttctaagataacgcatctttctcatttttttagagaaggatagtggtgttttgccttagaacatattttatctggaccatttcgyttaccatcaatactaagcaacagtaggacaacagttgtttttctgattgacttgtttagccttatgtttttaagctctatcctgcagaaagcccggcactcaccactaaaacagttcattatcagtttccaaaactgtgtgtgagttttaagtagcatttgaagcttatcattagcaataacactca

SEQ ID NO: 51020 - DNA, 600 bp, Chicken  19866894298416_6
ytccctgatgcattgtttcctgaaaacaaagaatacaaaaaggcaagcataattattctcattcttggatactygaagcaaatggtagaagacataagtaatgagaagacctgtaagtctgtatctgatgagaaataatgaagtatcttacagacagagaaaaattgaagtgcaaaggcatgtaacrtttcacacattaataatgcaatcacactttctaagataacgcatctttctcatttttttagagaaggatagtggtgttttgccttagaacatattttatctggaccatttcgyttaccatcaatactaagcaacagtaggacaacagttgtttttctgattgacttgtttagccttatgtttttaagctctatcctgcagaaagcccggcactcaccactaaaacagttcattatcagtttccaaaactgtgtgtgagttttaagtagcatttgaagcttatcattagcaataacactcaaaaggctaaatataccctggaacatcatgaactagcattatagttgctgttggagttgtttctgtataacacaattccatttcacctttctctagccccaataaagcatttca

SEQ ID NO: 51021 - DNA, 600 bp, Chicken  19866894298416_7
tggaacatcatgaactagcattatagttgctgttggagttgtttctgtataacacaattccatttcacctttctctagccccaataaagcatttcaggagtctccagaggcccagaaggataacaataagactttattttaccaagctgatagctgaaaacctttcccagatgcactgggttttccctctggcttagatgctacaaatagttcagagcttgtggactattttgctagtaacatcttcatttttcatgcaggtgttcatctttatgtgtctaactgaagaactttaatctktgtaagatattttggaaacaaagagctcaagtttggcattatttttttatcagaaagaaatgggacacggagtagattatttagatcaaggtcacttggagcagtgtcataattttagttttcagtgggatgaagactttacccatatctctgctactgttttggacaaaaacaatgtaaattatgtaaacaaagtacatttttcaaaactagaaagacaaagaaaaaaaaggacctcattgtaagactgcagataatcctttagcaaaacaaaaatgatttaaaaaataattaatccta

SEQ ID NO: 51022 - DNA, 600 bp, Chicken  19866894298421_1
catcagtagggttcatccttactggaaataactcctgtagcttgttagcctgctattaatgtgactgggaggtttgcttctggtgaaggtctcccagcttagaagtcttcaatcagataactgctggaataaacattcttacattttcacatgccctaatggattagtgtggctaaccagacttggctcctgccaccacctccctttcttattatgcctcgttaccttgggaaaggttcctaactaggtacctttgaaggagcaaacactgtctttctacatacccttagaggatttcgwattgttttcctgcaataatttttgtccctcttgctctttctctttccctctgagctcatcgtatcagcatactgtagtgccagatgttttttttttccagatttgagatactttttgctaatgcttaattttattaaattttattttgctttgttgttaatttcattttgttgcgacatttattttcctgtgtttacttttccttttcctactgactaccatgccctcctctgtagtatcttcaaatattacagacacttaggttggctgtagcaaatgactgatgttataatcaccctc

SEQ ID NO: 51023 - DNA, 599 bp, Chicken  19866894298427_1
  misc_feature (1)..(248): n is any nucleotide
nnnnnnnnnnnnnnnnnnnnnnnnnnnnnnnnnnnnnnnnnnnnnnnnnnnnnnnnnnnnnnnnnnnnnnnnnnnnnnnnnnnnnnnnnnnnnnnnnnnnnnnnnnnnnnnnnnnnnnnnnnnnnnnnnnnnnnnnnnnnnnnnnnnnnnnnnnnnnnnnnnnnnnnnnnnnnnnnnnnnnnnnnnnnnnnnnnnnnnnnnnnnnnnnnnnnnnnnnnnnnnnnnnnnnnnnnnnnnnnnnnnnnnnnctccctcctccaccccaacaggagagcaggagaacaggggatgggaaagctygtgggtcgagataaagacagggacatcacttgacagttactccgatggacaagagagactcaacatgggaaatgttaaagtaatttattgagaactaagccagccagcattcccctaggcagatagctttcccctcgcgtcaccatcatgggctggatcgccgtggagcctgaattgatacacgcaggtgtactccgggtggccccagttgctcagcacttgcagccttacgtacttgatgaacccagagtgctcgttctgcaaggaggaggagaaatgaattgagttttcctctcttc

SEQ ID NO: 51024 - DNA, 600 bp, Chicken  19866894298437_1
ggagcagagaatttgcggtgggactgtggaaaggagaaacaaaaaatatcagactcgcccttgggtcccaggagatactgaaaggactgagcccaaagtacaaggggaaatctcccttttaacatcagcgaatactggaaggattccggtctctttctcatttccaacatgagagaaagaatttgtaatggcacgggcttttgtttatggttctaccacacgcatcaaagaattgagtaaatctctggacaaatggtgcagactcactgaaaacaatctttttcctttctgcttcaacartttcaaggagaaatatgttatttaataggtctgctgttactgtgatgttaactgtaattattaattttcatattcagaaccatcaaaaagggcctgctcagaattcacagggtcacattcaatgctctgtcatgaaggcaaacggcaccaaacaagcacagctaacaatcggaagaaaccagaaaggatgcccaaaggaatcagaaataagaacatgtgcaggttaaatatgtaccttgaaaccaaattagaagagctaaatatacaaaccccaatcccaaggtcaggttgtgccaggca

SEQ ID NO: 51025 - DNA, 533 bp, Chicken  19866894298438_1
taataactaatcatctgagatcaaatttcaagcggatcccaaagtggtgctgggctgtgggccatccagtttgggtggatccgtatgttttcttctgaatgtttgcaaacatgaaagctctgcttttgatccttctctaacttttggcatgctttatcacagcagccagacgaggtgatttagccatcctcgtgtgtgcccagagaagggcctcccagtggaaagatgcttgaaataaatgctttgaggatagccaagacagagtctaattaggattttgttcatcgagagcctgagtgrtgctggcaacgcccctttcaaggtaggtgagaggcaaggttgagtcctaaagctccacttgtgcttttcagtaagcacaacacctacagtaggcatcaaagaatggatgatgttgctgggggtgagagagtcctgcagactgcaatctggctttacagaagagctggcatcctgggctccatcagaagaggagtggccagcagggacaggggaggtgattgtccctctctact

SEQ ID NO: 51026 - DNA, 600 bp, Chicken  19866894298440_1
gttttgttttgttggcatgaaatgtaagccgctaattttgtgtattattaggagggagcacttctgatgtacattaccagctctgtaagaacagaagaaattaaatgaaattcatgccagccagctttgctgaataaacaactgttttgaaacttggattcatcagtaataagcctgtggtggtaagctatacttggccacttagctttctaaaatataacccgagtacaggatagcattttaagtacaagtaaataatatcagaaagatcctacatttaaattaattacaaaggactcrgaaacaaagctgcraagtgtgttattctttgtactgtgtgccttctaaacaaagtttaacttttaaatttccagcactctatcaaactgacctttagtattcctagaattatcgctttataatggagaacttgtcacaaaacaagaaaattgtcttgttcaatggcagctgcaaaagatgatttgcccttttgtgaaattctacacaacttcaacacagcctccctgactgacctttttgcagcataaccaatatgtgacttctctgacatttaaaaatcaaggtagcaacagaaacaga

SEQ ID NO: 51027 - DNA, 600 bp, Chicken  19866894298440_2
gcatgaaatgtaagccgctaattttgtgtattattaggagggagcacttctgatgtacattaccagctctgtaagaacagaagaaattaaatgaaattcatgccagccagctttgctgaataaacaactgttttgaaacttggattcatcagtaataagcctgtggtggtaagctatacttggccacttagctttctaaaatataacccgagtacaggatagcattttaagtacaagtaaataatatcagaaagatcctacatttaaattaattacaaaggactcrgaaacaaagctgcraagtgtgttattctttgtactgtgtgccttctaaacaaagtttaacttttaaatttccagcactctatcaaactgacctttagtattcctagaattatcgctttataatggagaacttgtcacaaaacaagaaaattgtcttgttcaatggcagctgcaaaagatgatttgcccttttgtgaaattctacacaacttcaacacagcctccctgactgacctttttgcagcataaccaatatgtgacttctctgacatttaaaaatcaaggtagcaacagaaacagactgtctaaactata

SEQ ID NO: 51028 - DNA, 600 bp, Chicken  19866894298443_1
ggcatataaatgttagaggtcaccatgaggccagccaaaatcattatctgctgttgctggaacaatggaatggtgcttgtacaaagaggtgcaataagtattaagacacttccccaggaaatgtttgattttcatagatatcatactttcattggaagaacatacagtatagtttcttctaagatttaaaattaacagaggggatggatttggcataccatggtaactggctattccagttactttttggttgtggaaagaaaactaatctggtgttttatcttgaatggcaaaaggaaratccttcatggaacacaaatatctgtttttctatgacttttttttttctgctgtagttctgtactataactgtactttccagtagggggggggaaataattaggtagtaaaaacaaacaaacaaaaaccaacaaaaccaaacaaacaaaaaacccacaaaaagcactggttaaaatatataaaagactcagtcagggtgagaaataggtagcttaattagcttacacagtaaactaatatattaaacatagctataactcaccatgcatcacatttctttggtactgttttctattccaa

SEQ ID NO: 51029 - DNA, 599 bp, Chicken  19866894298447_1
  misc_feature (1)..(29): n is any nucleotide
nnnnnnnnnnnnnnnnnnnnnnnnnnnnnattgcagattttatggcatatttattcctgcattgactcaattctacatgtttctttgaagtatgtccagtcttgatctgaatcagaagaaagtctatggtggttcattccagtggttagcaacttttacagttattattaaactcatttccaattccattagaaattccattagaaatgaaaagaaattccattatgtctggccttaactaatcgttaatagcacttgttagctctatatttaaaagcccagtacagatacacttaataytgcagtcaaattacttctggtattcaacatgaatgtgaaagaccatcttaaaaacagcaaccttcactactttgtaaatcttmaaattcttcttctctttcccagcacggtagcatgcactagtagctctctgtgctaaaatgtggggcttttttctgaattgtacactgttgttgagtttcactgtcatgtgtcttcagtacrgatcatctgtctccctggattagctcttgatacatggaacccaactgctcgcatggatcagcacgcactccttggagatgagtcgcccttcatra

SEQ ID NO: 51030 - DNA, 600 bp, Chicken  19866894298447_2
tttgaagtatgtccagtcttgatctgaatcagaagaaagtctatggtggttcattccagtggttagcaacttttacagttattattaaactcatttccaattccattagaaattccattagaaatgaaaagaaattccattatgtctggccttaactaatcgttaatagcacttgttagctctatatttaaaagcccagtacagatacacttaataytgcagtcaaattacttctggtattcaacatgaatgtgaaagaccatcttaaaaacagcaaccttcactactttgtaaatcttmaaattcttcttctctttcccagcacggtagcatgcactagtagctctctgtgctaaaatgtggggcttttttctgaattgtacactgttgttgagtttcactgtcatgtgtcttcagtacrgatcatctgtctccctggattagctcttgatacatggaacccaactgctcgcatggatcagcacgcactccttggagatgagtcgcccttcatraattggagcatcgaactcaartgtctttacaagtakcaggagttagaaaatgctacatgggttttggcaccttcattgttaacag

SEQ ID NO: 51031 - DNA, 600 bp, Chicken  19866894298447_3
aaatgaaaagaaattccattatgtctggccttaactaatcgttaatagcacttgttagctctatatttaaaagcccagtacagatacacttaataytgcagtcaaattacttctggtattcaacatgaatgtgaaagaccatcttaaaaacagcaaccttcactactttgtaaatcttmaaattcttcttctctttcccagcacggtagcatgcactagtagctctctgtgctaaaatgtggggcttttttctgaattgtacactgttgttgagtttcactgtcatgtgtcttcagtacrgatcatctgtctccctggattagctcttgatacatggaacccaactgctcgcatggatcagcacgcactccttggagatgagtcgcccttcatraattggagcatcgaactcaartgtctttacaagtakcaggagttagaaaatgctacatgggttttggcaccttcattgttaacagaaagggaagctaaagcaatgcatacatcaggcagacttccttttacttccaagctgcatcctcagcatcatgactgggtatgacttccaaaatattggtgaatggagaattgagccatgat

SEQ ID NO: 51032 - DNA, 600 bp, Chicken  19866894298447_4
aytgcagtcaaattacttctggtattcaacatgaatgtgaaagaccatcttaaaaacagcaaccttcactactttgtaaatcttmaaattcttcttctctttcccagcacggtagcatgcactagtagctctctgtgctaaaatgtggggcttttttctgaattgtacactgttgttgagtttcactgtcatgtgtcttcagtacrgatcatctgtctccctggattagctcttgatacatggaacccaactgctcgcatggatcagcacgcactccttggagatgagtcgcccttcatraattggagcatcgaactcaartgtctttacaagtakcaggagttagaaaatgctacatgggttttggcaccttcattgttaacagaaagggaagctaaagcaatgcatacatcaggcagacttccttttacttccaagctgcatcctcagcatcatgactgggtatgacttccaaaatattggtgaatggagaattgagccatgatatttttcttagwcccaaagaaatcaacatatgtaagagaatcaacaaggaaaaaatagtttactgttattacaactattcccatatataatctc

SEQ ID NO: 51033 - DNA, 600 bp, Chicken  19866894298447_5
gtattcaacatgaatgtgaaagaccatcttaaaaacagcaaccttcactactttgtaaatcttmaaattcttcttctctttcccagcacggtagcatgcactagtagctctctgtgctaaaatgtggggcttttttctgaattgtacactgttgttgagtttcactgtcatgtgtcttcagtacrgatcatctgtctccctggattagctcttgatacatggaacccaactgctcgcatggatcagcacgcactccttggagatgagtcgcccttcatraattggagcatcgaactcaartgtctttacaagtakcaggagttagaaaatgctacatgggttttggcaccttcattgttaacagaaagggaagctaaagcaatgcatacatcaggcagacttccttttacttccaagctgcatcctcagcatcatgactgggtatgacttccaaaatattggtgaatggagaattgagccatgatatttttcttagwcccaaagaaatcaacatatgtaagagaatcaacaaggaaaaaatagtttactgttattacaactattcccatatataatctctgcaagttttatatgttcgaa

SEQ ID NO: 51034 - DNA, 600 bp, Chicken  19866894298447_6
gtgaaagaccatcttaaaaacagcaaccttcactactttgtaaatcttmaaattcttcttctctttcccagcacggtagcatgcactagtagctctctgtgctaaaatgtggggcttttttctgaattgtacactgttgttgagtttcactgtcatgtgtcttcagtacrgatcatctgtctccctggattagctcttgatacatggaacccaactgctcgcatggatcagcacgcactccttggagatgagtcgcccttcatraattggagcatcgaactcaartgtctttacaagtakcaggagttagaaaatgctacatgggttttggcaccttcattgttaacagaaagggaagctaaagcaatgcatacatcaggcagacttccttttacttccaagctgcatcctcagcatcatgactgggtatgacttccaaaatattggtgaatggagaattgagccatgatatttttcttagwcccaaagaaatcaacatatgtaagagaatcaacaaggaaaaaatagtttactgttattacaactattcccatatataatctctgcaagttttatatgttcgaagctcaaattttacag

SEQ ID NO: 51035 - DNA, 600 bp, Chicken  19866894298447_7
ccctggattagctcttgatacatggaacccaactgctcgcatggatcagcacgcactccttggagatgagtcgcccttcatraattggagcatcgaactcaartgtctttacaagtakcaggagttagaaaatgctacatgggttttggcaccttcattgttaacagaaagggaagctaaagcaatgcatacatcaggcagacttccttttacttccaagctgcatcctcagcatcatgactgggtatgacttccaaaatattggtgaatggagaattgagccatgatatttttcttagwcccaaagaaatcaacatatgtaagagaatcaacaaggaaaaaatagtttactgttattacaactattcccatatataatctctgcaagttttatatgttcgaagctcaaattttacagaatttgtagagaatcagatcagtcttgaatattaagcgctgaccattcttgctacattttgcatcaagtaagcacaagtaaatgccatggtcttctttcgtctgccctgtatcaggttcaactccaactgtcccacaagtgcactaattagccatcacaacacaactctcctgcaatatgtt

SEQ ID NO: 51036 - DNA, 597 bp, Chicken  19866894298448_1
ccatcaacctgctgctgcggagtgtccgcatcaaactggaatttattctggataatctgagctttgatttcaactcattgcatcccatgcccttctcttacgaagtcaaccccatcctcaagccactgaatgctgaagatcctgccaagccctaccgtcacaagcctggaagtgtcatttctgtggaggtaatgcaacaaataacatacgctgtacaaaattgttgctaaccttagactgttttaaattggtgtcatgcagcatccagtgtttcaaagcatttgaaaggcttggagcctktaacagcacatctatttcagcccctgagaaatggcacattagaagaggggaaaaggactgcaccaaaaaaatcctcttgagcccatatggattcatagggctcatagaaagttccatactcttatttttagtctcaatataaactaatgctattcatgtatgagatattagtatgaaaaaaagccaaacccaaagctgccaaccttttcacgtcatcttaggagtaaaaagaaagggctcctctcatcttgcagtgctggtctccttcatcgtctctggaactatggataatggaga

SEQ ID NO: 51037 - DNA, 600 bp, Chicken  19866894298457_1
gttagagggctgaggagagatgagtgtccacatctggttccatctttgatcagatgcccatctgcaaggcaggcaggaaggaataaaggagcagccacatgccctgcttccctgtgatgccctctcttgcatggccctactcactgggtggctcatctgccagcaatttccatggccatgtgttgaaagagccactgcaatcaataggtctggtgccagcacctgcagtagggtcagagttcagcaaagtggtaaaaaatgttggggtgagggcagggggatcttgggcagcttccaagktcccttagtatatatgaaaggatactgtttgtgtctgacttgtttgttctgtatggcagcatggagaccattaagtgggctgaggataagcatgcrtcttgctctggttgcatgtttgagtggatgcctatctgcaaggcagacgggaaggaataaaggagcagccacgtgccctgcttccctgtgcagcactcccttgtatggccctactcaccgggtggctcatctgccagcagtttccayggctgtgtgctgaaagtgccactgcgatcagcagatccagtattagcacctgcagtg

SEQ ID NO: 51038 - DNA, 600 bp, Chicken  19866894298457_2
acatgccctgcttccctgtgatgccctctcttgcatggccctactcactgggtggctcatctgccagcaatttccatggccatgtgttgaaagagccactgcaatcaataggtctggtgccagcacctgcagtagggtcagagttcagcaaagtggtaaaaaatgttggggtgagggcagggggatcttgggcagcttccaagktcccttagtatatatgaaaggatactgtttgtgtctgacttgtttgttctgtatggcagcatggagaccattaagtgggctgaggataagcatgcrtcttgctctggttgcatgtttgagtggatgcctatctgcaaggcagacgggaaggaataaaggagcagccacgtgccctgcttccctgtgcagcactcccttgtatggccctactcaccgggtggctcatctgccagcagtttccayggctgtgtgctgaaagtgccactgcgatcagcagatccagtattagcacctgcagtgtggtcagagctcagcaaactggtaaaaaatgttggggtgggggcaggaggttcttggggaacttccagtgtcctttaggatctagaaaggatactg

SEQ ID NO: 51039 - DNA, 600 bp, Chicken  19866894298457_3
gcaaagtggtaaaaaatgttggggtgagggcagggggatcttgggcagcttccaagktcccttagtatatatgaaaggatactgtttgtgtctgacttgtttgttctgtatggcagcatggagaccattaagtgggctgaggataagcatgcrtcttgctctggttgcatgtttgagtggatgcctatctgcaaggcagacgggaaggaataaaggagcagccacgtgccctgcttccctgtgcagcactcccttgtatggccctactcaccgggtggctcatctgccagcagtttccayggctgtgtgctgaaagtgccactgcgatcagcagatccagtattagcacctgcagtgtggtcagagctcagcaaactggtaaaaaatgttggggtgggggcaggaggttcttggggaacttccagtgtcctttaggatctagaaaggatactgtttgtgtctgatgtatttgttctgtatggaggcatggaaaccagctagagggctgaggataggcgtgagtcctgctctggttccatctttgatcggatgcccatctgcaaggcagacaggaaggaagaaaggagcagccacgtgccc

SEQ ID NO: 51040 - DNA, 599 bp, Chicken  19866894298469_1
  misc_feature (1)..(124): n is any nucleotide
nnnnnnnnnnnnnnnnnnnnnnnnnnnnnnnnnnnnnnnnnnnnnnnnnnnnnnnnnnnnnnnnnnnnnnnnnnnnnnnnnnnnnnnnnnnnnnnnnnnnnnnnnnnnnnnnnnnnnnnnnnnngagccaggagtgctggttggctggagcaaataaaggactgagagccagggctgcctgcctgctgctggctgatggactggaaatgctgacctgaggaaaaaggtccacctgcttcacagggcatccttcaagttcctatggtacactgaaatgtgtagatgaatactgctgttcakcattaaaaaggttatcttgaccagtgatcagaggagaackcaacaaaacaagagcaggtcactcaagagctttctgtcagctgttttttcttaatttttgaatacaattctgactgacagagatgatcatcagatgatcatcataagttacatgaactttgacacctgttgctgaaagtactagtcacagttagatcattccattgattcccttagagtcctcacccacccttccccagatgctatcagtattttgatacgcatttaagaaccaaaatctctactatctcatttgactg

SEQ ID NO: 51041 - DNA, 599 bp, Chicken  19866894298469_2
  misc_feature (1)..(84): n is any nucleotide
nnnnnnnnnnnnnnnnnnnnnnnnnnnnnnnnnnnnnnnnnnnnnnnnnnnnnnnnnnnnnnnnnnnnnnnnnnnnnnnnnnnngagccaggagtgctggttggctggagcaaataaaggactgagagccagggctgcctgcctgctgctggctgatggactggaaatgctgacctgaggaaaaaggtccacctgcttcacagggcatccttcaagttcctatggtacactgaaatgtgtagatgaatactgctgttcakcattaaaaaggttatcttgaccagtgatcagaggagaackcaacaaaacaagagcaggtcactcaagagctttctgtcagctgttttttcttaatttttgaatacaattctgactgacagagatgatcatcagatgatcatcataagttacatgaactttgacacctgttgctgaaagtactagtcacagttagatcattccattgattcccttagagtcctcacccacccttccccagatgctatcagtattttgatacgcatttaagaaccaaaatctctactatctcatttgactgagtgtacacaatgcaggaagacatttcaataaatttatcc

SEQ ID NO: 51042 - DNA, 600 bp, Chicken  19866894298469_3
atgatcatcagatgatcatcataagttacatgaactttgacacctgttgctgaaagtactagtcacagttagatcattccattgattcccttagagtcctcacccacccttccccagatgctatcagtattttgatacgcatttaagaaccaaaatctctactatctcatttgactgagtgtacacaatgcaggaagacatttcaataaatttatcctaaaatgaactcgtcttcatagtatgaactaccaaaacacaaatagttcaaatagtttcactgggtttcttttattataccckattgctcataattgaaaatcagtattatctgcattcctggctccataaataagccactctattttcttaccattctgaagcactccccaagcttctgctaataatttcgcttgacctttattaaagacggagcattagctggcaattagatttggtgatccctttggtgattgagattcagtgatttactgtaaattacaaaaagttcaaatgtttcattgcgtctatcctttgtacaagctttgtgaccaggtaagcactgacatgacattcaccgttaaattaggaagtttaatgaga

SEQ ID NO: 51043 - DNA, 444 bp, Chicken  19866894298469_4
gaatgttatggttgtgggagatggtatcttgagaaacctgaaagcatgtgcctttttttaaacccttaaaacaatgaaaagaaccccaaaccacacagccttacagcaaacagagaaagaagtcagaaaactcctaccccaaagtatctctctgccatttcatccctccttctcctactcactatggttatcagggccgagcagagtcaacttggatgctgctccaaatcatttccctcaggccaatgaacagcctacagcctcatggctagagggaagcgcagtatttttgtcagaggyacctctatgctcasactgtgtgagcagtttctactgcagtaacaactagtagcacatacatgaggacctcactgtatgtattggatcgacagactctgccaaggcttcaaaaactaacactaaggcataagtacagcaacaggg

SEQ ID NO: 51044 - DNA, 430 bp, Chicken  19866894298469_5
tgggagatggtatcttgagaaacctgaaagcatgtgcctttttttaaacccttaaaacaatgaaaagaaccccaaaccacacagccttacagcaaacagagaaagaagtcagaaaactcctaccccaaagtatctctctgccatttcatccctccttctcctactcactatggttatcagggccgagcagagtcaacttggatgctgctccaaatcatttccctcaggccaatgaacagcctacagcctcatggctagagggaagcgcagtatttttgtcagaggyacctctatgctcasactgtgtgagcagtttctactgcagtaacaactagtagcacatacatgaggacctcactgtatgtattggatcgacagactctgccaaggcttcaaaaactaacactaaggcataagtacagcaacaggg

SEQ ID NO: 51045 - DNA, 600 bp, Chicken  19866894298471_1
tcacctcaagtcccagatgacctctgctaacttctgaagtatgctcttgtattgtcttactggttttgcaaaacaatagtcttctctgcaccattaactttttcttccttctaagggtttactctgttgttctctatctgcttttagtcctttcacctgggattttttcccaaacttcttgctttcctgaagcgactttgagagatttcaagactttgtgctgatatctgtctggattcatcacctttctgtttaatcctacttctgtattcttaaatctcttttctcaactgaactctyctagactcatagctccgtctgactgttttcaattgaggaaatctagagtttaggccacctactaagtattttaaatgattaaacttctcattcccttttttgtcttaacggagtgatactgaaagtaaaaaagctaatggcaatttagctatttcaaattacagtcttctgtttgctcatattgaatgaaatctggtaattattactattctttaggcaaaagccagttttccaggcctgtgattaaaatttcatcttcattcattataatgaagtttaaaatagtttcctcagaacagt

SEQ ID NO: 51046 - DNA, 508 bp, Chicken  19866894298474_1
tatcctgtgtgtgtgcatggcacaagctgagcaggatctgcagtacatcatgagtccctgtaggtatcatgctgatcaaagggctctgtgtgcagggcagggtgggactggaagagtggagacaaggttggggatgtgctgagcgacaaacatatgagcataggtttggagatcattttgggagtaatgtttctcttgtctaagcttggtgttctaccaagctcctaacagcagggtgtacaggcaccaaagtgctctgccacgtgacagcacagggatgactttgtgcaggattcaccwctgctgcgttgccacctgtagttaccttaacccctgtggaactgtcagtctggtaccacgataccaacagagcaaatgtgagatgtgtttcctacgtggccatggggtgggacagtaggatgggtgaccgacagcagttcacgatcaacagggcttttgtgtcaccattgccatgtcatgtctgatggatgtgcctggggttctcagg

SEQ ID NO: 51047 - DNA, 600 bp, Chicken  19866894298478_1
cactatacagtaccagaaagtgatatttgtactttgtagagagccactgaaaggtctatgtaccactcaagtcccacgtgacagctgaagaattagctgagacttcacataaaaaagtgaaattcatccacagcccttttttggttgtcggacctcagtttgcaggagtgagagctatacagcagccataatcatgaccaagaattcaggaagagaaaaaccttcatatttaactagctagtgtcagttagtacagctcctgatgctgtgctgtggctgtgacataactgctgcaaactrctttggcaggtgggatacaaagatggctcattcattctttatgttggcttctgaactgagtctttcttttgctctacctttgtattattccctttagtcttttccacattatcaataataatcaagacagatccatgatcttttcgtacactgtgacatttttgagcaatcttcacggaacagtgcctcatattcatacaaaattctattttctccccgtatttctgtgcatcaccttacttggcagaagtgtgcctggtggataaaggcaggatgctacccgtgatgctgcattggaag

SEQ ID NO: 51048 - DNA, 600 bp, Chicken  19866894298482_1
atgatagttatatttgggcttcagtgctccttaacttcattacattaacacaggaatgatccctaaaaagtttatatcaaatgatggtaaaaattttgtgttttaaactcaccctccttgctgcctattcaaggcctgtcctccatataatgactaaaattataaaacttagatcactttctctataacatagagaaatatgacttactagtgtcttaatatgacttctatatgcttcacagctcctcttaatttccagcaacatacaaaccccctattctcaagtaaactcattaaagraaaaaaaaaaaaaaaaaagcckttaactgtctttaactccttagatgacarcatgacacttttatggtatagatactgtccaccagtgaagtattactactctcctactagcaacacataaagagaaatcacatgggagactctgtcctggtatgtattttccaagctgaaaatatccaaatgagctatatttatagaatttatctcatgatgtgacagttcctactttggtatgaagagatgtactttccctgtataaaatatttctttttctctctcaaacactatttcgtgcttgag

SEQ ID NO: 51049 - DNA, 600 bp, Chicken  19866894298482_2
agtgctccttaacttcattacattaacacaggaatgatccctaaaaagtttatatcaaatgatggtaaaaattttgtgttttaaactcaccctccttgctgcctattcaaggcctgtcctccatataatgactaaaattataaaacttagatcactttctctataacatagagaaatatgacttactagtgtcttaatatgacttctatatgcttcacagctcctcttaatttccagcaacatacaaaccccctattctcaagtaaactcattaaaggaaaaaaaaaaaaaaaaaagcckttaactgtctttaactccttagatgacarcatgacacttttatggtatagatactgtccaccagtgaagtattactactctcctactagcaacacataaagagaaatcacatgggagactctgtcctggtatgtattttccaagctgaaaatatccaaatgagctatatttatagaatttatctcatgatgtgacagttcctactttggtatgaagagatgtactttccctgtataaaatatttctttttctctctcaaacactatttcgtgcttgagggatccttgcaaattcttattc

SEQ ID NO: 51050 - DNA, 600 bp, Chicken  19866894298482_3
aggaatgatccctaaaaagtttatatcaaatgatggtaaaaattttgtgttttaaactcaccctccttgctgcctattcaaggcctgtcctccatataatgactaaaattataaaacttagatcactttctctataacatagagaaatatgacttactagtgtcttaatatgacttctatatgcttcacagctcctcttaatttccagcaacatacaaaccccctattctcaagtaaactcattaaaggaaaaaaaaaaaaaaaaaagcckttaactgtctttaactccttagatgacarcatgacacttttatggtatagatactgtccaccagtgaagtattactactctcctactagcaacacataaagagaaatcacatgggagactctgtcctggtatgtattttccaagctgaaaatatccaaatgagctatatttatagaatttatctcatgatgtgacagttcctactttggtatgaagagatgtactttccctgtataaaatatttctttttctctctcaaacactatttcgtgcttgagggatccttgcaaattcttattccatttatgtgcagatttccattgtccttt

SEQ ID NO: 51051 - DNA, 357 bp, Chicken  19866894298498_1
ctcgagccagataaaaggcttcaaaatgcccagccgtaattttcagtgaacaattttttctttcattgttccaagctgtcagattattagtgggaaaggattagtgggaaagggggaagtgttttcgtctaacatatttttcagggaggggagaaaaagaagtccattttgacgttttcagatggaaaagtagcgttttacagaagagatgttttgaaagtgttgagatgtaagctaagtagttttaaaaatggcacagcaaaatcaaaagaaaatattttcatgtttgacagtcagtayaactcttgtgttttgtcgctgttgttttttttttgtccagccctgtatattttcagt

SEQ ID NO: 51052 - DNA, 600 bp, Chicken  19866894298502_1
tttttttgtttgatatcatttatcagtatcagcctcaaggtagcagcaagctgcacagcctggaccctttagcatcaccatttctacatgttttgaaagatctgctattcttttgaacatgagttaaataaagcaacaggatgcatgtcagttcaggcaacacatgcgttttaacatcgctcacaccagcctgcacttgttgacaattctgatgagccaaagcgacccaaaggcacacagcctgaaggggtgcagaggggcaccctgtgaaacgtgagtgatatgtcatacccaccccaygacagagctctgcacagtttgtcacacagtgtggaaggactggaaatgtctgctctcctagggtttgtgctgacacagccttcatttcaatgcctgcttcccaccctcacactcaggtaccacagcagctctccctttccccgctctgctcgccatgcctactgtgtacatcagcatcagcgacttcgtgctaagctccccttgagtgcaaacaaggataaacagggacagatgccaatgtcaaacatttgcattggtaaagtacatatttaaaaaaatctcaataatgtattactgctg

SEQ ID NO: 51053 - DNA, 600 bp, Chicken  19866894298506_1
gagattggtacctttgcaagcatatgagcactaacggcttgtctaattctttctgtgatttctcccagagcctgttggacttcagctgtcagctgaatctcctcttcaggctgttgaccccagagaagagatgtcaacggggctagcaggctgttgggaatgcccacttgtggacgtacccactgaatattccccaaaaagatttgcaagtcgtgtaaattcttgacatccaccctgaactctaactgctgaggagacactacagagtctgacaccttccagcctaggtataaaatcggrgtagtatgctgcaccttctcaggagccacctttaggccaaaccgactgaggtgggcagttacctcagtcagccaatcttccgggaatgagaattcctgacaaaagagaatgtcatccttataatgacagataatcatttctgggtgcctttttcggagaggccttagtgtgctgctgctacaaacagttgtcaaagggtaggggaatttttcataccttggggcaagactacccattcatatcagtcagctggttccaccttattaatagatggcactgagaaggcgaagcatttacaat

SEQ ID NO: 51054 - DNA, 600 bp, Chicken  19866894298512_1
ctgaaggctttccctcctcttcacccacaggaggggtgagacacacactcagaatctctccacgtcacatgaaaggaaggacagtgctttgtttgctgtagtatttgagagcagaaaacatctggggaagagaaagatcctttctgaaagtcacttgctactcagaaactgtggctttagcttcagttgttctacagcagactgttccaaagagatgtgtaccagaggaagagttaccatggaatggtgccctccagagacgggcacccgacggtgctcaatcacctcagtccttcctcrcccacrcgagagaygtgtggtagacacgggcagcccaggcacgtccaagggtccaaacccaggctggctgtgctcagcataagggcagtggtgcctcgggcagccctgcagcaggcagctcccctgggcagacctgagggtcccgagcacagcagcccggaggtgtaaagcccacaccaataggaaccgaccacaggaacagagcagcatggctcggctgtgcctgcgtcctactgcaaacatttaattgctacggggtccaaagaacaaaggcaaaaataacgggctggggacctacag

SEQ ID NO: 51055 - DNA, 600 bp, Chicken  19866894298512_2
gctttccctcctcttcacccacaggaggggtgagacacacactcagaatctctccacgtcacatgaaaggaaggacagtgctttgtttgctgtagtatttgagagcagaaaacatctggggaagagaaagatcctttctgaaagtcacttgctactcagaaactgtggctttagcttcagttgttctacagcagactgttccaaagagatgtgtaccagaggaagagttaccatggaatggtgccctccagagacgggcacccgacggtgctcaatcacctcagtccttcctcrcccacrcgagagaygtgtggtagacacgggcagcccaggcacgtccaagggtccaaacccaggctggctgtgctcagcataagggcagtggtgcctcgggcagccctgcagcaggcagctcccctgggcagacctgagggtcccgagcacagcagcccggaggtgtaaagcccacaccaataggaaccgaccacaggaacagagcagcatggctcggctgtgcctgcgtcctactgcaaacatttaattgctacggggtccaaagaacaaaggcaaaaataacgggctggggacctacagatcgaa

SEQ ID NO: 51056 - DNA, 600 bp, Chicken  19866894298512_3
tcctcttcacccacaggaggggtgagacacacactcagaatctctccacgtcacatgaaaggaaggacagtgctttgtttgctgtagtatttgagagcagaaaacatctggggaagagaaagatcctttctgaaagtcacttgctactcagaaactgtggctttagcttcagttgttctacagcagactgttccaaagagatgtgtaccagaggaagagttaccatggaatggtgccctccagagacgggcacccgacggtgctcaatcacctcagtccttcctcrcccacrcgagagaygtgtggtagacacgggcagcccaggcacgtccaagggtccaaacccaggctggctgtgctcagcataagggcagtggtgcctcgggcagccctgcagcaggcagctcccctgggcagacctgagggtcccgagcacagcagcccggaggtgtaaagcccacaccaataggaaccgaccacaggaacagagcagcatggctcggctgtgcctgcgtcctactgcaaacatttaattgctacggggtccaaagaacaaaggcaaaaataacgggctggggacctacagatcgaaaccaaacc

SEQ ID NO: 51057 - DNA, 600 bp, Chicken  19866894298513_1
cagaaacagtgaagcatgacttacagatttcagctgatggaaaatatgttaaaaaattcatcctcattttcagatactgtgtgagcagtaagtgtttatttaccagctggagaatgggtcttagatcaactatactggttctgcttagtatagtagatggtacccctactaagcaacattttcaaacacaccttgagacaagagccttatatttcaatccatcctgcatctgtccctgcgtaggatgaattagctgcaaacacacaaatcttacaccaaaactgagtgaatatgaaaaawttatggactcaaaagatgccaaatgtctttgctgaaactaaagcatgggattacattgttttattttgtcaagtattccttcctggtgcagagaaaagggttagccttctcatttaaactcgagttgtgaagtgtggtcatttcctttgcctttgtcaaaacaccagacaacagaaggataaaaaagaagggacactaaaggtaggggaaataaagcattgttgatgttctcgggatccaaggcaactggtcagtcatggatgaatgctttgggctggcagcctgaccacagcagatgtt

SEQ ID NO: 51058 - DNA, 600 bp, Chicken  19866894298514_1
ggttgcaagccagcaataaattgggacatttaaaaaactgggatccaatccaatccgtgatctgatcagggttcaatggttataataaattgggagtattaaaactgggatcacatccaacactttattttgcctaaaccacaggacctggctgtgctgcaaagtcaggcattctcaatggacagatacgccttgttggattaacccttcataaataatgatgcacaagctcaggagccccaaaaacacgtggtttagcacagagctgaatggtgagagcagcaattaccagtgttttaycagaaatcacaatgaactatgaacagctataataatactttcagaccttgcgagtctataacataggcacaaaaactacgtgggggtggtaacaatttgtgtgttatgaatgcaccctgagaygtaccacacatttaaaaatcacacttctgttgctgtgagtttcaacttctgattcaaaacaatttggctgccgtacctcactgccatgcctgcaactattcttgctttcattttcatttccagtaacacacaaattgtttgtaattaaatataatgaagcaaatgctaacagaaaga

SEQ ID NO: 51059 - DNA, 600 bp, Chicken  19866894298514_2
tttattttgcctaaaccacaggacctggctgtgctgcaaagtcaggcattctcaatggacagatacgccttgttggattaacccttcataaataatgatgcacaagctcaggagccccaaaaacacgtggtttagcacagagctgaatggtgagagcagcaattaccagtgttttaycagaaatcacaatgaactatgaacagctataataatactttcagaccttgcgagtctataacataggcacaaaaactacgtgggggtggtaacaatttgtgtgttatgaatgcaccctgagaygtaccacacatttaaaaatcacacttctgttgctgtgagtttcaacttctgattcaaaacaatttggctgccgtacctcactgccatgcctgcaactattcttgctttcattttcatttccagtaacacacaaattgtttgtaattaaatataatgaagcaaatgctaacagaaagaagtggaacgagcttcactcacaagtattctctcatataggaacggtctctaaatgtttttatttctgtaagatgcattcccttcgtacggggatctcacagctgcaaaattaaatctctgttt

SEQ ID NO: 51060 - DNA, 600 bp, Chicken  19866894298517_1
gtcttttgggggttttgtgcatgtattcttttgggcaggaagtgtttgttatcctaaattcagtttttgctgctgttaaggcccctgaacatgtctgctacacaaaacagaaaacaaaaagaaaatgttttctcttcagttattctggcattgcttatgtgatcgtaaatcgttcctactccatctggaaagatgggatgcagagctcttttctgaggaggtatctaatgcaaaacctggtagcagccagcaattggcatgacaaaagggttacagctagtggctggcactcttcccatycatcttgccactggaaacataatgctttgcagtgtgcttgcttgttcttcaggcgctgctgtgcraagccrgtccccgggatgtgtaacggagcagttgcatgtcgtctgcttttgtttgtggtgcctccttagtggcacgagaatgggaagtgggrctgaatgcagtggactgtttttcttcagtagagtgcaacgtgaagtggatgagaacagtggggtacttgtggagtgtcctctggtgtgggaagatgagcagcaaggtgtctagcacaggcagtgaagcatcaagtgtggcrgg

SEQ ID NO: 51061 - DNA, 600 bp, Chicken  19866894298517_2
tttgctgctgttaaggcccctgaacatgtctgctacacaaaacagaaaacaaaaagaaaatgttttctcttcagttattctggcattgcttatgtgatcgtaaatcgttcctactccatctggaaagatgggatgcagagctcttttctgaggaggtatctaatgcaaaacctggtagcagccagcaattggcatgacaaaagggttacagctagtggctggcactcttcccatycatcttgccactggaaacataatgctttgcagtgtgcttgcttgttcttcaggcgctgctgtgcraagccrgtccccgggatgtgtaacggagcagttgcatgtcgtctgcttttgtttgtggtgcctccttagtggcacgagaatgggaagtgggrctgaatgcagtggactgtttttcttcagtagagtgcaacgtgaagtggatgagaacagtggggtacttgtggagtgtcctctggtgtgggaagatgagcagcaaggtgtctagcacaggcagtgaagcatcaagtgtggcrggagagcttgttttgtttctaaccytgtatgccttgtgaaggacaaggcagaacttagaagtatgga

SEQ ID NO: 51062 - DNA, 600 bp, Chicken  19866894298517_3
gctgttaaggcccctgaacatgtctgctacacaaaacagaaaacaaaaagaaaatgttttctcttcagttattctggcattgcttatgtgatcgtaaatcgttcctactccatctggaaagatgggatgcagagctcttttctgaggaggtatctaatgcaaaacctggtagcagccagcaattggcatgacaaaagggttacagctagtggctggcactcttcccatycatcttgccactggaaacataatgctttgcagtgtgcttgcttgttcttcaggcgctgctgtgcraagccrgtccccgggatgtgtaacggagcagttgcatgtcgtctgcttttgtttgtggtgcctccttagtggcacgagaatgggaagtgggrctgaatgcagtggactgtttttcttcagtagagtgcaacgtgaagtggatgagaacagtggggtacttgtggagtgtcctctggtgtgggaagatgagcagcaaggtgtctagcacaggcagtgaagcatcaagtgtggcrggagagcttgttttgtttctaaccytgtatgccttgtgaaggacaaggcagaacttagaagtatggagtgcac

SEQ ID NO: 51063 - DNA, 600 bp, Chicken  19866894298517_4
tgtgatcgtaaatcgttcctactccatctggaaagatgggatgcagagctcttttctgaggaggtatctaatgcaaaacctggtagcagccagcaattggcatgacaaaagggttacagctagtggctggcactcttcccatycatcttgccactggaaacataatgctttgcagtgtgcttgcttgttcttcaggcgctgctgtgcraagccrgtccccgggatgtgtaacggagcagttgcatgtcgtctgcttttgtttgtggtgcctccttagtggcacgagaatgggaagtgggrctgaatgcagtggactgtttttcttcagtagagtgcaacgtgaagtggatgagaacagtggggtacttgtggagtgtcctctggtgtgggaagatgagcagcaaggtgtctagcacaggcagtgaagcatcaagtgtggcrggagagcttgttttgtttctaaccytgtatgccttgtgaaggacaaggcagaacttagaagtatggagtgcacttgtttttttgattttataaatactgtagattttgttcatgtaagctgactgcactgtgtatattctgtcctccacttgatttgca

SEQ ID NO: 51064 - DNA, 600 bp, Chicken  19866894298517_5
tycatcttgccactggaaacataatgctttgcagtgtgcttgcttgttcttcaggcgctgctgtgcraagccrgtccccgggatgtgtaacggagcagttgcatgtcgtctgcttttgtttgtggtgcctccttagtggcacgagaatgggaagtgggrctgaatgcagtggactgtttttcttcagtagagtgcaacgtgaagtggatgagaacagtggggtacttgtggagtgtcctctggtgtgggaagatgagcagcaaggtgtctagcacaggcagtgaagcatcaagtgtggcrggagagcttgttttgtttctaaccytgtatgccttgtgaaggacaaggcagaacttagaagtatggagtgcacttgtttttttgattttataaatactgtagattttgttcatgtaagctgactgcactgtgtatattctgtcctccacttgatttgcaagaagaccaaggccctggctcaattaacttagtttcaagtgttcctgtgatgccaagattatatcacccacttttttgtagataggtttataacatggtgtcagaataagcagtagaaaggagatctcctaaattgttatc

SEQ ID NO: 51065 - DNA, 600 bp, Chicken  19866894298517_6
gctttgcagtgtgcttgcttgttcttcaggcgctgctgtgcraagccrgtccccgggatgtgtaacggagcagttgcatgtcgtctgcttttgtttgtggtgcctccttagtggcacgagaatgggaagtgggrctgaatgcagtggactgtttttcttcagtagagtgcaacgtgaagtggatgagaacagtggggtacttgtggagtgtcctctggtgtgggaagatgagcagcaaggtgtctagcacaggcagtgaagcatcaagtgtggcrggagagcttgttttgtttctaaccytgtatgccttgtgaaggacaaggcagaacttagaagtatggagtgcacttgtttttttgattttataaatactgtagattttgttcatgtaagctgactgcactgtgtatattctgtcctccacttgatttgcaagaagaccaaggccctggctcaattaacttagtttcaagtgttcctgtgatgccaagattatatcacccacttttttgtagataggtttataacatggtgtcagaataagcagtagaaaggagatctcctaaattgttatctttttctgctgctgagtttagacag

SEQ ID NO: 51066 - DNA, 600 bp, Chicken  19866894298520_1
tcaactgcaaacagatcttaaaaactctgaaaatacatgtaacgaagctagtgcaggagacagtgaagaaatgcttccactgcctatgaagagggctagagaagtgagaaaagtagaaaacacagaagaaccgattgcacctaaaagaggaaggagagctaagaatgaccaatttaagcaagcttcagaggagcttcatgcaacaacaaggaggcttcgtaaacaaccatctgcaaagatgatacaagaggatgagcagatttttgaggctgtttcagcaaaagaatctgaaaacaggarcaaagttgaaatgaagataacacaaaaaagagttaagtcttcgagaaatgctacgaaacactcgacagaagtaaaatcgaacagttacgggatggcacctgaaaatacacagaacgttcagaaaatcaaggaaatttcggatgaaattgttactgaaacacaatcrcccaccaataatgagagggaagcatctctgagagatgaagctgaaaatactcaggcaaatgcaagagaagcatctcggagattaaaatcacagtcaccttctggagaaacaaacaaaatgccaactactgttct

SEQ ID NO: 51067 - DNA, 505 bp, Chicken  19866894298520_2
gaccaatttaagcaagcttcagaggagcttcatgcaacaacaaggaggcttcgtaaacaaccatctgcaaagatgatacaagaggatgagcagatttttgaggctgtttcagcaaaagaatctgaaaacaggarcaaagttgaaatgaagataacacaaaaaagagttaagtcttcgagaaatgctacgaaacactcgacagaagtaaaatcgaacagttacgggatggcacctgaaaatacacagaacgttcagaaaatcaaggaaatttcggatgaaattgttactgaaacacaatcrcccaccaataatgagagggaagcatctctgagagatgaagctgaaaatactcaggcaaatgcaagagaagcatctcggagattaaaatcacagtcaccttctggagaaacaaacaaaatgccaactactgttctggtcttggaatcaaacagcacagtgcaaggaacaaacagaactaggagcaggagaggcaagaaggactctt

SEQ ID NO: 51068 - DNA, 599 bp, Chicken  19866894298523_1
  misc_feature (1)..(55): n is any nucleotide
nnnnnnnnnnnnnnnnnnnnnnnnnnnnnnnnnnnnnnnnnnnnnnnnnnnnnnntctgctctaacgctttgtttgttcagcagatcagacttgactgcaggttgccatttgatacaagaggggttatagatgggttctttcttctgtgtgcatgagcctaatagctgttctttcatctggattcctctgaggttttctctgcttttccatgagtaaatcacactctgcataatgatcacagatgtcaattctggagtatttcagcatgattgcaaaatgtgcaagttgtatgttactgwgttctcagtccttccattcagttcyttactagtctttctatgagtgtcctaatccctccggagccatcccattttttcacatccaagttgcacaaggccctaacccctatcagaacaggtcatttatgagctgagaatgttttactctgtaccatatacaaaatgcacactgaggtttgctcactgaggggattaattcagaaagtcaatgtgaatttgctaacaggatggattttagaatataattttattttcaatagaaatctcatcagtgtgtatttcagtaaaatttagccaat

SEQ ID NO: 51069 - DNA, 599 bp, Chicken  19866894298523_2
  misc_feature (1)..(30): n is any nucleotide
nnnnnnnnnnnnnnnnnnnnnnnnnnnnnntctgctctaacgctttgtttgttcagcagatcagacttgactgcaggttgccatttgatacaagaggggttatagatgggttctttcttctgtgtgcatgagcctaatagctgttctttcatctggattcctctgaggttttctctgcttttccatgagtaaatcacactctgcataatgatcacagatgtcaattctggagtatttcagcatgattgcaaaatgtgcaagttgtatgttactgwgttctcagtccttccattcagttcyttactagtctttctatgagtgtcctaatccctccggagccatcccattttttcacatccaagttgcacaaggccctaacccctatcagaacaggtcatttatgagctgagaatgttttactctgtaccatatacaaaatgcacactgaggtttgctcactgaggggattaattcagaaagtcaatgtgaatttgctaacaggatggattttagaatataattttattttcaatagaaatctcatcagtgtgtatttcagtaaaatttagccaatctttttatgtttgacataaatctta

SEQ ID NO: 51070 - DNA, 600 bp, Chicken  19866894298525_1
taggtgtggcactgaggggcgttgtttagtgggcacgatggtgatgggttgctggttggacttgatgattttaggggtcttttcctcccttaatgattctgtgatgattctgtctcctagtgctgttgtatttttttgtgtgtgtaatgaactgttggggtctttaaaaatcattgaatatcttcaatggtattgaaattaagaggatcgaaagtctagttttaaagtgcacaaactcccctgaatttaggtactttgaatgaaaatccatttataccatgttttctactacctgcagtsagctcaatagctaggcttttatccaaattgagtggctgctggctgtggttcacattcagtgctgctgccactcatgaggacaaaggagttgctcaagtactagcaatcgaagtacaagccaagttcttgggtgcctagaggtgtttccctaggcttcttttaccaaaacatacatctgtattctgttctctctcttttaaatgtgtaagtttctatttaatatatgcataaaaatcacacaatgatgggcagaattactgctgtggaagtaaaaattttgatcggtagaggaaagtgggg

SEQ ID NO: 51071 - DNA, 599 bp, Chicken  19866894298526_1
  misc_feature (1)..(151): n is any nucleotide
nnnnnnnnnnnnnnnnnnnnnnnnnnnnnnnnnnnnnnnnnnnnnnnnnnnnnnnnnnnnnnnnnnnnnnnnnnnnnnnnnnnnnnnnnnnnnnnnnnnnnnnnnnnnnnnnnnnnnnnnnnnnnnnnnnnnnnnnnnnnnnnnnnnnnnnctgtcatggtttccttcctgtgttctggctgaagacagcacgcatatgcacttcatgtacatatgagatgctcgcaatgataagaattgctcatgcacgcagcccagattccaatggactgcacagtccagtaggcttaacacagaacytggggggttgcagtcttgtttctgcagtactggtcttgaacacaaaggcagacagaaagcatgcatacgtactctgcaaactctcacgtaaacatgtatgcagaaattccttgttcaaagtttgctaacagctctgccatcccttatgatgttcttagttcggatagcaaygtgtttcatcaatttttcctgaaaaaaaattcttgtggaaaatgaaataaagtaataggatatcagttagagatatacatttcagacagactgcttcctcgtcctcttctttttttgctcatcccaga

SEQ ID NO: 51072 - DNA, 600 bp, Chicken  19866894298526_2
tgttctggctgaagacagcacgcatatgcacttcatgtacatatgagatgctcgcaatgataagaattgctcatgcacgcagcccagattccaatggactgcacagtccagtaggcttaacacagaacytggggggttgcagtcttgtttctgcagtactggtcttgaacacaaaggcagacagaaagcatgcatacgtactctgcaaactctcacgtaaacatgtatgcagaaattccttgttcaaagtttgctaacagctctgccatcccttatgatgttcttagttcggatagcaaygtgtttcatcaatttttcctgaaaaaaaattcttgtggaaaatgaaataaagtaataggatatcagttagagatatacatttcagacagactgcttcctcgtcctcttctttttttgctcatcccagagagttaccctcaatgatcagattcactgaactccaaaaccaaagcaggtaaatttcaatctgaaaccaaactgaaagtttataaccttttctctttcaaaatgtgctttagttctaaagctcwgtgtgttattgatccaacgagataaatgcaatgatatggctatcctgcc

SEQ ID NO: 51073 - DNA, 600 bp, Chicken  19866894298526_3
tgctaacagctctgccatcccttatgatgttcttagttcggatagcaaygtgtttcatcaatttttcctgaaaaaaaattcttgtggaaaatgaaataaagtaataggatatcagttagagatatacatttcagacagactgcttcctcgtcctcttctttttttgctcatcccagagagttaccctcaatgatcagattcactgaactccaaaaccaaagcaggtaaatttcaatctgaaaccaaactgaaagtttataaccttttctctttcaaaatgtgctttagttctaaagctcwgtgtgttattgatccaacgagataaatgcaatgatatggctatcctgcctgctaataatttgttttaaattatttcctctcattttctgtgttcacaacctctatagcactktaagcagctgtttgatacttgtatgagagagattcaaacttactgtgatgaattgtagaatcacagaatggattaggttggaagggacctcaaggatcatcaagttccaaccctcctgccatggcagggctgccaacctccacatttaatactagaccaggctgcctagggccccatccaacctggcc

SEQ ID NO: 51074 - DNA, 495 bp, Chicken  19866894298526_4
cagttagagatatacatttcagacagactgcttcctcgtcctcttctttttttgctcatcccagagagttaccctcaatgatcagattcactgaactccaaaaccaaagcaggtaaatttcaatctgaaaccaaactgaaagtttataaccttttctctttcaaaatgtgctttagttctaaagctcwgtgtgttattgatccaacgagataaatgcaatgatatggctatcctgcctgctaataatttgttttaaattatttcctctcattttctgtgttcacaacctctatagcactktaagcagctgtttgatacttgtatgagagagattcaaacttactgtgatgaattgtagaatcacagaatggattaggttggaagggacctcaaggatcatcaagttccaaccctcctgccatggcagggctgccaacctccacatttaatactagaccaggctgcctagggccccatccaacctggccttgaaca

SEQ ID NO: 51075 - DNA, 592 bp, Chicken  19866894298534_1
aaagaaataatgtattgccttcatgaaaggatcttgaagagctcctcaaaaaagcaaattaaactcaaatattattttatgttcctactgcagaaggagcaatgcaagtcaagtgaatgccagctcttaaccagctcggcagaaagccagaggggcaagagggtgtcagatggaatttaggccaggcaggcaggaaacaccgagaggaaacaccagcagcagctgtagaagcaaaagaatggacagaagctctaagacaaataataacaggcagagtggcagcagtagcagatgtcagarwaatgctttctggagggggaagggatggcacttgtaaagaaaatgtattattattatgtttttaaatgctttgtattaattacctgaaaatggattattcccccaaagccctttgaaacattgttttggatccgcttgggtggaaagaggctcaaccaagcagccatccaacatatgcagtgccctagtttcatacatgggtttgaattctcccagtggtttgtggaaataatgttaaaactaattctggaaatgtttagtagattgatcccttatttctctagtgctttta

SEQ ID NO: 51076 - DNA, 591 bp, Chicken  19866894298534_2
aagaaataatgtattgccttcatgaaaggatcttgaagagctcctcaaaaaagcaaattaaactcaaatattattttatgttcctactgcagaaggagcaatgcaagtcaagtgaatgccagctcttaaccagctcggcagaaagccagaggggcaagagggtgtcagatggaatttaggccaggcaggcaggaaacaccgagaggaaacaccagcagcagctgtagaagcaaaagaatggacagaagctctaagacaaataataacaggcagagtggcagcagtagcagatgtcagarwaatgctttctggagggggaagggatggcacttgtaaagaaaatgtattattattatgtttttaaatgctttgtattaattacctgaaaatggattattcccccaaagccctttgaaacattgttttggatccgcttgggtggaaagaggctcaaccaagcagccatccaacatatgcagtgccctagtttcatacatgggtttgaattctcccagtggtttgtggaaataatgttaaaactaattctggaaatgtttagtagattgatcccttatttctctagtgctttta

SEQ ID NO: 51077 - DNA, 600 bp, Chicken  19866894298537_1
cttgatgtttctagtactgattgtttacccagttctcctggtcttgttaattcacaaaactagttagatcagtttaatagattctattcaaattagtttcaggctgtgtgtatgattttcattataagaatgtagacttaaatatctcatgtctagtttagtctgagcaaggagacctccaaaaatgtgctaggcatagcacatgcaaaaattgtgttttagcagttagttcttcaggatttcagcagaactgctcacaaaaagtagagtctgagtcttttgaagaggaaagaacaatcmcctatcctagagccttagagatgcattgccttttttcttttttttttttttttgtaaaatgcattgtccatacacattccaaaaccagctctttatccctcttagaatgtatagtcccaacacagagattgtttttcaccaaagagtgaagaaacagttgaagatrctgcctttgccatttttgactgtttgcagtagtttcaaggactcttcagtagacatcactctgtaaagatcttcctcactattacttatgaggcacaggtgcatcaygacagcagtgtgaataggcagtgtatc

SEQ ID NO: 51078 - DNA, 600 bp, Chicken  19866894298537_2
gcaaggagacctccaaaaatgtgctaggcatagcacatgcaaaaattgtgttttagcagttagttcttcaggatttcagcagaactgctcacaaaaagtagagtctgagtcttttgaagaggaaagaacaatcmcctatcctagagccttagagatgcattgccttttttcttttttttttttttttgtaaaatgcattgtccatacacattccaaaaccagctctttatccctcttagaatgtatagtcccaacacagagattgtttttcaccaaagagtgaagaaacagttgaagatrctgcctttgccatttttgactgtttgcagtagtttcaaggactcttcagtagacatcactctgtaaagatcttcctcactattacttatgaggcacaggtgcatcaygacagcagtgtgaataggcagtgtatctcaaagagaagactggctcctctaaattgagtaattcctctcttctttttatagttcatccrtgtcagtgggccaacagatgccaatgaaaaaataaaaccttatgcttacccctcttttttgtgtaatcttgagatgatttgtaaatctgcttgagttataaatc

SEQ ID NO: 51079 - DNA, 600 bp, Chicken  19866894298537_3
agtcttttgaagaggaaagaacaatcmcctatcctagagccttagagatgcattgccttttttcttttttttttttttttgtaaaatgcattgtccatacacattccaaaaccagctctttatccctcttagaatgtatagtcccaacacagagattgtttttcaccaaagagtgaagaaacagttgaagatrctgcctttgccatttttgactgtttgcagtagtttcaaggactcttcagtagacatcactctgtaaagatcttcctcactattacttatgaggcacaggtgcatcaygacagcagtgtgaataggcagtgtatctcaaagagaagactggctcctctaaattgagtaattcctctcttctttttatagttcatccrtgtcagtgggccaacagatgccaatgaaaaaataaaaccttatgcttacccctcttttttgtgtaatcttgagatgatttgtaaatctgcttgagttataaatctgcaattactaactaaaattcakacttcgagctgtcagccaagactgtcatgttcaagcttgtgacccattacttaacttgttaaaagggacaacagctcagattat

SEQ ID NO: 51080 - DNA, 600 bp, Chicken  19866894298537_4
attgtccatacacattccaaaaccagctctttatccctcttagaatgtatagtcccaacacagagattgtttttcaccaaagagtgaagaaacagttgaagatrctgcctttgccatttttgactgtttgcagtagtttcaaggactcttcagtagacatcactctgtaaagatcttcctcactattacttatgaggcacaggtgcatcaygacagcagtgtgaataggcagtgtatctcaaagagaagactggctcctctaaattgagtaattcctctcttctttttatagttcatccrtgtcagtgggccaacagatgccaatgaaaaaataaaaccttatgcttacccctcttttttgtgtaatcttgagatgatttgtaaatctgcttgagttataaatctgcaattactaactaaaattcakacttcgagctgtcagccaagactgtcatgttcaagcttgtgacccattacttaacttgttaaaagggacaacagctcagattatccttttaaaacagggtgccaccagtctgtgatggtaagcttgtatgtgatatatactgctctacatctggagctgtgtgaagaggaaca

SEQ ID NO: 51081 - DNA, 600 bp, Chicken  19866894298537_5
ttgcagtagtttcaaggactcttcagtagacatcactctgtaaagatcttcctcactattacttatgaggcacaggtgcatcaygacagcagtgtgaataggcagtgtatctcaaagagaagactggctcctctaaattgagtaattcctctcttctttttatagttcatccrtgtcagtgggccaacagatgccaatgaaaaaataaaaccttatgcttacccctcttttttgtgtaatcttgagatgatttgtaaatctgcttgagttataaatctgcaattactaactaaaattcakacttcgagctgtcagccaagactgtcatgttcaagcttgtgacccattacttaacttgttaaaagggacaacagctcagattatccttttaaaacagggtgccaccagtctgtgatggtaagcttgtatgtgatatatactgctctacatctggagctgtgtgaagaggaacaatttcttctctttctttctgtgatggtggtgggaagatgttgcaatctttgtagaatttcttagagttaagtttttagtttatttatttttctgtaatgtttttactgctttttgttttaaacctaa

SEQ ID NO: 51082 - DNA, 600 bp, Chicken  19866894298538_1
tgcctgtggagatgctggagcagcctccttcccttgctcacatggtcagagccttgtacaagcatttagagctgagttggaaccatagcagatacatgacctgttttctggactgacagagggttttctacccagctccaggtgtggctgtgagatggcaaaagactgggacagccccacacagccacttaactgcattaaagcaagcaggactgagtttcctggctaccagctgtgcctctgctcaggtctccgtccttgtggctgcctacaggcttgctcttgccctgaatggcacamagaactcatcctagccctgcacrcatagtgctgtcctgagcacgtgccagccctgcttcagcctcccatctccstctgytcccagtggacgcagtgctcttgccagcccgtggctgcatcctctgatgctgtgcagctgttcctrttggcagcatggcaccagcacaaccaggtgcctggcacagtgagatacagcrggagcatctggctcagtacagcagctcttccctgcaccgccgggccccatgcaacactcagtgtgccacacgctgctcataaccctgtggagtgcctgcacct

SEQ ID NO: 51083 - DNA, 600 bp, Chicken  19866894298538_2
cctccttcccttgctcacatggtcagagccttgtacaagcatttagagctgagttggaaccatagcagatacatgacctgttttctggactgacagagggttttctacccagctccaggtgtggctgtgagatggcaaaagactgggacagccccacacagccacttaactgcattaaagcaagcaggactgagtttcctggctaccagctgtgcctctgctcaggtctccgtccttgtggctgcctacaggcttgctcttgccctgaatggcacamagaactcatcctagccctgcacrcatagtgctgtcctgagcacgtgccagccctgcttcagcctcccatctccstctgytcccagtggacgcagtgctcttgccagcccgtggctgcatcctctgatgctgtgcagctgttcctrttggcagcatggcaccagcacaaccaggtgcctggcacagtgagatacagcrggagcatctggctcagtacagcagctcttccctgcaccgccgggccccatgcaacactcagtgtgccacacgctgctcataaccctgtggagtgcctgcacctctctgagcagcaggagcaggcag

SEQ ID NO: 51084 - DNA, 600 bp, Chicken  19866894298538_3
agttggaaccatagcagatacatgacctgttttctggactgacagagggttttctacccagctccaggtgtggctgtgagatggcaaaagactgggacagccccacacagccacttaactgcattaaagcaagcaggactgagtttcctggctaccagctgtgcctctgctcaggtctccgtccttgtggctgcctacaggcttgctcttgccctgaatggcacamagaactcatcctagccctgcacrcatagtgctgtcctgagcacgtgccagccctgcttcagcctcccatctccstctgytcccagtggacgcagtgctcttgccagcccgtggctgcatcctctgatgctgtgcagctgttcctrttggcagcatggcaccagcacaaccaggtgcctggcacagtgagatacagcrggagcatctggctcagtacagcagctcttccctgcaccgccgggccccatgcaacactcagtgtgccacacgctgctcataaccctgtggagtgcctgcacctctctgagcagcaggagcaggcagaccgatggacagacctgctggttctcttgtgcatgggatggtagacacaac

SEQ ID NO: 51085 - DNA, 600 bp, Chicken  19866894298538_4
gaaccatagcagatacatgacctgttttctggactgacagagggttttctacccagctccaggtgtggctgtgagatggcaaaagactgggacagccccacacagccacttaactgcattaaagcaagcaggactgagtttcctggctaccagctgtgcctctgctcaggtctccgtccttgtggctgcctacaggcttgctcttgccctgaatggcacamagaactcatcctagccctgcacrcatagtgctgtcctgagcacgtgccagccctgcttcagcctcccatctccstctgytcccagtggacgcagtgctcttgccagcccgtggctgcatcctctgatgctgtgcagctgttcctrttggcagcatggcaccagcacaaccaggtgcctggcacagtgagatacagcrggagcatctggctcagtacagcagctcttccctgcaccgccgggccccatgcaacactcagtgtgccacacgctgctcataaccctgtggagtgcctgcacctctctgagcagcaggagcaggcagaccgatggacagacctgctggttctcttgtgcatgggatggtagacacaacagagg

SEQ ID NO: 51086 - DNA, 600 bp, Chicken  19866894298538_5
ggctgtgagatggcaaaagactgggacagccccacacagccacttaactgcattaaagcaagcaggactgagtttcctggctaccagctgtgcctctgctcaggtctccgtccttgtggctgcctacaggcttgctcttgccctgaatggcacamagaactcatcctagccctgcacrcatagtgctgtcctgagcacgtgccagccctgcttcagcctcccatctccstctgytcccagtggacgcagtgctcttgccagcccgtggctgcatcctctgatgctgtgcagctgttcctrttggcagcatggcaccagcacaaccaggtgcctggcacagtgagatacagcrggagcatctggctcagtacagcagctcttccctgcaccgccgggccccatgcaacactcagtgtgccacacgctgctcataaccctgtggagtgcctgcacctctctgagcagcaggagcaggcagaccgatggacagacctgctggttctcttgtgcatgggatggtagacacaacagaggttcagccccagggattgatacttgaaacaaatcactccagagcaaagagaagtggtgcgtgccagc

SEQ ID NO: 51087 - DNA, 600 bp, Chicken  19866894298538_6
ttaaagcaagcaggactgagtttcctggctaccagctgtgcctctgctcaggtctccgtccttgtggctgcctacaggcttgctcttgccctgaatggcacamagaactcatcctagccctgcacrcatagtgctgtcctgagcacgtgccagccctgcttcagcctcccatctccstctgytcccagtggacgcagtgctcttgccagcccgtggctgcatcctctgatgctgtgcagctgttcctrttggcagcatggcaccagcacaaccaggtgcctggcacagtgagatacagcrggagcatctggctcagtacagcagctcttccctgcaccgccgggccccatgcaacactcagtgtgccacacgctgctcataaccctgtggagtgcctgcacctctctgagcagcaggagcaggcagaccgatggacagacctgctggttctcttgtgcatgggatggtagacacaacagaggttcagccccagggattgatacttgaaacaaatcactccagagcaaagagaagtggtgcgtgccagctgggtgtgatgagaactggagtcctcattgccagcaacagcattgctcctcc

SEQ ID NO: 51088 - DNA, 599 bp, Chicken  19866894298545_1
  misc_feature (1)..(5): n is any nucleotide
nnnnntgtgggatgtgagggtgggcaggacatctgtactcggtcttgggtttgcatctgctgctaatggtatccgaaacataaaatgcccagaggttgtgagcctgggtgtagcagtggcaatttgcagagtgagtacaggatgtgttagagcagtgcttttgtgtggctgtaggcctgtcctatgctattgtaggcttgattgcaggcagaacggggaattgatacatctcaagtgctgcattctgtatttgacatctaatgtggtgttgtgagctgtcttgtgtgcgtgtgggtattygctctcacaaaaggttcctgcctgtttgctttcttgctaatgagatatcctcagtcatttctttgttacgccagctctcattttgagctctttgacacgagcaaccgtttttctgtgaaaggctgagatcgtatggcaggattataaatttactcctgaaaagtcccattaataaatgatagagtgtttataaatatgcaaaatagattattagtcaattctacgaagtcttggctatgggagcataaaagtgtgccctgcagcttgtgtatctattataaagaagaggaagaaactat

SEQ ID NO: 51089 - DNA, 600 bp, Chicken  19866894298545_2
acgagcaaccgtttttctgtgaaaggctgagatcgtatggcaggattataaatttactcctgaaaagtcccattaataaatgatagagtgtttataaatatgcaaaatagattattagtcaattctacgaagtcttggctatgggagcataaaagtgtgccctgcagcttgtgtatctattataaagaagaggaagaaactataaagaaatccaggctccctttctaacttcggagctgcgagtgctgaataatttacttctgatagcgattatgttaaaagcaaatcatttgtttcctygaacagctgcaaacaatgtgctgtaaatatgtgattttaaaactgttgcgcgtacgcagagggacaaaggaaagttgttcattggaacagctcattaaatagcagctcttgagcacrgggctcccccagtccgtgggcaccctgagaggtaccattgcttccttttaagcttagcaggctttgggaatgctaatcctgcttaaatagacctgacttcaacaacaggagctcagatcggaggcttgagtggagtcctgtttagtttggttgctgttaaggcaaaggatgagccatgtctgc

SEQ ID NO: 51090 - DNA, 600 bp, Chicken  19866894298545_3
gtcaattctacgaagtcttggctatgggagcataaaagtgtgccctgcagcttgtgtatctattataaagaagaggaagaaactataaagaaatccaggctccctttctaacttcggagctgcgagtgctgaataatttacttctgatagcgattatgttaaaagcaaatcatttgtttcctygaacagctgcaaacaatgtgctgtaaatatgtgattttaaaactgttgcgcgtacgcagagggacaaaggaaagttgttcattggaacagctcattaaatagcagctcttgagcacrgggctcccccagtccgtgggcaccctgagaggtaccattgcttccttttaagcttagcaggctttgggaatgctaatcctgcttaaatagacctgacttcaacaacaggagctcagatcggaggcttgagtggagtcctgtttagtttggttgctgttaaggcaaaggatgagccatgtctgctgttctgtggaggtccatccttggcagctggtggttgcagccatggtttgactattgctccaacagaacctgctgcatctctcctttgctgtgaatttatgtgtgagggcattgcta

SEQ ID NO: 51091 - DNA, 600 bp, Chicken  19866894298548_1
gtgtggaaatgatgcgggcaaggagactgacttataaaatgttgtggatgttgtggctattctctctcccgatataaaagatgcagttgaaatcttatgaattaatgccatcattttttcttaatgtgtaaataaactcagggttatacctcagtgtgggtttaactgaggtcattgacacaaccttcttgttttaatgagaagagtaaaatggccagaagctaatagaaaacttaagatctgaaatttagtggctgttttacattcagatggcaggcaatcaactttcaactgctgtcytgggcattagtgagctcttcctttccagcagactgaagctcctggatagcaatctgttggaagtgtgaaagctcagcactatggtgaagaccagcaccaaactgaaggaaaaggccttataacagtactcaagcagattttcygattttctgatatgcttattggttcctaaatgaaccccrttcatgtgtcactgtccttttttctagcacttggcttcaactcttgtgccagcatcactcctatgctgtgcagccttctgaggtattgctggtgatctcagaagtaawgcagactttc

SEQ ID NO: 51092 - DNA, 600 bp, Chicken  19866894298548_2
ttatacctcagtgtgggtttaactgaggtcattgacacaaccttcttgttttaatgagaagagtaaaatggccagaagctaatagaaaacttaagatctgaaatttagtggctgttttacattcagatggcaggcaatcaactttcaactgctgtcytgggcattagtgagctcttcctttccagcagactgaagctcctggatagcaatctgttggaagtgtgaaagctcagcactatggtgaagaccagcaccaaactgaaggaaaaggccttataacagtactcaagcagattttcygattttctgatatgcttattggttcctaaatgaaccccrttcatgtgtcactgtccttttttctagcacttggcttcaactcttgtgccagcatcactcctatgctgtgcagccttctgaggtattgctggtgatctcagaagtaawgcagactttctgtctgtgcacagaagcatcaatcctttaggactggtgctcaggggacacgcaggcaatgccttccctgcagtatcttggctcacttctccaatggttccctgggagccactttcactccaaagctgtctctgatgggccact

SEQ ID NO: 51093 - DNA, 600 bp, Chicken  19866894298548_3
accttcttgttttaatgagaagagtaaaatggccagaagctaatagaaaacttaagatctgaaatttagtggctgttttacattcagatggcaggcaatcaactttcaactgctgtcytgggcattagtgagctcttcctttccagcagactgaagctcctggatagcaatctgttggaagtgtgaaagctcagcactatggtgaagaccagcaccaaactgaaggaaaaggccttataacagtactcaagcagattttcygattttctgatatgcttattggttcctaaatgaaccccrttcatgtgtcactgtccttttttctagcacttggcttcaactcttgtgccagcatcactcctatgctgtgcagccttctgaggtattgctggtgatctcagaagtaawgcagactttctgtctgtgcacagaagcatcaatcctttaggactggtgctcaggggacacgcaggcaatgccttccctgcagtatcttggctcacttctccaatggttccctgggagccactttcactccaaagctgtctctgatgggccactaaaccaagcaaacttctgctacttgaaaaactcctacaa

SEQ ID NO: 51094 - DNA, 600 bp, Chicken  19866894298548_4
actgctgtcytgggcattagtgagctcttcctttccagcagactgaagctcctggatagcaatctgttggaagtgtgaaagctcagcactatggtgaagaccagcaccaaactgaaggaaaaggccttataacagtactcaagcagattttcygattttctgatatgcttattggttcctaaatgaaccccrttcatgtgtcactgtccttttttctagcacttggcttcaactcttgtgccagcatcactcctatgctgtgcagccttctgaggtattgctggtgatctcagaagtaawgcagactttctgtctgtgcacagaagcatcaatcctttaggactggtgctcaggggacacgcaggcaatgccttccctgcagtatcttggctcacttctccaatggttccctgggagccactttcactccaaagctgtctctgatgggccactaaaccaagcaaacttctgctacttgaaaaactcctacaacaagcccaacagtcttttctggaataaaagctttcattaaaacaataacaacaaatccatgtgtatagcagcactgagtgtctgatcacatgcaaggggagttagaac

SEQ ID NO: 51095 - DNA, 600 bp, Chicken  19866894298549_1
acacgggctatgaaataatggaaaagcaagaatataggcatatctgcttttcttgttttatactgaagactgattgaagatacaggcgttttcacgccaccttttgttaccataatttagctttgttttagaagtccttttctaattgcaaccaaatttctttctgaaagtctcaaaaatagatatttttttccactgctttcttttctgtggagttagaaacttcggtgtgatcttaactctgaaatataaacacatcttcaggcatctgtgatgatggaaacagcacaactgtgtgaygtcttatgctttaaagcaactcattttattctcgttgtagatttaagctctttaagagaaacgagatttttctccattgtgatcataaattgtatcatcatttcgtgtaaatcagaatgaaacgtttaaaatgtttttattaatatctggaatatagagagaaaacagactgtgtatatgtatatacataggtatatatatgcacataaatatttttttattgtgccaaggcgagtttttacgttttgatatgaaaatagaaggataaggtggaggttgcacctcctgtctttgtatgat

SEQ ID NO: 51096 - DNA, 600 bp, Chicken  19866894298550_1
cttcctgccatgatgctattaaccatttcctatggtggccttataatttcccaaatttctcctcccacctcaaagactgggaaagcagatggaccttacaggatgaccgggggagggggtcgtgaaatccagactgttagagctgaagtggggaagtgcattccagaagagacaacccttccaccaacagtgtccatagctcaggctgctttccagcctgagccgctgtgctgacactgcgctcttcaaatgattgcaagtgacatggcctggggcacggagacaacagatggctgatayttaggctattatggctcagtgttttccacttgagctggaactcaactgctaactaatggcagtcgcggagacctcttgcagcacgtcttcaacagggcacgcaggaagcaaaatccattcaagaatatcaggtttttgtctaacatttgaamgaggagaaagtgtgaagaaagccagcaaaagcatgaatcaccagagaggtctgtattcaaatgtgaagcctgcagttttctcatcagtcataaatggaaggccactcagcaaatcccactcagcccagaacctgggggacaaaccgcc

SEQ ID NO: 51097 - DNA, 600 bp, Chicken  19866894298550_2
gaagtgcattccagaagagacaacccttccaccaacagtgtccatagctcaggctgctttccagcctgagccgctgtgctgacactgcgctcttcaaatgattgcaagtgacatggcctggggcacggagacaacagatggctgatayttaggctattatggctcagtgttttccacttgagctggaactcaactgctaactaatggcagtcgcggagacctcttgcagcacgtcttcaacagggcacgcaggaagcaaaatccattcaagaatatcaggtttttgtctaacatttgaamgaggagaaagtgtgaagaaagccagcaaaagcatgaatcaccagagaggtctgtattcaaatgtgaagcctgcagttttctcatcagtcataaatggaaggccactcagcaaatcccactcagcccagaacctgggggacaaaccgccccacccccccatcatttttgcctctcattctgtcttgtcctgatgaactttctgtcccatcaaaactctaaatgtgcaagagagctaacagtgatatggatcccccatggaaatccctggggtcagagaatctttgtttggcattgttctgc

SEQ ID NO: 51098 - DNA, 600 bp, Chicken  19866894298563_1
gatgatttgtttctcgtgtttttcctgagcagtgtgctgacaatttggagtgtatttcgagcttacctcaagaatgctctccagctggaactgctttatagctcctcttaaactagccactccaatcaccacactttgtagacatccacacgtagggcagtactgcactgtttaagtgcatccaaagattcaaagtgaatttgcgctgcggagctaaaactcaaattctgctgtagacagcaacaaaatcagtgaaaggagccagacatctggagcaatgctcgcctacattctgctctrtaagggcccaactacaataaaaaagcaactctcaggcagtgatacaacacatgaaataccgaccattctaagaatctatcggagacctaattaggataggctgtacaagcacataagcctttggctgcagaaataaaaagttttctggctacttcacagcttcatttttaacttgatacttcataaatgaactgcagaaaacctcacatgttaccatttcaatctgacgtacgctttcakacgcatctaacagtgcctggattctatttatatgtacaactgaatatacgtgcatagaaa

SEQ ID NO: 51099 - DNA, 600 bp, Chicken  19866894298563_2
caacaaaatcagtgaaaggagccagacatctggagcaatgctcgcctacattctgctctrtaagggcccaactacaataaaaaagcaactctcaggcagtgatacaacacatgaaataccgaccattctaagaatctatcggagacctaattaggataggctgtacaagcacataagcctttggctgcagaaataaaaagttttctggctacttcacagcttcatttttaacttgatacttcataaatgaactgcagaaaacctcacatgttaccatttcaatctgacgtacgctttcakacgcatctaacagtgcctggattctatttatatgtacaactgaatatacgtgcatagaaaaatcatcggatttgttacagaaagacagcagatgttcttattaagccactggcacatgcaaggtgaagcatggaagccttataaggaaaacgtttaacgttctagctacaagataaagaaaagcaaagctaacaaattaaattacttctcccgtgctttactagccatgagcgcaaggctcagcaaaataaaagcactgctgagcaagcctgaatgactcctgcaacacacacagcctcg

SEQ ID NO: 51100 - DNA, 600 bp, Chicken  19866894298565_1
atccctggaaatgttcaaggctaggttgatgtaggcagcttgttctactccttgatgtagtagttggcaaccctgcctgcagcagaggaattggaactagataatcttcaatgtcccttccaacccataatttctatgatttgagggtaaaaatgtgtagcgtgttcagcggtgatccgtagattatatgaaagatctttggtgtgacatattaaatagcatcagtccggaactgtgaacaacacaagatgtaagcatacctgccacttaattactttaaatttaaattctcttgctaakggaagcattttaacaaagggagttcctgtttgtatgaggatagagtagagacatgggaaaggagaataaggaagactgaggatacgaatagtggcatttcctagaaaaagaagagagaagacaatattataaaaatgcagaagtcatgaaatgatgaaggagatgatgatcatgggagctggacagaagagaggaacttttcatgttgaaggaaaatccagtataacacgatgagtatgtaaggagaaaggaaactgattgaacaataagcttaactttcagcaataacagttaaatgcc

SEQ ID NO: 51101 - DNA, 600 bp, Chicken  19866894298574_1
ctactgatgtccattactgtattagcccttccgtttaataatgcacaggtggaaggcaaactactttgagctgaacaataagaccaaatgttgacagggcagccttgctggatttcctgcatgcagcagtatgtattagggggtgttcatgggagatggtgtaaatgctgtactggaaatacagtgaaacatggaatggattaggttggaagggacctcaaagatcacctagttccaagccctttgctgtgagcagggttgcccaccactagatcaagcatcagatcaggctgcccaggrccccatccagcccggccttaacaccatcagggatggggtaaaagttaatgaaaagtagcactccaaagaccagattctgaaacattttactgagcatcttactgaaggtcttactgaagcaatttggcaagtgttcatagtttggctttaaagagagatttgtggcatagcttaggttggaaggagccactgaaggtctctagtcctgctcaaagcaggttactgtgggctctaaagaggttgttgagggatttttctccttagatcttgaaaatgttcaaggatgatgagtgcacatcc

SEQ ID NO: 51102 - DNA, 599 bp, Chicken  19866894298586_1
  misc_feature (1)..(101): n is any nucleotide
nnnnnnnnnnnnnnnnnnnnnnnnnnnnnnnnnnnnnnnnnnnnnnnnnnnnnnnnnnnnnnnnnnnnnnnnnnnnnnnnnnnnnnnnnnnnnnnnnnnnnataaataatacaatagccacatccaaagcctcattcccttctaaccaagcaaggtgaaggattactcctatgactccagctcagctgtttagtttctaagatcgcagcattgtcatttcatggtaacctagtcagagaatttttgcagactccttcctttcagttttacctgcatggctccgagcttcccagaaatctrcagaagggaaagakataatagagttttattattccattaggcagttgcagacttgtgaaactaacgtactgaaaaagttacccccaaacaatccttgtcacctctggttctctatcagttttggctttgctcctcttaactcatcaattcttctgcttgttatcatttttaatgacttacccagctcagctttcagtttacctgcaagggaaagatatatcaatcaataacgcctctttwtatattttcattacagttttacaaagcagaacaactctcaggcatggaataggagagaa

SEQ ID NO: 51103 - DNA, 599 bp, Chicken  19866894298586_2
  misc_feature (1)..(87): n is any nucleotide
nnnnnnnnnnnnnnnnnnnnnnnnnnnnnnnnnnnnnnnnnnnnnnnnnnnnnnnnnnnnnnnnnnnnnnnnnnnnnnnnnnnnnnnataaataatacaatagccacatccaaagcctcattcccttctaaccaagcaaggtgaaggattactcctatgactccagctcagctgtttagtttctaagatcgcagcattgtcatttcatggtaacctagtcagagaatttttgcagactccttcctttcagttttacctgcatggctccgagcttcccagaaatctrcagaagggaaagakataatagagttttattattccattaggcagttgcagacttgtgaaactaacgtactgaaaaagttacccccaaacaatccttgtcacctctggttctctatcagttttggctttgctcctcttaactcatcaattcttctgcttgttatcatttttaatgacttacccagctcagctttcagtttacctgcaagggaaagatatatcaatcaataacgcctctttwtatattttcattacagttttacaaagcagaacaactctcaggcatggaataggagagaattctggaagctgta

SEQ ID NO: 51104 - DNA, 600 bp, Chicken  19866894298586_3
tttttgcagactccttcctttcagttttacctgcatggctccgagcttcccagaaatctrcagaagggaaagakataatagagttttattattccattaggcagttgcagacttgtgaaactaacgtactgaaaaagttacccccaaacaatccttgtcacctctggttctctatcagttttggctttgctcctcttaactcatcaattcttctgcttgttatcatttttaatgacttacccagctcagctttcagtttacctgcaagggaaagatatatcaatcaataacgcctctttwtatattttcattacagttttacaaagcagaacaactctcaggcatggaataggagagaattctggaagctgtagtgaggaacatttttatttatgctatttaaataccagcatcagtgctccaaggggagggacacaaagcttgtcctccagattccatcaactctgcatttatacagtgtacttcagatatgtcttgaaaaatcctttagtaaagcagctgagggacagctgaagggcaacttagatgggatcattcaaggaaaattctagctttatttctggactacattgtgctctc

SEQ ID NO: 51105 - DNA, 561 bp, Chicken  19866894298587_1
tagttaagggctgcaaatgttttgccccaggaaaaactctccttgtcctaagacacaagaagaggtttgaagctccaggattaaaacagagatcactagtgctggtactaagcagaaaagcaaatcctacctgtttaggaaatggaagacaatttgagatgggggagtaaaccaccacaagtgaaactgtaccttcttgcatgagttaaattcattttagccatctgctctaataaaagcatgcaatatttgaaatataatcctttgacacttccccttgctcctcaaatgaggcaaaarctattactgaagaaaggcattgtgccattstccttgagaagactaagtgtgaaatgccttgcagcagctataagtttcttaggttaaatrttacattacagtaacaaaacatttagaaagttcgaaagcaattacatgttactttatgagaaaaaacaggctaaagaaaagaaagcattgctgattggtaataactttatgcttgagagaagaactaagctgagctttgtaagcaagtctcagtttaaccaagatgggaat

SEQ ID NO: 51106 - DNA, 531 bp, Chicken  19866894298587_2
gaaaaactctccttgtcctaagacacaagaagaggtttgaagctccaggattaaaacagagatcactagtgctggtactaagcagaaaagcaaatcctacctgtttaggaaatggaagacaatttgagatgggggagtaaaccaccacaagtgaaactgtaccttcttgcatgagttaaattcattttagccatctgctctaataaaagcatgcaatatttgaaatataatcctttgacacttccccttgctcctcaaatgaggcaaaarctattactgaagaaaggcattgtgccattstccttgagaagactaagtgtgaaatgccttgcagcagctataagtttcttaggttaaatrttacattacagtaacaaaacatttagaaagttcgaaagcaattacatgttactttatgagaaaaaacaggctaaagaaaagaaagcattgctgattggtaataactttatgcttgagagaagaactaagctgagctttgtaagcaagtctcagtttaaccaagatgggaat

SEQ ID NO: 51107 - DNA, 471 bp, Chicken  19866894298587_3
gatcactagtgctggtactaagcagaaaagcaaatcctacctgtttaggaaatggaagacaatttgagatgggggagtaaaccaccacaagtgaaactgtaccttcttgcatgagttaaattcattttagccatctgctctaataaaagcatgcaatatttgaaatataatcctttgacacttccccttgctcctcaaatgaggcaaaarctattactgaagaaaggcattgtgccattstccttgagaagactaagtgtgaaatgccttgcagcagctataagtttcttaggttaaatrttacattacagtaacaaaacatttagaaagttcgaaagcaattacatgttactttatgagaaaaaacaggctaaagaaaagaaagcattgctgattggtaataactttatgcttgagagaagaactaagctgagctttgtaagcaagtctcagtttaaccaagatgggaat

SEQ ID NO: 51108 - DNA, 600 bp, Chicken  19866894298588_1
cgctgaagtgtttatctgtcatgttgttagtatgacaacagtaatagttaattcactaagttgttagttgtatagcagaccatgtttgactttttcagaatgatattgatgataaggaatctgctgtgaagatgaagatgtttggcaaactcacaagagacaagtttgaatggcaccctgaaaagctgttgtgcaaaagatttaatgttcctgatccatatcccgagtaagatgattaatttagaagttcttaaattattgaacacttcttggaaattctgagttttcctattcttgtgraaaaaatctcgcttgatgttttctttttgtattgtaatagatgtattatagaatctcctaatgttttaattggcctcataaagcatagtgaaataacttctcacaaaataatgttcattttaagtactattatggtttgttgtagctaatttgtgygtagaagacagtaatcaaaaacatctttatttccctgcaggtcttccatcrttggtttaccaaaagtgaagagagacaagtattctgtatttaatttcttaactctgtcagagcctactacatctggaacacaagaaacaaatg

SEQ ID NO: 51109 - DNA, 600 bp, Chicken  19866894298588_2
gagacaagtttgaatggcaccctgaaaagctgttgtgcaaaagatttaatgttcctgatccatatcccgagtaagatgattaatttagaagttcttaaattattgaacacttcttggaaattctgagttttcctattcttgtgraaaaaatctcgcttgatgttttctttttgtattgtaatagatgtattatagaatctcctaatgttttaattggcctcataaagcatagtgaaataacttctcacaaaataatgttcattttaagtactattatggtttgttgtagctaatttgtgygtagaagacagtaatcaaaaacatctttatttccctgcaggtcttccatcrttggtttaccaaaagtgaagagagacaagtattctgtatttaatttcttaactctgtcagagcctactacatctggaacacaagaaacaaatgaaagaaaacaagagggtaacagtgtgagcagtaagtcaggtggttttttaatcacgtagctatgaagtaatggtatatagaaaatggttgtctttgttatggggaatgaatccatcaccagccatccggtggtgtcttttttttcatgaaagaaaa

SEQ ID NO: 51110 - DNA, 600 bp, Chicken  19866894298588_3
ttcctgatccatatcccgagtaagatgattaatttagaagttcttaaattattgaacacttcttggaaattctgagttttcctattcttgtgraaaaaatctcgcttgatgttttctttttgtattgtaatagatgtattatagaatctcctaatgttttaattggcctcataaagcatagtgaaataacttctcacaaaataatgttcattttaagtactattatggtttgttgtagctaatttgtgygtagaagacagtaatcaaaaacatctttatttccctgcaggtcttccatcrttggtttaccaaaagtgaagagagacaagtattctgtatttaatttcttaactctgtcagagcctactacatctggaacacaagaaacaaatgaaagaaaacaagagggtaacagtgtgagcagtaagtcaggtggttttttaatcacgtagctatgaagtaatggtatatagaaaatggttgtctttgttatggggaatgaatccatcaccagccatccggtggtgtcttttttttcatgaaagaaaaacaggtataaaaattgaaaataatgaatacattccatacattcaattcaga

SEQ ID NO: 51111 - DNA, 600 bp, Chicken  19866894298590_1
tcagagtcagaacctggatgtcagaagctcagaaatcaccgatgggaaacgacaagaagacgatgtggggtttttggaaagcaccattgctgtcagcatccttgtggaaagagcaatgcatctcagtttaaaaggtaaacccccaacaaggtcctttttttttattgttgctgtatttatttgttttaatgcttgttttcctgagtgtatgtttgttgtgtttgtttcctggggtctgcttataacagctcctgtgaggagcaatttacaaacagaaaaacagcatctttttctcagacytattctaacacagtgagtgaatgcaatgggttttgaactttgcttgcagtgttgtagccctgagaycgttacatcacagtgtaagtagagggggggcaggaatttaagctattcagcctacctctattaataaaagccaaaatgtaaataacgttcacagttacagatgacagctgaattctgaagttaagctttatctgaataacataaccctcagatattcatatctcaaagactcctatgaatttgcatttttagcgtgtaatcaatttgtaaagctggcttacttgtgctatctgc

SEQ ID NO: 51112 - DNA, 600 bp, Chicken  19866894298590_2
ggggtttttggaaagcaccattgctgtcagcatccttgtggaaagagcaatgcatctcagtttaaaaggtaaacccccaacaaggtcctttttttttattgttgctgtatttatttgttttaatgcttgttttcctgagtgtatgtttgttgtgtttgtttcctggggtctgcttataacagctcctgtgaggagcaatttacaaacagaaaaacagcatctttttctcagacytattctaacacagtgagtgaatgcaatgggttttgaactttgcttgcagtgttgtagccctgagaycgttacatcacagtgtaagtagagggggggcaggaatttaagctattcagcctacctctattaataaaagccaaaatgtaaataacgttcacagttacagatgacagctgaattctgaagttaagctttatctgaataacataaccctcagatattcatatctcaaagactcctatgaatttgcatttttagcgtgtaatcaatttgtaaagctggcttacttgtgctatctgcaggctgccaggcacagcagtgaggaagggcagcgtaagggcagagcaggctgcactcaccaaggct

SEQ ID NO: 51113 - DNA, 600 bp, Chicken  19866894298593_1
acaccagtctgtctactttgctgctgggggacagcccagcacacccagctaatgctcccttgggagcacagaattgatgctcattattccctagcattctgacaaatgtaatttctgtgcctttatcagtgcattttcagggattagtggcttagaatttcctctggttcctgtgtctccttttgccagataaagatttgttcctcagaatcatgtggagacatttagtagatagatctggtatcagtaagagatttttgctgccagcacaagtattactttcctaaatgccccttcttyrtggcattttaaagcaagtccttacagagggagaaaagttttttttttaaaaaagggtaatacattaacagattggaagtgaatgtgagatatcaatgagaatattttgaagaaaatgatggtatgatctacttttggactaagtaaatgcacttggattactgtaattatcttaaataccaaggcattcatgctgattaggtcattatttcaaaaagttgcccaggaactctaaaagtctaccacaccttcctgccattctgttgattttaggtagtatctgttaagattttttttaca

SEQ ID NO: 51114 - DNA, 600 bp, Chicken  19866894298593_2
caccagtctgtctactttgctgctgggggacagcccagcacacccagctaatgctcccttgggagcacagaattgatgctcattattccctagcattctgacaaatgtaatttctgtgcctttatcagtgcattttcagggattagtggcttagaatttcctctggttcctgtgtctccttttgccagataaagatttgttcctcagaatcatgtggagacatttagtagatagatctggtatcagtaagagatttttgctgccagcacaagtattactttcctaaatgccccttcttyrtggcattttaaagcaagtccttacagagggagaaaagttttttttttaaaaaagggtaatacattaacagattggaagtgaatgtgagatatcaatgagaatattttgaagaaaatgatggtatgatctacttttggactaagtaaatgcacttggattactgtaattatcttaaataccaaggcattcatgctgattaggtcattatttcaaaaagttgcccaggaactctaaaagtctaccacaccttcctgccattctgttgattttaggtagtatctgttaagattttttttacaa

SEQ ID NO: 51115 - DNA, 527 bp, Chicken  19866894298596_1
gctataagtctctgccttgtccatcagaaacataacagtgctgtctgtggagacattaactgatacccaagagagcattcatttaacaagagtctgtaattttgatgtttctgttatgtcaaactcctctggtgaagtatatggagaggtggcagcctcctgtccatctccagcagctaggatgtctcctggaataaaggtacacactgtgccacaggtcctcgctttcctgcccatcaccgtagagggctcacttcccttgtcctacctgcttgttgtgctgaaaattgtcagaggatstgagtatggagaactgagaagtgattggatggccacaacaagcaggcacatcacagtggttccccctgcgagaggctcaccttgcctgaggttcaccagtcacgccattttactgtcatcaagagacaagtcccagtgctgcaacatgtctatctctggtgcaaggagagatttcaagctcatctttatggtgtagtaaaacagccacagagtttagaaaaagatca

SEQ ID NO: 51116 - DNA, 600 bp, Chicken  19866894298599_1
tgtcgatgaccataatatatagattcattactgggcaaagatgaagtcttcttgaagatatgtcttctgtattgagcaaaggatgcctcgtttactgtcatagttctggggcttcaactaatagtcatattccccttagggcatatacattttcttcttttcgtatcacacattaagtacatggagttagcaataaaagaaatactgagagtacctttcccacttctgaaagtagcagagttggaaagagatggtaaagactcagtaatgctaaggagcagaagtatttgcagaagtcartctgagcatcttgttctgacataaacactaaaaagtggtgtggaaactggtgtgaaggttgccaacactgggttcttccagagcttataatcctataatttttttttttaactaacaagggaaatttggattaagtaccacatgaattcactatttttttccaatctgcattagtagtcagcattcaaaatccccattaaaatgttatttattattcccagagctcatataagctgtatttcagttgctactgaactaacacacacttttttttttttaagtcattgcaaagatttctta

SEQ ID NO: 51117 - DNA, 600 bp, Chicken  19866894298612_1
tcatatgcgtgttttcaaatgggattcttttgtccttaactcagcataacgagaccacagtcagtaaaactgtatctgaggaaacttcaacaacacttctgcatttgtccatacattatatgatgagggagaaaaagtaaatgagacccaaacttcccactagctttatttatttgtttatttatttcaattttgagtctgcagaatttttccagcagttggaaatagaagtgagatctgattaaaattcagttgttgaaaacaaagaaactgaaattcctgtgtagcacacactctgcratatgagaagatgtcaaattttgaaactaaattggacttgcaatttgtgtgctgctgcccattcagatcattgcagaatattgggcattgagtcttgagcaatttctcaccaagtttaaaataggaactgctggaaacttcaaggaggaacagcaaaatacactacagcaaaaagtatttattaaaatatgcaattattataattaataatactccgattaacaagactcaattctttgccaaagcttgaggcgtttttcgggtcattagatgaaatcacaataattatcaaagaaaata
